United States Patent Application Publication US 2005/0228172 A9 - sequence listing, part 145

SEQ ID NO: 678071 - DNA, 880 bp, Homo sapiens
  misc_feature 2, 3, 4, 5, 6, 7, 8, 9, 10, 11, 12, 13, 14, 15, 16, 17, 18,19, 20, 21, 22, 23, 24, 25, 26, 27, 28, 29, 30, 31, 32,33, 34, 35, 36, 37, 38, 39, 40, 41, 42, 43, 44, 45, 46,47, 48, 49, 50, 51, 52, 53, 54, 55, 56, 57, 58, 59, 60,61: n = A,T,C or G
  misc_feature 62, 63, 64, 65, 66, 67, 68, 69, 70, 71, 72, 73, 74, 75, 76,77, 78, 79, 80, 81, 82, 83, 84, 85, 86, 87, 88, 89, 90,91, 92, 93, 94, 95, 96, 97, 98, 99, 100, 101: n = A,T,C or G
annnnnnnnnnnnnnnnnnnnnnnnnnnnnnnnnnnnnnnnnnnnnnnnnnnnnnnnnnnnnnnnnnnnnnnnnnnnnnnnnnnnnnnnnnnnnnnnnnnntgtattactgccatgcatttgcaacattcgattctgcaatcaytgatagaggaggaagtgtaattttagaggctggttttcaaatgtgctcagacatgggagcacacagaggccatactgcttttgaagaatgctcagtgtccttagagcactctatctgttaggcaactattgcagaaataactttacatgattttcttgaattatcacaataattctaagagaaacatgttgtattttacattttacagctgggaaaagctaggcactgattcaggagtgttgcccaagaccgaagctagggcagtgcttctcaagcattaggtggaatcagaataacctcaagagcacattaaaacacagattctgggcctcaccctcagagtatctaatttagaaagtctgggagggagcctcagaatctagcaagttcccatgtggtcctaatgttgtaggtcaggagaacaaatattggaacatctgagctaagaagtgtgttaagagagatggcacccaggtagctggaaagcagactccacactaactaccagcttacagcttgccagaggcacagccacattacacacatgacaaagatggccagccccacaggcaccctcaacaaaaccttgtcacatggagtaaaagctgctgtttcttagttttaatttgttccattctagaccttcctaggaaatgaacagtttcaggaaagaaaatttaataaataacttttaattgaaaaaaagtcatgctaattaacttctttctttgaattg

SEQ ID NO: 678072 - DNA, 653 bp, Homo sapiens
atataaacaaacatattaataactaatgttttagtatttaacttacaaatgactcagacattttatgattattacttaatttaacataacatgactttaatattttaaattactgaaaataattttgaaactatgacagaggtaccctcccaaatattttttctagtcatcttgggtttcaagtacccacaaaaggcatcatcgaggatggctgtgaaaggcaggacccacctgggttctgaattcacacaccaggtgtggagctcagaacagaagacagagctgtgaagatggcagctggtgacccaggtgctgtagacacacctcwccatggccacctgtccagatctgagaatccagaggctcaaaaacaaagacataagctcacagcaagatgtgtgcaaggcttcaggggagcccagcaggcagcccttacagcttcagcttatggaaaaaccaaacaaatataaaaaaattacagaggcaacagtttcatgatcttaagactgctaacaggggaagccaaaatctgatcaatagtcccacgcaaaaaattttaaattatttttagtactgaaaattctaaagacattttattttaccaacaatttttaaattagctgtatttaccaaagattatctcaaattatata

SEQ ID NO: 678073 - DNA, 713 bp, Homo sapiens
gctccaagaagtttctcactttcccctatgggaatgtctgtatttcctacagagatcagtcaaagctgcacagggagcctccaggaagggtctctgacatggctacagttttgcgtggggcacagttgcatacagcactcccgaaaacgtttctctttcccaattagctagctgagacattccctaactagtcatggaggccaggaagggcatcccttccacytggtggactgagtggggattggtcataggaggcaccctgcaaaattgtatctaaacccctctctggaggccaggacaaatctgaatggaccatggaactggggagagcctggatgggagccagtggtcaggaaggccttgggggctgctcagatggggccaggtatgaaggcctgagaagggtaccttgttgcatgggtctggttggcccaatgagtctccagaaagtttcttaagacccgtggttggggggaggactgcatctggctataaagtgaaggccccagggatggttttggtgccctactttccactccagtccaaagcagtgcctgtcatcagaggcaccagaaaatatgttctaagtactccctgtttgtgggcaccaggtaaggatgcccagtaaggcctgggaagggcttgtgaatccagtcacagttcttcctggccttgtcgatggcatgcaaattctttgaatgtttgcaagtccc

SEQ ID NO: 678074 - DNA, 713 bp, Homo sapiens
gctccaagaagtttctcactttcccctatgggaatgtctgtatttcctacagagatcagtcaaagctgcacagggagcctccaggaagggtctctgacatggctacagttttgcgtggggcacagttgcatacagcactcccgaaaacgtttctctttcccaattagctagctgagacattccctaactagtcatggaggccaggaagggcatcccttccacctggtggactgagtggggattggtcataggaggcaccctgcaaaattgtatctaaacccctctctggaggccaggacaaatctgaatggaccatggaactggggagagyctggatgggagccagtggtcaggaaggccttgggggctgctcagatggggccaggtatgaaggcctgagaagggtaccttgttgcatgggtctggttggcccaatgagtctccagaaagtttcttaagacccgtggttggggggaggactgcatctggctataaagtgaaggccccagggatggttttggtgccctactttccactccagtccaaagcagtgcctgtcatcagaggcaccagaaaatatgttctaagtactccctgtttgtgggcaccaggtaaggatgcccagtaaggcctgggaagggcttgtgaatccagtcacagttcttcctggccttgtcgatggcatgcaaattctttgaatgtttgcaagtccc

SEQ ID NO: 678075 - DNA, 713 bp, Homo sapiens
gctccaagaagtttctcactttcccctatgggaatgtctgtatttcctacagagatcagtcaaagctgcacagggagcctccaggaagggtctctgacatggctacagttttgcgtggggcacagttgcatacagcactcccgaaaacgtttctctttcccaattagctagctgagacattccctaactagtcatggaggccaggaagggcatcccttccacctggtggactgagtggggattggtcataggaggcaccctgcaaaattgtatctaaacccctctctggaggccaggacaaatctgaatggaccatggaactggggagagcctggatgggagccagtggtcaggaaggccttgggggctgctcagatggggccaggtatgaaggcctgagaagggtaccttgttgcatgggtctggttggcccaatgagtctccagaaagtttcttaagacccstggttggggggaggactgcatctggctataaagtgaaggccccagggatggttttggtgccctactttccactccagtccaaagcagtgcctgtcatcagaggcaccagaaaatatgttctaagtactccctgtttgtgggcaccaggtaaggatgcccagtaaggcctgggaagggcttgtgaatccagtcacagttcttcctggccttgtcgatggcatgcaaattctttgaatgtttgcaagtccc

SEQ ID NO: 678076 - DNA, 640 bp, Homo sapiens
ggagcataagtagaaacaaaaatgtagtaaatgtctcatatcattacttctgccagaaatacctctgcccttgcattttcaaaagatatttgctgcatccttttctgaaatatatttttataatctcaattcattcaaaacctaactttatttcatttatttatttatttatttatttatttatttatttatttatttgagacacagtctcattctgtcacccaggctggagtgcaatggtgcgatctctgctcactgcaacctctgcctcccaggttcaagcgattctcctgcctcagcctcctgagtagctgggattacaggcayctgccaccacacccagctaattttggtatttttagtagagacggggtttcactatgttgaccaggctggtctcgaactcctgacctcaggtgatccaccagcctcggcctcccatagtgctgggattacaggcgtgagccacctcgcctggcccaaaaacctaactgtaattatttccctagccactatactgatcattttatttagtgctttttttacaccattacatatacatataaggaaaactggcatcttttatatatttatttatttttatcctgttttcctctaaaaactgttaaggcaacttcca

SEQ ID NO: 678077 - DNA, 640 bp, Homo sapiens
ggagcataagtagaaacaaaaatgtagtaaatgtctcatatcattacttctgccagaaatacctctgcccttgcattttcaaaagatatttgctgcatccttttctgaaatatatttttataatctcaattcattcaaaacctaactttatttcatttatttatttatttatttatttatttatttatttatttatttgagacacagtctcattctgtcacccaggctggagtgcaatggtgcgatctctgctcactgcaacctctgcctcccaggttcaagcgattctcctgcctcagcctcctgagtagctgggattacaggcacctgccaccacacccagctaattttggtatttttagtagagacggggtttcactatgttgrccaggctggtctcgaactcctgacctcaggtgatccaccagcctcggcctcccatagtgctgggattacaggcgtgagccacctcgcctggcccaaaaacctaactgtaattatttccctagccactatactgatcattttatttagtgctttttttacaccattacatatacatataaggaaaactggcatcttttatatatttatttatttttatcctgttttcctctaaaaactgttaaggcaacttcca

SEQ ID NO: 678078 - DNA, 1079 bp, Homo sapiens
tgcaaaaattttctcccattctgtaggttgcctgttgactctgatggtagtttcttttgctgtgcagaagctctttagtttagttagatcccatttgtcaattttggcttttgttgccattgctttttgtgttttagacatgaagtccttgcccatgcctatgtcctgaatggtattgcctaggttttcttctagggtttttatggttttaggtctaacatgtaagtctttaatccatcttgaattaatttttgcctaaggtgtaaggaagactcttgtctcaaaaaaaaaaagaaaaaagaaaagaaaaagaaaatttgaaagtatgaattactctaaaatgtgattgtaactttatgtttatttatttgtgtatatgaaaaaatctacttcagtgagacttggtggcatgcttggtgtgtctcctggatagcaaaattatggtaaaatatggtaaaatgctaatatttgggatatgtttctttgactgtcgatattgtattgatttaatggaacctattcatgatagaaaggaaagagaaagacaagattcctatgctaacatcatccttctacttcaattcatctaataagtgtaaataacaagtaacagaattgcctcctttaatttattttgaatattattttaatgaaaatatccagtgtctaaatttcaaatgatgcttacataaaactatkaaagagaaatcaaatacataaataaatgaataaattaataactataattcaaaattaaatcatctaccaataatctagtttaatttttattaacatcattctaaaatgtgctttatatacacatagagattttataataatgataattacactataatgctatttaataaaatatttaatttaattttactcaaattaataacaaaaaacattctgaagtgaagctgaagaggatcagaaattcatactattgctttccacctcaaaagacaatttgtaaaaggccctttaatactaagaaaaaagattgatttagtttcttaattgttttaatagtaagattttaattactttgacatttattaaatattataagaaat

SEQ ID NO: 678079 - DNA, 1426 bp, Homo sapiens
gagttgaaatcatatgatatatagcccttacagattggcttcggattgagacaaggacttttgaaacatgtgtaggcattagtttttagacaaaagtctaaaccaagcttatcctgatgtcagttaataataagacctccagtcctttgactgaatgaaggcttaaagaacatccagaactctgaagaaactggcaagtgagtgcttaggcacccctgttctctgagtcccctctgtccctattcacatgccttacaggggcacttcattaatttgtggctgaaaatatatatacatggggaaaaggaaaggaaaagaaatatcttctccccccaattgaatcctgtttttatttcaatttgacatctctttcctttacttattttcatgagtgcagtagcaaagaaattaattttcctgtactacattcaagtagtaaaatatgtggaaagggagaattaatttcaaatctttaaaaatgaatttaaatcacagagattccatgaattttattttctctatatatgtaataaaagtaaatgttttctcattttaagctattaattcatataaatgctgtagagttaattttatgatgctacatttttataatctgttcccaaatactacaagactcttggagttgagcaaaaagtaaaaagatgtattgtcatattaaaatcaggtggttatgcatttacattgtaaatatctagaacatgttccttagtgtatttgtatatttataaattatatttgaattcactttctaggaaagtactgatgaaaatgatattagatgtttgcttgagtaatggcacatatgattttaaattttttgcttcttattttctagggtatcttaatgatgacaatcagattggagattaatgatgaagtttatgtgtttaaggctattatactacttgaaaaaactgtataatacacattacatttttaaaagttattatttttccttcctgtcaattaaagggaagtttttttgtgacagatgagaggacaatacatatgaacttcaaaaagaaagytgaaaaatattatatgaccaaccaacatgggaaaggatttttcaggtcgcaattgtatcatcatatggtcacatgctttgtttcctattttaatatgcactttaacttgatgtttctatgtgctaaagcgaagcaaataaatgacttgtgacataggtataaaataaaactttaactccattttcaaacacacgtacaaaaagtgaactatatttgacagccactacatgtttttcatataggaaaagtagtgttgtttataccaatttcttttgccgtataaaaactataatctgtagagaattaaaaagtggcttttttttaaagcacaatattttcccccaaggcagatgggagaatattctaaatgaattatt

SEQ ID NO: 678080 - DNA, 906 bp, Homo sapiens
aaaaaaaaaaaaaaaaaaaaaaaaatcaatcaattgatcaatctatatatctttaaggaatacttttggctgcaaataatagaacattcaaccagcaatggtttaaacacaaacagtacatttcttctcatatgacatgcccagaagtaggtcattgctggcaatacttaacagatgacagcgctctgggttgatatctcaraaatcctcttgactttctaatcatgctcataacaaatctaaatatcatatcctcatgcaactgtattccaagacaggagacctgaaaagtggctcaattaacagaatttccctgcatgtaactgattctcagcatggaggaaaggctttcctagatgctcttatataaactttgcccttatccctctgctctgaagttttatttccctccaacattcttacgttgatacctaatcaccaaggtgatggtattggaaggtggggcctctagtaggtgattacgtcatgagagcttcaccctagtcaatgagatttgtgtccttatgaaagaggcttcagagagcttcctcccgtttccactcttcccccaagtgagaacacagcaacaagatgccatcttggaagcagagagcaagcctttaccagacatcaaatctaccaacaccttgatcttgaactttccagcctccaggagtgtgaacaataaatttctattacttatttatttattgagatggagtctaactctgttacccaggctggaatgcagtggcacaatctcggctcactgcaacctccacctcccaggttaaagtgatcttcccacctcagcctcccaagtagctgggactacaggcatgtgccaccacgcctggctctttttttttctttttttgagactgaatctagttctgtcgcccaggc

SEQ ID NO: 678081 - DNA, 906 bp, Homo sapiens
aaaaaaaaaaaaaaaaaaaaaaaaatcaatcaattgatcaatctatatatctttaaggaatacttttggctgcaaataatagaacattcaaccagcaatggtttaaacacaaacagtacatttcttctcatatgacatgcccagaagtaggtcattgctggcaatacttaacagatgacagcgctctgggttgatatctcagaaatcctcttgactttctaatcatgctcataacaaakctaaatatcatatcctcatgcaactgtattccaagacaggagacctgaaaagtggctcaattaacagaatttccctgcatgtaactgattctcagcatggaggaaaggctttcctagatgctcttatataaactttgcccttatccctctgctctgaagttttatttccctccaacattcttacgttgatacctaatcaccaaggtgatggtattggaaggtggggcctctagtaggtgattacgtcatgagagcttcaccctagtcaatgagatttgtgtccttatgaaagaggcttcagagagcttcctcccgtttccactcttcccccaagtgagaacacagcaacaagatgccatcttggaagcagagagcaagcctttaccagacatcaaatctaccaacaccttgatcttgaactttccagcctccaggagtgtgaacaataaatttctattacttatttatttattgagatggagtctaactctgttacccaggctggaatgcagtggcacaatctcggctcactgcaacctccacctcccaggttaaagtgatcttcccacctcagcctcccaagtagctgggactacaggcatgtgccaccacgcctggctctttttttttctttttttgagactgaatctagttctgtcgcccaggc

SEQ ID NO: 678082 - DNA, 906 bp, Homo sapiens
aaaaaaaaaaaaaaaaaaaaaaaaatcaatcaattgatcaatctatatatctttaaggaatacttttggctgcaaataatagaacattcaaccagcaatggtttaaacacaaacagtacatttcttctcatatgacatgcccagaagtaggtcattgctggcaatacttaacagatgacagcgctctgggttgatatctcagaaatcctcttgactttctaatcatgctcataacaaatctaaatatcatatcctcatgcaactgtattccaagacaggagacctgaaaagtggctcaattaacagaatttccctgcatgtaactgattctcagcatggaggaaaggctttcctagatgctcttatataaactttgcccttatccctctgctctgaagttttatttccctccaacattcttacgttgatacctaatcaccaaggtgatggtattggaaggtggggcctctagtaggtgattacgtcatgagagcttcaccctagtcaatgagatttgtgtccttatgaaagaggcttcagagagcttcctcccgtttccactcttcccccaagtgagaacacagcaacaagatgccatcttggaagcagagagcaagcctttaccagacaycaaatctaccaacaccttgatcttgaactttccagcctccaggagtgtgaacaataaatttctattacttatttatttattgagatggagtctaactctgttacccaggctggaatgcagtggcacaatctcggctcactgcaacctccacctcccaggttaaagtgatcttcccacctcagcctcccaagtagctgggactacaggcatgtgccaccacgcctggctctttttttttctttttttgagactgaatctagttctgtcgcccaggc

SEQ ID NO: 678083 - DNA, 480 bp, Homo sapiens
tatcctttggtttcttgatagcattggtggaaactgcaaaaaataagaaacaaacaaacaatcccccccaaaactccactagtacctccaggacttctttccaagatgttaatrgtcattctgccattctataagatttcatgatctcagaaatcaagtcatcaaggaaatgacaaaataatgcatgtacaagccatcttgtctgctgcctggctaatgccaaggcgagatgccattgatgttttggagcttcttgatttcagagacgttaaaatatatataaaaaatgcatctaaaaagtgatatacagtctgggcatggtagctcacacctgtaatcccagcactttgggatgctgaggcagaaggatcatttgaggccaggagtttgagaacagcctggacaacacagcaagaccctgtttctacaaataataataataaaataaaaagtgatacataaagaatactagactgccca

SEQ ID NO: 678084 - DNA, 480 bp, Homo sapiens
tatcctttggtttcttgatagcattggtggaaactgcaaaaaataagaaacaaacaaacaatcccccccaaaactccactagtacctccaggacttctttccaagatgttaatagtcattctgccattctataagatttcatgatctcagaaatcaagtcatcaaggaaatgacaaaataatgcatgtacaagccatcttgtctgctgcctggctaatgccaaggcgagatgccattgatgttttggagcttcttgatttcagagaygttaaaatatatataaaaaatgcatctaaaaagtgatatacagtctgggcatggtagctcacacctgtaatcccagcactttgggatgctgaggcagaaggatcatttgaggccaggagtttgagaacagcctggacaacacagcaagaccctgtttctacaaataataataataaaataaaaagtgatacataaagaatactagactgccca

SEQ ID NO: 678085 - DNA, 649 bp, Homo sapiens
ttcttttgaaggcaaacatgccaaaatagtgaatgatccatctgatcccttaaatacaaaatacagtggcttatgtttctagagtaaaaagcattgagaaggggcataataaataaaccttagaataattcagcagaatttttgcataaaaccacagtggtttagctatattatcgcaaaacattttgtttgtattttggccctccaggacccatgcaaattattgagctgataatgtactgcataaaattcattaccagagctataytaggcaaggacaaaaaaaagtctcagagcctttaacatgcttatgtgcattgagactccttaagagtgtgaagtgcttctgcacgagtctgaacttctctcaaggggttaactctctgtggtagtattctgtgaaacacattctgggaagagctgagttacagtcaagaatgagacaaagattcccactagcacccctattgcccaatgatccccactaacacccctactgcccagtgattcccactaacactcctattgcccagtgattcccactaacactcctattgcccagtgattcccattaacaccactattgtccaacagtgttttggaggatctagccaatgcagtaaaacgagataaagaaatgtgacataaa

SEQ ID NO: 678086 - DNA, 1695 bp, Homo sapiens
  misc_feature 575, 576, 577, 578, 579, 580, 581, 582, 583, 584, 585, 586,587, 588, 589, 590, 591, 592, 593, 594, 595, 596, 597, 598,599, 600, 601, 602, 603, 604, 605, 606, 607, 608, 609, 610,611, 612, 613, 614, 615, 616, 617, 618, 619, 620, 621: n = A,T,C or G
  misc_feature 622, 623, 624, 625, 626, 627, 628, 629, 630, 631, 632, 633,634, 635, 636, 637, 638, 639, 640, 641, 642, 643, 644, 645,646, 647, 648, 649, 650, 651, 652, 653, 654, 655, 656, 657,658, 659, 660, 661, 662, 663, 664, 665, 666, 667, 668: n = A,T,C or G
  misc_feature 669, 670, 671, 672, 673, 674: n = A,T,C or G
cctaactcaggaaaaaataaggaggcagagatttaggcaccgtacagatggctttcagtccttgaggagcattgggtctgccacaccaggttaggggtgggacaacattaggtgtaatagcaatggcacagactgaagagcatatcatattacaccagactgatccagagagtgggctcagtgtgctcctatttgggttgatgcattcatggcttttatcaggagtggctaggcattgatgaatcaggctgcatatgctaagtaactcaccaaccctcgtaaattgcattactgaaaaccaatgatattgagcacatgcatattcaaacatgtgcataaattccaaatagtggactcaaaaatatatatatatatatatatatatatatatatttttttttttttttttgagacaaagtattgctctgtcacccaggctagagtacaatggtgtgatctcagctcactgcaacctccgcctcatgggttctagcgattctcctgcctcagcctcccaagtagtcgggattacagggacccatcaccactcccggctaattttgtattttagagannnnnnnnnnnnnnnnnnnnnnnnnnnnnnnnnnnnnnnnnnnnnnnnnnnnnnnnnnnnnnnnnnnnnnnnnnnnnnnnnnnnnnnnnnnnnnnnnnnnctttttgtttcttggtattaaactcttgggtwgtcccctctcttccgatacagctggcctctgtaactcatacttctgagacaatataataaaggacaatgtggcttccatcttgtgttcttttagatcacttgctttggtagaaatcaactgccatgctaggagtatactcaaccagcccaacggagaagtccatgtgacattgcattgagaccacctgctaatagtcagcactgaatcagacaccctagaagtggatcttcaaccttagtcaagcctttaaatgactgcagtcttagcaagcatcttgactgctatctcatgtgagactctgtgtcagaaacacctagctaagctgcttctaggtccctccaacataaatgctatgagataataaatgtatttttatttttttaagagacggagtatatgttgcccaggctggccttgaactcctaggctcagcgatcttcctgccccagccttctgagcagctgggactacaggcatacatcacagtgcccagcttgataataaatgtttattggttttacctgctaagctttgaaggtaatttttaaatgcagctataaatagctaataacataatttttttccaaaaccgagggggtttttctctgaaaaacaacatgaaggataaatatatgaaatgacataagaaccaaactgctaaaatcaaagacagggaaatttttaaaagcaaaattctgttcatataaagataaaaaacacatattatcttcaacagaacaaaaattgaatagatagctgtgactcctcaagagaaacaatgaaagtcagaggcaccataaagttatcttcaatgtggtacaagagaataactgccaacctagaattccataacaaacgaaactatctttcagtaatgaaggtgaaataagtacatttcaagaaaacacaaacaaaaagctttatcaccagcaaacccacactaaaagatcaagtgtttcccccctcacccccgcaagcagaagagaaa

SEQ ID NO: 678087 - DNA, 789 bp, Homo sapiens
aactcaactattaagggaaaaagaacttcagactgaatcacaaagtgaaactcaaatctatgttgtatgagagacaggtctaaaataaaatgattaagaaaggttgaagatcaacraaaaagtagagataccagaaaaactcaaacaaaaagcaaggatcaagatcttaataacagacaaggctgaattttggccaaaatgtattaaaccaaattttaaaaagggcactttataatgctaaaggttacagttcatgataaggatgaagttattaatacttctggatcaaataactgtagcaatattatgcacaaactataaaggttttacagagaaataaaagaaaaacatggggcagggtgcagtggctcacgcctgtaatcccagcactttgggaggccgaggcgggcgaatcacgaggtcaggagatcgagaccatcctggctaacacggtgaaactccgtctctaccaaaaatacaaaaagttagccgggtgtggtggcgggcgcctgtagtcccagctactccagaggctgaagcaggagaaagctccaggaggcggagcttgcagtgagccgagatggcgccactgcactccagcctgggtgacagagcaagactccgtctcaaaaaaaaaaaaaaagatggtaggcaagaaactaatttatttctctaagtcctgacagatcagttacattaaaaaaaagaaacaaggctttacaaaaccctaacacaccatactggttcatctaatggacactattatatcttctgaaaaggaaatggtgc

SEQ ID NO: 678088 - DNA, 1775 bp, Homo sapiens
tgcatcataaagaaaatgaaaagtcaagccattagggaaagatagttttaacacatataactcacaaagggctggtatccataatatatagagaattgctttaaaaaaaataaagacaggccgggcacggtggctcacacctgtaatcccagcactttgggaggccgaggcgggaggatcatgaggtcaggagatcaataccatcctgactaacatggtgaaaccctgtctctatcaaaaatacaaataaattagctgggcgtggtggcaggcacctgtagtcccagctactcgggaggctgaggcaggagaatggttcgaacctgggaggcagagcttgcagtgagcccagatcgcgccactgcactccagcctgggcgacagagcaagactccgcctcaaagataaatatataaatacattttatttatttatttatttatttattataaataaataaagacagacgaaacaatagaaaaatagagaaaagtatcctttcggctggagcagccatcttccagtaattcgccaaaatgatgaacgcaaaggaaaagaagaaaggcacctgatgtatgttctctaggccttttagaaaacatggagttgttcctttggccatgtatatgcgaatctataagaaaggtgatattgtagacatcaagagaatggatattgtttaaaaaggaatgcccacaggtgttaccacggcaaaactggaagagtctacaatgttacccaacatgctgttggcattgttgtaaacaaagaagggcaagattcttgccaagagaattaatgtgtgtattgagcacataagtgctctaagagctgagatagcttcccgaaacacgtgaaggaaaatgatcagaaaaagaagccagagagaaaggtacctgggttcaactgaagtgccagcctgcttcacccagagaagcaccctttgtgagacccaatgggaaggagcctgagctgctggaacctactccctataaagtcatggcataattggtgttaaaaaaaaaaaaaaaaaaaagacctctggactgtaaaaatgtttctcttcattgagaagaagtgtggtgtcctctctctcaaataaatatttaaagcaaattttaattgtgtcctaatgcattatataatgtctttactagtcaaatttaatgtatttcttgcttagatgtgaggtggcttattgtgcaacaaattactcaattggttagaaaacagtcagatattatttatgaaatatttgtactggtttgaagatagtccctctaaatcatcatggaagaaataaaataatttccaaaaagaaaaaaaaaagaaaaayagacaaaagtaatgaaaggtcatttcacagaaaagaaaataccaatgaccaatgaacctatggaaagaagctcaatgtggataaataagtaaactgtgatacatccatataatagaatattatgcaggggtaaaaagaagtaagcaatcaagctataaaaagacatggagaaaacttgacaggcatgtttttcatggaagaaagccaatctgaaatggctccatactgtatgattccaactatatgactatgatggctaattttatgtgtcaactgggctgagacacagtttctagatatttggtcaaacattattctagatgtttctctgaaggtttttttgtttgttttttgtttttttctttgagacggagtctccttctgtcgcccaggctggagtgcagtggcgcgatctctgttcactgcaacctcctcctcc

SEQ ID NO: 678089 - DNA, 591 bp, Homo sapiens
gatggagtcttgctctgtcgccgaggctagagtgcagtggcgtgatcttggctcactgcaacctcyacctcccgagttcaagcgattctcttgcctcagcttcctgagtagctgggactacaggtgcccaccacatgcacggctaatttttgtattttcagtagagatggggttttgccatgttggccgggctgttctcgaacttctgacctcaggtgatctgcctaactcggcctcccaaagtgctgagattacaggcatgagccaccatgcccggctaatatgtgctttttaaaatataagtttaaaacccacaggacttaatccatttttttttttgagataaggtgtcattcaggctgcaatgcagtggctcaatcatggctcactgcagcctcaacccaggctcaagctgtcctcccacttcagcctcctaagtagctggaactacagatgtgcaccatcacacccagctaaagtttttttctttttcatagagacaggcttttgccatgttgcccaggctgctcttgaactcctgggctcaagcgatttgcctgcctcggcctccttatatggtgggattacagg

SEQ ID NO: 678090 - DNA, 674 bp, Homo sapiens
tggagaaaccctgtctctactaaaaatacaaaaaattagccaggcgtggtggtgcatgtctgtaatctcagctactcaggaggctgagggcagggaaaatcgcttgaacccaggaggtggaggttgcggtgagccaagatcacgccattgcactccagcctgggcaacaagagcgaaactccaactcraaaagaaaagaaaaagaggtgtttttttttctttttttttctaaaagaaaaaaaattttatcttccttttgtgccatatgtatctttccattaaactttcacttatttcagaacaaaatcaccaatggtcccacctcacgtcagtccctttcctattcatagataaacatagagatgttgaaaacaagaccttattgatttggtcagttttaatgttttgcacagtctatttcagagtacagtgaacaggagctcttcgaagatggaggcatgcgcagtgagtgaggctcacccaggtgtctccgtttttatcattgtttgtggtgtgacaggtgcagtggacctaggaaataagtgaagaaatgagtacagaccaagacatcaacatgcacaaccccccattagaagaagaaacaggggaaaagactcagaggaggagcaagggatggagagagaagtgtagcaaagacaacagcttcctgaact

SEQ ID NO: 678091 - DNA, 1669 bp, Homo sapiens
ttttctcattccttagagctttggagagatgtacagatatgaactcatctttctattaaaaacaaaagtggtgctaccagaaaaaggtttggagtttggaagtgaatgagagtaaatgtcttcaggaaagtgaattttatgatagctacataaaggaattaagagctcctgcagagttcctttgcgatgtttgctttatatagttacttttacgctgcttataatcggtagaatttaaagggtaatggtgttataaaattataatggccacacaggaattaaagagaccttgtagcatacctttgcacactgtgcttcatagggtaatactacttagaattaaaaggccaattcttcacaatggcactgaaagtatatataaatttacaagagacataaaagttgtagctaggtaaatttaaaagattatcatgttacttaactcatttttgaatgacaagtgacttttaatttgtagacaaaaatactgacttacatatgaagagaagcaagaacatgagacaggctagagcaaaaaaaaaaaaaaaaaaaaaaccagctgaaaattttacaactgtaactctgtaatggctgcaaatgttaatgaatattgggaacacgcggtccacgagaagtggagaggagaatggaggggggaaggggaaaatttgggtctggtcaaagaaaaaatacaaggattgtatttttgtatttctaatgaagacatcagaattataaaatggaactcaaaattaatactttataatagagaaaaagtactactgcttatatgtaggttttaagaaatcagcatcatgtataaacactatacatattttgctatacttaaaattcattactcaataatgccctttaccacacaatgtcctttaccatgcaaactacataaaggataattctaactgcatgaatgagttttaagtayctgaacgtgctgcagaacaaaatggaataaaaattaaacacttaatcatcatcttgactataagaggaagttactgtgtcaaggtgggcagagagaaaataagaagagggaacacccaacagttatttcaaacaaaaagtagacacatcatcacatatttcttttgtatacattacttagtattcacgacttctatgaaatctgtaaagaatagtgacgtgacatgtaaacttttaagtagtaaagtcttggactttaaaaggtgtttttcacatccaatataacttactttaaaacaaattatttcagaagattatctaagtgtcacaaacaagcaacatatatatactgcaattttatttcaatcgcacaaacgaagttagcgtgtaggaaacttaaatgaaacaaatttaaacgaaatagttacggtaaaaatagcagaaaactgaaaattctaaaaaggaagtacacctaaaagcatgagaattcaacattcattagtgtttcatcttcagttttgattgacacttgatgcttgcaaatttttaaacaaacttttaaatcatgatgactattctgaagagatttcagcaccagcactaagatttgtacattcagtttgtttgcaattgacttgtgagccatttacatagtggatagtacagacttgtcacaggtcagatcacagtgttgaggaaagcagtgccttcctgtcattagaaa

SEQ ID NO: 678092 - DNA, 1669 bp, Homo sapiens
ttttctcattccttagagctttggagagatgtacagatatgaactcatctttctattaaaaacaaaagtggtgctaccagaaaaaggtttggagtttggaagtgaatgagagtaaatgtcttcaggaaagtgaattttatgatagctacataaaggaattaagagctcctgcagagttcctttgcgatgtttgctttatatagttacttttacgctgcttataatcggtagaatttaaagggtaatggtgttataaaattataatggccacacaggaattaaagagaccttgtagcatacctttgcacactgtgcttcatagggtaatactacttagaattaaaaggccaattcttcacaatggcactgaaagtatatataaatttacaagagacataaaagttgtagctaggtaaatttaaaagattatcatgttacttaactcatttttgaatgacaagtgacttttaatttgtagacaaaaatactgacttacatatgaagagaagcaagaacatgagacaggctagagcaaaaaaaaaaaaaaaaaaaaaaccagctgaaaattttacaactgtaactctgtaatggctgcaaatgttaatgaatattgggaacacgcggtccacgagaagtggagaggagaatggaggggggaaggggaaaatttgggtctggtcaaagaaaaaatacaaggattgtatttttgtatttctaatgaagacatcagaattataaaatggaactcaaaattaatactttataatagagaaaaagtactactgcttatatgtaggttttaagaaatcagcatcatgtataaacactatacatattttgctatacttaaaattcattactcaataatgccctttaccacacaatgtcctttaccatgcaaactacataaaggataattctaactgcatgaatgagttttaagtacctgaacgtgytgcagaacaaaatggaataaaaattaaacacttaatcatcatcttgactataagaggaagttactgtgtcaaggtgggcagagagaaaataagaagagggaacacccaacagttatttcaaacaaaaagtagacacatcatcacatatttcttttgtatacattacttagtattcacgacttctatgaaatctgtaaagaatagtgacgtgacatgtaaacttttaagtagtaaagtcttggactttaaaaggtgtttttcacatccaatataacttactttaaaacaaattatttcagaagattatctaagtgtcacaaacaagcaacatatatatactgcaattttatttcaatcgcacaaacgaagttagcgtgtaggaaacttaaatgaaacaaatttaaacgaaatagttacggtaaaaatagcagaaaactgaaaattctaaaaaggaagtacacctaaaagcatgagaattcaacattcattagtgtttcatcttcagttttgattgacacttgatgcttgcaaatttttaaacaaacttttaaatcatgatgactattctgaagagatttcagcaccagcactaagatttgtacattcagtttgtttgcaattgacttgtgagccatttacatagtggatagtacagacttgtcacaggtcagatcacagtgttgaggaaagcagtgccttcctgtcattagaaa

SEQ ID NO: 678093 - DNA, 657 bp, Homo sapiens
ggtttaggcaagagcctgtggtgcaattttgcccagtgacatgagaaggaatgtttgctggggcataggggcacctgggaaagcattttccttataagaagagattgccaggaggaagagggaggcagcttcagcctcttttcctggatgtaagtgtttgtatgtgrggcaggaggctagtatcttgcttccatgaaatgagctaccttcaatacaagccaaactgttgagtagaggggggcagagctgaaagacaggagctttgctcacctaggagatctagaagcccatggattaagtaaccttggagctgtccttccttggaacttctgactagatgaataagtcctttgttgcttgtagcagttgagtcagggttctgttaccattggctgaaaacatccgaactgatatagtatgttcttaggcaagttgtatcaatttctttgtctatatgaggagcctcacatccttaggagggagtcttctgaaccctccagtggacaatgcacaaggttagtaataacagctatagtaatgaggttgggcatggtggttcatgcctgcaatcccagcactttgggaagctgaggtgggaggattgcttaatgccaggagttcaagcttacagtgagctacgatcatgccaatgcactc

SEQ ID NO: 678094 - DNA, 651 bp, Homo sapiens
aaacagaggattaacactgaaagtatttctggccagttgatgaaagcgagtgatagaaaacaggatgctgcataatggacacagggctgggtaatttatatgggaatgaaaataaggccataaaaacaggccaggaaggagctggcaatgtacaagtatggaagaaaaggagcttggggtcgtcgtggtacgcaagctaaatgtgagtcagttgtattttgctcttattaagaaaaaggctgtcgtggctttggaactcatgaacgcacacccaacatgcaggaacacaaacttatccacccaccctgtccagcctctgtcaggcctctcttagagctctgcattctctgtggcccaggctcttaagtgagatgaagtgaccaagaaggggtttgaaaaaaatccagggaaggcaaayggaaatgattaaagggctataaagcaggatagaagaaactgcaacgatttctcttgtggaaataagggcaggcagggaacccacgaatttccatgcatgaaggggtgcagaggtcaagaacggccttccactcttctgtagcctctgcacctgaaatttttttgagtgctgacttgatgctcaaaggaatgctcactggaacattaggatttcagattttcaggtttgggatg

SEQ ID NO: 678095 - DNA, 616 bp, Homo sapiens
ctctatcctggatactggcccacagtctcttctatcaaacctgagaagccagtcagtaaatgtcgatgacgatgacaatgatgatgacaagaaggacgggagggggacaagatgaaaaatctgttttagagtctatgtgcttcttagatactgctgtgttcttctgaaaccatctaagagggtgaggggtttttgtttgtttgtttcgttttgttttcatcactgccctgccctagctgtgggtcaaracaagatgcacacctggtgagttccttgttttcttggataacaggagaacttcagctccagctcctactaacttctctcagtctaccccttactcctttgtccttttcttctttctttaatgtctttgacccagacccttggctacctagcatccatcattcagctgaaccctgggtccttcaggctaacatttctttagtttacagttctaccaattagcatcattaaattaccatttatgtttccttaaaaagtggagattgcatctttttttggagatttggttctaaagtcagtatgtgaggcaaagagtgaaagcctcttatcttatcctaaagtagacagcagtatatgtggtttgtgtaca

SEQ ID NO: 678096 - DNA, 616 bp, Homo sapiens
ctctatcctggatactggcccacagtctcttctatcaaacctgagaagccagtcagtaaatgtcgatgacgatgacaatgatgatgacaagaaggacgggagggggacaagatgaaaaatctgttttagagtctatgtgcttcttagatactgctgtgttcttctgaaaccatctaagagggtgaggggtttttgtttgtttgtttcgttttgttttcatcactgccctgccctagctgtgggtcaaaacaagatgcacacctggtgagttccttgttttcttggataacaggagaacttcagctccagctcctactaacttctctcagtctaccccttactcctttgtccttttcttctttctttaatgtctttgacccagacccttggctacctagcatccatcattcagctgaaccctgggtccttcaggctaacatttctttagtttacagttctaccaattagcatcattaaattaccatttatgtttccttaaaaagtggagattgcatcttttttyggagatttggttctaaagtcagtatgtgaggcaaagagtgaaagcctcttatcttatcctaaagtagacagcagtatatgtggtttgtgtaca

SEQ ID NO: 678097 - DNA, 554 bp, Homo sapiens
cagcctccccattagctgggaccacaggcgtacaccacaacacctgactaatttttgtawttttttttttgtagagatgaggttttgtcatactgcccaggctggtcttgaactcctgggctcaagcgatcagctcgcctcggcaagtgctgggattacaggcgtgagacactgtgcctggcctaactgagcaattactatgcagtgtgatgagcattgccccagctgaaagagtgggcaccgtggggcatgtggaagaagtgaatggcctagaggagagggtaggaggctctcccagagaaagggaaatttaggtcaagaaaagaaggctggtgggtaaaggagcctctggggaggcaggggaccattctgggcgtaggactggcatgtgcaaaggcctgcagctaaggcagtacgtgatgtgcaaggatgggctggccagaggagttgaggggctggtgtcagcttccgggcatgcagacagtgagatagcagagtgactaaggccacacttagaggtatctgtatccctcttcttcctctttttttttttt

SEQ ID NO: 678098 - DNA, 554 bp, Homo sapiens
cagcctccccattagctgggaccacaggcgtacaccacaacacctgactaatttttgtatttttttttttgtagagatgaggttttgtcatactgcccaggctggtcttgaactcctgggctcaagcgatcagctcgcctcggcaagtgctgggattacaggygtgagacactgtgcctggcctaactgagcaattactatgcagtgtgatgagcattgccccagctgaaagagtgggcaccgtggggcatgtggaagaagtgaatggcctagaggagagggtaggaggctctcccagagaaagggaaatttaggtcaagaaaagaaggctggtgggtaaaggagcctctggggaggcaggggaccattctgggcgtaggactggcatgtgcaaaggcctgcagctaaggcagtacgtgatgtgcaaggatgggctggccagaggagttgaggggctggtgtcagcttccgggcatgcagacagtgagatagcagagtgactaaggccacacttagaggtatctgtatccctcttcttcctctttttttttttt

SEQ ID NO: 678099 - DNA, 554 bp, Homo sapiens
cagcctccccattagctgggaccacaggcgtacaccacaacacctgactaatttttgtatttttttttttgtagagatgaggttttgtcatactgcccaggctggtcttgaactcctgggctcaagcgatcagctcgcctcggcaagtgctgggattacaggcgtgagacactgtgcctggcctaactgagcaattactatgcagtgtgatgagcattgccccagctgaaagagtgggcaccgtggggcatgtggaagaagtgaatggcctagaggagagggtaggaggctctcccagagaaagggaaatttaggtcaagaaaagaaggctggygggtaaaggagcctctggggaggcaggggaccattctgggcgtaggactggcatgtgcaaaggcctgcagctaaggcagtacgtgatgtgcaaggatgggctggccagaggagttgaggggctggtgtcagcttccgggcatgcagacagtgagatagcagagtgactaaggccacacttagaggtatctgtatccctcttcttcctctttttttttttt

SEQ ID NO: 678100 - DNA, 605 bp, Homo sapiens
gatagaaaatggatggatggatggatggatggatggatagacagaggttattgccctcaaggggccaatagtgtactagaaagagaagaaatttaaactgaggattacaatatagtcagtaagtgtcacaatagagttagtcccagagcacgtgagtacagagaagaaacgctgccctttgcctcaggaggggtaggagaggattcatacgaggaagtcatgcctgagctgcatcttggaggacaaagagcactcagcctgagagtgaaggggatgtgccaggcattgaagtgtgtgcaaaggtaagatgcaaagagaaccacgcattctgagagctgacagtcatcccatgtggctgcagttgtgttggggtgagctgggaggagatatgagagtcgtgagaggtcatacgctgtgccaaaacctctgaggtttgccctgaagcagtgggaagcccttgcaggattttaaagaaggagagtggttagacagatttgcatatagaaaagtccctttagcaatgttgttcaccaacaaggcagactaattaggaggctagggcagcaatctgtgttagaartgatgagatctcaattaagtttgta

SEQ ID NO: 678101 - DNA, 1188 bp, Homo sapiens
tcatcccaaaaccatccccccatttccactgtctgtggaaaaattgtcttccacaaaactggtccctggtgccaaaaaggttggggaccactgtcttatatcatgtgggtcagcatacaacagcccatgggacaggccccgctwactgcccgtttttgtaaataaggtttaattggaataaagccacatccattcatttacaaattgtctgcggctgctatctacaatggctgcagagttgagtaattgctacagagactgtatggcccacagagctcgaaatattatctggccctttatagaaaaagattgccaaggctggctgcagtggctcacgcccgtaatcccagcactttgggaggccgaggtgggaagatcacatgagctcaagagtttgaaagcagcctgggcaatatagtgagacctcatctctttatatttaataaaaataaaaataaataaaaaagaaaaagattaccaactcctgatctatacaaacattctgcaccagtttttatgtacatgtgggtagaagacaaagctgccagcttagtcttcttgggagaaaatgagaagtgactgctgctgggcaagccataatatgatgctccttcaaatcaaaactctttatgtctttgttcagcgtgtatttggtgaggatggggagaaactgatttcctattactaaaagccatatacctcttcctttagctcaaaggatttattgcatgcactggatattatacaatattctactttatttgaagttatcttcaagcacggttttccagtatggtaataacttcttggatggtttaatgtttatataaccgatgatgtcacatgttcccagtaaatgacatcccggaatgcactgtttggttggggaatttaagctgtcttcagatgctgacttttacagattggctgtcagctggttggtctctgaagatggtgcagcctcgtcttatacaatgcagttcatgtgtacccatcacagaactgctcagcaacaggaggttggcaccagcaaggaatgtgtcttttgttttgctttgttttgtttttccattcatgagcactctctaatttggcaaaaaagaggaccaatttctgtctctctctctctagttacgtaaagaattgtatgtggaaaccaagggatatccaccttggctgaattggcag

SEQ ID NO: 678102 - DNA, 988 bp, Homo sapiens
tagatgaggtttcttgaattgtggttagggactacctacttgttgaaataccgattcttgagcccagccccaaacctattatggtagctttttattgctgtgaaacaaattaccaccaacttagtagtgtagagcaacatctgtttattatctcayagttctgaaggtcagaagtccaggtgagcttgcctgggttctctgcttaggatttcacaaaattagaatgagacaaaatttcgagtctcgcaaggctggattcttttctgaaggctctggtaggaaaatccaatttcaagctcattcatgttatcagcaaaaatcagttctttgccgtctgtcagcgggggttacattctgctcctggaggccacccacatttttttccatatggcccctccacctttaaaccagcaaaggcacatgaagtccttctcatccttggaatctctctgacttcctctgtcatatgccagagaaaactctgtgcttttaaaggagttttatgattgcattaggcccacccagataatttaagacattctaaggtgcactgacttgagactttaattatatctgcaaaatcccttctcagcagtatgtaggttagtattcgattaaataaacaggggactggagtctttggggtccctcatttgaattattcctaccaacctactaaatcagagtctcttcagtggaatcaaagaaatttttttttaacaacactctaagagatttgaatgaataataaagattaagaactgatttagaaggataataagcagtgaatgttaggtgtcaagtgagtgatgcagaaaataactgttataggagttccaaatgagggaccaatgaagactgaagatgccagtgattgcagggatagccatagagaaactggagcttgagctgagtcttgaaggaagcaagacattcagaagggagcagtgcaggcttttcaggaaggagagactcatgagcagagatt

SEQ ID NO: 678103 - DNA, 3073 bp, Homo sapiens
  misc_feature 999, 1000, 1001, 1002, 1003, 1004, 1005, 1006, 1007, 1008,1009, 1010, 1011, 1012, 1013, 1014, 1015, 1016, 1017, 1018,1019, 1020, 1021, 1022, 1023, 1024, 1025, 1026, 1027, 1028,1029, 1030, 1031, 1032, 1033, 1034, 1035, 1036, 1037: n = A,T,C or G
  misc_feature 1038, 1039, 1040, 1041, 1042, 1043, 1044, 1045, 1046, 1047,1048, 1049, 1050, 1051, 1052, 1053, 1054, 1055, 1056, 1057,1058, 1059, 1060, 1061, 1062, 1063, 1064, 1065, 1066, 1067,1068, 1069, 1070, 1071, 1072, 1073, 1074, 1075, 1076: n = A,T,C or G
  misc_feature 1077, 1078, 1079, 1080, 1081, 1082, 1083, 1084, 1085, 1086,1087, 1088, 1089, 1090, 1091, 1092, 1093, 1094, 1095, 1096,1097, 1098: n = A,T,C or G
tgcctggcccaacaactacctttacactgaacgacagaattaatttcaatggaatttaacctaaatggcctggagatcagggattttgattccttgaaagttaagagactttgtgggagtgatgatgatgatggtagtattaaaaatgattttgcctctacaaatttcattttctctcttccaagaaacagatcttaatttctattcattttttcccactttcagtctgtatagtttgaaaattgaacctgaactcctgttccaaggagggtacatgacccgggccttagacctttgttatctacttcagttgccagtggctacgtgtggctactgaactagcatttgaaatgtggctggttcgaactgagaggtgctataaatgtaaaatacacactcatatattctttctgtggtaaaaaagaaaaaataattcaaactagccagttaattttttaatgttcactatgttgaaataatatttaagatatgattaaagcagatatattttcaaaataattcctttttttaatttttaaaatatcactactataaaatttaaaattacatatgtggctcacacttgtggttagcattataattctactggacagttctggtcaggcaattatattcgtagtcttccccatttcagcttgtttttagaaatacatatgtcagcttatagcaagtactaactgtacttaacccaataagttaccttatgtgaactactgcacagttatcagggaacttttacattcattattttctttggtcttataagataatcattgttataagaaaactgagattcaaagccattaagttagctgcccaaggtcaagctaagaaatgagcagaggccaggcacagtggcttacgcctgtaatcccagcactttgggaggccgaggcgggcagatcatgaggtcaagagatcgagaccatcctggccaacatggtgaaacctcaactctactaaaaatacaaaaattannnnnnnnnnnnnnnnnnnnnnnnnnnnnnnnnnnnnnnnnnnnnnnnnnnnnnnnnnnnnnnnnnnnnnnnnnnnnnnnnnnnnnnnnnnnnnnnnnnnagaaaacaccctcaccaactttcagtttagctttttctggagtagagaaagacttaaacacattttgagtaatctgaatgcagatctttacagtatttttccaaaaatttttttaggtttcttgcttacacctgattttttttttttttttttgcttacacctgattttacaactcatttttagcactttttaaattgaatcttttcaagtttttcaaattatctattacagaaacacttcattataaaattatcttaatgcattttatttgtttcagagacatgtctcgctctgtcacccaggttggagtataatggtgcaatcatggctcactgcagcctcaaacttctgagctcaagcaatccttctccctcagcctccccaatagctgggactatagatgagcactaccacatccaggtaattaaaattttttttttttagaaacaagatctcactatttgtccaggctggccttgaactcctgggctcaggtgatcttccctccccagcctcccaaagtgctgggattacaggtgtgaaccactgtacccagtctgtcttaattcagtgtttaattacgttattgtttcaattcttccttaaaaaggatggtctcaaatataagatcttactatatatttagaacttagaatattttctgatacctattaagtatcagtaaatattttttgaatgaacaaataaaaagacgatgttaaaaagagtagcaaactttggagacctagcaagccagaatatggagtttgaatatttttctaagagcaataaatgaaatgaacaaatataataatttatagtatatctcccactagtgtcttttattgcatttcagagttctgtgtctcaaattttgtaggtaagtcatatttcaggaagtgaaatttcgttgataattcatggtcagtcgtgtgaacataattttcatttgtatgacaattgtggaaggttcacattccgggaaccagagatgggggtggtaaggaaggggtagaagtgagaatctgggaacagtttgatttggtgtggtagccatcctgacactttccacccctgagtacttattttattttaaatctcaagggctcattccattagtgttttgatttttttaaaaggtgcagcgtgtttaacctgttctccatttcagcgatgttctctttgagaacacagagccagcacattacttaaaacagcaaagtgtcatgattcaatagtcataacttttcttcctattaataatagtttcgcccctgaatcatacctacatgtcaatcacatcaatagactagaaaaatgatgtttggcaacattacaaaacacaggcatcttggagtctggttattttctattttgtaaacctttaatactgagctaaaatctataataaatctcaaacataatcaataaggatatattacattctgttaaaaaatttagtgtaaatctttcaatctttacaaattttgaccttatggtggtgtagacagatgaattgtaaattaggtgtttttaaaacacatatatttttaattaatgcatgatataatacaacaataaatacaaccaagaataaaatgctaatttatattttatatttaggtataatcaagtcaggttaaaacagacacttgatgtttcccacattgattcagcgtttatatctcagatgcaaaagaatccaatgagtrataatttacatatatatacattttaaacagtaaaaatagatggaatcatatataggcttgcatagaagatagtagaacactagaaagcagttcaattgtgaaatataaaatcttaggaaattgatatgctatttaagaagtaaattatagctccgtatttgagagtctctgttagtatactccatatgtcctgtgttcttttatcagtaaccttcatatttttcaaatttcatagggacttaaaaaatccattctggcttga

SEQ ID NO: 678104 - DNA, 644 bp, Homo sapiens
taaatgcaatacacttgagcatccgtgtttgactgtgagcaacagaaaccgctcaggtctagtcttaaatgcaytaggggctctgcattttctcacatacaaaaatctggagtcaggtggtccgtggctggtatagcattctacggtgtcaccaaggagtcagttccttttagttttcagttctgccagtttttaaatgtatgcttttgccttatggtcatcagccagtgtggggtgcatattccacaaaggacaaaggggaggcctgaagggcaaaggatgtacgctgactgattccatccaccttgtgtggtgttgacaagctcccaagacctccactcactaggctactgcttcatcatgttgtcccctgacgcaaaaatgactagaaaacaaggtttttgtttgtttgtttgttttggtttgttttttacactcattgccttaaaagaaatgggttcttttaaaaatggttctcttcaagggaaaaaggtcagaacaaatataagcaggcaattagtagtgtctgccatagtattatagaaaagagaggtgactctgtaatactgtatcaatactgtatcctagtgcttttgacaatctctgtcttagaaacaccagaggagttccatgtgcttctttgt

SEQ ID NO: 678105 - DNA, 644 bp, Homo sapiens
taaatgcaatacacttgagcatccgtgtttgactgtgagcaacagaaaccgctcaggtctagtcttaaatgcattaggggctctgcattttctcacatacaaaaatctggagtcaggtggtccgtggctggtatagcattctacrgtgtcaccaaggagtcagttccttttagttttcagttctgccagtttttaaatgtatgcttttgccttatggtcatcagccagtgtggggtgcatattccacaaaggacaaaggggaggcctgaagggcaaaggatgtacgctgactgattccatccaccttgtgtggtgttgacaagctcccaagacctccactcactaggctactgcttcatcatgttgtcccctgacgcaaaaatgactagaaaacaaggtttttgtttgtttgtttgttttggtttgttttttacactcattgccttaaaagaaatgggttcttttaaaaatggttctcttcaagggaaaaaggtcagaacaaatataagcaggcaattagtagtgtctgccatagtattatagaaaagagaggtgactctgtaatactgtatcaatactgtatcctagtgcttttgacaatctctgtcttagaaacaccagaggagttccatgtgcttctttgt

SEQ ID NO: 678106 - DNA, 644 bp, Homo sapiens
taaatgcaatacacttgagcatccgtgtttgactgtgagcaacagaaaccgctcaggtctagtcttaaatgcattaggggctctgcattttctcacatacaaaaatctggagtcaggtggtccgtggctggtatagcattctacggtgtcaccaaggagtcagttccttttagttttcagttctgccagtttttaaatgtatgsttttgccttatggtcatcagccagtgtggggtgcatattccacaaaggacaaaggggaggcctgaagggcaaaggatgtacgctgactgattccatccaccttgtgtggtgttgacaagctcccaagacctccactcactaggctactgcttcatcatgttgtcccctgacgcaaaaatgactagaaaacaaggtttttgtttgtttgtttgttttggtttgttttttacactcattgccttaaaagaaatgggttcttttaaaaatggttctcttcaagggaaaaaggtcagaacaaatataagcaggcaattagtagtgtctgccatagtattatagaaaagagaggtgactctgtaatactgtatcaatactgtatcctagtgcttttgacaatctctgtcttagaaacaccagaggagttccatgtgcttctttgt

SEQ ID NO: 678107 - DNA, 644 bp, Homo sapiens
taaatgcaatacacttgagcatccgtgtttgactgtgagcaacagaaaccgctcaggtctagtcttaaatgcattaggggctctgcattttctcacatacaaaaatctggagtcaggtggtccgtggctggtatagcattctacggtgtcaccaaggagtcagttccttttagttttcagttctgccagtttttaaatgtatgcttttgccttatggtcatcagccagtgtggggtgcatattccacaaaggacaaaggggaggcctgaagggcaaaggatgtacgctgactgattccatccaccttgtgtggtgttgacaagctcccaagacctccactcactaggctactgcttcatcatgttgtcccctgacgcaaaaatgactagaaaacaaggtttttgtttgtttgtttgttttggtttgttttttacackcattgccttaaaagaaatgggttcttttaaaaatggttctcttcaagggaaaaaggtcagaacaaatataagcaggcaattagtagtgtctgccatagtattatagaaaagagaggtgactctgtaatactgtatcaatactgtatcctagtgcttttgacaatctctgtcttagaaacaccagaggagttccatgtgcttctttgt

SEQ ID NO: 678108 - DNA, 651 bp, Homo sapiens
tccagggcggccccaccaacccagccagcctcgcttttgcttgaagtgttgaatggccccaatcctcctgccttctcttcttgttgaaaatgaatcagatcttgttgcttctctgcttggaagctcccagtgcctcccctcccacctcgccatccagctctgctgccaacttgtcccttgaggccgtctcataactgtgactacagggttccctgggaagttcatctgggggcacccggttagtttggctgaagtccgttgacccggttttgcattggctgttctctcggcagttgggagcagagatggtggtctgccagctccacgggtccrggggtcctaggagtctccagagaatggtagagaaagtccggacctcagctcactcatgttgactgggtgacttcagccactgcttgatccctgagggactaaggttcctcatggtctgtattcagggccctctgtgctctgcttccacaattgtggaactgaaacaatcatataagccgggcgtggtggcgcacgcctctagtcccagctacaggaggcggaggcaggggaatcttgaacccgggaggcggaggctgcagtgagccaagactgtgccactgcacttcagcctgggcgacagagcgagactctgtctca

SEQ ID NO: 678109 - DNA, 651 bp, Homo sapiens
tccagggcggccccaccaacccagccagcctcgcttttgcttgaagtgttgaatggccccaatcctcctgccttctcttcttgttgaaaatgaatcagatcttgttgcttctctgcttggaagctcccagtgcctcccctcccacctcgccatccagctctgctgccaacttgtcccttgaggccgtctcataactgtgactacagggttccctgggaagttcatctgggggcacccggttagtttggctgaagtccgttgacccggttttgcattggctgttctctcggcagttgggagcagagatggtggtctgccagctccacgggtccgggggtcctaggagtctccagagaatggtagagaaagtccggacctcagctcactcatgttgactgggtgacttcagccactgcttgatccctgagggactaaggttcctcatrgtctgtattcagggccctctgtgctctgcttccacaattgtggaactgaaacaatcatataagccgggcgtggtggcgcacgcctctagtcccagctacaggaggcggaggcaggggaatcttgaacccgggaggcggaggctgcagtgagccaagactgtgccactgcacttcagcctgggcgacagagcgagactctgtctca

SEQ ID NO: 678110 - DNA, 272 bp, Homo sapiens
tgaccagcccttggctattggtctttccagccccacccaaggggcccttcaaactttcagttcagttgttttttttttttttttgagatggagyctcactctgtcatccaggcgggagtgcagtggtgcgatctcagctcactacaacctctgcctcccgggttcaagtgattcttctgcctcagcctcctgagtagctgggactacaggcgtgtgccaccatgcccagctaatttttgtatttttagtagaggcggggtttcaccatgttg

SEQ ID NO: 678111 - DNA, 658 bp, Homo sapiens
ggagcattttaagaaggaatgacaagaagatactctgaaaggtagaaaggcttatatgacattgagtaggttactaaggtatggggtacaaaatccgtttgaactatacacaaggttgttgttgaaaaaaattgtaagctttatttttgtttatatattttgtatatatttttaagagatggggtctcattatttagcccaggctggtctcaaactcctgagcttaagccatcctcctgtttcagcctactaagtggctggaactgctaccctgcccagcaaaagactgtaagctttagaacaagttagctctaaaatcaaatatatcacataaattagaataatgttcagtggaaaaaacagaaatatctcagaagcttaacataatgaaatttctggtttcttgtccaccatgggtcagtagtgggagtgtgtataggaggtcgtctctgctccatatcagtctagaattgatgggggcttcactgtctcgaatatcacttgttgctgcagtagcagaagaaggtggcatatggaacttctgcttgttcctcctarcagcaaggaacaaatgtaatcattctgtgtaccctgaagcaaagacaaagtgtatacaaattagcattaaaagtctctgtatctatcaaagcctcaaaca

SEQ ID NO: 678112 - DNA, 654 bp, Homo sapiens
gaacaaaaacctatatatacctatatgtgtgcatatatatgtattcacatatatgtatacatacatacacacacatatatatatgaatcaataataatatcacacttgtacatgaacaattgaaatactaatgctgctttgtcttttggtctctgttttgcaggyatatctattgtggagaatccatcttgtaaagtaacacacaggaactgttgcctctaaaatacgttcaaaagactttgtacttcaatgggattataatccattgtgtgtctattaatctaggtaatgatctcttaataaaacaagttcagatatctgttatgggccatatttgtcatagtatcatatgccttaatacttacaggtaatcttattgtggatgcaaagtaacaaggaaaaaggaatactaagcaaatggagatcaatgtcagtttagatgtgacacagtggatttatatatccaccactgatagccctagacccttctttcccattctctccctaatctatttctttaaatgtggtagtaaatatcactttttaaattttcctttttctttctgcttgcccagcatctattcccccctgatttctagtaaaaaattattcttttactctggaacttcccctcaaaccaagtgtgacagtaaa

SEQ ID NO: 678113 - DNA, 654 bp, Homo sapiens
gaacaaaaacctatatatacctatatgtgtgcatatatatgtattcacatatatgtatacatacatacacacacatatatatatgaatcaataataatatcacacttgtacatgaacaattgaaatactaatgctgctttgtcttttggtctctgttttgcaggcatatctattgtggagaatccatcttgtaaagtaacacacaggaactgttgcctctaaaatacgttcaaaagactttgtacttcaatgggattataatccattgtgtgtctattaatctaggtratgatctcttaataaaacaagttcagatatctgttatgggccatatttgtcatagtatcatatgccttaatacttacaggtaatcttattgtggatgcaaagtaacaaggaaaaaggaatactaagcaaatggagatcaatgtcagtttagatgtgacacagtggatttatatatccaccactgatagccctagacccttctttcccattctctccctaatctatttctttaaatgtggtagtaaatatcactttttaaattttcctttttctttctgcttgcccagcatctattcccccctgatttctagtaaaaaattattcttttactctggaacttcccctcaaaccaagtgtgacagtaaa

SEQ ID NO: 678114 - DNA, 522 bp, Homo sapiens
atttttagtagagatgggttttcaccatgttagccaggatggtctcaatctcctgacctagtgatccgcccacctcagcctcccaaagtgctgggattacaggcgtgagccaccatgccctgccaattataagtagttttaaccccttttggattatgatrtgtgtgtgtgtgtgtgtgtgtgtgtgtgtgtagtataattttggtctctgtgctttcagaaatcaccctacttatttctctgttccagaattctggattcaattttaagcatgatagatttaaatatatgagaacatttatgttgcttttggagttagattatagttataaaatgaaactaagaatctaaggtgctgatttcacagagttaatgattaggcaggtaaaatatatgttgaatgccattcatgtaagtctgttcataatgtattttataacatttctgtatacaagagcaaaaacaaaatggccatggcacaaataataattcatattaagtcaataaaaatagaaaacaagc

SEQ ID NO: 678115 - DNA, 2183 bp, Homo sapiens
actgttgtctagcrtcatatcagtatacctcgatagtttaaaaacaagtcttcagtcttattatagtactcataggttccacagagatgtaccaatatgtatttgtgtgaatgtgtctgtgtgtatgtgtattgtgataccacacaatgtaaaataaataggaaatattctttactgtattagactccttcttgacccagaactaaataactaaatattatatataggctgccagtcaatctttccactggaaataagagccaaaaaatgcacaaaattaaatattaatttaggctacataccataatttaatcaaatattttcatagtcagtttcctcaaataaaaatgataaaatgctaatttatctcttttgcatcaaaaacattttaagttttaagaatttttcagtttacaattattgtctttaacattgttagctgcaaccttttatcaatatttctacctacgtgttataagcctaatagttctgttattttcaactgttacaggtagagcttattttccataaatatagaacttttttgttgatttcctctgaatttccagttaaattatgagtagtaattataaaaagtagtaagatctaaaattagatcacacatttaaaaagacatgtaataacttttacttgtttatatataatcatggattgttatattcttaaatggaaagtgaaatatagaataagaagcacttagaaaaatacagttaatataaaactgatctcataagaaagactattatttagagcttttcactgcaatttcctttgtaaaaaaataaggaaaaacaacactgaacaagcctattttattaactctcaaatcttttttgctaattttttatctgctaggcaatatttgacttttcttgatttttaccctaactctgtccaatggtttgaaacctaaaataatcttgataatttatatcatttttgtatgattttgtgcagtaaaactattggaacactagcaaaggtgtctgcccactaaagctgaaaactgtcacctaaaattgacatccagtcaagacatatggagttcttttactaaaaaagtatgcataataacctgataaatctccccaaatcagcctttaattcaggaccttttattgagaacatttctttcctgtcaaaaaaattaataataaatttgaatgacaatttcagttgaatttgttcctaaaactacatgcatagttctgatttttatactcacagctgtgacatctatttggtagtatgattttttaaataaataattcatgataggagcatcagaacaaagataccaaaaatagtattcaaatgacatttgagagtataaatcgcttttcttgaatcacatatcttattaaaattatattctaacaatatatgaaattttgtagttattgaagaaatgagctattattatcctgtaaattgatagcagaaaagaagttcacatttcaaaattctagtcaatgaataaactccaggaaataaaagagttaataatactcatatcagaaatcattgaatatttataatcaggcataatgtttcttcatctttatgtgcaatttatatattttggtttttaatatattcacatgaaaagtaaaaatatttattttattgtatttattactctatgttgtacagtcatgcattcattatttagaataaaactgaacttaatttataaaaagcaatttcataaagtagtttaaatttaatgattatttttaacttggtgaatctaggctaccaaatcaatttgtcttagttttttcaggtggttataacgaagtattgtcaactgggcggctcataagcagcagaattttatttctcacagttatggtgactggaaagtctataatcaggcagcagaggatcccatgtctggcgagggcttgcattctcatagatgagtcttcttgcttgttgtcacatggtgaacaggagaatgagcattcttgagcctattttatcagtgcactgctcctattcctgagggttttgcccttatgacctaatcatctccacaaagaccctacctcctaacaccatcaacttaggtttaggatttcaacatataaatattgttggggcacagatattcagatcatagcaggattttaaaatgaagcaggatattcaaatagaaa

SEQ ID NO: 678116 - DNA, 1836 bp, Homo sapiens
gaaggtatgggagaatggatggatgagcagttatttaatgagtaaagatttttagtgggaattgtctgagtctgtttagtatgctctggcagaatatcttagaatggtagacaatagaaatttaatttttatagttctggaggccggggagtccaagatgaaggtgctggtattgttgtgtagtgaggaactttgttctgtgtactcacatggcagaacagatggaagtgctcaagggcctaagtagttccttggagcccttctacagggatactaatctcagagtatgtcttcatgatttaatcacttcttaaaggctccacctcttactactactacattgggtcttagacttagacataggaatttttaagagacatattaaaaccacagcaggaatgctgaacatttttttcagaattggatagtggtaatggtttcaccataatggaatataattaatgccactgaactatgcacttaaaaataacaaaaatgttaaattttatgtaatgtatgcttaaccataattaaaaagtatattaaaaacaacattagtatctaattctgtgactatagatcaaggtgaaaataaatacacagaaataacaacatgtcaagtaagggttatcagattgtagagtttcaacaactttgygctgtcaggtatgggatattaattgattttagagtttttcagatacctgtattaaattctaaatattaactataaaaatatacactatatatatatatataaatcaacccagaataggaaaaaggaataatagaaaaaataatattaaagaaatacatgcaactacattgctacattagaatgtataccgaccaaagataaaaataatcaaaagggttataaaacagtataggcaatatgaatagaaataaccctgaatgtctaacaaaaatgtagtcagtttcattaagattaaagaaaaagcaagtattatgtttagtgactgaactgagagggaacacatatacgtgttttcccattattgaatactaattaaatgtctgacactattattactattttcttttcttttctttttttttttgagatggagtcttgctgtgtctcccaggctggagtgcagtggtgcgatctcggctcactgcaacctccgcctcccaggttcacgccattctcccgcctcagcctcccaagtagctgggactacaggcgcctgccaccacgcccggctaattttttcatttttagtagagactgggtttcactgtgttagccagaatggtcttgatctcctgaccttgtgatcccccaacctcggcctcccaaagttctgggattacaggcatgagccactgtgcctgacctactattactatgttctattcattattacttttggttctcataactttgtaagctaccctagatatttttggcagctggcaatagggggaaaaactgagttaaacaataaaataaattttctcaaaacccaagtctagagatttcagaattgacgtaattcaggctttcaaactctacatgtgagtgtatcttatcttttctcacttgtcaatttgataaggaaatgtgtgcaattgactttagcatcacatctcctaataaaatgggaggagttttccccatccctcttacagggcatgtgacgagggtgtggctcgcttctttggtgccccatagctcaaacccccagggggtgcatgcatatcagtaggtcttggggagcgtttttttgggggctccaaccgcacagcagcctctagggttgagtggttacagctcccgaagccccagcgggcgtgtgttacactgccctt

SEQ ID NO: 678117 - DNA, 1836 bp, Homo sapiens
gaaggtatgggagaatggatggatgagcagttatttaatgagtaaagatttttagtgggaattgtctgagtctgtttagtatgctctggcagaatatcttagaatggtagacaatagaaatttaatttttatagttctggaggccggggagtccaagatgaaggtgctggtattgttgtgtagtgaggaactttgttctgtgtactcacatggcagaacagatggaagtgctcaagggcctaagtagttccttggagcccttctacagggatactaatctcagagtatgtcttcatgatttaatcacttcttaaaggctccacctcttactactactacattgggtcttagacttagacataggaatttttaagagacatattaaaaccacagcaggaatgctgaacatttttttcagaattggatagtggtaatggtttcaccataatggaatataattaatgccactgaactatgcacttaaaaataacaaaaatgttaaattttatgtaatgtatgcttaaccataattaaaaagtatattaaaaacaacattagtatctaattctgtgactatagatcaaggtgaaaataaatacacagaaataacaacatgtcaagtaagggttatcagattgtagagtttcaacaactttgcgctgtcaggtatgggatattaattgattttagagtttttcagatacctgtattaaattctaaatattaactataaaaatatacactatatatatatatataaatcaacccagaataggaaaaaggaataatagaaaaaataatattaaagaaatacatgcaactacattgctacattagaatgtataccgaccaaagataaaaataatcaaaagggttataaaacagtataggcaatatgaatagaaataaccctgaatgtctaacaaaaatgtagtcagtttcattaagattaaagaaaaagcaagtattatgtttagtgactgaactgagagggaacacakatacgtgttttcccattattgaatactaattaaatgtctgacactattattactattttcttttcttttctttttttttttgagatggagtcttgctgtgtctcccaggctggagtgcagtggtgcgatctcggctcactgcaacctccgcctcccaggttcacgccattctcccgcctcagcctcccaagtagctgggactacaggcgcctgccaccacgcccggctaattttttcatttttagtagagactgggtttcactgtgttagccagaatggtcttgatctcctgaccttgtgatcccccaacctcggcctcccaaagttctgggattacaggcatgagccactgtgcctgacctactattactatgttctattcattattacttttggttctcataactttgtaagctaccctagatatttttggcagctggcaatagggggaaaaactgagttaaacaataaaataaattttctcaaaacccaagtctagagatttcagaattgacgtaattcaggctttcaaactctacatgtgagtgtatcttatcttttctcacttgtcaatttgataaggaaatgtgtgcaattgactttagcatcacatctcctaataaaatgggaggagttttccccatccctcttacagggcatgtgacgagggtgtggctcgcttctttggtgccccatagctcaaacccccagggggtgcatgcatatcagtaggtcttggggagcgtttttttgggggctccaaccgcacagcagcctctagggttgagtggttacagctcccgaagccccagcgggcgtgtgttacactgccctt

SEQ ID NO: 678118 - DNA, 629 bp, Homo sapiens
ttaaaaaaccaattataaactagaaatcttatttaaaggaattatttatgatctgaaacaccattaatattttattacataatgaactataatgaattcatgataaagtggaaatatttccagataaaatagacaaaggacaagaactggaatttacaaaagaaaaatcattactatagcttataaaatagctttacgtgaatgataaaatgtataatatcagtgactttaaaatttataattttattttgtctttatcttaaagaattaagggaaacraggcaaaaaaatcacattttacgtgtttatatttaagtttgctatttgtaaatatatctttgagaattactatgacacatttgcaaggtaatgtaaagtcaatagagtctgtagaaaattttgataaagttcaaaagtttaataattatgtcaaatcgcattccagaagtttgtcccaagctacatttcaacaacaacaaaatagtcatatatgttttccctcactctagactattctgatactgaaacctgattatttaaaacaaatccaacctggtagatacaaaatggcattttttagggcccaagtgaacattttcttctgtcatgtatgtgctatctgtattaat

SEQ ID NO: 678119 - DNA, 1550 bp, Homo sapiens
attgacctcagagcaattattcttttaggcataaagcaaataaggtagagaatttctagttctacttactgtgagaatttccctgctctagtattctttagtgccagtgcttggtaaggctgtaatgacagagaagcttactttgacaccgtgctgacatatccagctgaattacctgtaaactgactcaatatgcttttttctctcttttttttttctgaagygatcagatgaagcagataatttagattggtttgctcaagattccctctaactgtcttccagtatactaggattctagatatgatttatattctgttaagcagtttcactggtacatgacttgaatttgcaattgagtcatggagacaatgaggaaggcaaaatgcatcagttttgctgatatgaatcaggtcatggtggatgtgactctgggaccagaagcagtgatgacatcttcttatctcaacaggcagcttttatatttcacagtttcttacacaaagtaggctcctctatttgatagcttcattctgtagtgtggcaatggaagagtttcctgaatatttaatttagtatgtattcctgtctcccagatctcctaatattagattaataacttaatttataatagcaattatgtctccttaaaattagctagagtgaattgtcttttcagtactgacagatctgcctgacggagtcattgtacagtgctgttgcaagctacagatacacaagaaataaaaaatctgggttttttatttcagagatggatgattttgaaaacagccagaattttgttaacactggtatatggctactggtagtcattaccatgtgttgatgtcttaggcacttgggtacttacattatcactgtggttgcctgaaataaagggtattaaaaaggcatactttagtaaagtgtgtggcctctgtaataagccatttcgttaacaaaagaaaaaatatggaggtctgtggagtgaactggtgattagtaacacacacaatttaaggaaagaaaattacaaacgcatgattttaaattttcagtttaaaaattttcacttgaccaagaagcttctgtaatttccttcgatcatttaaccataagtctcatattgcaaaaaaatcagatgcagaatctgtcccttcaaattgccgtttaaagcctagattaattttgcagcttcacaataaatactatgtgaccatcaaggtattaattggaacaacattgaacacggagaattggaattgcattttcagtgaaaattgggaacactatgaataaagcaaactaaagaatccttctgaaccttttgttgacaacaaaaacggatctgttccccttgtcttatgcacccattataattttatttgaaacaacacatatctttatccaaatccaagagtattaccttgcagtaggaattctacaccctctgtcatggttgcattgagacaaatgtcctgacctattaaaagagttagataagagtatgtcccaggggaacagaacaaagtctggcaccaaagtagaag

SEQ ID NO: 678120 - DNA, 1330 bp, Homo sapiens
tgcacatatatattcatatatattaaaaattcttctcctttaactgttcagattgcattaaatacatatctttccctctgatttaacagaatatatattcctaatgtagacagtatgagtattgctttgaataatctaaagcagtcattatcaaaatgtgatatctagaccatttgcaccagcactacctgggaacttgtgcaaattgcaaactgtacaagttccaaatgcaaatacaaatttggggccatacgccagacctatctgagtcagacactctgggaaatccgttttaataaggtctccaggtgcttgtgatatataccaaactgcatgaagcacttatctgaagtgtacagtgattcaagggaacagaaacatagagacggaatgcaaaagaagctctctctatatatatataatattgctttgagtattttatatatgcatgtatacatatatgtatacatatgtacacacacacaaatacagaaaatacttataacaatactctatttggtttattaataatagtggcccaaaatgcaaagctactatgtcacaaaccatatttctcaaaggtcttggaaagactgaaaactataatactagaaatgacaatacattcagagaaagagaatgaaaactatgcctggctctacatttggcacttatacagtacctcatataatcctcacaacagtatctaagaagtacgtattaacttcattttaacaaatgaggaaactggaagtctgagaggctgttccagatcacctagtaagtggctaagtcagactcagaaaacaaggctggctagaaagtcttctacttccacttctacatcatgccacacctattaaactttttcttctagtaaatgtcaacctaacccagtaaatgtcaactcttattaaaaatcatacaaattacctaatcagttgtaaaatatttgtgggtgtacagtagtaaaatgtaatgatttatttactagttagattacctattgcgccrtaatttaatttggcagaaatagtatccccagatcctaacacagagctgatcatacatttagcagttgctccataaatatttactattttgaatgtcgaatgtactttccttgtatattttccgccatgaacattagatagcaggggagctaagccttactgcctaacatttctggaacacctctcattattggtatgctgcagcatgatagaagaatctcttaacaagtcataaaaatcttccagttcaaccacttctgaagaatgccctcttcaccagctctaacagttagtaaggtaagttcagcatatgcttg

SEQ ID NO: 678121 - DNA, 651 bp, Homo sapiens
tgtccttacagccaaggtgcctgagtgggaagtaactagccagtgtccctgctagctctggcctcgctataattgtgaggaaccacagatcctttcttttttttcatttcattctctcagyccccatgttcctttatctcagacgcagaggttccttcccacttctcagtggtatcccatcttccctcccagaaacagatgcgtgatcctaagagaatccccccactccttttgtttctctctctccaaagcacaatgccattttgctgcctgctggtggctttcctgacctctgtatacatacagttctagatggctcatctggaaataacctgatcagctattagaaggactttcatatccagctgagccactgataaaaatgtccagcagcaaaaccaaccctaatatcctctacaaatttacaatcagactgggtcctctgccttccctcttaaaatctacatgggatttagagaaaagagtaggattagtggggcaaatttgaccaagatacctcacctctttgagcccctataattcttcccacctataaagtatgccgtcaatgggttaatccttgggaaattgtccatcacagtgcctggcatgcaataagtgatcaataaatgctaatatttttcagcctaa

SEQ ID NO: 678122 - DNA, 651 bp, Homo sapiens
tgtccttacagccaaggtgcctgagtgggaagtaactagccagtgtccctgctagctctggcctcgctataattgtgaggaaccacagatcctttcttttttttcatttcattctctcagcccccatgttcctttatctcagacgcagaggttccttcccacttctcagtggtatcccatcttccctcccagaaacagatgcgtgatcctaagagaatccccccactccttttgtttctctctctccaargcacaatgccattttgctgcctgctggtggctttcctgacctctgtatacatacagttctagatggctcatctggaaataacctgatcagctattagaaggactttcatatccagctgagccactgataaaaatgtccagcagcaaaaccaaccctaatatcctctacaaatttacaatcagactgggtcctctgccttccctcttaaaatctacatgggatttagagaaaagagtaggattagtggggcaaatttgaccaagatacctcacctctttgagcccctataattcttcccacctataaagtatgccgtcaatgggttaatccttgggaaattgtccatcacagtgcctggcatgcaataagtgatcaataaatgctaatatttttcagcctaa

SEQ ID NO: 678123 - DNA, 651 bp, Homo sapiens
tgtccttacagccaaggtgcctgagtgggaagtaactagccagtgtccctgctagctctggcctcgctataattgtgaggaaccacagatcctttcttttttttcatttcattctctcagcccccatgttcctttatctcagacgcagaggttccttcccacttctcagtggtatcccatcttccctcccagaaacagatgcgtgatcctaagagaatccccccactccttttgtttctctctctccaaagcacaatgccattttgctgcctgctggtggctttcctgacctctgtatacatacagttctagatggctcatctggaaataacctgatcagctattagaaggactttcatatccagctgagccactgataaaaatgtccagcagcaaaaccaaccctaatatcctctacaaatttacaatcagactgggtcctctgccttccctcttaaaatctacatgggatttagagaaaagagtaggattagtggggcaaatttgaccaagatacctcacctctttgagcccctataattcttcccacctataaagtatgccgtcaatgggttaatccttgggaaattgtccatcacagtgcctggcwtgcaataagtgatcaataaatgctaatatttttcagcctaa

SEQ ID NO: 678124 - DNA, 668 bp, Homo sapiens
ttcatatcgtgcttttgtaatccgaagaaaattgacatttaggtgtaagtcaagcaagaatgtaatttaaaactgcttaaattcagccacctattatgataaaaagaaagtttaaagaatattttagtctctatatggtaagccagtaccctatgctaacaaagtcctcacatgatactcataaggaatccagggttagatctgattatatgaatgtatcaaattatcacatgtacctgaaaatatgtacatctaatatgtatcagttaaaaaaaatttaasaaaaacttgtaagtcattttaaaaaaagaatccaggattgtcatcatgtttatcaatgctgaccatagtcccttgtgaagtaacaagagataggagtattctttatgtttgcaaaaggaaaaactgaagcaaaggaaaaatctgtcccagtcacagttgggaacacaagcaggctaccacttcatttctctgtttgttctaaacaggccaggtggaagaggactgtaagaacagaagcactaattgagtgacttaggcttcatataagtagcctctaagttacttgtattgatatctgacacaaaagctcaagttgatagtaacactgtcatgaggaagctatcaatgaggtcttaaatgttaatgagcagagcagtatagatgtg

SEQ ID NO: 678125 - DNA, 668 bp, Homo sapiens
ttcatatcgtgcttttgtaatccgaagaaaattgacatttaggtgtaagtcaagcaagaatgtaatttaaaactgcttaaattcagccacctattatgataaaaagaaagtttaaagaatattttagtctctatatggtaagccagtaccctatgctaacaaagtcctcacatgatactcataaggaatccagggttagatctgattatatgaatgtatcaaattatcacatgtacctgaaaatatgtacatctaatatgtatcagttaaaaaaaatttaacaaaaacttgtaagtcattttaaaaaaagaatccaggattgtcatcatgtttatcaatgctgaccatagtcccttgtgaagtaacaagagataggagtattctttatgtttgcaaaaggaaaaactgaagcaaaggaaaaatctgtcccagtcacagttgggaacacaagcaggctaccacttcatttctctgtttgttctaaacaggccaggtggaagaggactgtaagaacagaagcactaattgagtgacttaggcttcatataagtagsctctaagttacttgtattgatatctgacacaaaagctcaagttgatagtaacactgtcatgaggaagctatcaatgaggtcttaaatgttaatgagcagagcagtatagatgtg

SEQ ID NO: 678126 - DNA, 955 bp, Homo sapiens
aaaaagttcttcttttactttaaaaaaaggagtaacagtgcttcaggacttttttaagatcttgaataagtcttcggacttgaatcagtgtagatgttacttttctatgtctcagtggacaaagagaatccaggctggtaatacttgtaaggctttgttcagtaagaattattcaggttagtgcccactttgatccaccaatatttattattttctggggatgttggtatatctaaaggatcagaagcatggattgacattacccacaatttctgccttcccatgttctgactttggaatctaacccctacataagacacaccttattattcatatatgatatctgtataatgcctttgacttttaaggcattgtgacactcatactttcaacaattattaatatttccaatataaagatgaaacaggtgagacaaaataagattttaagtgacacagataggaggcaggccctggaatttgtttctgctgaattgtagtcctgtcctctttaatgcttaccatgtacaatcatttattccactgactttcttatcacaataattacaggttgtgggtggttaatattagtaggggactctttttatcagtctacattatcatactgmcaaggccactgcttatcctgcttcctttagctgagctagcctgaatttaagaagctctcattcacttgtgactgcatttaatttctagtaaaaatgactcatgtaagtatattaattcttatgaagtcttcctattggtttgtatatgagatttcaaatcttatcaactataccaatataggaaagttaggccattaatatcctacactttatgagacatttgcttttttttctgagtttgtctaggtatctaaatcattctcactaaacccaaatgtacagcatccttaagttaaaaaatgaaaaagatgactcatgggagctgat

SEQ ID NO: 678127 - DNA, 613 bp, Homo sapiens
tcatcttgtgtggttattaaattatcttcacattcaatgatgtcttctattttccctaaactatagatttatttctcyaagttttatagcctgtaagggttcttatgtttaattggaaagtgctcttttgatgccatctttatgtttcaagccaggaaacatcaagttcaataacacaattgattgctaatttaatgtagttaccaagtcagtacatttgttacttatttctgaggcaagccaaatatgacttcatattataagctcagaaaactttccaggagtggccctggcatggagttgattggatttttacgattagattagataagatgtatctggggagatgtgtgaggaaaaggtcggagacaaggacacccgcccaaatctgttataattataccagacagagccaatgcttgctgagcctggaccacactcagctttggagctaactgccttagtcacattcacttacgtgggaaatgcggttctagtgagaacagtgatgagtttggatctgggcatgttgattttgactttcctttgagatatctacctatatgaaaatatctggcaggccagtgagtatgtgagatagaagttcagaagc

SEQ ID NO: 678128 - DNA, 613 bp, Homo sapiens
tcatcttgtgtggttattaaattatcttcacattcaatgatgtcttctattttccctaaactatagatttatttctccaagttttatagcctgtaagggttcttatgtttaattggaaagtgctcttttgatgccatctttatgtttcaagccaggaaacatcaagttcaataacacaattgattgctaatttaatgtagttaccaagtcagtacatttgttacttatttctgaggcaagccaaatatgacttcatattataagctcagaaaacttyccaggagtggccctggcatggagttgattggatttttacgattagattagataagatgtatctggggagatgtgtgaggaaaaggtcggagacaaggacacccgcccaaatctgttataattataccagacagagccaatgcttgctgagcctggaccacactcagctttggagctaactgccttagtcacattcacttacgtgggaaatgcggttctagtgagaacagtgatgagtttggatctgggcatgttgattttgactttcctttgagatatctacctatatgaaaatatctggcaggccagtgagtatgtgagatagaagttcagaagc

SEQ ID NO: 678129 - DNA, 2132 bp, Homo sapiens
aataggtattcagcttaaaaacaaagagtgggccaggcgtggtggctcacacctgtaatctcagcactttggaaggccgaggcaggtggatcacttgaggccaggagttcaagaccagcctggccaacatggcgaaaccccgtctttactaaaaatgcaaaaaattagctgggcgtggtggtgcgcgcctgtaatcctagctacttgggaggcggagacacgagaattgcttgaacctgggagatggaggttgcagtgagctgacattgagccactgcactcctgcctgggggttcttgagacagcaagaacctgtctcaaaaacaaaaaatgaaaaacaaaaacccaaaaagtgattttcctgcttaaataagtttagaagtgctcctgtgcctcatgaatatgcaaatatgcaaaatgacactcagagtttcataaacctatttgatcacagaattatctttccagtggaactttttgtggaacaattgtttcagtgaacacattttggaaaaaatgtttgctaaccttcttccgtaatctatttgcagtacataraggaattatagacaatggtagactcataagaaaaactgaaaaaccagtttttcttcggttttgtaagacaacagaacaagaaaaacacattgtagatcaatagctttccttcccaaagaacgtctatatctggtacacgttcttcctcatttgcagcgaggccacagggatgcttccctttccgtagatggcaccgagcttaactcgtgtattggactttgtatgagggactgcccccattcaacagcccccatgatcagtcttccatttctaggccttgttccctctgctaactgtgggaagaggaagattgttttgctttcggaataggtaatatagtcacatggttcaaaattcaagaggtatgaaagcgtggaagatctgcctttcacctcactctccaacccctcagttcaaccagtgttgctaatttctggtgtatctttccagagatatttcactcatatataagtaacatatacatatttattttatccattcatccacatatgttatacactcttttcacatctttttttcatcttaacaagttatcagaaattgttttcgactagttgaaacatttaaaaagtcattaaaaaattttttaatgacttaaatgtttaaaatgactttaaacattaaaaaacatttaatgtttcgactagtcgaaacattaaagaatgtccacttttttttcttaacatgtgcaaggtattccattgaatgcaaaacgttatttaactactacaatattgagtaatattatttttctaatattttgctattgcaaagattactgcaaagagtaaccttgtcacatcaattcacatgcttgagagtatatttttagtgtgcaatactgaagtacacttactgagtcaaaagtatgtacattagtaatttcacagatattatcaaattaccaagatgcactcccaccgacaatatattaaaatgtctctttcagcttccgtgacaacaacacaccaaactttttgacctttgcaaatctaataggtgaaaaacactatcttagtagagtttaaatttggagtttatatcttgaagaagcaagcggttttatttaattgaaaaatatttataaaatttattgaagaaaatactgcttatttcccttgccttcttctacagcttacactaaggctgatcttcctttgatgtttaactgttatcattaattctgtgctataatttaaggggtggtgatgaacgaaggctttgccaagaatgggactggtttctgagcattatgccctgattgttcttctggctacttaatttctttcagctattaatttttatgtagtgaatatcctcttggtttctaatctgcttcctcaattaatactttatcatttgaaggaaggaatgaaagatgttcttacagtcttcaaaataataattataatagctaccatttaagtgtctcttatgtttcaggtagatgtttatatgcatcattgattaaactttcatagagactttataaagtagatattattatttacattttcctgatggaagtaaccccggctactgacaacttatca

SEQ ID NO: 678130 - DNA, 820 bp, Homo sapiens
cccagatttgttacaaatatgatatttcttcatgctctgaactttagatagagtagctctcctgtaagctatttcttcccaaaatgggtaagaaactttttcctccttttaagtacaagttaattatgtaatcattcaaaattaccagatgtcgattgggggactctttggaaagtacgggttgttgtacatctgcaatctcctttcttaggacatattaaagcaatttagagttaaaatctccatccattcatagaaagaagagggataaagctgtcggttttctagccacctggagtacactattctgcagtgttgattttgataaagcaaccttagtttataagccctgaaaaactagaatttaacaagctggcagaactgtggcatcaatatgtcttaaaatggaggtcagggagaagttaaattactgagcaaatgggtaaaaatcttttccctaacgtatagcctaatttttcagtacatctccaggcaaaattatacagctmccttcatttaaatcattttatttctgcattttgcttaatactaaaaggtggatggcaagatgtaacactgacattcaaaaaggcagtaatatataagtaagagcatcttccttgatgcaatgctattgtccaagaagcaatcatctctcctgcaggagagacacaaccattcatattgaacatacacattagtcacctcatggttttattcatccctgctaataggcatatctctcaacctccatagctgtaatggctcctgtccaaatgggctttcactacacacaggaagctttcttgcttctctctct

SEQ ID NO: 678131 - DNA, 598 bp, Homo sapiens
caggagatggaagcataggagagaaacaagcaccaggtttagagaagcttgcttctggggcaatagataaacacttgatagtcgtgcatgcacagaattctgtgcagttggcccaacaagggtgtggtgcctcggggtagaattcatcccgagtacrtgaggagacaatcctctgcctccatagttgctcactttcatgcaaaaccagctgttacccatttggttggggaactgaggtaaacatagtggaactgaagaggattggagtggagtagcagagtcctagcccttgaatagaatttttgccaggtaattgatgagagtgtgatgagcacaattatacctattatttattgggtacatactctgtgtctgccatgcttaatcttcaccacagaaaacttaaagatacgtgtattagtccattctcacgctgctataaagaactgcccaagactgggtagtttgtaaaggaaagaggtttaactgactcacagttctgcagggctggggaggcctcaggaaacttacaatcatgtccttcttcacgtggcagcaggaaggagaagaatgaaagtcaagtgaagggggaagctcc

SEQ ID NO: 678132 - DNA, 1130 bp, Homo sapiens
caaaaccaaaaagtcatagcccggtttcaccatcggtctttcaaaagtgcaaaccagcctaatgcctccctgcttggttttttaaagaattcattactctcttagtactaatactagacagtcccattctgttctaaaaggaaatctcgacctaacaatctttgttctagagcaggccaagagttccaaaacccaagttctttcactaaacaaaactacctgtttcctcatctagaaaatgaaagaaatccttcctctatgactctcaatgttttgggtttttcttaatgaaaatgagataaatataaaagtttttggtaaatttaaagtcatcgtgcttaagactcttagaatttagttacccctagttaaggcaactccagtccctaacagaattcctaaaacagcaaatgcaatcttttctgaaataaaagccttctcaaaatagttatctaggaggctgagagaaggataatgagagattacctaaggaggacaatgtacgttattccagtgatggacacacaaaaagccctggcttcaccactacgcaatacacgcatgtacaaattacacttgtacctcacaaattatacaaataaaaatttttaaaagaaaaaagttatctaacaaagaatatccacataaaagaggagtttatcactgacgcacactaaacacaccttcattctaaaaggaatgggggaaagaaaagactcctataaaaatgttcaaacgaaacaattggcttttgtaaagctatctgtatgccctaagacttcctgctttacctaaagaggcaaggcagtttctcaaaccagagaaaacctggcagaacagtttcaaagtgagcaaatacctaagcaattaacatgttatsttgggtagttttgtggtattttggcaaatacggcacaaaaattaaaaactcagtatcctaaatatcagaaaagctcactaatacgtgtagcatttaaaatgtgatttttttacaaatgacaccttataagtactttaagcaactagaagtgctcagtccagctactctttcacagctttcaaatgtttacaaagttttttaaaatatcactaattgagttgaattcaaaggaacacggtttactttattt

SEQ ID NO: 678133 - DNA, 1130 bp, Homo sapiens
caaaaccaaaaagtcatagcccggtttcaccatcggtctttcaaaagtgcaaaccagcctaatgcctccctgcttggttttttaaagaattcattactctcttagtactaatactagacagtcccattctgttctaaaaggaaatctcgacctaacaatctttgttctagagcaggccaagagttccaaaacccaagttctttcactaaacaaaactacctgtttcctcatctagaaaatgaaagaaatccttcctctatgactctcaatgttttgggtttttcttaatgaaaatgagataaatataaaagtttttggtaaatttaaagtcatcgtgcttaagactcttagaatttagttacccctagttaaggcaactccagtccctaacagaattcctaaaacagcaaatgcaatcttttctgaaataaaagccttctcaaaatagttatctaggaggctgagagaaggataatgagagattacctaaggaggacaatgtacgttattccagtgatggacacacaaaaagccctggcttcaccactacgcaatacacgcatgtacaaattacacttgtacctcacaaattatacaaataaaaatttttaaaagaaaaaagttatctaacaaagaatatccacataaaagaggagtttatcactgacgcacactaaacacaccttcattctaaaaggaatgggggaaagaaaagactcctataaaaatgttcaaacgaaacaattggcttttgtaaagctatctgtatgccctaagacttcctgctttacctaaagaggcaaggcagtttctcaaaccagagaaaacctggcagaacagtttcaaagtgagcaaatacctaagcaattaacatgttatcttggrtagttttgtggtattttggcaaatacggcacaaaaattaaaaactcagtatcctaaatatcagaaaagctcactaatacgtgtagcatttaaaatgtgatttttttacaaatgacaccttataagtactttaagcaactagaagtgctcagtccagctactctttcacagctttcaaatgtttacaaagttttttaaaatatcactaattgagttgaattcaaaggaacacggtttactttattt

SEQ ID NO: 678134 - DNA, 1908 bp, Homo sapiens
tgctgaaatggcttagaaacaatgaccaatcaaatagcaatgagtgtgtccagcacacagattctgttctgaactgttttctcctagcaaaagaaagcaatattttctggagaaatagattattccagatttggaggaggaaatgcgcaaaatgagcctgaaacatgttcccatgacatacaacaacgaatgcatcaaaaacgttgagttgtgcctgaaaaactcagaagaaaacctgaagaggtttgcagtagtcaaagatatggcaatttgagctttcaaatggattttaactgcagtacatagaaacacatcaaatatgtttcacagaaatacatcgaattatgtttaatatacaagtagttcctgagtagtttaaaaatctacttattctctttgcatgatctcttttgtagctcatggaatctgtgttgtaggagggggagatattatacttgttatttgaggctacaaaaagatgtctagggaacaggcctgaagttcttctgtgaattttagtctttctagatagctcgattggggaaaaataaataaattaacttaggggagcagtgaagctctacaagaacacatatatctctggatgagaaagaaaagggatgtggagctgcagatatgtccttggataatgacagggccactgggcacggaggctcatgcctgtaatctcagcactttgggagggtgaggcaggcagattgcctgaactcaggagtttgagaccagtctggccaacatggtgaaaccccacctctactagaaacacaaaaaattagccaggcgtggcggtgcaggcctgtagtctcagctactcaagaggctgaggcacgagaactgcttgaacccaggaggtggaggttgcagtgagctgagatcatgccactgcrttccaccctgggcaacagagtggtaatgggctctgaacttatggatgagacctgaaggggaattgaacttactcctctttttggagcatctttaaaactggattttgaaattttgaaaataatgcctctaacactatcccgagtggccatggttctgtgctgtggaaggactcttgtcctggggacagaaacgtggtcagaatccaaaggaaaggctgccgccccctcaacacacacacaccccattttacttcctatgtattttcctctaccttctgtttttgcttcacttcatttcgatccccacactgtttatcccccattcttagacagcttcatgaagaacctctggacatatactgagggcttaaccttgaatatggataaaatcaagatgatcaacaaacatgatctttggtgccataatgctttctatatcagttcctcttctgtgcacattttaatgcagtttatatctctatttctatatcagttcctctttaattcaaattttaatatagtttatatctctatgagcatttcttaatgcataaataattcagatttctaaaataccaaaataatggcatgaaatcaacaaaaaggccaatattgtacgcctaaaattagcagagaacagaaaatattgaaaacttgtgtaacaagcagaagtaagtgatgaaaacattaaatttgagaattatctgctttggtgcaagggatctaccaaattagagaaatgtttagagaagatagaagttgtctgaggaaataaccgcttaccattatttgttgtatggccttggaaaaaatattccttgaagctccggaagaatttggaggatatactgacacagaaattaaattaaatgaaaatcataagatgaaaatgaaagtcaacagtgttatgcattcagaaaattcagggagaaggaccggaaagagaactctagattgagtcaattaaagatgacaagtgagagatgaataagggatttta

SEQ ID NO: 678135 - DNA, 598 bp, Homo sapiens
atataacacaattttatctttggtttcactagtaactcactcagcctctccatttccaacttcagattatagaaagcaaagatctgattgcaccagctcatttcttgagccatgctacacaaagtcatcctgtgggttagcttcccttctacccactacaaagcactgcaacattcagctatgaactgcaggcagttcactttgttcagaacataggaccaaagccagctatgcctgtgagttgggtggaattcctgataaggagttgtaggagggacaggtaytattgacatcactagggtcggggaagaagcaggatatcacacgcctaggaaattgacctatgatctgggaagccttctcttgccattcacacgtgaatggtgtgtgttgggacctgctcacatttgggctgagagatgcatgaatgtggtaactaagcagccctcagagtctgtgtcagagcctggctattacgtaggtagatcaaggagttacttacacagtgtggtttgagggacctcaaaaaattcacttcttccaaaatttgtctcccactggctgtaactatgtcttacatccaccattaaaagagttc

SEQ ID NO: 678136 - DNA, 598 bp, Homo sapiens
atataacacaattttatctttggtttcactagtaactcactcagcctctccatttccaacttcagattatagaaagcaaagatctgattgcaccagctcatttcttgagccatgctacacaaagtcatcctgtgggttagcttcccttctacccactacaaagcactgcaacattcagctatgaactgcaggcagttcactttgttcagaacataggaccaaagccagctatgcctgtgagttgggtggaattcctgataaggagttgtaggagggacaggtattattgacatcactaggrtcggggaagaagcaggatatcacacgcctaggaaattgacctatgatctgggaagccttctcttgccattcacacgtgaatggtgtgtgttgggacctgctcacatttgggctgagagatgcatgaatgtggtaactaagcagccctcagagtctgtgtcagagcctggctattacgtaggtagatcaaggagttacttacacagtgtggtttgagggacctcaaaaaattcacttcttccaaaatttgtctcccactggctgtaactatgtcttacatccaccattaaaagagttc

SEQ ID NO: 678137 - DNA, 1488 bp, Homo sapiens
gtactctccaattgacaaaacwtgatctcatttattacctatagcatagtgagggagttatttctgcatttaccgaggaagaaagagaagctcagcgacactgaggagcttcacaaaagcatgagctgctgtctgacccgggcctgtgtccattcagtactgaaaccctcaggagaaatgttttactttgataaaacagatcccagtgagaacattgtactcctggaggtggggggatattgaaaggaggaggcaggtgcagaaagaggagttggagcccctgagataaactttatcttcttacagttttgcccagggccaatcctacttaagtcacttttcactccctcaaccaaacacagaggcccatcttccaaacttgactagcatccaacttaaacactttgatgaaacccaagctgggaaaggaggttggtctcagcattttggttaatcatttattaaaaccaccttaacagggatcagtgtgtaaacagctgagccatttttgctaaaacccagagctaggatgtcagattgagcaaatatttgacaagcagagaaaggtcttggtgtagaatgcattttctaacacataacttgtactttgctagacctaagaattggcaccttcccacgttttcagcctctctccccacatttttcctggccaagtcagtcaaaagcaggagtccatgggtccctctgtgctgaattgggcctcctgcttggtaaccaagtaaatgagctgagaagaccccaactgtttctcagccagtagttcccacctgtccagcctaataagacagagacagaagaggtatggagatgtgcagttgagagaactttccagctcaggccaacaagactgcaattaggagattatctgatctacgaacccatgtggtgcctggagaaaaagaaggaatcagttgagaaataagcccttaactgaaagggaggtaaagagacctttaatccttattcactctcctgtgactactcccaaataaaaataattcccggctgggcatggtggctcacacccataatcctagcactttgggacgctaaggcaggcagatcacgaggtcaggagtttgaaaccaggctgaccaacatggtgaaatcccatctctactaaaaatacaaaaattagctggatgtggtggtgcacacctgtaatcccagctactcaggaggctgaggcaggagaatcacttgaacccgagaggcggaggttgcagtgagctgaggtggcaccactgcactccaacctgggcaacagagcgagactctgtctcaaaaaataataataataataataataataataattcccaaacatgcaggtaataatagttactgctatctagtgagtatctacttacaatgtgccaggtaggtactggctccagcaaggtatatattattattcctgttctacagatgagaaggctgaggctcagagaggttaagtaacttgcc

SEQ ID NO: 678138 - DNA, 1488 bp, Homo sapiens
gtactctccaattgacaaaacatgatctcatttattacctatagcatagtgagggagttatttctgcatttaccgaggaagaaagagaagctcagcgacactgaggagcttcacaaaagcatgagctgctgtctgacccrggcctgtgtccattcagtactgaaaccctcaggagaaatgttttactttgataaaacagatcccagtgagaacattgtactcctggaggtggggggatattgaaaggaggaggcaggtgcagaaagaggagttggagcccctgagataaactttatcttcttacagttttgcccagggccaatcctacttaagtcacttttcactccctcaaccaaacacagaggcccatcttccaaacttgactagcatccaacttaaacactttgatgaaacccaagctgggaaaggaggttggtctcagcattttggttaatcatttattaaaaccaccttaacagggatcagtgtgtaaacagctgagccatttttgctaaaacccagagctaggatgtcagattgagcaaatatttgacaagcagagaaaggtcttggtgtagaatgcattttctaacacataacttgtactttgctagacctaagaattggcaccttcccacgttttcagcctctctccccacatttttcctggccaagtcagtcaaaagcaggagtccatgggtccctctgtgctgaattgggcctcctgcttggtaaccaagtaaatgagctgagaagaccccaactgtttctcagccagtagttcccacctgtccagcctaataagacagagacagaagaggtatggagatgtgcagttgagagaactttccagctcaggccaacaagactgcaattaggagattatctgatctacgaacccatgtggtgcctggagaaaaagaaggaatcagttgagaaataagcccttaactgaaagggaggtaaagagacctttaatccttattcactctcctgtgactactcccaaataaaaataattcccggctgggcatggtggctcacacccataatcctagcactttgggacgctaaggcaggcagatcacgaggtcaggagtttgaaaccaggctgaccaacatggtgaaatcccatctctactaaaaatacaaaaattagctggatgtggtggtgcacacctgtaatcccagctactcaggaggctgaggcaggagaatcacttgaacccgagaggcggaggttgcagtgagctgaggtggcaccactgcactccaacctgggcaacagagcgagactctgtctcaaaaaataataataataataataataataataattcccaaacatgcaggtaataatagttactgctatctagtgagtatctacttacaatgtgccaggtaggtactggctccagcaaggtatatattattattcctgttctacagatgagaaggctgaggctcagagaggttaagtaacttgcc

SEQ ID NO: 678139 - DNA, 1488 bp, Homo sapiens
gtactctccaattgacaaaacatgatctcatttattacctatagcatagtgagggagttatttctgcatttaccgaggaagaaagagaagctcagcgacactgaggagcttcacaaaagcatgagctgctgtctgacccgggcctgtgtccattcagtactgaaaccctcaggagaaatgttttactttgataaaacagatcccagtgagaacattgtactcctggaggtggggggatattgaaaggaggaggcaggtgcagaaagaggagttggagcccctgagataaactttatcttcttacagttttgcccagggccaatcctacttaagtcacttttcactccctcaaccaaacacagaggcccatcttccaaacttgactagcatccaacttaaacactttgatgaaacccaagctgggaaaggaggttggtctcagcattttggttaatcatttattaaaaccaccttaacagggatcagtgtgtaaacagctgagccatttttgctaaaacccagagctaggatgtcagattgrgcaaatatttgacaagcagagaaaggtcttggtgtagaatgcattttctaacacataacttgtactttgctagacctaagaattggcaccttcccacgttttcagcctctctccccacatttttcctggccaagtcagtcaaaagcaggagtccatgggtccctctgtgctgaattgggcctcctgcttggtaaccaagtaaatgagctgagaagaccccaactgtttctcagccagtagttcccacctgtccagcctaataagacagagacagaagaggtatggagatgtgcagttgagagaactttccagctcaggccaacaagactgcaattaggagattatctgatctacgaacccatgtggtgcctggagaaaaagaaggaatcagttgagaaataagcccttaactgaaagggaggtaaagagacctttaatccttattcactctcctgtgactactcccaaataaaaataattcccggctgggcatggtggctcacacccataatcctagcactttgggacgctaaggcaggcagatcacgaggtcaggagtttgaaaccaggctgaccaacatggtgaaatcccatctctactaaaaatacaaaaattagctggatgtggtggtgcacacctgtaatcccagctactcaggaggctgaggcaggagaatcacttgaacccgagaggcggaggttgcagtgagctgaggtggcaccactgcactccaacctgggcaacagagcgagactctgtctcaaaaaataataataataataataataataataattcccaaacatgcaggtaataatagttactgctatctagtgagtatctacttacaatgtgccaggtaggtactggctccagcaaggtatatattattattcctgttctacagatgagaaggctgaggctcagagaggttaagtaacttgcc

SEQ ID NO: 678140 - DNA, 1488 bp, Homo sapiens
gtactctccaattgacaaaacatgatctcatttattacctatagcatagtgagggagttatttctgcatttaccgaggaagaaagagaagctcagcgacactgaggagcttcacaaaagcatgagctgctgtctgacccgggcctgtgtccattcagtactgaaaccctcaggagaaatgttttactttgataaaacagatcccagtgagaacattgtactcctggaggtggggggatattgaaaggaggaggcaggtgcagaaagaggagttggagcccctgagataaactttatcttcttacagttttgcccagggccaatcctacttaagtcacttttcactccctcaaccaaacacagaggcccatcttccaaacttgactagcatccaacttaaacactttgatgaaacccaagctgggaaaggaggttggtctcagcattttggttaatcatttattaaaaccaccttaacagggatcagtgtgtaaacagctgagccatttttgctaaaacccagagctaggatgtcagattgagcaaatatttgacaagcagagaaaggtcttggtgtagaatgcattttctaacacataacttgtactttgctagacctaagaattggcaccttcccacgttttcagcctctctccccacatttttcctggccaagtcagtcaaaagcaggagtccatgggtccctctgtgctgaattgggcctcctgcttggtaaccaagtaaatgagctgagaagaccccaactgtttctcagccagtagttcccacctgtccagcctaataagacagagacagaagaggtatggagatgtgcagttgagagaactttccagctcaggccaacaagactgcaattaggagattatctgatctacgaacccatgtggtgcctggagaaaaagaaggaatcagttgagaaataagcccttaactgaaagggaggkaaagagacctttaatccttattcactctcctgtgactactcccaaataaaaataattcccggctgggcatggtggctcacacccataatcctagcactttgggacgctaaggcaggcagatcacgaggtcaggagtttgaaaccaggctgaccaacatggtgaaatcccatctctactaaaaatacaaaaattagctggatgtggtggtgcacacctgtaatcccagctactcaggaggctgaggcaggagaatcacttgaacccgagaggcggaggttgcagtgagctgaggtggcaccactgcactccaacctgggcaacagagcgagactctgtctcaaaaaataataataataataataataataataattcccaaacatgcaggtaataatagttactgctatctagtgagtatctacttacaatgtgccaggtaggtactggctccagcaaggtatatattattattcctgttctacagatgagaaggctgaggctcagagaggttaagtaacttgcc

SEQ ID NO: 678141 - DNA, 550 bp, Homo sapiens
caaaacaaaacaaaacaaaacaaaacaaaacaaaacacctgccacaagtccaccaaacagagataactacttttaacattttgctgtatttctttccagattctgattctatacatgcatgtacacatgcaaatgaagatcatatggtatatagttttgttttctgacttttttccatttaattttaggtcaaaagcactttcccatgtccttaatggcygcatcacagtttctttccccattcccctattgttggacctggagttgtgttccatttttccttattttaaataatattgcaatgacactttctttgtatctctaattatttcctttagataaattcccagaagtggaattactaggttaaagagtatgagtttctttgagattgttgatcaagagatttctaagagaaaacagacatccctaagtcttttcttccacttttactttttgatgtggtaaatttataaaacctattatggcaaatttgaaatacattatttcaaatatatattaaaaaaacaaaacagtgcaatgagcccca

SEQ ID NO: 678142 - DNA, 550 bp, Homo sapiens
caaaacaaaacaaaacaaaacaaaacaaaacaaaacacctgccacaagtccaccaaacagagataactacttttaacattttgctgtatttctttccagattctgattctatacatgcatgtacacatgcaaatgaagatcatatggtatatagttttgttttctgacttttttccatttaattttaggtcaaaagcactttcccatgtccttaatggctgcatcacagtttctttcmccattcccctattgttggacctggagttgtgttccatttttccttattttaaataatattgcaatgacactttctttgtatctctaattatttcctttagataaattcccagaagtggaattactaggttaaagagtatgagtttctttgagattgttgatcaagagatttctaagagaaaacagacatccctaagtcttttcttccacttttactttttgatgtggtaaatttataaaacctattatggcaaatttgaaatacattatttcaaatatatattaaaaaaacaaaacagtgcaatgagcccca

SEQ ID NO: 678143 - DNA, 1634 bp, Homo sapiens
gtcaggagttcgagaccagactggccaacatggtgaaaccctgtctctactaaaaatacaaaaaaaaaaaaaaaaaaaaaaaaattagccaggtgtggtggcggccagaggcttaggcaggaaaattgcttgaacctgggaggcagaggttgcagygagcggagatcacgccactgcacaccagcctgggtgacagtgacagactctgtcccagaaaaaaaaccaaaccaaaacaaaacaaaacagtccaagatgtaggcacacctgggcaacatggggaagggggaatgtgaaccaaggaagatgggaaatgaaatcccaggacctggaggccagaaagtggggtccccggatcttcagccaggagcttcctgccctcatcccactaacagcagaggccatgtcctcgacatcacatcggggcctccaacacctaccaaaggagcctttgggacagggagcagcagcaggcagcccgaagcgggtacggggccaccagatcccagcctcaatcgctcgtgggcagctgtcataattcactgcggggaagagcacatggtcacccaggagcagctctccctctgctgtcctgcccaggctccccagccctccctaggcctccccaggcctccccaggcctgcaaccagccccttcctggctttcctggggtgcaggtgcctagcacactgtaaggagggctgcccacccatcccaggagccccaccttcacagccattggtggtgacctcagcaaaagggttgtcacagcggtcacactgacgcccgatgacacctggcttgcatggacactggccatcctcagggtcacagactctggacaaggagcctgtggggtagcagtcacacaagaggcaggtggggctgcctgggggccggtagtggttctcctgagaaaggagggaagaacggtgtcactggccaggctctcttcccaggatgctcatgggtccttctcagctgtggcccctgtggagagggtcccgacctcaggtcccctcaggagcagtattcaaaataattaacactagcaatgctttggagttgagcccatcagcgagatgtcacagaatcagaacaggctgcaaaccaccaccacaccaggccagagctcatgggttacacattggcccagggtccccctgcgcctcagacacacgaaggtaagcagccaactgccctgcctgtgagagcaaaggcacaaggccctcagctctacaggaagacccatccctacagcctgccctctagggcccaggagatgtggacagaggcccaagtggccacagtggaggcttgcttggggctgtcaccttgcagtggcactcgccgcttgtcttgttgcagtctgggtcaaagcctttgctgacatcacagttgcatgggccacatgtgggatgtccccaccagccacggggacaaggctggtcaatcctgcagagagggacccaggtaggcatgagctccccctgccactcccacctaacctaggtgagccctatgtggcccttctgaccctggctgtggatcagccaggctttcggggctctgagggacacaccagagagaagcagcagccactgggacctgctgccacatgccctggtctgcttac

SEQ ID NO: 678144 - DNA, 1106 bp, Homo sapiens
tcattaaaggaagatcctaaaccaacttttcctagtgtccagcttttttgtctttagacaaagcttattcatgtagatttagatgtttaccactttatctctactaatagattttacttttgagtgcatttgatgtaataaaagataatagctttttgtgttttttacatttgccttgcaataaccatatgaaaaatgtttaataaattctgttttacagatatcttcatagaaccaagaacacaagtaccttcatagacccaccattcacctagttacttaggacaaaaatcatttttgaatcctcccttttatttagacctcatctgctcttaaacctcatttgttgctttaatggccaaacagtaccccaaatttatcccattaatttttacttttccctggaacytcttccttctttacgtgggagtccaggtcagcattattatttactcttgatcatggaaatggactcaagtctggttatttaaactctgacttctctgtacactctactgtggcaaccagattgggctctttgtaaaataaactgtatcatacattccattgagcagaatacaacaacagctttctttacaagtagactaataccagctccttcccatggactacaaagacctacatgatgtgctctctgattaattcttcatatatatattatttatacttcgtatatattatatatgtgtgtgtgtgtataatttcatgccaaaccagtttcttgtatatgctaatttttacctcagagattttgaatatagtttactttgaccagaatattcttccgccaactttctcatagtattttttcacgagcattttcatgattctggttaaaggtctcattctgaaagagtatatcctgaatacttgtctaaagcagtcctccaaaagtccaccacaaaattcttcttcccgtgtcataatctgatgctacttaatttttccctgaaaatgtattatttccagaaatagacacatatatataccccccaaaacagactaaccaaaaatctctaatccagaggttttccattgaagctatcactcggtgggcttctgcaaattccaggaccataaaatca

SEQ ID NO: 678145 - DNA, 1106 bp, Homo sapiens
tcattaaaggaagatcctaaaccaacttttcctagtgtccagcttttttgtctttagacaaagcttattcatgtagatttagatgtttaccactttatctctactaatagattttacttttgagtgcatttgatgtaataaaagataatagctttttgtgttttttacatttgccttgcaataaccatatgaaaaatgtttaataaattctgttttacagatatcttcatagaaccaagaacacaagtaccttcatagacccaccattcacctagttacttaggacaaaaatcatttttgaatcctcccttttatttagacctcatctgctcttaaacctcatttgttgctttaatggccaaacagtaccccaaatttatcccattaatttttacttttccctggaacttcttccttctttacgtgggagtccaggtcagcattattatttactcttgatcatggaaatggactcaagtctggttatttaaactctgacttctctgtacactctactgtggcaaccagattgggctctttgtaaaataaaytgtatcatacattccattgagcagaatacaacaacagctttctttacaagtagactaataccagctccttcccatggactacaaagacctacatgatgtgctctctgattaattcttcatatatatattatttatacttcgtatatattatatatgtgtgtgtgtgtataatttcatgccaaaccagtttcttgtatatgctaatttttacctcagagattttgaatatagtttactttgaccagaatattcttccgccaactttctcatagtattttttcacgagcattttcatgattctggttaaaggtctcattctgaaagagtatatcctgaatacttgtctaaagcagtcctccaaaagtccaccacaaaattcttcttcccgtgtcataatctgatgctacttaatttttccctgaaaatgtattatttccagaaatagacacatatatataccccccaaaacagactaaccaaaaatctctaatccagaggttttccattgaagctatcactcggtgggcttctgcaaattccaggaccataaaatca

SEQ ID NO: 678146 - DNA, 1106 bp, Homo sapiens
tcattaaaggaagatcctaaaccaacttttcctagtgtccagcttttttgtctttagacaaagcttattcatgtagatttagatgtttaccactttatctctactaatagattttacttttgagtgcatttgatgtaataaaagataatagctttttgtgttttttacatttgccttgcaataaccatatgaaaaatgtttaataaattctgttttacagatatcttcatagaaccaagaacacaagtaccttcatagacccaccattcacctagttacttaggacaaaaatcatttttgaatcctcccttttatttagacctcatctgctcttaaacctcatttgttgctttaatggccaaacagtaccccaaatttatcccattaatttttacttttccctggaacttcttccttctttacgtgggagtccaggtcagcattattatttactcttgatcatggaaatggactcaagtctggttatttaaactctgacttctctgtacactctactgtggcaaccagattgggctctttgtaaaataaactgtatcatacattccattgagcagaatacaacaacagctttctttacaagtagactaataccagctccttcccatggactacaaagacctacatgatgtgctctctgattaattcttcatatatatattatttatacttcgtatatattatatatrtgtgtgtgtgtataatttcatgccaaaccagtttcttgtatatgctaatttttacctcagagattttgaatatagtttactttgaccagaatattcttccgccaactttctcatagtattttttcacgagcattttcatgattctggttaaaggtctcattctgaaagagtatatcctgaatacttgtctaaagcagtcctccaaaagtccaccacaaaattcttcttcccgtgtcataatctgatgctacttaatttttccctgaaaatgtattatttccagaaatagacacatatatataccccccaaaacagactaaccaaaaatctctaatccagaggttttccattgaagctatcactcggtgggcttctgcaaattccaggaccataaaatca

SEQ ID NO: 678147 - DNA, 1106 bp, Homo sapiens
tcattaaaggaagatcctaaaccaacttttcctagtgtccagcttttttgtctttagacaaagcttattcatgtagatttagatgtttaccactttatctctactaatagattttacttttgagtgcatttgatgtaataaaagataatagctttttgtgttttttacatttgccttgcaataaccatatgaaaaatgtttaataaattctgttttacagatatcttcatagaaccaagaacacaagtaccttcatagacccaccattcacctagttacttaggacaaaaatcatttttgaatcctcccttttatttagacctcatctgctcttaaacctcatttgttgctttaatggccaaacagtaccccaaatttatcccattaatttttacttttccctggaacttcttccttctttacgtgggagtccaggtcagcattattatttactcttgatcatggaaatggactcaagtctggttatttaaactctgacttctctgtacactctactgtggcaaccagattgggctctttgtaaaataaactgtatcatacattccattgagcagaatacaacaacagctttctttacaagtagactaataccagctccttcccatggactacaaagacctacatgatgtgctctctgattaattcttcatatatatattatttatacttcgtatatattatatatgtgtgtgtgtgtataatttcatgccaaaccagtttcttgtatatgctaatttttacctcagagattttgaatatagtttactttgaccagaatattcttccgccaactttctcatagtattttttcacgagcattttcatgattctggttaaaggtctcattctgaaagagtatatcctgaatacttgtctaaagcagtcctccaaaagtccaccacaaaattcttcttcccktgtcataatctgatgctacttaatttttccctgaaaatgtattatttccagaaatagacacatatatataccccccaaaacagactaaccaaaaatctctaatccagaggttttccattgaagctatcactcggtgggcttctgcaaattccaggaccataaaatca

SEQ ID NO: 678148 - DNA, 1106 bp, Homo sapiens
tcattaaaggaagatcctaaaccaacttttcctagtgtccagcttttttgtctttagacaaagcttattcatgtagatttagatgtttaccactttatctctactaatagattttacttttgagtgcatttgatgtaataaaagataatagctttttgtgttttttacatttgccttgcaataaccatatgaaaaatgtttaataaattctgttttacagatatcttcatagaaccaagaacacaagtaccttcatagacccaccattcacctagttacttaggacaaaaatcatttttgaatcctcccttttatttagacctcatctgctcttaaacctcatttgttgctttaatggccaaacagtaccccaaatttatcccattaatttttacttttccctggaacttcttccttctttacgtgggagtccaggtcagcattattatttactcttgatcatggaaatggactcaagtctggttatttaaactctgacttctctgtacactctactgtggcaaccagattgggctctttgtaaaataaactgtatcatacattccattgagcagaatacaacaacagctttctttacaagtagactaataccagctccttcccatggactacaaagacctacatgatgtgctctctgattaattcttcatatatatattatttatacttcgtatatattatatatgtgtgtgtgtgtataatttcatgccaaaccagtttcttgtatatgctaatttttacctcagagattttgaatatagtttactttgaccagaatattcttccgccaactttctcatagtattttttcacgagcattttcatgattctggttaaaggtctcattctgaaagagtatatcctgaatacttgtctaaagcagtcctccaaaagtccaccacaaaattcttcttcccgtgtcataatctgatgctacttaatttttccctgaaaatgtattatttccagaaatagacacatatatataccccccaaaacagactraccaaaaatctctaatccagaggttttccattgaagctatcactcggtgggcttctgcaaattccaggaccataaaatca

SEQ ID NO: 678149 - DNA, 636 bp, Homo sapiens
atatggagatgaactatgaaaattatctgttaattttatttttgtaattttagatcaattactgccaaatcattayaatcggatctccgttatatttcctagttcactttcttactgaggtgcttatgaatgtcacagtcccaagaaaagactaaataggaaaagccagggcaaatcttacagtcagtccttagtcaaggaatagcaggaagctgcttgtgctttggtaaatttccatgaattacatacacatatatttgagcaaatgtagatcaaaaatccagttaactggttgcctaacaggttgaatttatatactgattgataattcagaagataatttttctctaacctacttatttttagaagataaaacctctctaacaatatctaaagacagtattcttaaaatatattccatgatcccaaaggcaactatagtagggtataaagaaatctgaatttacatatgagtcagtatattacataaatgttttgtgggtttatgcagaagtcacttatatgtgctgaggataaagaatgggaaaagttctttttgttacattctctaagaaatatgtcattcccaaattcataaacccctaccgctgtgctaattatgtttttaatataaga

SEQ ID NO: 678150 - DNA, 583 bp, Homo sapiens
atatattcctttgagtgtctatgctctgcttttaccttgggaacaaaatgttgctaatataatgttttatttaaatcatttatgatgtgactttttgtatttgtggtttgtattatttgttattatgaaatagtattcaatactaaatttagagctgtaaatttactaataaagatattgaaaaaagatatatttagtcatagtttatcctatcctgaaaacctatgaaatttaaagtaatttttaaataattttcaatcatataatagaaaaaagtgttagcattccagtgacaattaataggccatgtattgacctgaaacagctttatgaaatagactgattttggaagggtaaatttattatataaattattcaccataaattaacttttaacagttttgtayacatttcaaaataataaaatgttttcttaaatataatctaggattcacaatttccaaagacagagaaaaagattataaacattttaatgaggtttagtgttttaaaagaatgaaagtattatatcatttatataggcacatgcttaaatgattttcactagtatttgccaacagca

SEQ ID NO: 678151 - DNA, 643 bp, Homo sapiens
cttttactaaagaaatcagtaatgcataatttgtatcatctgtcagaatgtttgcattgtccttaatatcttagttgatttatttktgtatcatccttttagttgtgctattttatttttgatatattggacatcttaaattgcacagtttgaagtattgtttctttttgacaatgactttctgagggagctagatctgtatattaaaacatgggaaatgaaatgtctgagagaaaatatgctggcataggcaactcacatttaggcagaggaacaaaagtatgagtcaggagattaggcaaattttattaagtaacttaaaactaggaaatgaaggtataacaatataaagcatagccttgttcaacatttaaatacggaaaaaaatatgtgttccaaaataccttttaaagacaataggatgggcggccaaaataaagggagaattgaaaacagacaatgtggttttcatacaatttccttgtcttttatcacggatgatcacaggaaaagatcgttttagagaacttctggatttactataaactttctgttaaagacatcacttacacctttgatttaatgctgcttgtataagatcatattgcacctgaaaagttactataagcaaaaatggtgcctt

SEQ ID NO: 678152 - DNA, 2077 bp, Homo sapiens
  misc_feature 242, 259, 271, 274, 275: n = A,T,C or G
tggtrtttcattgtggctttaatttgcattttctcaatgatgaagcccaactttaacaatatactttttgaaaaaataattttaaagtgaaagtgtaaatgattttaagtaaacattattctttttcaattagtaagtatattaaccatgaaaaatgtttattattatatataattagaataatactgtattgtttctaactacatttgtgtgaattagaccttttaagaaattttcacttnccttataagagtacatntgcctacacaancannaacttatgaacaacctctgaataaaactacatgcttgccagtgattcaatataaaaactatattaatgccatatatagtcagatggccaaaaacaaaagctttcatgtcctttaaatctattttggttgtataaattcaagtgcaatcatggttgttgtttgattcccctccagtttcaaacaactcacactatccactgttttccttatgtaaaagagaaatgaggattccagaagtatggcaatgaaaatctcattcacatgttccatatgaaaaggcaaataatttccagaagttatcgcaaccatgttttcattttaatatcaaaatgatctaaaaatgcttccttcaaatgtgaaagtttatattaaatccatgtattactactagatataaagttctagatcatttgatatctcactgttaaaagaataaccatgtagtaattctttgacataatacaaatgtgcagatatatattttcacaagaggcatataagatgacatatgccatgtcatataacccatgtcatcttatatgccatttatgcaaatatataaatgccacacagcaacaaatgcaatattttctttatggttcttttttggggacagtgtctcactctgtcacccaggatagagtacagtggtgcaatcatagctcactgcagctttgaactcctgggctcaaactatcctgcctcagcctcctgagtagttggaactacaggcaggtgcacaccaccacacccagctaatttttaaaaacattttttgtagagaggaagtcttgcaatgtagctcaggctggtctcgaatctctggcctcaaaaaatcctcctgctttggcctccctacatggtaggattacagacatgagctgctgcacccagccctctctggttcttgaaaataaacatctgtgtgttaatgtaggaattttctttatttcaatatatttgggtttttctcctatagttatgaattgtcagcatgaaacaactgattttcagtcatgtgaacaaagatcttacgaatgatcaagtggaatctgtgtaaaatgcatgcacacacaaatatactcttcatgaacataggcaccaatacagagttaattgatagtatttggaatacacatgtgtgattcgctttggcttttagttttgcatatacactttcatgtaggtataaatatgtatgtgtgacaagtaaatatactccttgggttaataatggagttatatctcaacaaaaccatcctaaattaaaaatatcttaaatcaaaatagcattaatatacctagtctattgtacattatagatcagcttaactcagaacacctgtgttactacagttgggcaaaatcacctaaaacaaggcctattttatatcaaagtgttgaatatcccatgtaattaattgaacactacactgaagttaaaaacaacggttatataggttctcaaagtatggtttctactgaatgtacattgcttttacatcactgtaaaattaaaaaatctttaagtctaatcatggcaaactggggacctttttaaaataaacggattatcctcaattgcatacgctttctcacttctccacaaacagcaaacatatcttatcactactccaggctgactttgcttctcatttctctgagaataggaagcaagctgtcaccacattgtgacttttcttcagttactaagaaagccctgtcctggtttcttcgaaatgccaaaatgtccacatgtggcctggatcaataccatttttcctaattcatttttatcttcc

SEQ ID NO: 678153 - DNA, 1042 bp, Homo sapiens
tttccaaatgaggacacagccactcagtgaaagtgagtagatctctatgtgactatgaggaaggccacaaccaggtattatcctttgggttttagaaaaatgagaaataaacctgtactaagatatgtatatattagggttacaacagcagggatacctaacgtgcaataaggctggatcctatattccacttcagatgctgattcatttatgttcattcagttcatattcctgtttctattctattttttctaattctctcttgacattgggccatgttatcttttggcctcacctctaacacaatacttctttataaaacacatcagtggagtccatttttaaccatacaaacttcatattaaactaataatttctcagtcctcagcttrcagcctgggtgccagcatttggtatgattcactactcctttttcctctaaattctttctttatttaattcttattctccacttacctcacttattcttcctgcctgctatttttgtttctcctcagctctcctaaattcagtttctctttctacattcactcccttaatttacctcctccaggttcatgtcattaaatatgattgctttgtgaattgatcttaaattcacagtttaagaccatttcacccttgaaattcagatttttatattcaccttgttagtaaaacattccacctgtgtgtttaacttaacagtaagatgtctaaacagaaacttctgacttctgacccacattggcttccttaaaggttttgttcaaaagctgttattccaattgtttagacttaaaaaaaatttgaattacccttaattactttatttctctgacaacccacatgtagtactccatcagaaaatcctgctttttatttaaaatatattaaggttttgacgtctgccaaggtcatcaccaggaccacgaccagaattcaaggcaaaatgtttcacctgagccaccatgtgactagtatccctaattttgcctttttttttttttaacgatttcactcttcacacagaattaacctt

SEQ ID NO: 678154 - DNA, 2462 bp, Homo sapiens
cctcttattcattcttaataagattatactctcttattagctaagcaaaattcatttcctatagctaatatacatcagttgatcacttgctatttcaagcttagatgatcatttcctatagctgatattcattggttgaccactcgctgcatcatttccttgaactattaactattatcagaatgaatttacaaataatcatatagttgaataatacgtattagactttccttttctgtttgtaaataacagagataagatattgtgttgggaaagagctagaataaatgtgaaaataactggttaaactacttgcttttataaaactgcttgaccataagtgactgagtagatttagctggtaaattgagaattatattcacattacatatgggttatccatgagttagattgttccaatgtagttaaatggaaagaggtagatactctggcagagttctcagatatttaaattttattttctgtcagatggaatcaatgctgacaaattcaaaggaattctgttagagcggggtaagatatcatctataaaatgcatagcatactgtgtggcacatggtagaatatacacatattaactttctcattataattgtagaatattaaagagttttgttattgttactcttgtgctttttgtgttcatttttattatttaatcaacctctttgaagtaataattcatttttgtaatattatttttccataagttccaagaaagaaacrggagtccacaggggtattttgacaaggagactcactgggggcaggtactacagggagaatgggttgaaatgaatgagatcaatgtcacagatgtctaaaggaaggaggttgcaaagttgttcaatatggaatattttttcaacataaatgctgggtattgtgtaatatgatatttccttgtaacctcataaaacattagtgataagaaagaaattagtaaatgcatacagaaatgggattgcttatgtataccaattaaagactaaatagcaggcatttcagtgtaaacaatactggtgaggaaaatctgacagctaagaattttttgttgtcgttagtagctcattatgctaaaataaatctctttaattggatgactttttattctggataacttaagttttattttattggaaaatgtataactgatacagcataatggttaagtacatgggtactaaagagagattgcagtgacgggggaagggagagtctattcctggctctgccactcattaactgtcatcccttggccgtgctacttattatctttgcctcagaactcttctgaaaaaccaggataatgatactacctgtctcgtaggattgttttaaagatgaaatgtgtaaatattcataaagccctcacgatgatgactggggaatattaggcgctgaaagctcctatttattgggaaaaccaatattaacaacattcatatctgcactaaatcctcattgaaatatgggctaactaaatgcctacaaaaaagactgctgagtagaaatgtggtcataaagttaattatcaatgagtaaacaatttataatgatgaagataataaatgtaatgtcatcacactgaggaaaaaaacagtagtctttacttagtaactagtacaattatgagtttctaacctcaccggattttttcagactttttatcaacttttcgatggtaacttgaatgagcatgtaaaagtatgctacagaataatggagaggatggaaattaaatggcagtcttactcttagagttcagaaacacactttgagacatgaatgtgagtgcagatggtttatgtggtaatcatgaagaaaaggagaaatgagagagataaggggagataatcaatacagtgtgcctccatgagaaatttactgctgtggtaaacctgggcccagtcccactggggacctttagaaatgtatttagaagccaacttagtgcttgtccacctaagagttgaaagatctgaggtatctgtctaccaagtccaccccatcactctccccacatggtaattttctagctcctgcggcttgtcctgtgtttgaccagacctgcccctgcagccagaggctgtactcagcagaatctgccacttgttttgtaagaaagagcttctactccaggcaagatccttgggttcaggcaagatggatgcctgaattggcctcatactttggacagcagtgcatatcacaaactccttaacacaaagaattaatttttcctttgggggctcatatgaaaaattttttgaactttggtaacctttaagcatgagaggtttggtatggaattctgtgtgagtggaactgagccctccctgtcagggatgtgagattgacagcacagaagtgaatgagcaggaaaaaaaatcacagccactctgtgaagccagaggatgaatatgtgtggcttcttttgc

SEQ ID NO: 678155 - DNA, 2462 bp, Homo sapiens
cctcttattcattcttaataagattatactctcttattagctaagcaaaattcatttcctatagctaatatacatcagttgatcacttgctatttcaagcttagatgatcatttcctatagctgatattcattggttgaccactcgctgcatcatttccttgaactattaactattatcagaatgaatttacaaataatcatatagttgaataatacgtattagactttccttttctgtttgtaaataacagagataagatattgtgttgggaaagagctagaataaatgtgaaaataactggttaaactacttgcttttataaaactgcttgaccataagtgactgagtagatttagctggtaaattgagaattatattcacattacatatgggttatccatgagttagattgttccaatgtagttaaatggaaagaggtagatactctggcagagttctcagatatttaaattttattttctgtcagatggaatcaatgctgacaaattcaaaggaattctgttagagcggggtaagatatcatctataaaatgcatagcatactgtgtggcacatggtagaatatacacatattaactttctcattataattgtagaatattaaagagttttgttattgttactcttgtgctttttgtgttcatttttattatttaatcaacctctttgaagtaataattcatttttgtaatattatttttccataagttccaagaaagaaacaggagtccacaggggtattttgacaaggagaytcactgggggcaggtactacagggagaatgggttgaaatgaatgagatcaatgtcacagatgtctaaaggaaggaggttgcaaagttgttcaatatggaatattttttcaacataaatgctgggtattgtgtaatatgatatttccttgtaacctcataaaacattagtgataagaaagaaattagtaaatgcatacagaaatgggattgcttatgtataccaattaaagactaaatagcaggcatttcagtgtaaacaatactggtgaggaaaatctgacagctaagaattttttgttgtcgttagtagctcattatgctaaaataaatctctttaattggatgactttttattctggataacttaagttttattttattggaaaatgtataactgatacagcataatggttaagtacatgggtactaaagagagattgcagtgacgggggaagggagagtctattcctggctctgccactcattaactgtcatcccttggccgtgctacttattatctttgcctcagaactcttctgaaaaaccaggataatgatactacctgtctcgtaggattgttttaaagatgaaatgtgtaaatattcataaagccctcacgatgatgactggggaatattaggcgctgaaagctcctatttattgggaaaaccaatattaacaacattcatatctgcactaaatcctcattgaaatatgggctaactaaatgcctacaaaaaagactgctgagtagaaatgtggtcataaagttaattatcaatgagtaaacaatttataatgatgaagataataaatgtaatgtcatcacactgaggaaaaaaacagtagtctttacttagtaactagtacaattatgagtttctaacctcaccggattttttcagactttttatcaacttttcgatggtaacttgaatgagcatgtaaaagtatgctacagaataatggagaggatggaaattaaatggcagtcttactcttagagttcagaaacacactttgagacatgaatgtgagtgcagatggtttatgtggtaatcatgaagaaaaggagaaatgagagagataaggggagataatcaatacagtgtgcctccatgagaaatttactgctgtggtaaacctgggcccagtcccactggggacctttagaaatgtatttagaagccaacttagtgcttgtccacctaagagttgaaagatctgaggtatctgtctaccaagtccaccccatcactctccccacatggtaattttctagctcctgcggcttgtcctgtgtttgaccagacctgcccctgcagccagaggctgtactcagcagaatctgccacttgttttgtaagaaagagcttctactccaggcaagatccttgggttcaggcaagatggatgcctgaattggcctcatactttggacagcagtgcatatcacaaactccttaacacaaagaattaatttttcctttgggggctcatatgaaaaattttttgaactttggtaacctttaagcatgagaggtttggtatggaattctgtgtgagtggaactgagccctccctgtcagggatgtgagattgacagcacagaagtgaatgagcaggaaaaaaaatcacagccactctgtgaagccagaggatgaatatgtgtggcttcttttgc

SEQ ID NO: 678156 - DNA, 2462 bp, Homo sapiens
cctcttattcattcttaataagattatactctcttattagctaagcaaaattcatttcctatagctaatatacatcagttgatcacttgctatttcaagcttagatgatcatttcctatagctgatattcattggttgaccactcgctgcatcatttccttgaactattaactattatcagaatgaatttacaaataatcatatagttgaataatacgtattagactttccttttctgtttgtaaataacagagataagatattgtgttgggaaagagctagaataaatgtgaaaataactggttaaactacttgcttttataaaactgcttgaccataagtgactgagtagatttagctggtaaattgagaattatattcacattacatatgggttatccatgagttagattgttccaatgtagttaaatggaaagaggtagatactctggcagagttctcagatatttaaattttattttctgtcagatggaatcaatgctgacaaattcaaaggaattctgttagagcggggtaagatatcatctataaaatgcatagcatactgtgtggcacatggtagaatatacacatattaactttctcattataattgtagaatattaaagagttttgttattgttactcttgtgctttttgtgttcatttttattatttaatcaacctctttgaagtaataattcatttttgtaatattatttttccataagttccaagaaagaaacaggagtccacaggggtattttgacaaggagactcactgggggcaggtactacagggagaatgggttgaaatgaatgagatcaatgtcacagatgtctaaaggaaggaggttgcaaagttgttcaatatggaatattttttcaacataaatgctgggtattgtgtaatatgatatttccttgtaacctcataaaacattagtgataagaaagaaattagtaaatgcatacagaaatgggattgcttatgtataccaattaaagactaaatagcaggcatttcagtgtaaacaatactggtgaggaaaatctgacagctaagaattttttgttgtcgttagtagctcattatgctaaaataaatctctttaattggatgactttttattctggataacttaagttttattttattggaaaatgtataactgatacagcataatggttaagtacatgggtactaaagagagattgcagtgacgggggaagggagagtctattcctggctctgccactcattaactgtcatcccttggccgtgctacttattatctttgcctcagaactcttctgaaaaaccaggwtaatgatactacctgtctcgtaggattgttttaaagatgaaatgtgtaaatattcataaagccctcacgatgatgactggggaatattaggcgctgaaagctcctatttattgggaaaaccaatattaacaacattcatatctgcactaaatcctcattgaaatatgggctaactaaatgcctacaaaaaagactgctgagtagaaatgtggtcataaagttaattatcaatgagtaaacaatttataatgatgaagataataaatgtaatgtcatcacactgaggaaaaaaacagtagtctttacttagtaactagtacaattatgagtttctaacctcaccggattttttcagactttttatcaacttttcgatggtaacttgaatgagcatgtaaaagtatgctacagaataatggagaggatggaaattaaatggcagtcttactcttagagttcagaaacacactttgagacatgaatgtgagtgcagatggtttatgtggtaatcatgaagaaaaggagaaatgagagagataaggggagataatcaatacagtgtgcctccatgagaaatttactgctgtggtaaacctgggcccagtcccactggggacctttagaaatgtatttagaagccaacttagtgcttgtccacctaagagttgaaagatctgaggtatctgtctaccaagtccaccccatcactctccccacatggtaattttctagctcctgcggcttgtcctgtgtttgaccagacctgcccctgcagccagaggctgtactcagcagaatctgccacttgttttgtaagaaagagcttctactccaggcaagatccttgggttcaggcaagatggatgcctgaattggcctcatactttggacagcagtgcatatcacaaactccttaacacaaagaattaatttttcctttgggggctcatatgaaaaattttttgaactttggtaacctttaagcatgagaggtttggtatggaattctgtgtgagtggaactgagccctccctgtcagggatgtgagattgacagcacagaagtgaatgagcaggaaaaaaaatcacagccactctgtgaagccagaggatgaatatgtgtggcttcttttgc

SEQ ID NO: 678157 - DNA, 2462 bp, Homo sapiens
cctcttattcattcttaataagattatactctcttattagctaagcaaaattcatttcctatagctaatatacatcagttgatcacttgctatttcaagcttagatgatcatttcctatagctgatattcattggttgaccactcgctgcatcatttccttgaactattaactattatcagaatgaatttacaaataatcatatagttgaataatacgtattagactttccttttctgtttgtaaataacagagataagatattgtgttgggaaagagctagaataaatgtgaaaataactggttaaactacttgcttttataaaactgcttgaccataagtgactgagtagatttagctggtaaattgagaattatattcacattacatatgggttatccatgagttagattgttccaatgtagttaaatggaaagaggtagatactctggcagagttctcagatatttaaattttattttctgtcagatggaatcaatgctgacaaattcaaaggaattctgttagagcggggtaagatatcatctataaaatgcatagcatactgtgtggcacatggtagaatatacacatattaactttctcattataattgtagaatattaaagagttttgttattgttactcttgtgctttttgtgttcatttttattatttaatcaacctctttgaagtaataattcatttttgtaatattatttttccataagttccaagaaagaaacaggagtccacaggggtattttgacaaggagactcactgggggcaggtactacagggagaatgggttgaaatgaatgagatcaatgtcacagatgtctaaaggaaggaggttgcaaagttgttcaatatggaatattttttcaacataaatgctgggtattgtgtaatatgatatttccttgtaacctcataaaacattagtgataagaaagaaattagtaaatgcatacagaaatgggattgcttatgtataccaattaaagactaaatagcaggcatttcagtgtaaacaatactggtgaggaaaatctgacagctaagaattttttgttgtcgttagtagctcattatgctaaaataaatctctttaattggatgactttttattctggataacttaagttttattttattggaaaatgtataactgatacagcataatggttaagtacatgggtactaaagagagattgcagtgacgggggaagggagagtctattcctggctctgccactcattaactgtcatcccttggccgtgctacttattatctttgcctcagaactcttctgaaaaaccaggataatgatactacctgtctcgtaggattgttttaaagatgaaatgtgtaaatattcataaagccctcacgatgatgactggggmatattaggcgctgaaagctcctatttattgggaaaaccaatattaacaacattcatatctgcactaaatcctcattgaaatatgggctaactaaatgcctacaaaaaagactgctgagtagaaatgtggtcataaagttaattatcaatgagtaaacaatttataatgatgaagataataaatgtaatgtcatcacactgaggaaaaaaacagtagtctttacttagtaactagtacaattatgagtttctaacctcaccggattttttcagactttttatcaacttttcgatggtaacttgaatgagcatgtaaaagtatgctacagaataatggagaggatggaaattaaatggcagtcttactcttagagttcagaaacacactttgagacatgaatgtgagtgcagatggtttatgtggtaatcatgaagaaaaggagaaatgagagagataaggggagataatcaatacagtgtgcctccatgagaaatttactgctgtggtaaacctgggcccagtcccactggggacctttagaaatgtatttagaagccaacttagtgcttgtccacctaagagttgaaagatctgaggtatctgtctaccaagtccaccccatcactctccccacatggtaattttctagctcctgcggcttgtcctgtgtttgaccagacctgcccctgcagccagaggctgtactcagcagaatctgccacttgttttgtaagaaagagcttctactccaggcaagatccttgggttcaggcaagatggatgcctgaattggcctcatactttggacagcagtgcatatcacaaactccttaacacaaagaattaatttttcctttgggggctcatatgaaaaattttttgaactttggtaacctttaagcatgagaggtttggtatggaattctgtgtgagtggaactgagccctccctgtcagggatgtgagattgacagcacagaagtgaatgagcaggaaaaaaaatcacagccactctgtgaagccagaggatgaatatgtgtggcttcttttgc

SEQ ID NO: 678158 - DNA, 1055 bp, Homo sapiens
atttctgagattttaatggcactgtatattaggcagttgggattgggcaggaaagtgtggatgtttgccaaaacagaatgtaaatttgtagctagaggtggggtgcagtgaaaattactgaaggagctgaagttggaagggctaagatggtgggaacagggcttggagccagggggaaagcaagacacaagccagagctgaaagaagagtgggaatggagccaaggctattattaagacagtagaatggaagtttcagagagatgggaaggaaagagagatgagactcaaatacagcattagggactacaccatggaaaggggtgggaaaacaagccacagttatacaaaccatatgaggttcatttttctaataagtagacttaaagatacatgtaacaaaaattaaaacaaaaaggcctaggacagactttccttcagcatataaactgagcattcaatggccaactgtagakgaaaggcatacagttcattcatctatcatagctttgtttgccatgatttcatgtctgttttttcattgttttatcttttttggataataaacacttttttttatttgagatggagtctcgctctgttgcccaggctggaatgcagtggtgcaatatccactcactgcaagctccacctcctgggttcacaccattctcctgcctcagcctcctgagtagctgtgactacaggtgcccgccacaatgcctggctaattgtttgtatttttagtagagacagggtttcaccatgttagccaggatggtctcgatctcctgacctcatgatccacctgcctcagcctcccaaagtgctgggattacagacgtgagccaccatgcccggccaaatagtaaacatttttaacaacttctatcacatgttcaatttttatactattgcatttgcataaaaaagaagaaattaaaaaatgcactagataagaatgtagtggaaaatcagtgttagggaaaagagagcaagttttttatgctaccatccatttttcctgttaaattaattaaaaggaggctgccagcc

SEQ ID NO: 678159 - DNA, 2289 bp, Homo sapiens
ggaacatgtttagtttgaggtgtcaatttgctatcttttgaagatgtcaaaaagtgcttacatataaatctggcaattaaagaaatgcaagaggcccaggaatatatgagagaaataggatttatagattatgtttaaagtcacgatgcaggataaagtgactttgacaatgcacaacttagataagagtaaagctgatccctctcttcccatttgtgtgttgcaaaaatgataaggctgtttccatctcatattcaaattagtaattaacctttaaaacactttacctagggtcataatacactgactgaaaagatgccacacacataaagagaacacatttcgtagagataatacaaataggaaagatgttaaggtcagagagaaagtaattttacctgataataacaatctgaatatatattatttaggaagacttgaaaaccttcgacggaattaatttaacttttgatgaactcattagtgaagcataggacttgataaattgtactgagtagttattactgctgtgttacaaattaccttaaaatttagtagcttaaaacagcaaacatatatgtctcacagtttttgagagttaggagtaacttagctgagtggttctggctcagactcttatgaggctgcggtcaagtcgttggtcagggctgcagacctagctgaaggcacacctgggaaggatttactaatgagctcactcaagtggttcctggcagttgtcagtttcttaatgattattagtcagaaacttcagttcctgggcacaaaagatctcgacagagctgttcataacatagcagcttgttcttccagagtgagtcatcaaatgggggaagagaacttaagctcccctaagacaaaagcgcaattttttaatagcataaccttggtacttatataccattgcttatgctatattttattgattataatgtggaaggatactaacaaggatctgaataccaggggctgggagcattgaggctcctcttggaggcagaccgccacagttggtctttgttgaccttatgaaattgtgggagctagttaagcagtccagtaagcccgttgtcttcacatatgatgttagagtttgaagtatgcaggacacccggtgtggaagaggagatagatgtaacatgggagaggtcaagaacaagctggaacctatagaagcacaagctgggaacccatgaggcaggactaaaatatatgtcagttcttattgcttgtgtcattggtggtgtgggcatcctgagaagccaaatgtctttgtctcagggctaaacacgtgggcccagattctctactgctgaaggaggatctcagggaaggcggagcagtcacagcactagtgcctatcgcacaatcctgagaggagtgagcacataaatgacagtaggtgtatgctatcaaatgactcctgctttatttcaactttctcagcctttcacaagaatctctcttgtggtcaactctaaccaaaaatatatggagaaaggaattctgggaaatgtagttcattctagaaaaggtatcatgttacaaagccactgcagattgtacctgagaagcagagttctcagtgtctgtatgtaacaatggaaatttgaaaagcatccaagagattctagactggataaaaaggataaaaatatactttataatcatgctaattgagagtttttcctagtttctttgtaagaagcaattaacaacaaatattactattaagtattttgtattcctcattatttttacttatataatttataaacatatatcacatataatgtagtgcattatattctataacaatagcatatatataatatacagactattggtaacagatatttatcaacagcttatattcctgaattaaargtgtttacgtagggaatgtaggtatatctgaaaagcctggataacaattcagagcacggatttcaatatctcccatagaaaaaaatagtaaacaggtaaacaaactgtcctgttcttaccccaagtaacaaggtttatttctagctgaatgggcagcatgtgatgtagactttcaacattattgattatttttatcttctatctttttccaaaagtgaggtgaatatacctactcatgtttattaattttagctttactaagaaaatacaaagcagagattatgatagactttcttatgggtattttccttctgcttcattttgtctcctttaacacttctagtggtatttggagagttgtgattgcgggatttttaaaaa

SEQ ID NO: 678160 - DNA, 687 bp, Homo sapiens
gcgcaagttgcaggaaagattctctgttctccccaggtcctggcaggtgtgagatagaggtgcaagcaagtaaaaagaacaccttgatttcacaagggtatgccaacggtgaccttcagtttgttgtcccagcatgcggcaccatagcctatcggcctgcaggaaagcccctgcagacagggaggyttgctgggaggctggggcagatgctggtggcctgtgctcaacttcacacactggcattagcactggaggggattctactcaaccttccagcaaacaaaaaagcattctttatgggagggcccgggcacggtggctcacacctgtaatcccagcactttgggaggctaaggcgggtggatcacctgaggtcaggagttcgagaccagcctgaccaacatggtgaaactacatctctactaaaaatataaaattaggcaggggtggtggcgcatgcctgtaatctcagctacttgggaggctgaggcaagagaatcatttgaacccgggaggcggaggttgcagtgagctgagatcgcaccattgcactccagcctgggcaacaattgtgaaactctgcctcaaataaataaataaagtgagaggtactgcaggagatggtgtttctaagagcatggagagatggtaaagaaagacaagttgggaattgacagagaggctgta

SEQ ID NO: 678161 - DNA, 687 bp, Homo sapiens
gcgcaagttgcaggaaagattctctgttctccccaggtcctggcaggtgtgagatagaggtgcaagcaagtaaaaagaacaccttgatttcacaagggtatgccaacggtgaccttcagtttgttgtcccagcatgcggcaccatagcctatcggcctgcaggaaagcccctgcagacagggaggtttgctgggaggctggggcagatgctggtggcctgtgctcaacttcacacactggcattagcactggaggggattctactcaaccttccagcaaacaaaaaagcattckttatgggagggcccgggcacggtggctcacacctgtaatcccagcactttgggaggctaaggcgggtggatcacctgaggtcaggagttcgagaccagcctgaccaacatggtgaaactacatctctactaaaaatataaaattaggcaggggtggtggcgcatgcctgtaatctcagctacttgggaggctgaggcaagagaatcatttgaacccgggaggcggaggttgcagtgagctgagatcgcaccattgcactccagcctgggcaacaattgtgaaactctgcctcaaataaataaataaagtgagaggtactgcaggagatggtgtttctaagagcatggagagatggtaaagaaagacaagttgggaattgacagagaggctgta

SEQ ID NO: 678162 - DNA, 1913 bp, Homo sapiens
ttatcataagacctatgaggggatgcacaaaaagggagtaatactttgacaacttcgtttatttcttttgtgactatttgttccttcattgttgttttaacttcttcctttttctctatttttaaaatgtatatatttcctagaaaaattatatctttcatcaagtttttccaagtagattggcaaagaattatgaataatattctctgataatttttaatttcttactggcctatagtcataacatttaaatttttactatgtttttctcgactaaaacagccagattttgtctgtacttttcactgaaactgatcttagattatttataaatcctatttatttctattttttcatttattattttctactttgacatttatgaattctccctgctttctttggtttattttgttgctacttttctagcttcttgagttaaaattttaatttacttgattttattctttcttgtttatcaaataaggtctttaaatttctgaatgtgtatgtcttggctgtgccctctaagcatccatcttttatacaggaatttatagacacacaagcacaagttctagtttcagtttttgggaaatgtatctaaaagcccatattcaaaagagataaatgtgcaagtctgagaaatttgagaagtatggtgaaatgtccattagctgtaactaactggaatcatttggttggatttgtgtgcatttttttcccttttaaaagcaaattgtatgggaaagaaaccctcacatagcttatgcattacaattttggaatcttcaaggggattacttgggtcaatgcatactgattctaaacttccatgcttttttcaattttttataatgatcaatcatgttcagaaggatattctgaggcactgcaagattatcttcagaagttacattactatactagtgttaggaagtattacactatttactatactagtgttaggaaatattataaatatattcatataaggattggatgaatatctacaaggattttgacaatgagaagtttctattcaattcttgacaaaatacttcattctctgacatttaaattaaacctagttgtgtagtgattattatatatcactaataataatgcttacatttactgcatacttacaatgagtcagttagtattctaccactttttgtgtattttcttattctttaaggcaacctcatgaaaaaggcagtgatgaagagatgaggcacagtggttaggtcacatggccactcggggactcagacccaaactgccccaagagcccatgttcttaattgttttcctttyctttttttttttttttttaagttggagtctcaccctgtcgcccaagctggcgcagtggcatgatctcggctcactgcaacctctgcctcctggttcaagcaattctcctgcctcagcctcctgagtagctgggactacaggcatgcgccaccaggcccagctaatttttctttttttttttttgcatttttagtagagatggggtttcaccatgttggtcaggctggtctcgaactcctgacctcaaatgatccgcccgccttggcctcccaaagtactgatattataggcatgagccactgtgcccggcctcttaattctttatgacactacctagtaatgggttgaaaaatgtgaggccacaaaaccacaagagaaatgccctgtgtgaatttacctttggcagggatgaggcaggataatgtgacccagcaatgtggcaacataactctttgtaaagctaacccaccaatgtgggtgacacaatgactccccagctcagagacacaatcccttaaagaagatctgtgacagcccctgccatcgcaggaagggatgatgtccgttctagcattcacatgaacacctggact

SEQ ID NO: 678163 - DNA, 982 bp, Homo sapiens
aaggtgacagtggctctagaaacgtaaattaggtgaagtactaaggagaggcagctcttgcactggccatataatttccaaaacttccttgaaagtgaacactatatttatcttaccatcaatcaagcataatcctgaatatgtagcaggggctcagtacattcatgttaaattaagtggatgaaaaagtaataaatccagagagaccttacaaccagaaacctttacttccaggaaacgttgtagattcttctacagtggtcacctggagggacgtggtcacacttttgtctagggtgatatataaaggaagaaggatcaaattaaaggtttctagaaactgtttctaactcttaattgcttatactccacaaaagaggggtcaagtaactgcaatatgcaccatatgtcatgtcttctgtattaaataacactgtatcattaaactccttttcttgcataacaaacctccccatcatgggtgcttaaaataatagcaatcatgtattttgctcataagtatgagggttaatgaggctcaactgggtgcaggatttctctttagattatagtcaggcaatgaccccagggtcgcattaaagccttcttcagtcattttgatacaactgcgttaggaagactcagacagatgggtgctgttctcctctccccctcctccttcccttacctctcacttgtctttgcacatggcagtctctggatagactgaatttttacatgatagttgaacattctagagtgaataccagcagaggcaattttgtttttctaacctatcctcagagtcatgcgacatcacctttgccacattctattcatctagccattcccaaaagctattcaagttaaagggaatccaccttctgatgggaagagtgccacagtttactgatgtttaaaaaccaccaaagactrtccccttgccaaaattatttatattcctcccaaacgcattacgttc

SEQ ID NO: 678164 - DNA, 1000 bp, Homo sapiens
gtctgtgagcctttctgctgacggagatctttttyatgtatgttttacatttaaatggaatgatgagtatccttaaaaaaatgttatctctagaattagatccttcttggttccataaggatgatttgtgacccaaaatttgaaaagaattttgatttggttgtaagaagagaagcacatcttgaagttatttcaaactttgtcaaacttctttaatgaataaagtgccatctttcatgcttagtttcttagaatgtcataaatctataacctgaagtttctaaaacactttcattttcctgcttagagaggaagggagggcaaatatcattaccttcatgttatacatgaagaaactaaacttcagagaggttaggtgacttgcctgaggttgtacagctaataagtgacagagttagatgagagtgaagtctttgctgatttcatctgatattctttctgtcacactttcatgcttgagaactaggaacaagaaaggggaaagtaacaagaaaaaagaaggaatgagactaatggatacttcctagggtatcccagctttccaaaaagtaaaacagttggaaaagaaaatctactctgtttttatcttttaaagccctcacagtgttatataaaatgaaaaattaatgagcacctgtaaaagatttcattgcccagctctctgaggccacaatttaaagttaatgttattttctgtattaatagctgctcccaatgatgtttcccttttaagttaatgcagatgccaggtaatttggaagagaccaaatagaccaggaggagcagctcagactgctcactcagcagccctctaatttgaaaagagagcttcaggagtagttactacctttgggaccttgtctggggttattagatgtacacaggctactccttaagaacaacatcccctgtttcttatccttcagaaaaatttgcagctcctagtaattgtagaatagaattccattatcacagtact

SEQ ID NO: 678165 - DNA, 572 bp, Homo sapiens
ttttgaaaaaataaataaataaatattgaggaagtattttatagtgttggaccaattaaataatcattagcaaaaataagttgctgctaatacagcaattcattgcagatggaacaaaaattcaaagaaagcaccaaaatactaaaataatagataggtgaatacgttttcattattagccaagaatgggaaaagccttcctaaacatgaaraacaaaatattagccataaagaaagaggttgctaaatttgaatacttaaaatcaaaacattctttttaacaagtcaaagtagaaatttttaaattggaaaaaaattgcaacacatgaaacagaggaatatcaatatgaaaaagagaataactcaacagaaaaatggggaaagaacataagccagcaatttatattaaaacaaatataaatagcctgtaaatatgtgaaaagatagtcaatatcactcataataaatgcaaattaaaacaaaaaagtataccattgtttacagattagcaatgacttgaataatttcataatacagtacctaatcttgaatcttatgcattgtcagtgaga

SEQ ID NO: 678166 - DNA, 646 bp, Homo sapiens
ccagcggatggatcagatttcctaaagaggttgtgtaggcaaggcaaatatgactgacatctctcaactaggcaggtggccagagacccagagtcgtgttagaagagatatgctatatgccagaggcttctaggacagaagtcagcacactacttctgtaaagggccagatggtaaatactttaggttttgcaggccagacatgattgcagtgcaaaagctgccatggacaataagtaaaagaataggtgtggtgatgttccaatacaagattacaaaaacaatataacaatataaaaacagacagatggctggatttggcctgagggctgtactttgcagactcttgttctaggacaaaggcctcatcagtaaatagaacacttatccatattgctagcaaactggcttcaggttctctgaacaaacgatattattttgtttttactgatttcttcttgtctttaatcattaatgaattgcagtgaccttgctgttatgatgtagaacatcctgctaaacagggaatgtaaatactttgctatatgataaggagggtgcttgaagaaccaggttatacctatcrgagccgtttaaatgggagtgagtgattatgctacctattgctaaagtggtgtaattatcca

SEQ ID NO: 678167 - DNA, 1930 bp, Homo sapiens
ctgctctctaacattctattttgaactcttatctgtcttggtctccctggactcttacctcctgtttcctcaacttaaattgtctaccaggctctgcctcaggtaactctccctacaccacagcctgccaattctttcaaggcagttagctagggtaatggtagggctcatttcactcatttcctctctctcaggaaccactgttcttcattgcctgatgtccagggtcttaaaaactggtttaatgtattttatctttgtcttttttgttgttatttctggtaggagggtaaatctagtccctgttactccatcttggcagaaataaaaagtctaggattgactttaattaatctagtttttgacctccttttttgggaggagactgagtggttcatatgctgacaataataaagttaatttaatttctgcaataggaatctgtcaagtaatatatgtcaattaggagcttcactgagaagtaatgccaggtgatatttcttacctttttctctacttagctgatcctccagtattggtttggctgggtatcacaagctgaattacagtcatgccaccatctatggctaatttctgaatcttctatacccaatttttactaatttgatacaataatttctaagcatatctttttaaataacgtgacttttatttgyactcaccttggcgaacagcatcacttactactttttcttgttcctttaagagaaaccttgtttggtcaaaaataacagtggcaaatttccaattagcagtagggagggtacacaaggatacaaggttttttaagataggagaagctgctgcttcgaggaggcaaaatgcttggcactggctatctgcaaaaataaaagcattaatggcagtgttttaataaagatggtatgctctttttgatgaaccaattaaatgttatttcgtggagatccgaacttctatctgaattattttctgagttaaaaataatgagattgtataaaaacttattttaagatatttattctaaataaactaataaaaacaaacatggaattatataattttatggctatattatttatttatttattcattgagacagagtcttgctctgttgccaggctggagtgtagtggcgccatctcggctcactgcaacctccgtctcccggattcaagctattctcctgcctcagcctcctgagtagctgggactataggcgtgcaccaccacgcccagctaatttttgtttcatcatcttgtccaggatggtctcgatctcttgacctcatgatccgcccacctcggcctcccaaagtgctggaattacaggtgtgagccaccgcgcctggcctatattatttattagagaggatttattccataattaacttgacatggcaaatataaagacccatataacatgaactgcatttttttctttgccattctccactgttagcatatgatcttaagccaaacaatgaaaaattttttccagttatcactagaataacattatttaaagatttgcataatcatctagagaccaaaagaatgaaaagatacttgagaacctgggtcatatttccttactgattttaataatgaatctgatgttcttaagcaggttgttctttaggagtcaaagaatactcttctttatagcataacaaaaaaatcaatataggaatcaatagaaacttatttacatcactctgatagcaggtaagagaacagagagagcatgattagcagttcattttccagactgggcagaagagtccgaggaggtacagttgttctcagattgatatagggaagcagcagcagtttaaatgaaagaagaaataacactgagtcgcttgggtagggcaatggggagaggcaggggtagtgaacagggcattccagattgggatataacttg

SEQ ID NO: 678168 - DNA, 636 bp, Homo sapiens
atcatttctagcctttgatttaaagtgagagttgtgcaactcctcctttcacttgaagacttacaggccactgtagggttattaattggcctaattttagtaccgttgtgtctcgacagacatagagtgggccaaggaaagggagagagataagggaacagctggttagtggagcagtcagaacacacacatttatcaattcaattcacttttttgtatgggcagggtctatggcaccccaaaacaattacaaaattaaaatcaaggtaactgagcacagataactataacagatataataataagaaaaaaatacttactattgtgataattaccaaaatgtgacagagacacaaagtgagcacatgttcttcaaatatccatataatgtattaaatctataaaattatgtaaagtctttattgtgatatataactaatgagattaaaataaaacawatcattcatgttttatatttttgatatctaataaattatgataattctaaagttggaaatgctgttgggaaatggctgcaaaagaattgcttgatacaagattgccacaaaacttccatttgtaaaagacacaattatctgtgaagcacaataaagtgaagtacaataaaatgagatg

SEQ ID NO: 678169 - DNA, 1894 bp, Homo sapiens
caactgtatcctattagtataaatagtagagtctagtatacgggaaattgttttctctacgtgcatttccttcttttgaaagcccatatataatactttttttgtccacagtaaaagacacattgattggaatgttcctcttgttagataatctctctttctgacctcaaaatgctaggcctcttggaatcatgctgggggctacagtacataaaggyatgggaaagaaatctagccttttctttatgcccttaccaacctttcataagcctcctttaacttcttcattttatcagctaaggtacaaagagccaaggtcagacatttggtgacaatcaggcagaaggaaaagagtaaagaggaccctattctctttagagctggcatttcctctgtaaaataataaagcttttgtgaagagcctcccaatgcaaataacaatacaacattcatattcccagatggcacactgcagtcattcatctttatgtaaccggatggatgattagtgtgggttagcaattgaagctaaattatctgtcagtttgtctttagaccttgctgataacatcagcccaatatttgtaataactgatgacatgcacttatgcatagaagagaagattaagcttactgtctctaaaaggaaacgtcaaagacaaaaaacacaaagatggctttgggtcccaagcttctggcatcaatgaaaggctcttactggccaacattctgaaaatggtacatgctttttctggctaatggcacaatgattctcagatgggtgtcattttctctggctctttaatcaggagcaaaatcaagaggaaatagctttattatgtgtagcttcaaatcagacagcccttcgctaggtaatcatcactctgggaacatttcaaaacattacagatttgaactttccagtattaggaacatccttatttggcaagtccagataataagggtcctggtcaaattatggacagtattctgggtatgatagtgagtttctctatgaggatttcaaactataaaacattccagttcattaataactagtatgacttggaggcgagtggatcacttgagcccaggaattcaagaccagactgggcaacatggcaaaatcccgtctctaccaagaaaaaaaaagttaataaaaataaaaactagtatgacttgaatgtttaggacaaaaacaaagcacaaggtgccatagtacagtacaaaactcaatgacactttctgtctaaagatataattaatactaaaattatactaaaacaagatatgctttaggattcagctgatcagcaagattagcaaaacaaattgttatatggtaaatgtatgtgactattacttaatagaatcatattaacctgctatgttttagatcagaaacaatcgaatcttggcaatttcatactttccaacctactataaattaacagatttctaacgtcacgtatggaatggttgttgtgtttttcttaaaattaatttgctatgggaagctttctttatcttgatactttgaagttagagccttaagacctggaactcctaatatcttacctagaagaaagccacgtttgctttccaagttacttttgtgatttccctggtgatcggtggcagcttgctctctacgtttgcagcttctgcttgctgctgagtgataggagatgaatgatgaggaggcaccgtgtgagctttcttgctgagcaccactaggagccactgagactccacagccatgtggcctctgaagagctaggctctgtgacacacttggcagactggagctcactggtgggaaataccaatctccattgttgctgcctgtggaaattgtacactaaatggcaaaatgggagtgtagtacccctcc

SEQ ID NO: 678170 - DNA, 1894 bp, Homo sapiens
caactgtatcctattagtataaatagtagagtctagtatacgggaaattgttttctctacgtgcatttccttcttttgaaagcccatatataatactttttttgtccacagtaaaagacacattgattggaatgttcctcttgttagataatctctctttctgacctcaaaatgctaggcctcttggaatcatgctgggggctacagtacataaaggtatgggaaagaaatctagccttttctttatgcccttaccaacctttcataagcctcctttaacttcttcattttatcagctaaggtacaaagagccaaggtcagacatttggtgacaatcaggcagaargaaaagagtaaagaggaccctattctctttagagctggcatttcctctgtaaaataataaagcttttgtgaagagcctcccaatgcaaataacaatacaacattcatattcccagatggcacactgcagtcattcatctttatgtaaccggatggatgattagtgtgggttagcaattgaagctaaattatctgtcagtttgtctttagaccttgctgataacatcagcccaatatttgtaataactgatgacatgcacttatgcatagaagagaagattaagcttactgtctctaaaaggaaacgtcaaagacaaaaaacacaaagatggctttgggtcccaagcttctggcatcaatgaaaggctcttactggccaacattctgaaaatggtacatgctttttctggctaatggcacaatgattctcagatgggtgtcattttctctggctctttaatcaggagcaaaatcaagaggaaatagctttattatgtgtagcttcaaatcagacagcccttcgctaggtaatcatcactctgggaacatttcaaaacattacagatttgaactttccagtattaggaacatccttatttggcaagtccagataataagggtcctggtcaaattatggacagtattctgggtatgatagtgagtttctctatgaggatttcaaactataaaacattccagttcattaataactagtatgacttggaggcgagtggatcacttgagcccaggaattcaagaccagactgggcaacatggcaaaatcccgtctctaccaagaaaaaaaaagttaataaaaataaaaactagtatgacttgaatgtttaggacaaaaacaaagcacaaggtgccatagtacagtacaaaactcaatgacactttctgtctaaagatataattaatactaaaattatactaaaacaagatatgctttaggattcagctgatcagcaagattagcaaaacaaattgttatatggtaaatgtatgtgactattacttaatagaatcatattaacctgctatgttttagatcagaaacaatcgaatcttggcaatttcatactttccaacctactataaattaacagatttctaacgtcacgtatggaatggttgttgtgtttttcttaaaattaatttgctatgggaagctttctttatcttgatactttgaagttagagccttaagacctggaactcctaatatcttacctagaagaaagccacgtttgctttccaagttacttttgtgatttccctggtgatcggtggcagcttgctctctacgtttgcagcttctgcttgctgctgagtgataggagatgaatgatgaggaggcaccgtgtgagctttcttgctgagcaccactaggagccactgagactccacagccatgtggcctctgaagagctaggctctgtgacacacttggcagactggagctcactggtgggaaataccaatctccattgttgctgcctgtggaaattgtacactaaatggcaaaatgggagtgtagtacccctcc

SEQ ID NO: 678171 - DNA, 620 bp, Homo sapiens
atactatgcagccataaaaaatgatgagttcatgtcctttgtagggacatggatgaaattggaaatcatcattctcagtaaactatcgcaagaacaaaaaaccaaacaccacatattctcactcataggtgggaattgaacaatgagaacacatggacacaggaaggggaacatcacactctggggactgttgtggggtggggggaggggggagggatagcmttggaagatatacctaatgctaaatgacgagttaatgggtgcagcacaccagcatgtcacatgtatacatatgtaactaacctgcacattgtgcacatgtaccctaaaacttaaagtataataataaaaaaaagaccacttaatgcactgtaaaagcctggatttctcaccccaaatcaggacaactctaaaaggccattctagttttagagctgccacagtgtaggtagaggctttgttgtgactgcccctcagcccaacttctccttctgcccaattttcttcctctgtaacccccactttaatatactttctgtacactagctccaactcagaattttcttgctggggaacccaattgggacagtattactttgactaacagtaaactcgttatc

SEQ ID NO: 678172 - DNA, 941 bp, Homo sapiens
  misc_feature 163, 167: n = A,T,C or G
gaaaattttcacgtatacagaaaagttgaaagactaacataataactatccaattgccactcccctagattcaccgattgctaacatttgccatgtctgctttatctatgtgtgcactttttttgagccatatgaaagtaagttgcagacgttatgacacttncctnctcatacttcagcatttattccctatgaataaggacattctgttacataattccttgactggtgcctcacctaagaaaataacattattcaaaaatgacatcaattataaagtctatactaacattttcccagttgcccaaaatgtcctttctggcgacccaccccaaccccatccaggactcaatccagattcactcactgcatgtgcctgttatcaccagtgatctttcaacaaatggtaaagcttctctgagctcctttaccaaaagcgcatcctgtcagttaagctgaagttcagagatgaagcaccaacagccccatcctcgagagccggatcctgggagctttaaatctcattttccaaagctaggcagcagtgagaggtctgggtgccaagccccctctagctcttgtgatcctccctcatacatggactcaacccccaaatcctccccaccgtcctcagccccatacctcctggctcatgcggaagggggttggaggcccaagccttcatagccctgacttgaactcaacctcttmctcctcccttttatctaatcctgcaggttgaaagtaacggaagcctacagaaactgatccgcatccgaaatccctggggagaagtggagtggacagggcggtggaatgacaagtgaggagggcgcaggcctcggggccccaggcgggggtgcattgtgctgggaggctctgggaagagggcgagagaagaagacatgtgcattattctgagaaatatagccaggagagcc

SEQ ID NO: 678173 - DNA, 1079 bp, Homo sapiens
tgatatctttacagttaacatggrtatagtgctaagggtatactatgctaaggactattctaactgctttaatacatattaactcctttcatcctcacaagaacccttgaactaggtattagtgttagtcccatttatagatgaggaagctgaaacccagattgtacagctactaactggaggagctggaatttgaacctaggcactctggctccagagtctgtgcttttaaccattacaatctttctttcagtctgtgtggcaaggaggatgggattgtgtagattgtcttcctttagtcagagcatccccttggcactgagagtgaggtcagcccatccaagccatatgtctgttgcccagtggaggaggagtataatttgaatgttggggaggcaatcacatgtctactgggtacttatgagaatcagataagctcgtggatctgaagacatacattaggaactacaagaccctctacaagttttattttttgccacctagagtcctaccagagtagcccataaaagtctgcgggtcattcaggaaagcagactcttccatctacttatccagatcctccttcttaagactccaggcatgagccttgaaggttccacactttggtttttttcatttgtttcccttttttaccacccaattttatcctgcttatttgggatctcttgggtcccagcctaccattgtattgactgcactacccacagctccaacaagtgaggccagccagctaaagacagttcatgagttggtacagccctggggcagggggacaagggaagaggttaatatgcagactgatgcttgggcctgcaggaatggagcagcctcccagagggcctgtctttagctccaagcccaaatcatgttctcttccctatgtccctccctgcatgctttgaaaggttattgactccatcactgactttgggtaagacacttcccctctcggcccaggtttcctcatttttaaaaagaatgggtgatgatatttgttgaagctgttgataggtacctatgatctcactatactattttctctacttgttataatttcc

SEQ ID NO: 678174 - DNA, 1079 bp, Homo sapiens
tgatatctttacagttaacatggatatagtgctaagggtatactatgctaaggactattctaactgctttaatacatattaactcctttcatcctcacaagaacccttgaactaggtattagtgttagtcccatttatagatgaggaagctgaaacccagattgtacagctactaactggaggagctggaatttgaacctaggcactctggctccagagtctgtgcttttaaccattacaatctttctttcagtctgtgtggcaaggaggatgggattgtgtagattgtcttcctttagtcagagcatccccttggcactgagagtgaggtcagcccatccaagccatatgtctgttgcccagtggaggaggagtataatttgaatgttggggaggcaatcacatgtctactgggtacttatgagaatcagataagctcgtggatctgaagacatacattaggaactacaagaccctctacaagttttattttttgccacctagagtcctaccagagtagcccataaaagtctgcgggtcattcaggaaagcagactcttccatctacttatccagatcctccttcttaagactccaggcatgagccttgaaggttccacactttggtttttttcatttgtttcccttttttaccacccaattttatcctgcttatttgggatctcttgggtcccagcctaccattgtattgactgcactacccacagctccaacaagtraggccagccagctaaagacagttcatgagttggtacagccctggggcagggggacaagggaagaggttaatatgcagactgatgcttgggcctgcaggaatggagcagcctcccagagggcctgtctttagctccaagcccaaatcatgttctcttccctatgtccctccctgcatgctttgaaaggttattgactccatcactgactttgggtaagacacttcccctctcggcccaggtttcctcatttttaaaaagaatgggtgatgatatttgttgaagctgttgataggtacctatgatctcactatactattttctctacttgttataatttcc

SEQ ID NO: 678175 - DNA, 1079 bp, Homo sapiens
tgatatctttacagttaacatggatatagtgctaagggtatactatgctaaggactattctaactgctttaatacatattaactcctttcatcctcacaagaacccttgaactaggtattagtgttagtcccatttatagatgaggaagctgaaacccagattgtacagctactaactggaggagctggaatttgaacctaggcactctggctccagagtctgtgcttttaaccattacaatctttctttcagtctgtgtggcaaggaggatgggattgtgtagattgtcttcctttagtcagagcatccccttggcactgagagtgaggtcagcccatccaagccatatgtctgttgcccagtggaggaggagtataatttgaatgttggggaggcaatcacatgtctactgggtacttatgagaatcagataagctcgtggatctgaagacatacattaggaactacaagaccctctacaagttttattttttgccacctagagtcctaccagagtagcccataaaagtctgcgggtcattcaggaaagcagactcttccatctacttatccagatcctccttcttaagactccaggcatgagccttgaaggttccacactttggtttttttcatttgtttcccttttttaccacccaattttatcctgcttatttgggatctcttgggtcccagcctaccattgtattgactgcactacccacagctccaacaagtgaggccagccagctaaagacagttcatgagttggtacagccctggggcagggggacaagggaagaggttaatatgcagactgatgcttgggcctgcargaatggagcagcctcccagagggcctgtctttagctccaagcccaaatcatgttctcttccctatgtccctccctgcatgctttgaaaggttattgactccatcactgactttgggtaagacacttcccctctcggcccaggtttcctcatttttaaaaagaatgggtgatgatatttgttgaagctgttgataggtacctatgatctcactatactattttctctacttgttataatttcc

SEQ ID NO: 678176 - DNA, 606 bp, Homo sapiens
ccatttcattcctcctcttctctttcccataccatatagtgtaaccatcattggtgttagagacaaaaataatttcttttaaatcctgattccatcacttattaataatgtgacctttacttaaactccaggaaattttgttttatcatcaactataaagtaagcatgyaaccatgtgttggttttgccaggattaagtaaagatttaattattgtttagtatttattactatgattttaataatatgccaggaaaatacaaggtgattgtacaatggtaactttcattttttttctttttatcatttctattttctatatgtattttttcttatttatttttaaataagaaatattttaaaatgtatttttaattgtatttaagaaatattttaaaatgcattttacttttttaaatatttgagaaaatgtaaaatacatacacttcaggattctacataagatcttgattttagtgtttgtctgttatatacttttgtgtgggctttctattattgatgctggcaaagcttgtccaaatgtggctttctactagtaaatgaaggcaacataaagtgttatgcatgactcacttggctgacacac

SEQ ID NO: 678177 - DNA, 1564 bp, Homo sapiens
tgtgtttaatatttaggaataaataaacagctgttacccataagtcattttctatacagtatctacaagtttattataccatgaaatgaaaagtttgtaaaactttgagctaggaaacgccaattaatatttctctagtgctattcatttttgcaacagctctaatgcagtagtaacaccatagttatcaaatctgaagacctaggttaaaatttatttttatcacttactttgtcacaataagcaaataacttagcctttcctaatttaaatgttcttaccttgaaaacaagaaaaatatatttctgcttgcaaagaataactggtataggacttggcctcccaacaaaaacacctataaaatttgatgaaatactgtgtcattattttgacactgaaaaagaggcagtttaggaccattatccttgaggaaaagaaaaacaaaaaggtgagctcccagactgccctacagttgccctagttttctgcctaagggtgatttactgcagggagtagagcagcaagatggaaccaaacccaaagtcaaagtccagatttgcaggctatggaggccacagggatttataagacaaagtatctgagaaggggaaactgttgagggaaaggccacctaaaagtctgtatggaagttactcagtcctttgtcaatggataggcttgaaaaggcaaagagcaaagcactgtggtttctgacagagaattgttgctgtgggacagagagatgaacagtgaaaggccagcagggtgagggacactggaattacaattcatccagaataaaaagaaattattcagcatattggacttcaattgagaccccagaaagactatatgttttagtaaaaaccacatccaagagtaagggccaagccataggactaagttgaaaagcaaaataaatatgccctaacaacaaataaattcatatctttcccagtctgctttgtgctactatgatagaataccacaaactggatattttataatgaggagaaatcaattggcttatggtgctgaaggccagaaagtcctaaatcaagkagctggtatctgtcaagggccttcttgctctgtcatcatatggcaggaagaaaaagagagggcgagagagacaaattgaaagtaatggaaaaaaccacaattacttttgcaccaacctaataaaaatcccactccctcagtaatggcattaatccattcttgagggcagagcccccatggatgaatcacctttcattagaatccatctcccaaaatttttgcattacaaattaagtttccaacacataccttttgagtgacacattcaaaccactgcaatgtctgactgcacttaaataatccatcagcaatttattagttaaaagaaaaaataacactctttaaaggaattttacattaactacactttctacaattatcacacacaatgttcagcttatacaattattaaatgtgcaaaaaaaaattgaacatgtaatccatggttgaaagaaatagcagcacatagagtagtcctcctttatccacagttttgatttct

SEQ ID NO: 678178 - DNA, 1564 bp, Homo sapiens
tgtgtttaatatttaggaataaataaacagctgttacccataagtcattttctatacagtatctacaagtttattataccatgaaatgaaaagtttgtaaaactttgagctaggaaacgccaattaatatttctctagtgctattcatttttgcaacagctctaatgcagtagtaacaccatagttatcaaatctgaagacctaggttaaaatttatttttatcacttactttgtcacaataagcaaataacttagcctttcctaatttaaatgttcttaccttgaaaacaagaaaaatatatttctgcttgcaaagaataactggtataggacttggcctcccaacaaaaacacctataaaatttgatgaaatactgtgtcattattttgacactgaaaaagaggcagtttaggaccattatccttgaggaaaagaaaaacaaaaaggtgagctcccagactgccctacagttgccctagttttctgcctaagggtgatttactgcagggagtagagcagcaagatggaaccaaacccaaagtcaaagtccagatttgcaggctatggaggccacagggatttataagacaaagtatctgagaaggggaaactgttgagggaaaggccacctaaaagtctgtatggaagttactcagtcctttgtcaatggataggcttgaaaaggcaaagagcaaagcactgtggtttctgacagagaattgttgctgtgggacagagagatgaacagtgaaaggccagcagggtgagggacactggaattacaattcatccagaataaaaagaaattattcagcatattggacttcaattgagaccccagaaagactatatgttttagtaaaaaccacatccaagagtaagggccaagccataggactaagttgaaaagcaaaataaatatgccctaacaacaaataaattcatatctttcccagtctgctttgtgctactatgatagaataccacaaactggatattttataatgaggagaaatcaattggcttatggtgctgaaggccagaaagtcctaaatcaaggwgctggtatctgtcaagggccttcttgctctgtcatcatatggcaggaagaaaaagagagggcgagagagacaaattgaaagtaatggaaaaaaccacaattacttttgcaccaacctaataaaaatcccactccctcagtaatggcattaatccattcttgagggcagagcccccatggatgaatcacctttcattagaatccatctcccaaaatttttgcattacaaattaagtttccaacacataccttttgagtgacacattcaaaccactgcaatgtctgactgcacttaaataatccatcagcaatttattagttaaaagaaaaaataacactctttaaaggaattttacattaactacactttctacaattatcacacacaatgttcagcttatacaattattaaatgtgcaaaaaaaaattgaacatgtaatccatggttgaaagaaatagcagcacatagagtagtcctcctttatccacagttttgatttct

SEQ ID NO: 678179 - DNA, 654 bp, Homo sapiens
atctatgctttatgtggaaatgcgagatctaaaataaccaaagctatcttgaaaaataaaccaaagttggaagattacctcatgacatcatgaggtaatataaagctacactaattaagacagtgcagtagtggcataagtattggcacaaaagtttgatgtaacaaaatagaaagttaaaacatacatacgcatttatatactgtcatacataaatatttatatagtatcatttgacttatgaacagacaatcaaattaaagggagaaagaaaaggtttttctttcaacacgttgtgctatagaaaaatgtatattcatggtgaaaaaaagaaaaagagaagtctgacccttaccttacattaagcaaaacaattgtttagatatagaatgtagactaaaagataaaagaartgagtataggacttttagagaaaagaagaaggaaatattttttatgacttgggagacaagctttttcaccaattcacagagagcaataacttttgaataatatatataacaataaatcagactttgtcaaaaaaaagtactcattaaaaatatcagaaaatcaatgtgtaagtgccggagagcaaagaaaacaatcagcagagtgaagagacaacctacagaacaggaaaaatatttacaa

SEQ ID NO: 678180 - DNA, 654 bp, Homo sapiens
atctatgctttatgtggaaatgcgagatctaaaataaccaaagctatcttgaaaaataaaccaaagttggaagattacctcatgacatcatgaggtaatataaagctacactaattaagacagtgcagtagtggcataagtattggcacaaaagtttgatgtaacaaaatagaaagttaaaacatacatacgcatttatatactgtcatacataaatatttatatagtatcatttgacttatgaacagacaatcaaattaaagggagaaagaaaaggtttttctttcaacacgttgtgctatagaaaaatgtatattcatggtgaaaaaaagaaaaagagaagtctgacccttaccttacattaagcaaaacaattgtttagatatagaatgtagactaaaagataaaagaagtgagtataggacttttagagaaaagwagaaggaaatattttttatgacttgggagacaagctttttcaccaattcacagagagcaataacttttgaataatatatataacaataaatcagactttgtcaaaaaaaagtactcattaaaaatatcagaaaatcaatgtgtaagtgccggagagcaaagaaaacaatcagcagagtgaagagacaacctacagaacaggaaaaatatttacaa

SEQ ID NO: 678181 - DNA, 654 bp, Homo sapiens
atctatgctttatgtggaaatgcgagatctaaaataaccaaagctatcttgaaaaataaaccaaagttggaagattacctcatgacatcatgaggtaatataaagctacactaattaagacagtgcagtagtggcataagtattggcacaaaagtttgatgtaacaaaatagaaagttaaaacatacatacgcatttatatactgtcatacataaatatttatatagtatcatttgacttatgaacagacaatcaaattaaagggagaaagaaaaggtttttctttcaacacgttgtgctatagaaaaatgtatattcatggtgaaaaaaagaaaaagagaagtctgacccttaccttacattaagcaaaacaattgtttagatatagaatgtagactaaaagataaaagaagtgagtataggacttttagagaaaagaagaaggaaatattttttatgacttgggagacaagctttttcaccaattcacagagagcaataacttttgaataatatatataacaataaatcagactttgtcaaaaaaaagtactcattaaaaatatcagaaaatcaatgtgtaagtgccggagagcaaagaaaacaatcagcmgagtgaagagacaacctacagaacaggaaaaatatttacaa

SEQ ID NO: 678182 - DNA, 631 bp, Homo sapiens
taaagcacttacacacaaatcatagtatgtttttccaacttaaaaaaaaatgatttgaacatacatctttgtatgataggtaaaaagcaggtattattatctccctctaacagaaggaggattggatttgtatctgcttcctaagattactttgcacccataactggattgatagcatcaagtctagtgtgcagattattaaattggatgctgagggattagcaaagaaaagtagaaacattctctgccttcaaggatcatattacctgaaggggaagacaatacccatagaaaataggtaggaaaataggtccattgaagctcttytaaacaatcctaaaaatggaccactcaaatattgagagaaaggaaaaatgctgaaattacctctgtaaccaaactggaacttcttttggagatcagcatctgtatttagatgacagctgctctacccagagggctgtacacagggagacaagtcacctcttccaagcctgcagtgctccctaacggccagctgtccggagcatgcagcagaatggcagcatcctgacagtttaattctgagcatcacgtctgcagtttacctggagggaagaagctgaaggcagaatgcatagggaaatgatga

SEQ ID NO: 678183 - DNA, 1000 bp, Homo sapiens
ttcccattttataccatgcaaaaaatcacatggcctttaacattttttattattttacatagaataaaatttattcctggttgtatacaattcagtgtttttaaattaaaaacatgggtccatacaaacactcctaaaatggttatacctaaygatgacccctcccccaccaaaatttcctcactctgtttctttctgtgcaagcctgttcttcctcctcgaaccctggcagccattgatttgttctccactcttcagttttgccttttcctaaatattctatacatgaattcacgcagtataccatcttttgagactggcttctttgatctagtaaatgcatttgcaatatattgatgtattatcagaagcttgggagcacattttcctaccaattatctgaaaggaaaagtaaatgatctattgagaatgtggtatatttaataaaagaaaatacaagcagatacttaatttgctgtggtacaaaaaccacatttttccatcaatatgtaagaaatgaaacaaatataaactgaactctttggtccaaaaggtgaaaacatctttcaattacacagtcaggtgtgacctagaaacagatctaagtctttaccactgtttttatctacattatgtcttgactttctgtgtgttttgcatacccagtaataatgcattaaattattgcttcgtgaattaggcgggattagatagcattgttgtatgtgtaacctatacggtaatgagagtgaaatagttaaacagagatggagtaggtggggtcagatttcatgaatggattttcacttctctgcatagtgagagataattttcagctcaggcctccattggtggatactttgagagaacatgctgtgttgggcaagagcagcagggggcctggatgaagataggagcttggaccaaaaaaggcatgaggatagatagaatcaatctcattcacttacccatttcactctcactaaacctttggggaagt

SEQ ID NO: 678184 - DNA, 1000 bp, Homo sapiens
ttcccattttataccatgcaaaaaatcacatggcctttaacattttttattattttacatagaataaaatttattcctggttgtatacaattcagtgtttttaaattaaaaacatgggtccatacaaacactcctaaaatggttatacctaacgatgacccctcccccaccaaaatttcctcactctgtttctttctgtgcaagcctgttcttcctccycgaaccctggcagccattgatttgttctccactcttcagttttgccttttcctaaatattctatacatgaattcacgcagtataccatcttttgagactggcttctttgatctagtaaatgcatttgcaatatattgatgtattatcagaagcttgggagcacattttcctaccaattatctgaaaggaaaagtaaatgatctattgagaatgtggtatatttaataaaagaaaatacaagcagatacttaatttgctgtggtacaaaaaccacatttttccatcaatatgtaagaaatgaaacaaatataaactgaactctttggtccaaaaggtgaaaacatctttcaattacacagtcaggtgtgacctagaaacagatctaagtctttaccactgtttttatctacattatgtcttgactttctgtgtgttttgcatacccagtaataatgcattaaattattgcttcgtgaattaggcgggattagatagcattgttgtatgtgtaacctatacggtaatgagagtgaaatagttaaacagagatggagtaggtggggtcagatttcatgaatggattttcacttctctgcatagtgagagataattttcagctcaggcctccattggtggatactttgagagaacatgctgtgttgggcaagagcagcagggggcctggatgaagataggagcttggaccaaaaaaggcatgaggatagatagaatcaatctcattcacttacccatttcactctcactaaacctttggggaagt

SEQ ID NO: 678185 - DNA, 635 bp, Homo sapiens
aaaaggatacggaggagagctatttagaaaactggcagctgtaaatttccatttaattgttggatatatgacagatgacaagaaatcctgaggtagacagaaagttcctactggctaaagtattccaccaggatgtgcccttccactttggagtgttatgggatccttctgttctttcaagttagaatgaccactttccgtatgctcctgcagggacgcttattaaaatctgaggccgatgtgttgcctcaagttgtgtkcagtggtgagcaggggacagcataggccagcagctctgtagatagcagtgccctttgattcagttgaagagacctctttatcctcagttttgaatcacaattagcaccagttgttggtagccatttcattttaagtttcattttgtgggcaccaacgtggagctttcattctggcagtctgaagtttatatgacactcaacaagtctacaaaaattataggagggagtgtggtaaggaatgtatcttttaacttttacttctcttccaccactttctcatcatcatatgtattagataatatttgttactggcatcagtccttgtctagcccagccaactcgtggagagaatgaaggcacctcatgaaactggaa

SEQ ID NO: 678186 - DNA, 617 bp, Homo sapiens
ggagttattggactgctgaaattttatattttgtgtgcaagtacaggttatgtcagtgaatctgatagctagcatagcagagactgctcaaggtgtatacatccttggctgtattggcagtttctggttctatttccctcttttatttcctttcgacctgtctttcagtcctccttgtatatttctttttctctttccttctttaccaaacatattttgagaatcaatcacatccctacacttgagcaatcaaaacttgtttacagtactgtcacatatattcattttgtttctacatagttttcattttgccaaacatattagtatacacttattttgttttattttaatacatgttattacatataatatatacacagaaacatgtacacatcacaagtgaagaataattttcaaaaagtacaatgcacctatgtaactagcagcaggaccaagaacgaagagcatttcctgtatactccttgtgctgcatcctagtcaaaggtcactgctcttctgagttccaacagcttgaattggttttgcctgtttttgaaattgaataagtgraattgcctattgtatacttttaggtaaggtttattttactcagttat

SEQ ID NO: 678187 - DNA, 608 bp, Homo sapiens
  misc_feature 508, 509, 510, 511, 512, 513, 514, 515, 516, 517, 518, 519,520, 521, 522, 523, 524, 525, 526, 527, 528, 529, 530, 531,532, 533, 534, 535, 536, 537, 538, 539, 540, 541, 542, 543,544, 545, 546, 547, 548, 549, 550, 551, 552, 553, 554: n = A,T,C or G
  misc_feature 555, 556, 557, 558, 559, 560, 561, 562, 563, 564, 565, 566,567, 568, 569, 570, 571, 572, 573, 574, 575, 576, 577, 578,579, 580, 581, 582, 583, 584, 585, 586, 587, 588, 589, 590,591, 592, 593, 594, 595, 596, 597, 598, 599, 600, 601: n = A,T,C or G
  misc_feature 602, 603, 604, 605, 606, 607: n = A,T,C or G
tattttgtggaggaatcaaatattaatatacttagttcatgaagaaaataaaatgttagtgagttctttcatagtagcgcaattgttctagaaactgggccactcttgaattttatttcacttttagctattcacagggtatcagtatgttagatttataatgatggaatctgactctgtaacaagatatttgttgttagacttgtttgtagagtgattttcctcttttgtgaaataatgtatggttatgttgtacttatctcagtaggattttattaggaaagtgatatattttaggaaacagttggtcatgaagtacatttaatttttgaactcctagtttrtaaaaccaaataattaaaacatttttgacaaaatatttacagcagaatcttggaagttaagaaaacaaaacaaatgtttcttcgatttcagttacaggttttcaagtaaactgataaaaccttatcaacaactcatagcgatatacactatactactgcataannnnnnnnnnnnnnnnnnnnnnnnnnnnnnnnnnnnnnnnnnnnnnnnnnnnnnnnnnnnnnnnnnnnnnnnnnnnnnnnnnnnnnnnnnnnnnnnnnnnt

SEQ ID NO: 678188 - DNA, 1095 bp, Homo sapiens
tacaaagatattgagatttatagtttgtttgttgaaatggtttttattaaagtaatcaataccaaaaaactcttgtttgttctaagtaccttggtcagaaacccgaaacatttaataaaagaaattgaacaattttttgacttaatgtttgctaaaaagtagaaatggaaatcatttaattgccagatattaaaaacagaaagttttctattgctgtaatactcactccccatcagtgtaggagaaacaaggttttatatttaactataatatattccttaaaatatacttaagtgggaaacttaacttctgccgacagttacagtggggaaagttaccactgttctctttccctaactaaataccgtacatagctatcatctggaagtaatagtattacttcagtgcattgtgccagtagacacttaatacagaatatactttagactaaatgaaatccagatcccagtaatactgaaacagaaagacacaggttcctttggttaaactaagtcatagtgtacagtgtactataaattaaatacagtttgtgagtatgtcattagattttaattgaatttgcaattagcatcccaaacatttaaaaatcgtgtgggtttataagtttttacttttgaattttaaaataatagaacctttacccccttccactacccatctcccatagcaatcacatccatttatgttcttatcctaatgaatcagctaaattgggttttaatttacaatgagctggtaagagttaaagaaaatgactcctataaatgtagtaggtgagaggctgagggcatcctcttctaggttattctgctccttcctacctttgttgatgccccacagtcartgttggggaaaattaattaggatttatattccagtcttctctaatgtgttgtcaccattgcacagactcaggacttccagtgcagtgttgactagtaccagtgcacatccttacccaggggactggaacttacccaggatcacaaaaatgacactaggaatgtttctcccctctcagcattcaaatgttctccttatcttttatttttatatatttatttttgagacaag

SEQ ID NO: 678189 - DNA, 619 bp, Homo sapiens
aggcagttacaggagaactatacaaaagaaacctatggcttaatgaactattatagggcgaactattttgaaatcatgaaataggtccagacgcagatgtttaccctgaatcctggaaagctgtgtgacccatctcagtgctaacctccggcctctctctaaacatacccattcctttggcttttatagtaatcatttttttttgcrtttaaaaataattttattgtccaaatgtgccaccttggacacaatatttaagtcttgtccatttatttttaaatttgataagtctttaaaatcttagtctgtaggctcctcttgcttccttttcttcatgacttatctgttgaagaacttgggtgtttgacttacagagtcttaccccagtcttgacttagctcactgcatggcgatgctatagctcagtggtttcccccattcttggtgtttcctacaaattggcacttgaattcagagatgggatcagacttggatttgatgcctttgatgaagactataggaggcacataatgtctttttagctctttttaagatataagcagactttgatgcttactgcccatatctagtaatttattggattacaaaattttggtag

SEQ ID NO: 678190 - DNA, 1924 bp, Homo sapiens
tgatcaaggatgatgacggcaggaatgataataaaactacatagtctttacgtatgggcccaaattaaagctacaaagcataaaaattacagaaacaaatttatcattaacaaatatgtctaaaagacaaagccctattaacattaraagtcatttttaaaaatcaatttatgatctttcatgtaaaaggaatttaataggaaataacagatcctaaaaaatatttgtttttaaaaaaaactaaataaaaatatatgtcaaattagtttgatgtgaataccaaagacattaaacttccttcaaaagtttgtctcatgtgtagaaatgtatataaataattccactgaaaggtaaattttttttttttttttgagacagggttttgctctgtcacccaggctggagtgtagtggtgcaatctcagctcactgcagcctccatctcctgggctcaagcaatcctcccacctcagcttcccaagcagctgggaccagaggcgcatgccaacacacccagctaatattttttttttttttttttgagacagagtctcactctgtcacccaagctggaatgcagtggcgagaactccgctcactgcaagctctgcctcctgtgttcacgccattctcctgcctcagcctcccgagtagctgggactacaggtgcctgccaccacgcccggctaattttttgtacttgtagtagagacagggtttcaccgtgttagccaggatggtctccatctcctgacctcgtgatctgtccaccttggcttcccaaagtgctgagattacaggcgtgagccaccgcgcccagccacacccagctaatttttaaattatttgtagagatggggttttcctatgtgcccaggctggtcttgaactcctggactcaagtgatcctctggcttcagcctcccgaactgctaggattacaggcgtaggccactgcgtctggccgtaaagaattattaatgactagtaagtaaagtggtaagcaacaggaattcagaaatgaatgagtaaaagtccttgacttgacatggaagtaattatactaaggctaaaaaagaatgtggaagtggagtggggcatagtagtcagaggaggcatgctcattctgtctagaatctcagcttaaaggccacactctcagagaagactgtcatcaccctatctcaagaggctacccagtcacctttcaggacagtgcctatcaaattttctgggctttacagttttaaatattgacaatctcaaggagctttggcttatacatgttgtatatatcaatatttaccatgttaaaattaagaaatttttaaaaatgtatttcaaaagaatagcccatttaatgttaacaattagaagtaacatttttatgacaaattcattagagtagaaatgttttacattttcacaaatctctttaacatgtggcttaagacagctggattctcaaatctggttcctgcattcaatctgctgtgataacatatatcatataactctactgttacatggaaaactctactgcacaatcctcagagaatgagagcaggaaaaactattatggaaaattgtttacttcagagtgtctgaaagggtctcaagagtccccaggtaccacagaacatactgggaaccaatgctctattgtatcacccactcttattttatggctactgtacgctatgctgacaaaatatgctgttacttgtgtatagattatgtaaatatgtaactaatttacatccaatatattttctatcaattgtggcattctaatcagtaagagcatatattactataaatgctgttatcaaaatatttccttataaatcaaatattgtggttaagaaatacaacacattatttttatctgcactcaacaatcaactagcacataaaggactgaa

SEQ ID NO: 678191 - DNA, 645 bp, Homo sapiens
caaataaatcaatgaaaataaattttaagacatcacgaagttaccgtaagtttaaaatagcataacacaatgaaagcacaaggatgcttctcaaagcatcccttctacatttatttccagaattctaaatttgaattcagcaacttatctaatctagcaaagagttaataagcacctccagaaagcctgagtgatacagaagaatcaaaaagcatgagttcaggctgggtgtggtggctcaygcctataatcccagcacttccggaggctgaggtgggaggatcacctgaggtcagcagtttgagaccagcctggtcaacaaggtgaaactccgtctctactaaaaatacaaaaattagccaggcaaggtggtaggcatctgtaatcccagctactcaggaggctgaggcaggagaattgcttgaacctgggaggcggagtctgtagcgaactgagatcgcaccattgcactccagctgggcaacaagagcgaaactccatctcaaaaaaaaaaaaaaatacagaaattagccaggcatggtggcgctcacctgtagttccagctactcaggagcctgaggcaggagaatcacttgaacctgggagacggagattgcagtgagccaagatcgtgccactgcaccc

SEQ ID NO: 678192 - DNA, 1603 bp, Homo sapiens
cacattttaaaataaacagtatacatctcccaacgtttaccgggaattctctttgcwtaaatatcaaaacttacaagctttgctcttcaaatataatttttcttgagagcaggcttttgttaatgggaatacaatgttctgcatttcccaatgactacttctaacctccccatgctagaggcatgaagagattgttttttcctaatcttctctctgagaacctggtggatttcaaggtaaaccttataaaagtgtgcctcttgccccattccccaagactcagtcttagtgattttgagatcatccacactgagcctccttcaatttgtcaatcataactcaacgtttctattagtacaggctctactgctgggcttctgctcttagtaaactgtgattctctatactgcttgtccctacaactttggggacagcagcttgctttgtgacctcaattctctgatggatctaagaagggttgttgattttcagattcagcttatttttttttttattatgagcgcagaagcaacaaattccaagcttttacatggaaactggaagtgccctgaattcattttttttttcttttttagtagagatggggtttcaccgtgttagccaggatggtctcgatctgctggcctcgtaatcagcccatgttggcctcccaaagtgctgggattacaggtgtgagccaccgtgcccggccctgaattcagtttttttcatagcatttctgttttacctcacaatagtgcataggcttacctgtgcaatatcacttgatcagattacttacaattttcaacagtatcaacccagaatatacagaaataaataccttttcctaaaagaattagattaccatatgaaacgaatttttcagtcccttttccattatttttaatttttgttttatttatttatttatttatttggagttggagtctcactctgtcacccaggctagagtgcagtggcatgatctaggctcactgcaacctccacttcccgggttcaagtggattctcctgcctcagtctcccaagtacctgggactacaggcacgtgccaccacgcccagctaatttttgtatttttagtagagacagggttttgccatgttggccaggctggtctcaaactcctgatgtcaggggatctgcctgccttggcctcccaaagtgctgggattataggtgtaagccaccacacctggcctctgttatttttaataactttctattttgcagtaatcgtagagatcacaaatagtcgccatcactacacatgatgaagttgcattatggacagtgtcttactgttttaatttatagtggtgcacaaagtgcttttctcaacattggaataaaaagccaataatatggagtttctgccttcgtgtgaacctaattctggtaaaggagataaatttttgcagctgcaaaagtattaaaatgtggtaggtgaggaataataatggcaaagtttctgtattggaaaattagcaccatggcgcataagttggaatttattaccaggtatgtgggagaaaaaagaaaacaaaaagcacagagaatttgtaaaaataaagatattt

SEQ ID NO: 678193 - DNA, 1075 bp, Homo sapiens
taatgaaggtagcttcttccagagatgatttacattttcttctgtcagacacttgggggcactgcccgactaagactatattaaaacaattcaagtaatttgaacttgggctttaattctacttcaggattttgttttaacttctttgtcaccctcaccttggaagtatagcccattggggttacctagcttatttcagggactgctcctatcttgaatgagtttagggttttgattttctttcccctcatcatgtgggttgtcaaactaaggttctacctttcataggccagaaaatgttctctgggtaaargctcttttgtgtaaatgaaactatctgggttcttattttctttcagcttgggcctataattgtttttctcattatcttctttgcatttaggaagatattttttgcatttttctttaggctctttggttatttccatcaggagttgatctgagttgatctgaatagcccagtctgcttgggcctataattgtttttctcattatcttctttgcatttaggaagatattttttgcatttttctttaggctctttggttatttccatcaggatttgatctgagttgatctgaatagcccagtctgcaacgctatttacaagtttgattccccaccctctacccctaccaatgattaaccacttgcctaaaaacatttgttgaaaaacatatgtcacatttatgttttacccaataaatatattggtctgtttctgacctatttttctgttccattcatttctcattattcactgtgattaacggttagacaccaccacaagaaggctgactatcctcatttcctttgttggcctctgtaactaatagccttgattttcaaatggtggcctagaacatgctcatgcattgctcatcagaatgtaaaatagtacaagctttatagcaaaacattcagttacatctaaaaaaaactatgcatttatcctttaatgtagaaatacaacttctaggaatttatcttgaagttacaccataaaaaatcaaaattcatacataaatattatttattatagcatctatagttg

SEQ ID NO: 678194 - DNA, 1303 bp, Homo sapiens
ccagatcccttctcaaaacttgcagagaagtgctttctttcactgattccagagtatttgcattttgcctgccaacagaccccactcttttgtgcctaacagggaaagctcgttgtatgctactgcccatcatagtcttgtttttccctcaatatacctgaaatccctttatagctgatacacctgaagtccttgaactccctacaacaccttaaaagctaatggcttaaaacaaccatagcagcatttatttgggtcagttaggaattcagacacagtgaggtgggggtggtttgtctccatactacttgggcaccagcggcagaagctcaacctgggatcccgtccaagatggcttcctyattcgcatctctggcaccttgatgttctttgcctctctctctctccataggatatttcatcctccagggccttgccacgtgacttgtacttcttaactacacgacagcctgagggttgttggccttgttagatggtggaggcttctctaaagcaagcattccaagaggcccgagaggaagctatgagacttcttatctagcctcagaagtcccagaatgatatttacacagcattctgctggtcaaggaagtcacaaaggacaactctgattcagggaaagggaacttagactccacctctcagtggaagaagtaggaaagaatttgcagctatatttaatctaccataatgattatttatttatttatgtacactgggtaagacaaacaagaattgtttatactctatcccggggtcagcagactatagcctgtgggccaaatctagcccactccctgtttttgtaaataaagttttgttggaacatagtcatgcctatttgcttacatattgtctatggctgtatttgtgttacagtcacagagttaagcaatctcactggagactgtgtgacttgtacagaataaaatatttactatctggtcctttataagataaatttggtaacccttgttaaacacgtagttatgttctgctaatgcttgattttaattgcttttcttaaaaaatttaaattgtcttttaaaagtacacttaactatagaaactccttagaaaaatcagcttacaaacctgcaacttacacactgccatagactaacaacagagctagcctctggggcagtagagagtcacttctgcctgccacccacagatggtatccacaattgtgccatttatttatttatttatttatttatttatttatttatttagagacagggtctggcactgacacccaggctggagtgcagtggca

SEQ ID NO: 678195 - DNA, 1353 bp, Homo sapiens
tttagatgggtttcaaatcaccaactgctagactgtcaataccacaaagttgatgtcttatactcctatatggatgaatatctggggtcttcaaaagccaacacatccaggagaactgtgcccctagagagcttagaggtaatacagtcccacatagaaatgaagggccaccttaggagatggcagcaaaccattgtctacatccaggaactccttctagaacccaggagtctcttaacttggcamctgaagaaaatatgggttagaagcttttgcttgagcaatagacctgcctcagcaggcaagtcttaagcccaattctttcatctgtcgtggccatggatctctagtgcagtgttcagaactacacagaaacttcaaggatgtgttagaagataaattttaatctgtgcattttttatttaaaagcaaagagagccaaaaagcctataaataatttaaaattgaatgatgaaaaacatttaattatcccaaagaagaaagaaaagaaggaataaaaaataattataaaatggtgaacatttcccaaacattaatcacattttttttttgtagctgggattacaggattgtgccaccatgcctgctaatttgtaaatttttgtagaggtgaagtctcactataatgcccagtcttgtcctgaactcccggcatcaaaagatcatcctgcctgggccttccaaagtgctagtattacaagtgtgagccaccatatctggactactttaaatttaaatggactacacatacctaataaaacatgaaaactgtaagaatgaattaaaaaaatgcaagactcaactatatatggcctataagagatgtactttatttattcatttatttttattgttattactttttagcttcctcgggctgaaagagatgcactttaaatataaagacaaatcgattcgaagtactttcttaagggaataatagaaagccaaaatcaatggaatagaaaacagacaaacaataaagaaaattaatacagataaaatttggttctttaaaaagacaaataaaattgataaatctgcatgtagccaaactgttgaaggaaaaaagaaagataaattattaatattgggagtaaaagagataatatcattactccagatcctacataccttaaggatgataacggaatattataaataacattacaccaataaattcagtagttcagatggaatagatggattttttgacaaaaatagtttacccaaactgataccatatgaaataaaatcttttaaaaatactatgaaataatagtaacaaacaacatgaatataataacaaatatagggttataataattataa

SEQ ID NO: 678196 - DNA, 1353 bp, Homo sapiens
tttagatgggtttcaaatcaccaactgctagactgtcaataccacaaagttgatgtcttatactcctatatggatgaatatctggggtcttcaaaagccaacacatccaggagaactgtgcccctagagagcttagaggtaatacagtcccacatagaaatgaagggccaccttaggagatggcagcaaaccattgtctacatccaggaactccttctagaacccaggagtctcttaacttggcacctgaagaaaatatgggttagaagcttttgcttgagcaatagacctgcctcagcaggcaagtcttaagcccaattctttcayctgtcgtggccatggatctctagtgcagtgttcagaactacacagaaacttcaaggatgtgttagaagataaattttaatctgtgcattttttatttaaaagcaaagagagccaaaaagcctataaataatttaaaattgaatgatgaaaaacatttaattatcccaaagaagaaagaaaagaaggaataaaaaataattataaaatggtgaacatttcccaaacattaatcacattttttttttgtagctgggattacaggattgtgccaccatgcctgctaatttgtaaatttttgtagaggtgaagtctcactataatgcccagtcttgtcctgaactcccggcatcaaaagatcatcctgcctgggccttccaaagtgctagtattacaagtgtgagccaccatatctggactactttaaatttaaatggactacacatacctaataaaacatgaaaactgtaagaatgaattaaaaaaatgcaagactcaactatatatggcctataagagatgtactttatttattcatttatttttattgttattactttttagcttcctcgggctgaaagagatgcactttaaatataaagacaaatcgattcgaagtactttcttaagggaataatagaaagccaaaatcaatggaatagaaaacagacaaacaataaagaaaattaatacagataaaatttggttctttaaaaagacaaataaaattgataaatctgcatgtagccaaactgttgaaggaaaaaagaaagataaattattaatattgggagtaaaagagataatatcattactccagatcctacataccttaaggatgataacggaatattataaataacattacaccaataaattcagtagttcagatggaatagatggattttttgacaaaaatagtttacccaaactgataccatatgaaataaaatcttttaaaaatactatgaaataatagtaacaaacaacatgaatataataacaaatatagggttataataattataa

SEQ ID NO: 678197 - DNA, 1353 bp, Homo sapiens
tttagatgggtttcaaatcaccaactgctagactgtcaataccacaaagttgatgtcttatactcctatatggatgaatatctggggtcttcaaaagccaacacatccaggagaactgtgcccctagagagcttagaggtaatacagtcccacatagaaatgaagggccaccttaggagatggcagcaaaccattgtctacatccaggaactccttctagaacccaggagtctcttaacttggcacctgaagaaaatatgggttagaagcttttgcttgagcaatagacctgcctcagcaggcaagtcttaagcccaattctttcatstgtcgtggccatggatctctagtgcagtgttcagaactacacagaaacttcaaggatgtgttagaagataaattttaatctgtgcattttttatttaaaagcaaagagagccaaaaagcctataaataatttaaaattgaatgatgaaaaacatttaattatcccaaagaagaaagaaaagaaggaataaaaaataattataaaatggtgaacatttcccaaacattaatcacattttttttttgtagctgggattacaggattgtgccaccatgcctgctaatttgtaaatttttgtagaggtgaagtctcactataatgcccagtcttgtcctgaactcccggcatcaaaagatcatcctgcctgggccttccaaagtgctagtattacaagtgtgagccaccatatctggactactttaaatttaaatggactacacatacctaataaaacatgaaaactgtaagaatgaattaaaaaaatgcaagactcaactatatatggcctataagagatgtactttatttattcatttatttttattgttattactttttagcttcctcgggctgaaagagatgcactttaaatataaagacaaatcgattcgaagtactttcttaagggaataatagaaagccaaaatcaatggaatagaaaacagacaaacaataaagaaaattaatacagataaaatttggttctttaaaaagacaaataaaattgataaatctgcatgtagccaaactgttgaaggaaaaaagaaagataaattattaatattgggagtaaaagagataatatcattactccagatcctacataccttaaggatgataacggaatattataaataacattacaccaataaattcagtagttcagatggaatagatggattttttgacaaaaatagtttacccaaactgataccatatgaaataaaatcttttaaaaatactatgaaataatagtaacaaacaacatgaatataataacaaatatagggttataataattataa

SEQ ID NO: 678198 - DNA, 1353 bp, Homo sapiens
tttagatgggtttcaaatcaccaactgctagactgtcaataccacaaagttgatgtcttatactcctatatggatgaatatctggggtcttcaaaagccaacacatccaggagaactgtgcccctagagagcttagaggtaatacagtcccacatagaaatgaagggccaccttaggagatggcagcaaaccattgtctacatccaggaactccttctagaacccaggagtctcttaacttggcacctgaagaaaatatgggttagaagcttttgcttgagcaatagacctgcctcagcaggcaagtcttaagcccaattctttcatctgtcgtggccatggatctctagtgcagtgtycagaactacacagaaacttcaaggatgtgttagaagataaattttaatctgtgcattttttatttaaaagcaaagagagccaaaaagcctataaataatttaaaattgaatgatgaaaaacatttaattatcccaaagaagaaagaaaagaaggaataaaaaataattataaaatggtgaacatttcccaaacattaatcacattttttttttgtagctgggattacaggattgtgccaccatgcctgctaatttgtaaatttttgtagaggtgaagtctcactataatgcccagtcttgtcctgaactcccggcatcaaaagatcatcctgcctgggccttccaaagtgctagtattacaagtgtgagccaccatatctggactactttaaatttaaatggactacacatacctaataaaacatgaaaactgtaagaatgaattaaaaaaatgcaagactcaactatatatggcctataagagatgtactttatttattcatttatttttattgttattactttttagcttcctcgggctgaaagagatgcactttaaatataaagacaaatcgattcgaagtactttcttaagggaataatagaaagccaaaatcaatggaatagaaaacagacaaacaataaagaaaattaatacagataaaatttggttctttaaaaagacaaataaaattgataaatctgcatgtagccaaactgttgaaggaaaaaagaaagataaattattaatattgggagtaaaagagataatatcattactccagatcctacataccttaaggatgataacggaatattataaataacattacaccaataaattcagtagttcagatggaatagatggattttttgacaaaaatagtttacccaaactgataccatatgaaataaaatcttttaaaaatactatgaaataatagtaacaaacaacatgaatataataacaaatatagggttataataattataa

SEQ ID NO: 678199 - DNA, 591 bp, Homo sapiens
ctttctattgattctggtttctgaaatagaaccaagtgcaaggcatagctagtataatttaaagtaacagattgtcttcttctcttacattgacattccattcggyattctacgtgaacaaagtaatgttccagatttttttaatatatagttacatttactgtatttatgtgataaattcaattctagatataggtattagcaattggaaccatgcttcagttatctcccttatgaaagataacataggaatgttataacaaatatttagttaaaaaactgaaaagggctttgaaaatgtaaaagtgtaatataaatgctaaataaagataatatattctgaacagcaggctcctttgaaatagggcctatgaattccattaacactctctgtttacatgcttttaggaacttttaggagggtgttgcccatgaacataactccgatacaatacctacggtctagtaactagccaggaaagacacaagtccaagagcagcgtaataattcacataagaatacttctttaagtcatttagtaaatgttttttgcatgcttccatgtgcaggtacagttctgggtgctagga

SEQ ID NO: 678200 - DNA, 1946 bp, Homo sapiens
tattactgatggctataatcaattcatttctcttaacttctgtcgtgtaaaaatccttgtttggtcctcaggcaccctctaatcatattatctacccaagatgttaatatttaatgatatttgtgttagcctccaaaatgacccccaatgacccacacccttatatagccccctctggattttgtcgatgaatcaaggctggccctgtgtgacagagagagtacaaaagtgattgtatatggctctcgggggtgtcaaggtattttatctatcaccccgatctcttagattgctctctctgggggaagatagccaccatactatgagggcattaaagtggctccttgaaaaggaaaactggagcagctaatcaacttcccacacgtgtagggaaggcacctaggaagaggattctgaagccccaaagccttcagatgacagtcaccccaatcaaaatctgactgtaactacaagagagccctaagtgagaactaaccaacagcgcccttcttgaattcctgatctagaatttatgggcataaaaaatcattactttatgccatcaagttttccgtaactagaataatatttaaaggtcttcatagttggcaaatttatgaattaattctcacttttaagagaattgaaaatcaatagtgattctaagttcaagcacatgcttaattgtccaacaatcatctatcaaatttctcttagaaaaatttctatgttgagtgtattcagttctgagtcattaagttcctcgttggttttgttactatttaacattggaaagctgcaaagcagccagttccaggtccaggttttctagactttaactgctttggtggatttacttcttatccctctctgaagacatgcagacagggataagaagtaaattttatagtcgatatctacagctcctcttgggattggtgagctagacctgttgagtgaataaattaagggattaacaaataataagtgataaatacataaaccaatgaacagattttggtgcctaatatgtgttggggactgtgttaagtcttttcacacattatgctctgtgttttcacccacattaccccttctatgtgtgcagtgagttttgcagtacctcacatgcatttgatctttccaattagcctgcgtattcagaaaaaaagaaatctcatggacgaagggagtttgttagcatttggtatcttcctgacataattttcttgtgaaggatgtaatcagcttttgatttgtataaaaaaaaaatctgagaattacccattaattgagagcttcaacttcctccaagagtcacaagacccctgctctctaaggtcttcattcttttagagaaaatgacactaaacaaaaagaagaaaattactaaayagcaataagctctgtgcagagatgtaaaatagaatggtatgctagagtcactggatggctgttttagaggacagataacctgagatttgaaagaagtgacaaagatgaagggaagggtatcagaggcagaaggagcggaaagtaaaggccatacaaggtgggaaagagtttggtgtacttgggatgcaacaaaggcaaataggtggcagaaaagtgtacaaaagtgtacaatgggcaggagaagagtgtacttgtcaaatgagatcagacaattcaaccattccaggtagggagacctttctatgatagaataaaaaattagaatctttaagaaaaaaaaaaagcactaagaagccaatgaagattttaagccagtgatttgacttataatttaaactgcttctggctgctttttggtaaatgggtattatatggtggcaaaagtaaaagcagagagttgttagagtgggcgctaatccaatccgactgatgtccttataagaagaggaaatttggacacacgaacagccaccagggatgtgcacacacag

SEQ ID NO: 678201 - DNA, 512 bp, Homo sapiens
aaaagacccgtctggccactgtgttgagaatagatgttcctggtaaacaggggtgggcagggagaacagctcccctgcaccagctcccgctgggctgcagacaggctctgatgtggcttgcagcacggtggcagcagggggaggtggcaccgagcagcaggaccctggatatttttttggacatagagccaggaggatttcctcatggttctgatgagggttgagagagagaaggggagtccggatcatcccaaggtttctggcagacagatgatgtttcaccagctaagatggagcggtcctggaaagagtgaagatcaagartttcattctggaaatgtgggggttttcgctgtctgtcagagagtcgtggagctgctgggaggtggttagtgtggacttctggagagagggctgaaactgtccttgaaaaaatggatttctcagtgtgatgtgtatacagtgtccctttttcagacatggcaccttcgtccatttgggctgctataaca

SEQ ID NO: 678202 - DNA, 637 bp, Homo sapiens
tacattaacacatatttcatggctgaaagcaacacaaatacattatcttacagttttgtagttgagaggtctgtaaagggtctcagtgggctaaaatcaaggtgttggcagaactacatttctttctgaaggttctaggagagaatccgttttcatgcctttttcagttcctagaggttgttagcattccggggccagctatggaggtcatgccattccatcttcaagaccagcaatggctagtagagtctttctcacatcctatcacgctgacccacaagtcttctgcttcttctatctgcaaccttaaccctcccttgacagggaaggtaacattcacagggtctagaaattatgatgtgggccyttttttttggtggggggcgcggggggcattgctgtgcctgaccacccccatcccatctccccaccttttccccctggcaagccaattctactttctgatggttctaattttgggaatcacacatatgttgacttatgacaatgactgctattcatgcagcaggtgagtttttaaaagagaaataaaggaatctgcaacctggagattttcaactttgagaccaccagccgttttgaaggctgagactgagcgaaaactggtagaaactaa

SEQ ID NO: 678203 - DNA, 2346 bp, Homo sapiens
attacccttgatattatggcatgtctcaatgtgctgtggctgaacatatgttcatattccctcaagtttaaataagaattccatttatatttaaagaaaaaaagagaacaataatacttcatagcagaggagtaaaaaaacatctaaagtgtgctttaaaacatctaaagtggcaacctcagcaaaaatatttaaaaatacatataatacagtataatttgtagttcaaaagaagcctttggagaaaatgtattgctttccttttcttttatagttatgtctgtgtactatggctttaaaaaatgccctttgttaaagcagtctgcaagaatgatttgtagaattcctaatgataattttattcctctggtaagtcagcctgtgtatatatatgtgtgtgtgtgtgtctgtgtgtgtgtgtgtgtgtgtgtgtgtgtgtgtgtaaaggaatatatgtttggactgatgcttaaggtcacaaataatcagtgcttcatatttctagttgccttcatcatcttttctctctctctttttaaaaatcacaggccttgagagtctcattgatttgatgcctctgggagcttaccttctgaacagagtatcacatttttttccccagtacctgcccagtgggtgacctaacacaatcatttagattgaaaggtggaagcgaaagaagataaaagattgagaagcaagaggcagagggacagaggggaacaaaacacaaataggcaaactgcaaagcaaatggaaaatgcattatttctaaaagggaaataccaaaagcactggcaggagcaataatggaaacaagagtgaccagatagatgggaaaattatgataggacctaacctaatattcacatgataaaagggtttctcaggctaaaaatgcacacatatgcctatgtatgcagtcactgatttttttcctagttttatttgcttctttctttctcccaatttcctgggaaacaagaaagtttgtgttaactcctgactcaaaccaaaccggactacagtatggtcaagaattagaaacacagacaacactgaagggctgctctcgggataataattgcttgttacgcatttcttccctgcctaatgctaataataaattgacattgattgaaaacatcttggaaacctaattaactttttcttacttaaactgtttactttttgcttttaatttgtcttgagtaaattcccggttggtctcaatatttcattcttgtttagtgacacaagctttgtctgatcatctaattctgcttgtttctattaagagccccttccttctaaataatgacttaagtaggcacatccaagtctcagagagtacactgtcctttttattcttgcacaaagctaaaggttggctagacgacttgatgcaaagtgtcttcatctaatgtacagggggttctctcctgttctttccttatccttcttttgaaatggttcggaggttaacttcatttattagattttaaacttgtggttcaggcttaggcatggtaactcacatctgtaaccccagcactttgggaggccaagttgggaggatggcttgaagtcaggggttcgagaccagcccaggcaacatagcaaaaccctgtctctacaaaataataaaacttaaaaaaatcagctgggcatggtggagcatgcctgtagtcccagctgcttgggaggctgaggtgagaggatcacttgagtccaggagcgtgaggctacagtgaacgatgactgagccactgcacaccaccctggatgacagagtgagaccctgtctctaaaaataaataaataaataataatatataaaataaacatgtggtgcgaatacaaatgctcagaggtgtcaggtaatttagatgagtgagaaggccatatggggcctggggcccggtggagagtgcccaccacctgaagagggaccgcaggccatgctcagtgacagcaggttgctgccttgtgaaatgtgggcgcactcttgtcccagcttccgatttccttcacagaagttgatcatgaaccttccaggtaaaacctttccattcttaattactraaaattaattgaattttaaaagcactgtatggggcaaaatgtgtctacaggctagattcagcatatgggccatgaaataaactttcatgatctcaggctccaggctcatcaatggcttaagagtgcactacccacacttcctcgggaactgagggtgtacctaacgatatcacttcctcagggcattttgtcatatttgaatccacaaccatgaagctgaggacacaaaggaatttttttaaataaggtataaaatgaatg

SEQ ID NO: 678204 - DNA, 579 bp, Homo sapiens
tctggtttgtagcagtctttaatttctgtggtgtaaatactcctaacacggctaatttcaagctatcaacatgaatttgctgaccacaaagttgaaagagatgtgaacatatgkttttctgtgagtcaagtacaagttatctatgcatacgcatataggtatacgcataaaaagaacacctggaagaatatgcataaaactatttatagtggtttgctctagagacaagagtgggtttaagatatgcctaatgaaaaagaacttgtccattttattctgcatatttttatatcttaaaaaacttttttgaagtatgatatatacatgaaaaagtacatatataataaaagaatagttctgttttcacaaactgtacacgcctatataactacccacatctagaaatacagcattatcatacccactcttacctctatcggtcattattcctcaaccccccaggaacaactgttattctgatttctaaaagcacacatcaactttgcttgatttttgtaatttacaaaaatggtacatcatatatgttatggtagctacctctaccaagatattcaatga

SEQ ID NO: 678205 - DNA, 616 bp, Homo sapiens
catggatgactccagggattcattatggggcctttatttctaggtctccaatgcaaagccccatctgatcattactgggaacaagttctcactgggtaatagctcttcacagctggacatgggatacctataaaagaagtgacctccattcagttaatcctggggggacggaggtccacattacagactggcagtaattagctcccctgctggtggtctctgctaagactccaggagccaaacaggtcacagartgtgaatcctgagcaggcatttcagaggctgccagttcccttctgatcttgcctgggatgagctggtggaagtgtgatgggaggatttagccgtgtcactgtcattctggtacccagtctttggatgggacactgtgttccctgaacttgtcaatttgtcacctttcagcagcatgaggcttgtgttaagaggggaagcatgtccttttctaacaatgttgtttaggtgtgtgtttaaaaacaaaaaaacaaaaactgtactacaacatgtactatctttctctgctctttctaactcctctgaagatctgagcaatcgcttaagacttcagtactaccaaaatccaacaaagtaagcaaaa

SEQ ID NO: 678206 - DNA, 1667 bp, Homo sapiens
ctgtatttctttcttctcttcttcctcaagaatatgagcattgtgtttacagatcattttttgttttattcacttataaatgtttgttgaattaattaaaagaagagaaaatcaatcacagatatgaaaggaccaacatagtgaattgccttggatccatattgcacaattttgctgttggcagactgaagttgtccaagggctgagtaaaaatgatgaggaatactttacaaaggccttacttggtttggttcctgtggtagagatgatttgtttgcagtgactgttccttaagttcccctgcttcatttttcttcctttactgcagttagttttcatcaatggactgcagattgcagtgacatgtttcacttctgggaggggaaatttaacagccagcatgctccctccacctctttttcccccactgttatgatcatgagaccaattgttccaaatggcagagctaaagagggaagagggctacctaaaccacacaaagctttgcaatagagaatagtaaaccttaattatgttaagtgacaaagattctgatggctttctagttatagtagttaaccttaattggagaagctaaatccagaataaagtggtattacaaggtttttggtgtctgcaagttggaagttgaaactatcttttgtatacttcttttagctattatatacttgtgyctatttatttctcagtaccagaaaatgtgttcctgaagacatattcttcattgcacagttcagagaaaatcttgtatcctcattgttgaacattcaaaataatagtgtgattattctattactgtacttgatagctatggctaaacaactaatcccagtgggaaatttctagaagtattagaaaatttgaactacatagtgcaactccgtgaccacttccactgccatagaattttagtaagatttttatatagcttcaaaaattaaaaaaaaaaaccattgaattaacttttttaattgaaagattgataaaacatctcatggcagatatttttgttatcaacttcagtatatacatttatcatctttttgtatgatttaatattctaatgcagtaattggcaaactttctctataaagggccaaatagtaaatatttcacttttagaagccatgtagctactcttacaactactcagctctgccattatgacatgcaagcagccatagacaatatataaatgaatgtgcgtgtctgtgttccactaaaactttatttacaaaaacaaatgctggctgtagtttgttaactctcactcaatgggagtacagaatattctttgtttcagtgttttagtcttggtagtaattttcaatcaagaatcttccaggaggtggatgatgagtgcgttggggttccttagaggaacagaatgagtaagattatacacacacacacacacacacacacacactcagttgattcttgttattcactgtagttatgttctataaagtttctatgaacattgaatcagtgaataatgaacaattgctcctagggaaaatacagtgtagtttcctgaaagcctctggtcacaacatttttgtcaaccagtcaatatacattcttgttttatgtgtgttctcttcaaaggcaccttatttaatacctatgctgattcgttaaca

SEQ ID NO: 678207 - DNA, 987 bp, Homo sapiens
aagaggcccacccagattgttacagattatctcctttacttaaagctaactgattatagatgttaaatacatctacaaattaccttcacagcaataccttgattagtgtttgaataactggaactagggcctagccaagttaacacttaaaactaaccatcacagtgagtatactttggaaggccacagaagatttaaaggtgaaataatggtattgtagttatatatttttcaaaaacataatttaccttttaaggatgtataataaagtatttatagatgaaaaaataattcttatgaactcaacaaaatatcaaatgtgattatctggattcagttaccgtctcagtggttattatacttttctacatttgcaaatttctacatttttttcgtgcttataattacatgatcaattcatggtacttttatatatagaatatatattagttttctattgctacataataaattaccacaartttaacagcttaaataacagtttctatgggtaaggagttagagttaggagtctgggtacattttatcttttcatggtttgaacagactaatctcaatgtgttggctagggcttcagtcccatctgaggcttgaggttttcttccaagctcactggttgttggcagaattcagttccctgcaactgcaggactaaagtgtctctttgtccataagttgctctggattcctaaaggccactttcatgtcctaactatatggctttgtcatataacgtggagcttacttctttaaagccagcgggagaaattctctttagtgtgctaaggtggagtcatgtttatataacataaccttatcaagggagcagctgtcctaccacattcacaggacctgtccaaacttaacagaagggaattataaagggtatgtacaccggagggcaatgatatggggggacatcttaggattctgcctcccatattagttgtgtgatcacagctaaaa

SEQ ID NO: 678208 - DNA, 987 bp, Homo sapiens
aagaggcccacccagattgttacagattatctcctttacttaaagctaactgattatagatgttaaatacatctacaaattaccttcacagcaataccttgattagtgtttgaataactggaactagggcctagccaagttaacacttaaaactaaccatcacagtgagtatactttggaaggccacagaagatttaaaggtgaaataatggtattgtagttatatatttttcaaaaacataatttaccttttaaggatgtataataaagtatttatagatgaaaaaataattcttatgaactcaacaaaatatcaaatgtgattatctggattcagttaccgtctcagtggttattatacttttctacatttgcaaatttctacatttttttcgtgcttataattacatgatcaattcatggtacttttatatatagaatatatattagttttctattgctacataataaattaccacaaatttaacagcttaaataacagtttctatgggtaaggagttagagttaggagtctgggtacattttatctttycatggtttgaacagactaatctcaatgtgttggctagggcttcagtcccatctgaggcttgaggttttcttccaagctcactggttgttggcagaattcagttccctgcaactgcaggactaaagtgtctctttgtccataagttgctctggattcctaaaggccactttcatgtcctaactatatggctttgtcatataacgtggagcttacttctttaaagccagcgggagaaattctctttagtgtgctaaggtggagtcatgtttatataacataaccttatcaagggagcagctgtcctaccacattcacaggacctgtccaaacttaacagaagggaattataaagggtatgtacaccggagggcaatgatatggggggacatcttaggattctgcctcccatattagttgtgtgatcacagctaaaa

SEQ ID NO: 678209 - DNA, 603 bp, Homo sapiens
taaaaaatgtatcagaaaacttaagcatacataaaataaaagggaagactataatgaatccatcattacctctaatctttgccctagcttaattactagccttttcccattcccattgtatctttatttgttttcatacaatttgacatttttttctcttatctgtcctggacaaatcccagttgttatctcttttaatagattattcacttctttagtctctcctgagataaccactagatgattaaatcttattatattttttcatrtcataaactttcagtttcattaccttgtctttctccattacaatctgattaatgattttagctttggcttctagttcaaattcttttttcaactttgtttaatctacagtttgaccatcgagattatacttttaattatatttctagtctagtagttctatttttttatttttaaaacaggtcagttaattattgacagatttttgacacttgcttaccacatacttcttaggacaatagactctgaaggatttgaattctagcactacaacttgcactgtgtaaatttagggaactttcttaatttctctaagttttcatttcctttttcata

SEQ ID NO: 678210 - DNA, 603 bp, Homo sapiens
taaaaaatgtatcagaaaacttaagcatacataaaataaaagggaagactataatgaatccatcattacctctaatctttgccctagcttaattactagccttttcccattcccattgtatctttatttgttttcatacaatttgacatttttttctcttatctgtcctggacaaatcccagttgttatctcttttaatagattattcacttctttagtctctcctgagataaccactagatgattaaatcttattatattttttcatatcataaactttcagtttcattaccttgtctttctccattacaatctgattaatgattttagctttggcttctagttcaaattcttttttcaactttgtttaatctacagtttgaccatcgagattatacttttaattatatttctagtctagtagttctatttttttatttttaaaacaggtcagttaattrttgacagatttttgacacttgcttaccacatacttcttaggacaatagactctgaaggatttgaattctagcactacaacttgcactgtgtaaatttagggaactttcttaatttctctaagttttcatttcctttttcata

SEQ ID NO: 678211 - DNA, 600 bp, Homo sapiens
caagcccactgagtctcctttgggtttagaaccatattgtctacaaaacaatcgcaacatctatagtcattgaaaggcatttggagaaacattctcaagaattcgagaattgaagttacataaagcatgtttccatctaaatgcactggggaataaaaaagggttcacggggcctctggcattgctccaggaaaggactattacaccacagaggaattgggtttttgcccagtggcctttggaatgacctgaactttatatactttttaaaatagatgccctgtatagtcatcacctggcagtagagaaatttcccaagtctactctattacatgtgatgcttacattcttctgcaagcattcgtatattctacacccccaatgrgcctgatccccaggacctacactaaaggatctctcccacttgccaatggtagtgatatcccagccttagcaagaggtccttgccttggagacacctaggtttattttttttaacttctttaaaaaataatttcaacttttattttagattcatggagtacaaatgcaggtttgttacttggatatgttgtgtgatgctgaggtttgggatacaga

SEQ ID NO: 678212 - DNA, 649 bp, Homo sapiens
gattagtgacactgagcatcttttcatgtgcttattggccatttgtatatctgctttggggatatgtctaagtcttttacccattttcaaaattgatacgcagcagatgtacatattttcggaattcacatgacaatttgatacacttatataatcaaatcagattaattggaatattcgttatcttaaatrcttttctttatactaggaacattcacaaaattatcttttagctattttgaaatatacaatgaattaatatctgcagtcataccacctgaatgcatctcatctcatctgcccattttttaattgggctacttatatttttgttgttgaattaggaaaaattagattcatagcttaattatgatgaatgtatttatcatctcaaaaattataaaaaaagagaaatattatgaggtcatattttacttcattgttgaaataattgttgaataaatagaatacatttttattcagcaaagggagatttttttgtgtgtagcttattctatataaattatatacttccatatttagtggaattctcttctttcacagatatttcttttagactcccacttttagcaaataaagtcaagaaaagtgttttcccggtatttctcctctcatcttcttcctgcct

SEQ ID NO: 678213 - DNA, 573 bp, Homo sapiens
tgtgaagtggctatccagatgtaaaaaaaagtacaagacaaaagctgtcatcaagggattcatggtttagttgaagataaaagaataggccttaaaggaatccacgagtgaggttaccgcggagaacagagaactgcagggagtttccgcgtggagcccccmgaagctggacagtgaggctgcagaccctggctgttcactaactgatgtgtatgaccttgacacatagactggtgacaggacctctgagcttcagctttcacatccaaaaagtgaagacgatgtggcacccacctcacaggttccaaggagcatgaaatgccatcactgtgctgtacttggagctctaaaatgtgtggggaagggtatccacaacaatggctgatagaacgtcctggagtcacaaagaacaagcactcttaggaaaggtgccattttagttagatatgacacaatgaatcgggtttggatcaggagggaaggactgtctatttcaggaagtggaaaaaagaagaatgagcaataagtcttcatctgcctttgtgtccccacattatgtcttgtcttccaggt

SEQ ID NO: 678214 - DNA, 648 bp, Homo sapiens
attttctgatcatcaatacactgcagtatttcacactaccatgcctttgtttacaaaatgctttcgctgtctcactggttctaaaaaataatagaaatctttaaatccttgtttcatacaatagtcatgattttccttataataagagccattggattttactgtgatacagatattttttcttcttctgaagcatatatgaagattaagtggtttttgaaatctattaggcctttacaaattatttgtaagtccaaatcctagagaattaggattctagataacagaagtcattttcaaaagtccaagaactctttagtgtctcccaagrttatctaataaacaacaacaacaaaaccaataggacacaaatttgggaagtggtaaatctcattttgtagttggaagtgcctatattcctaacaggcagaatattcaataattaaaatatctgctatggaataattttgtagattaaaaaaggcacgagtaatgttaccttgagtatacagttagtttggctacagtatggtttgagcttttcaaaaagcagtagctcttcagaaagtacaaaagaagagaatattgtctaactcattttagggggctatcattaccttgataacaaaaccaaacaaagatagttca

SEQ ID NO: 678215 - DNA, 623 bp, Homo sapiens
gattggctttagcatagcctatataattgagttgaaatctatttttatttactgataatttttctttttactattttctttctaaaacaactacttaaaatctatctttttagatatcaaatgccaacacctcttgtcctaaatctaaaatttaaaaattggcttagtcatttttacttcccagtatgtgtattcaaatttcatttttataattgcttaaagttaaaacattatgcactatgctgttagcaaagagtgaggggatggcagccatgtaaagtatttaatagttaattaaaaaattataattattttgagtagctaaaaaaattagaagatgaaagttactgagccatgaagatacattttattttaataaatttactaaacttcaatctttgggggctctagatttcaaaactgatacattttaaaattacaattaattagcagaaggaaaaaagtgactgttgaacagaatggcaagatttatagctttaaaatctattccataagaagaaaaaattatcwggcacttcccaaagcagaaacaaaagaaacaggagttttactgtcttcttcgtttctaaataacttaacagtcctttctttgtggaagcact

SEQ ID NO: 678216 - DNA, 1478 bp, Homo sapiens
tgaaagtgctgtgggattggccaggttttaaacacctgtttcagtacttgrctggtaaaatgagctcccctatctgtgatgttcaaagggaatcccaggtagaaatggttttctcaagtagtatttggccaccaccatagctgtgacttgtttgtaaaggaaagcctcaactcaatgagaataaacgtcaccactacaagaacatatttacatccatggggtggcaataacagaatgaaatcaacttgccattacagtgaagggaagtgaaagttaacttggaggagagtttaggggtttactgagggcagacattgcaaagtttatggacctgagaagcactccaggtatctgagggcagacattgcaaagtttatgtacctgaaggcagacattgcaaagtttatgtacctgagaaagtctccaacagtattgtctgctccattgaatcatttgtctggattgcaataggtcagattctgtatgaaggttaaagtcggtctctaaagagtgctgggtacaattggatgtctacttggactttcctataattttgtctgggggtttaaagaacaattttgttttatctaattcctcctttcagcctctgaaactgtttttagaaatagtgagagtctggagaagagatcttcagatgggaaagggaatgagggagaggaaggagcccgggaagaaggaggggtagtgggttgagcagccataactggggaaggagtcaccctgcaggagctggagctgccacacttcttaggtaattgtctttgctgtcctatgtcttgtcagagaaatgtctctggactttgataatgactattgcttgaggagcctgaatggtatccaagaggaccagaacaaagtcttcgttcttaacaggctcttcagaaaaggtgtgaaatcctttttggctctagatcttgctgaaatcacaggcaactctgaaggcatgtctgctgtgtgtataaatattaccccctttatatgtggctagtggacaggcttgagtgagggcatgcagttctacctgttgggcagattaggcacctggccgagggcttgatttaatggtttgtatcagagaaaccaccatgtagcctgcccagtaggacacagcagaatctctgataaaagactcatcagcgtaccagataaaattcagattgagtaagggagtttcctttagtctgtgtgtggtgagagaaggatgtctataaaagcagtatagtcatggaggatacctcttctggtaaaggaaagaaggtgccggggttaaggaggttacagtgagctatggctaggttaggagaggaggagaaaagtgtcttatagcaggtcagtggactagttgaaagatgctgagtgtggtgcagggtgagaagggcctcaactgaataaggaacatgtatagtgagaggggctctcgttgttttttcagtagatttaaagctttaatgagggtg

SEQ ID NO: 678217 - DNA, 1478 bp, Homo sapiens
tgaaagtgctgtgggattggccaggttttaaacacctgtttcagtacttgactggtaaaatgagctcccctatctgtgatgttcaaagggaatcccaggtagaaatggttttctcaagtagtatttggccaccaccatagctgtgacttgtttgtaaaggaaagcctcaactcaatgagaataaacgtcaccactacaagaacatatttacatccatggggtggcaataacagaatgaaatcaacttgccattacagtgaagggaagtgaaagttaacttggaggagagtttaggggtttactgagggcagacattgcaaagtttatggacctgagaagcactccaggtayctgagggcagacattgcaaagtttatgtacctgaaggcagacattgcaaagtttatgtacctgagaaagtctccaacagtattgtctgctccattgaatcatttgtctggattgcaataggtcagattctgtatgaaggttaaagtcggtctctaaagagtgctgggtacaattggatgtctacttggactttcctataattttgtctgggggtttaaagaacaattttgttttatctaattcctcctttcagcctctgaaactgtttttagaaatagtgagagtctggagaagagatcttcagatgggaaagggaatgagggagaggaaggagcccgggaagaaggaggggtagtgggttgagcagccataactggggaaggagtcaccctgcaggagctggagctgccacacttcttaggtaattgtctttgctgtcctatgtcttgtcagagaaatgtctctggactttgataatgactattgcttgaggagcctgaatggtatccaagaggaccagaacaaagtcttcgttcttaacaggctcttcagaaaaggtgtgaaatcctttttggctctagatcttgctgaaatcacaggcaactctgaaggcatgtctgctgtgtgtataaatattaccccctttatatgtggctagtggacaggcttgagtgagggcatgcagttctacctgttgggcagattaggcacctggccgagggcttgatttaatggtttgtatcagagaaaccaccatgtagcctgcccagtaggacacagcagaatctctgataaaagactcatcagcgtaccagataaaattcagattgagtaagggagtttcctttagtctgtgtgtggtgagagaaggatgtctataaaagcagtatagtcatggaggatacctcttctggtaaaggaaagaaggtgccggggttaaggaggttacagtgagctatggctaggttaggagaggaggagaaaagtgtcttatagcaggtcagtggactagttgaaagatgctgagtgtggtgcagggtgagaagggcctcaactgaataaggaacatgtatagtgagaggggctctcgttgttttttcagtagatttaaagctttaatgagggtg

SEQ ID NO: 678218 - DNA, 1478 bp, Homo sapiens
tgaaagtgctgtgggattggccaggttttaaacacctgtttcagtacttgactggtaaaatgagctcccctatctgtgatgttcaaagggaatcccaggtagaaatggttttctcaagtagtatttggccaccaccatagctgtgacttgtttgtaaaggaaagcctcaactcaatgagaataaacgtcaccactacaagaacatatttacatccatggggtggcaataacagaatgaaatcaacttgccattacagtgaagggaagtgaaagttaacttggaggagagtttaggggtttactgagggcagacattgcaaagtttatggacctgagaagcactccaggtatctgagggcagacattgcaaagtttatgtacctgaaggcagacattgcaaagtttatgtacctgagaaagtctccaacagtattgtctgctccattgaatcatttgtctggattgcaataggtcagattctgtatgaaggttaaagtcggtctctaaagagtgctgggtacaattggatgtctacttggactttcctataattttgtctgggggtttaaagaacaattttgttttatctaattcctcctttcagcctctgaaactgtttttagaaatagtgagagtctggagaagagatcttcagatgggaaagggaatgagggagaggaaggagcccgggaagaaggaggggtagtgggttgagcagccataactggggaaggagtcaccctgcaggagctggagctgccacacttcttaggtaattgtctttgctgtcctatgtcttgtcagagaaatgtctctggactttgataatgactattgcttgaggagcctgaatggtatccaagaggaccagaacaaagtcttcgttcttaacaggctcttcagaaaaggtgtgaaatcctttttggctctagatcttgctgaaatcacaggcaactctgaaggcatgtctgctgtgtgtataaatattaccccctttatatgtggcyagtggacaggcttgagtgagggcatgcagttctacctgttgggcagattaggcacctggccgagggcttgatttaatggtttgtatcagagaaaccaccatgtagcctgcccagtaggacacagcagaatctctgataaaagactcatcagcgtaccagataaaattcagattgagtaagggagtttcctttagtctgtgtgtggtgagagaaggatgtctataaaagcagtatagtcatggaggatacctcttctggtaaaggaaagaaggtgccggggttaaggaggttacagtgagctatggctaggttaggagaggaggagaaaagtgtcttatagcaggtcagtggactagttgaaagatgctgagtgtggtgcagggtgagaagggcctcaactgaataaggaacatgtatagtgagaggggctctcgttgttttttcagtagatttaaagctttaatgagggtg

SEQ ID NO: 678219 - DNA, 1478 bp, Homo sapiens
tgaaagtgctgtgggattggccaggttttaaacacctgtttcagtacttgactggtaaaatgagctcccctatctgtgatgttcaaagggaatcccaggtagaaatggttttctcaagtagtatttggccaccaccatagctgtgacttgtttgtaaaggaaagcctcaactcaatgagaataaacgtcaccactacaagaacatatttacatccatggggtggcaataacagaatgaaatcaacttgccattacagtgaagggaagtgaaagttaacttggaggagagtttaggggtttactgagggcagacattgcaaagtttatggacctgagaagcactccaggtatctgagggcagacattgcaaagtttatgtacctgaaggcagacattgcaaagtttatgtacctgagaaagtctccaacagtattgtctgctccattgaatcatttgtctggattgcaataggtcagattctgtatgaaggttaaagtcggtctctaaagagtgctgggtacaattggatgtctacttggactttcctataattttgtctgggggtttaaagaacaattttgttttatctaattcctcctttcagcctctgaaactgtttttagaaatagtgagagtctggagaagagatcttcagatgggaaagggaatgagggagaggaaggagcccgggaagaaggaggggtagtgggttgagcagccataactggggaaggagtcaccctgcaggagctggagctgccacacttcttaggtaattgtctttgctgtcctatgtcttgtcagagaaatgtctctggactttgataatgactattgcttgaggagcctgaatggtatccaagaggaccagaacaaagtcttcgttcttaacaggctcttcagaaaaggtgtgaaatcctttttggctctagatcttgctgaaatcacaggcaactctgaaggcatgtctgctgtgtgtataaatattaccccctttatatgtggctagtggacaggcttgagtgagggcatgcagttctacctgttgggcagattaggcacctggccgagggcttgatttaatggtttgtatcagagaaaccaccatgtagcctgcccagtaggamacagcagaatctctgataaaagactcatcagcgtaccagataaaattcagattgagtaagggagtttcctttagtctgtgtgtggtgagagaaggatgtctataaaagcagtatagtcatggaggatacctcttctggtaaaggaaagaaggtgccggggttaaggaggttacagtgagctatggctaggttaggagaggaggagaaaagtgtcttatagcaggtcagtggactagttgaaagatgctgagtgtggtgcagggtgagaagggcctcaactgaataaggaacatgtatagtgagaggggctctcgttgttttttcagtagatttaaagctttaatgagggtg

SEQ ID NO: 678220 - DNA, 1478 bp, Homo sapiens
tgaaagtgctgtgggattggccaggttttaaacacctgtttcagtacttgactggtaaaatgagctcccctatctgtgatgttcaaagggaatcccaggtagaaatggttttctcaagtagtatttggccaccaccatagctgtgacttgtttgtaaaggaaagcctcaactcaatgagaataaacgtcaccactacaagaacatatttacatccatggggtggcaataacagaatgaaatcaacttgccattacagtgaagggaagtgaaagttaacttggaggagagtttaggggtttactgagggcagacattgcaaagtttatggacctgagaagcactccaggtatctgagggcagacattgcaaagtttatgtacctgaaggcagacattgcaaagtttatgtacctgagaaagtctccaacagtattgtctgctccattgaatcatttgtctggattgcaataggtcagattctgtatgaaggttaaagtcggtctctaaagagtgctgggtacaattggatgtctacttggactttcctataattttgtctgggggtttaaagaacaattttgttttatctaattcctcctttcagcctctgaaactgtttttagaaatagtgagagtctggagaagagatcttcagatgggaaagggaatgagggagaggaaggagcccgggaagaaggaggggtagtgggttgagcagccataactggggaaggagtcaccctgcaggagctggagctgccacacttcttaggtaattgtctttgctgtcctatgtcttgtcagagaaatgtctctggactttgataatgactattgcttgaggagcctgaatggtatccaagaggaccagaacaaagtcttcgttcttaacaggctcttcagaaaaggtgtgaaatcctttttggctctagatcttgctgaaatcacaggcaactctgaaggcatgtctgctgtgtgtataaatattaccccctttatatgtggctagtggacaggcttgagtgagggcatgcagttctacctgttgggcagattaggcacctggccgagggcttgatttaatggtttgtatcagagaaaccaccatgtagcctgcccagtaggacacagcagartctctgataaaagactcatcagcgtaccagataaaattcagattgagtaagggagtttcctttagtctgtgtgtggtgagagaaggatgtctataaaagcagtatagtcatggaggatacctcttctggtaaaggaaagaaggtgccggggttaaggaggttacagtgagctatggctaggttaggagaggaggagaaaagtgtcttatagcaggtcagtggactagttgaaagatgctgagtgtggtgcagggtgagaagggcctcaactgaataaggaacatgtatagtgagaggggctctcgttgttttttcagtagatttaaagctttaatgagggtg

SEQ ID NO: 678221 - DNA, 1547 bp, Homo sapiens
tggttctttccctttgcctggtcatgttactgtttttcctgaatgaatgttttcaagaaaaaaaggggggatgccagatgcggattacaggtgggttactgtaatcccagcacttttggagaccaaggtaggcggatcacttgaggtcagtcaggagtttgagaccagactggccaacctggtgaaacactgtctctactgaaaatacmaaaaaaaaaaaaaaaattagcaggtgtggtggcacgctgtagtcccagctactcgggaagctgaggcaggaaaatgacttggacctgggaggcagaggctgcagtgagccaagatcacaccatcgcactccagaatgggcgatagagtaagaccctgtctcaaaaaaaaaaaaaaaaaaagaaagaaagaaaagaaaaaacgggggatggggaggtacacaatatgtttcttatttccctttacctgatactgtcacctgacctgattctgccataagagagtccggagcaaattctgaccagagagtcgacacacatgattttcgggaagcagcttcagcaaatcaaagtttgagcaggaaaaaggagagttactctgattccatattattgtattaaaaatatttttatttagtgaagttatgctcttaactacaaaacctgagagctgtactgctacaatttagcagaatccaacaaattagcaggatccaatgcaccttcaaattttcaaactcaacaaaatgccatttctttgaaatagcaaaatcaaacactggcaatgcaaacagagtaaggaataaaaaatacatgaacatacccaactgtgctcaaattactaaacatttactgttattgtttatgcatactaggcagatgatacattgacctgttcagcatattaagtattttaggaaaaaaaaacactattctgagtatcaagtacaattttgcaaatgaaacatttcaaaatactacattctcacagtactgtatgttttttccttcagagcatttatcgctactaaccacaggtacctattcatttaatatttgtctcctctgctaaacagtaagttctgtgaaggcagactatgtgttttatacccatgataatgcctggcacctactatagtgcctaattaatagtacgtaatgaatatactgttaaaggataactacatttgtaaggtcttggaggctttagtattagtcataaaatttgccaaaaattttctaaatttgcatagcaatttatactcagttactctcctttccaaaatactaacctaaggcttgtaacacacattaaatgctaatatcttttaccattatatgctacagagaccagaagtatattcttctgcgtcattactgtgttaaagaaaaaactatcccctttcatcttcatataaatgtattaataccctaaagaatgggggatattggctttgttttctttgttttagcttttagaaattaaaaaatactgtgaatggtaaaacaaggcttcccatgttccattttttctaaagagataaattagaaaataattaa

SEQ ID NO: 678222 - DNA, 663 bp, Homo sapiens
ttgttttcctaaggacttccattgcatctcctacaatattttctctacgcaccactagaattaagcagggattcacagattcaatcactgggagaaaaagagaggagacattctgcctgtgggcctgatcaatagccatctggaaaacaaaagattaacattttaacagcaatgctacaataaagctactgtgactgaaacaagctaacctctacctattagttacaggtattctataattcctatgctactgaattaacatagcacctaacagtatcccgtacagcataaaacttaataaactgagcataaagagtacccttttgaatgtttttatactaatgtataatgtataactcataacaccattagagtaagccagtayagaacggtagtaatactgataaatctgagcattggtttttctaaaaaacattcactggaggggagggtaaagagggaggagcaaaaacaaacctttaaagagtataaggaacaggctgggcgcagtggctcacgcctgtaatcccagcacttcgggaggccaatgagggcagattacttgaggtcaggagttcaagaccagcctggccaacatggtgaaatcctgtctctactaaaaatgcaaaattagcagggcgtggtggtgtgtgcctgtaatcc

SEQ ID NO: 678223 - DNA, 1375 bp, Homo sapiens
taaaaaggaagtttcaccttcatagtacagtgttgacacagtttatttatgatcactcttttgttatgtgcacatgaacatatttaattttcaacttggttccaaagtcccttgtgttcttttctgttttgtaaagtkcattcacagttctttcttatttttttgtcatcatgcttaagcatattctctttatgtgccttcatccagattgggatattgtaggacaaacaattttctttatgtcatggatcttaatgggttgatatctcataggcctttttaggtcagttcacagtactgggcaatggtacaaggtcagtaactgggcttccatactctactgttcagttgctctaaaaccggacattttacttgaagcttctgtgcttcagtttcttcactgctaataccacatgagtatcacaagagtttaatgagttaattcaggtaacatgctgatgtcagtgcttgacacacagttcagaccctttaaaagtaaactttttgaacaagtgtttgggggaagagtagtagaaaagcacaaaatcagatatgacttcttggtagtctgatgtatatacaaagaccttcttatataatcaaagtgtttgttgtgatcctgaaaggtaaactatatgaatatttatttaagtaaaaatacagctgaaattgttaatttttctttcttattaggacactcctaggaatgttcagtttcttagcattaatagattcatagacaaaagactacaacaaataacacttgcgttaaatgctatgaaaggataatcaaaaaagtttacctgagtaaattttttctggtgaatgactagttgaattaaaaatgaaacaagaaaacaaaacatattaacaaaagaagggcagttttactggtgttcaatttttcaaagccttcaagtagctataatttaataaaaagcaatgcaatagaaaaaaaatcctggattcttctggaattgtatttattctacatcactaacttgttgaaaattatttgaaatgaaagtacagttattagaaataattgtatttcattttataaacactatattgtatcttgatttcattagaattacatttacaggatttacattcctttctttcttcatttttcaaaacaaagcagtgtccttcaggctcctttgctgctcagtaacatcaattaaaagttagagtcaaattaactgaaaagtttagatggaaaatgaagccttagaatgttctgaaagctgatgactatgaaagagtgatttgtctgcagccaaaatgtctttacccaatgctactctgaactgaaggatgtaaggtaatcagagttttcccaatttaaaagatcattttcagacggataatt

SEQ ID NO: 678224 - DNA, 614 bp, Homo sapiens
gaggttatgaaatagaatcaatagggttaagtgtcctagattgctgcagttaagctctgtggcccctccactacccacaccaatttttcacacctacccatgtccatacccttgggtagtctcctcacagactgatttaagtgatttgctttggcccttgggacaacagcaattgtaatgttagcagagacttgaaaaattcttccgcattgggattcacactcttactgctggtacccctttgccacaatttgattaaatcaagctagcctcctagaagatgagaccactttgagagtgtccctagctctcccagccttcctggttgtctcagcattctcagttgaagccccaaacatatgtgtgaggccatcctagaatgagccagtctatacctagaattataggaaatatagattcttttctttctttctttctttctttttttattagatggaatctcgttctgtcacccaggctggagtgcagtggcatgatcttggctcactgcaacctctgccttctgggttcaagctattctcctacctcagcctcccaagtagctgggactacaggtgyctgccaccatgcctggctaatttttgtgtttttag

SEQ ID NO: 678225 - DNA, 651 bp, Homo sapiens
ccccatcacttcccaccaagtccctccctagacacatggggattatggagattacaattcgagatgagatttgggtggggacacagagcgaaaccgtatcagtgaagaatctaaagtagtcaaactcacagaagcagagagtagagtggtggctgccagaggttgtggggagggcaagtggggagttgttcagtgggtacagtttcagtcaagcaagataaaaaagttctagaggacaaaaagatggcaacaatagacattggagagtggtagaatggggwggggggcaaaggttgaaaaactacctattggatactatgctcaccacctggatgatgggatcaattgtaccccaaacctcagcatcccacaatatacccatgtaacaaacctgcacatgtaccctgaatctgaaataaagttgaaattttagaaaaagtttctggagatctgctgtacaacattgtgcttatagttaaccgtacttaaaaatttgttaagagggtagttttcatggtgtatttgttttaccaccattaaaaaaaagcatttcagaatgcaggtgagagtgatattattcaaggaaaacccttgaagaaaaaccctctgttattctaaaaacacaaatgttatcacaggattccattgctt

SEQ ID NO: 678226 - DNA, 651 bp, Homo sapiens
ccccatcacttcccaccaagtccctccctagacacatggggattatggagattacaattcgagatgagatttgggtggggacacagagcgaaaccgtatcagtgaagaatctaaagtagtcaaactcacagaagcagagagtagagtggtggctgccagaggttgtggggagggcaagtggggagttgttcagtgggtacagtttcagtcaagcaagataaaaaagttctagaggacaaaaagatggcaacaatagacattggagagtggtagaatggggtggggggcaaaggttgaaaaactacctattggatactatgctcaccaccyggatgatgggatcaattgtaccccaaacctcagcatcccacaatatacccatgtaacaaacctgcacatgtaccctgaatctgaaataaagttgaaattttagaaaaagtttctggagatctgctgtacaacattgtgcttatagttaaccgtacttaaaaatttgttaagagggtagttttcatggtgtatttgttttaccaccattaaaaaaaagcatttcagaatgcaggtgagagtgatattattcaaggaaaacccttgaagaaaaaccctctgttattctaaaaacacaaatgttatcacaggattccattgctt

SEQ ID NO: 678227 - DNA, 651 bp, Homo sapiens
ccccatcacttcccaccaagtccctccctagacacatggggattatggagattacaattcgagatgagatttgggtggggacacagagcgaaaccgtatcagtgaagaatctaaagtagtcaaactcacagaagcagagagtagagtggtggctgccagaggttgtggggagggcaagtggggagttgttcagtgggtacagtttcagtcaagcaagataaaaaagttctagaggacaaaaagatggcaacaatagacattggagagtggtagaatggggtggggggcaaaggttgaaaaactacctattggatactatgctcaccacctgratgatgggatcaattgtaccccaaacctcagcatcccacaatatacccatgtaacaaacctgcacatgtaccctgaatctgaaataaagttgaaattttagaaaaagtttctggagatctgctgtacaacattgtgcttatagttaaccgtacttaaaaatttgttaagagggtagttttcatggtgtatttgttttaccaccattaaaaaaaagcatttcagaatgcaggtgagagtgatattattcaaggaaaacccttgaagaaaaaccctctgttattctaaaaacacaaatgttatcacaggattccattgctt

SEQ ID NO: 678228 - DNA, 645 bp, Homo sapiens
tacaaattaatccaaattttgttgatcttttaataatttactgcaacagtgcttgagagccataaaaagtaatgacaggagtttgcttgaatttagaaattcactcaccaaagtcatccatagtttgttttactgaacactaaaatgaaagcatgctcctataagttacatttcaaaaactacatggactaagtactgcataaaaattattttaaattcttaggaaaaacatacataggaggaaggcttgaagaaaatatatcaacctagagatattgggtagtggcataagcattttgcattttttccttccaamttttattttaggctcagtgggatgcaggtgtatgttgttacatgggtaaattgtgtgttttagtggcttgatgtacagattatttcattacgcaggtaacaagcatagtaccccttaggggtttgtcattctcaccctcctcccaccctccacccttaagtgggccctggtgtctcgtctccttctttgtgtccatgtggactcagtgtttagctcccacttatgagtaagaaaatgtgatatttggttttctgttcttatggtaattctcttaggtaatggccttcagctgcatccatgtggctatgaaggacatggttttgttcttt

SEQ ID NO: 678229 - DNA, 602 bp, Homo sapiens
tctcttgttatgttttttttttttttttttttgagacagagtcttgctctgttgcccaggctggagtgcagtggtgcgatcgctgctcaccgcaagctccacctcccgggttcacgccattctcctgcctcagccttctgagtagctgggactacaggcgcccgccactgcgcccggctaatttttttttgtatttttagtagagatggggtttcacggtgttagccaggatggtctcgatatcctgacctcgtgatcctcccacctyggcttcccaaagtgctgggatgttatgttctaaagtatgatatgatgccttataatggcaggttttcaattaatatctgttttagtataaatcatcaacatacattactcaaagtattttaaagtacttaaatggaaacaaataacaaagatacagtttttgatctctttgatttttctggccaaaatagttgctcctaaaagcaatctagtatcctggaatagaagaaaagactttaggctgggcactgtgggtcacacctgtaatcccagcattttaggaggccaaggtgggcagatcacctgagggcaagagctgaagaccagcctggcca

SEQ ID NO: 678230 - DNA, 602 bp, Homo sapiens
tctcttgttatgttttttttttttttttttttgagacagagtcttgctctgttgcccaggctggagtgcagtggtgcgatcgctgctcaccgcaagctccacctcccgggttcacgccattctcctgcctcagccttctgagtagctgggactacaggcgcccgccactgcgcccggctaatttttttttgtatttttagtagagatggggtttcacggtgttagccaggatggtctcgatatcctgacctcgtgatcctcccacctcggcttcccaaagtgctgggatgttatgttctaaagtatgatatgatgccttataatggcrggttttcaattaatatctgttttagtataaatcatcaacatacattactcaaagtattttaaagtacttaaatggaaacaaataacaaagatacagtttttgatctctttgatttttctggccaaaatagttgctcctaaaagcaatctagtatcctggaatagaagaaaagactttaggctgggcactgtgggtcacacctgtaatcccagcattttaggaggccaaggtgggcagatcacctgagggcaagagctgaagaccagcctggcca

SEQ ID NO: 678231 - DNA, 588 bp, Homo sapiens
tctactaaatgggtagttgtacaagtaaatactcagttgtattatttaaacaaggggtctgccctctagccataatatttttacctttatcaattgcaaatataaataaatatatttccttacaaattacacataacagtaacatctgaacacgtttgggcagcaacatagttatgtatcaatcaagtttatactaacaacaattactgatatagaaattgatacagatcatgaggaaaaaatcaacattcatatcaattaagaacctactggaggcagctgcttcttctcaatcgtcaggaccagactgtgtgaccacctatgtctatmaattagagttatgtggccttctgggatggtcacagtaatgtagctgccacaagaagatatttatgtaaagattttatcattatttgcctcagattaaattatatacatgtaaaaagtaggtgagtgctcagctttcttactttgggagattaaatttatgtcccacttaacaaattgtttttcccacagatttttttcataaatctattccaaattcaagaaacataaaataacagcaatatactatagtactgatga

SEQ ID NO: 678232 - DNA, 1438 bp, Homo sapiens
ttgatgtattgctacattctctttaacttacatttttcagaagttaccttaaacaatttagagtcattttatgcctttaataatatttgagcacagctgtcttctgcctcatggtcttttcttcaggctaacttgtcatggcttgtagccttgtagctgatagatactcttatgatgattggggtttatttagcccagacagcattcattgtaagtgtggtaaaaatgtactaaatttgtacttagctaattaggagtttataataattctgacatgctgaattgaagtttctttgtaatgttcaaggcaaagagaaaaggatttgtttagctaattaaaactataaacaagacggaatgtttaatctacttgaggcaaaccaacaastgttttcaagtacttatgaaatcaacataaactaggaaaacaccaattgaaattattttttattaaaacactaaaggattttctaaggcacagcttttgactgacttcttccttggcatttgttcacattattaggaaataggggcctactggtatttttcaaatcctttgttcatgacccacagtgagatatacatactatattgctattcagtaaaaacacacatgtaactgaaacaaaagctgtagaaaataatatttaatttcttgtgatgcagtattttaattttcttatatttcaaatattaaaaagttcctctcaggacaagtaaattgattttacaaattgatcaagatccacagcttgaaaaaactggactagactgtgcttgagtgcagagaccatgacatattcatctttctgttactaagtgctagagcaggtgctcagtagatatttgaataaattggtaattgagaagaggagtaagaagtgaaatcagagttgtaaaaggaatagatgtttttgacaatgaagttcttggatataataaaggcagtcgaggtaaagcactgtggtacttatggttggtatgaaatttgtttgtttgcaggaaatagaaaccagtgttagctgaagcaaagaagaatatattaaaaggattcagggtatctcacagaaatcaagcgtaggggtgtgtcttgtgatttgggaagggaatgaaactagaaagtggaatgacttcaagagcctaagtgtgttatcttgtgttttttcatccctgcttctttctttgtggctttttttttttttttttttttgggtggcggaatggtttcctctgcagccaaatgacagaagaatcttcagttcacgtgacagtttatttccaaagctcctgattgttttacattttggttccaggctttaatactgtatgtgacttataggtggtagaataaattagtcttttgatatttactgtatgccatgagttagtagtttcaagtcactggtttcagataagatacctgtattagtctgttctc

SEQ ID NO: 678233 - DNA, 1178 bp, Homo sapiens
ttagtatttgtaaagtgttcagaacagtatctgacatatagtaagcactgtaaaaatgtgtggtaaataaataaaactcacataagattttttttcccttgcattggctagtatggtacttctagatgaatattaatctagaagcccaatggtgggctttctttattcctcccagacttcaacagaaatgcttgtgtgtgtcattgttttagygtttcagtaatgtttccagtaaaacattagaaagttatagactgatatgaaatgtatttttccattatgttaaggaaatagtcatctattgctattttgctaagcgttaaaatcaggaacggtttaaaaatttcatcatgtctatttggcatctacttagatggtcatataacttttcttttttgacctacttatatggttgcttgtatgagtagagttcctaatagtgaactctcctggaatcactggagtaaacagttgtgcctatagcctatccttcatttagtgcatttatgagttctcattgctattacttttaaagtttttgcaccaatatttataaatgagtcttttttttccgtttcttttttgaaacggagtcttggtttgtggcccaggctggaggtgcgaactctgtccactgcaacttccacctcccaaacgagttcaaacgattctcgtgcctcagcctccccagtagctggtagtacaggtgcacaacaccacccataatttttgtatttttaggagagacaaggttctgccatgttggccaagctggtctcgaactcctagcctcaagtcatccacccatcttggcctcccaaagtgctagaattacaggtgtgagccaccgcccctggcccgcaagtgagatttgacagtaatttttaatgtgttcgttgtcaggttttggtgtcactgtgtgatgctgtaagtatttgacagtttccttcctttttctatattttagaaaagtttaggtttagtgatctattcttttaaaatttaaaagaatgttaaattagaataggaagtgagagatttagtcctgctgtcttaatttcacagatgaagaaacagtggcttctttacagccacttcatgtcagctacttggggtaagcagttgcggttgtgctacggaggtgaggaaataacatttattgagcatttatgtaggca

SEQ ID NO: 678234 - DNA, 1178 bp, Homo sapiens
ttagtatttgtaaagtgttcagaacagtatctgacatatagtaagcactgtaaaaatgtgtggtaaataaataaaactcacataagattttttttcccttgcattggctagtatggtacttctagatgaatattaatctagaagcccaatggtgggctttctttattcctcccagacttcaacagaaatgcttgtgtgtgtcattgttttagtgtttcagtaatgtttccagtaaaacattagaaagttatagactgatatgaaatgtatttttccattatgttaaggaaatagtcatctattgctattttgctaagcgttaaaatcaggaacggtttaaaaatttcatcatgtctatttgrcatctacttagatggtcatataacttttcttttttgacctacttatatggttgcttgtatgagtagagttcctaatagtgaactctcctggaatcactggagtaaacagttgtgcctatagcctatccttcatttagtgcatttatgagttctcattgctattacttttaaagtttttgcaccaatatttataaatgagtcttttttttccgtttcttttttgaaacggagtcttggtttgtggcccaggctggaggtgcgaactctgtccactgcaacttccacctcccaaacgagttcaaacgattctcgtgcctcagcctccccagtagctggtagtacaggtgcacaacaccacccataatttttgtatttttaggagagacaaggttctgccatgttggccaagctggtctcgaactcctagcctcaagtcatccacccatcttggcctcccaaagtgctagaattacaggtgtgagccaccgcccctggcccgcaagtgagatttgacagtaatttttaatgtgttcgttgtcaggttttggtgtcactgtgtgatgctgtaagtatttgacagtttccttcctttttctatattttagaaaagtttaggtttagtgatctattcttttaaaatttaaaagaatgttaaattagaataggaagtgagagatttagtcctgctgtcttaatttcacagatgaagaaacagtggcttctttacagccacttcatgtcagctacttggggtaagcagttgcggttgtgctacggaggtgaggaaataacatttattgagcatttatgtaggca

SEQ ID NO: 678235 - DNA, 630 bp, Homo sapiens
tcttaaatctgaggggcagagtttgcagtgagccgagattgcaccactgcactccagcctgggccacagagcaagactgtgtctcaaaaaaaaaaaagtttaaatagagatggggtcttgctgtgttgcccaggctggtcttgaactcatgggctcaagagatactcctgccttggcctcccaaagtgctgagatttagaggtgtgagccaccatgcctgggccttattttttagagtttaatatcatcagcttttttccatttgaaagactctccttggttacctagaaattttattttagctttcataaaaagctttgctttgaaagtgatcactgaattaatctaaggaaatatgagtcttaagatactrtgatgatgttcagctgcctcgaatactttttaaaaagttagtatagtgttcatgatgtatgaacagtttcttttgatttatgagcttcagattttgtgaattttatgaattttgagtgtgtctgaaaaagacagtggtaggaataaagtaatttctttccacatgaatctgtttttcagtgttttccgaagaaaacatatttgtatactgtataattcatagtggttttttttttatttgcctaggataatgaaata

SEQ ID NO: 678236 - DNA, 587 bp, Homo sapiens
cgaagcaaaacaattcaatctcattctgggtaaggcaacacactgtcttctgcaataaagacagtcagagtgtgtgtgtgtgtgtgtrtgtgagtgtgagtgtgtgtgtgatgtacattaaaagttagggctgggcacagtggctcacgcctgtaatccaagcactcattctggtaaggcaacacactgtcttctgcaataaagactgtgtgtgtgtgtgtgtgtgtgtgtgtgtgtgtgtgtgtctcacgcctataaggcaacacactgtcttctgcaataaagactctgtgtgtgtgtatgtgtgtgtatgtgtgtctgtctcacgcctgtaatcctagcactcattctgggtaaggcaacacactgtcttctgaaatagtgtgtgtgtgtgtgtgtgtgttgtatattaaaagttagggccaggtgcggtggatcacacctgtaatcccagcactttgggaggccaatgtgggcggatcatctgaggtcaggagttcgagactagcctggccaacatggtgaaactctgcctctactaaaaatacaaaaaaaataagccgggtgtggtggcaactgtaatccca

SEQ ID NO: 678237 - DNA, 472 bp, Homo sapiens
tgggtacaacccccactttccccttcttgctgtagagctccagattgtctcttatcaaaaatacaaattcccagatgacccatcaactccacttctgatctttgttctctagactaattcacacacgtgtgatgtgccgatgtgaacggttattcctgcagcactgcaatgataaaattttggagccgggcgcagtcgctcacgcctgtaatcccagcactttggggggccgaggtgggcagattgcctgaggtcgggagttygagaccagcctggccagtatggtgaaaccccatctctattaaaaatataaaaattatccaggcgtggtggcaggcgcctgtaatcccagctacttgggaagctaaggcaggagaatcacttgaacctgggaggcggaggctgcagtgagccaagatcacgccattgcactccgcctgggcaacagagcgagactcagtctcaaaaaaaa

SEQ ID NO: 678238 - DNA, 1124 bp, Homo sapiens
cttttttgttttttttttttgttttttgtttactgaagattacagaaaggagagtgttagatggtctatcttctaccttgcaggcctgaattttttttttttttttttaagacaggatcttattctgtcttgctgctcaggacagattgcagtgttgcaatcatagctcactgcagccttggtcttctgggctcaagtgatcttcctgcctcaagcttcctagagcactgggattacaggcgtgagccactacacccagcccaggccttcagacttttgtgttctcttccagctcagctctttccaaaagccagtaaccccatgcaggttggtcctcgctgtgagattctttctgagtagtctactctctgtcccttgtcatcacagtattcttgcttttgagggaataggccctaccagaccagtctgaatctcctgaaatgttggtgaataaaattttgttctgataccacagtgtaagtaaacaaacaaacaaacaaaaagcagtcatcatttccaatttttctagaagatctcaagttgtttttcatgcatatggtgagagaacaagttttttgtttttcttttatcttaaaactgtatatgcttgtgctacccagaacacggtattatgcagtttaagagattctttacatgcttggcgcrgtcaaacatcaatagttctaccttgatagactttcaagtctggaaaaagcttaatgaagttaggagtctttatggcctcatttttttcttttcaactgttagtttaggttccaggggtatgtgtgcagggtttgttacatgagtaaacatgtatggggtttggtgtacagataattttgtcatccaggaatcagcataacacccgataggtagtttttcagttctccccttccttcaaacttttaccctcaaataggccctaatgtctgttgttcccttctttgtgtccatgtgtgctcaatgtttagcttccactttattttattttactttgccaaagctacagaacataagaaagtagtctgggaaacttcttatagtgaaaggatatgtatacttgtcttttgggagatacaaaaaaaaaaaagggggtgaacagggcagaatttttccaattc

SEQ ID NO: 678239 - DNA, 621 bp, Homo sapiens
taaacatttgaatatatatttaatatatttaatatctaagtgttcgtattataaattcaaatatttaaataaattaaatatttaaatttaaaattttaatttaaacatttaaattaaaaatactttaaaacttataaatgtagaattattttatattttgttttatacaaaatgtgtataacaatgttagcgtttacataaatgataatcattatttaggtgacatttaatgagattatttacttcttcaaagtctgtaatacatagttcagcctaaatctgttttccatgaaagtccagctgcttgattagtttgcttagtggaaaaggagtatgattatctctttgcttagacacagaaaccctttgaarttacatttttaattaagccatacagaagacttctaaaggcttttaatgtttttatcagtcttgaagggttctgagtttttaaaatattatttagctcaaatatcagaaatattaacatgatttatgttgtaaagtatcaatttgtttaaggaattattatttatatttaaatgttttacattttatttacctgttgtaatctgaagttgaacttgctaaaataatccatgtctcaatttgcttttttat

SEQ ID NO: 678240 - DNA, 636 bp, Homo sapiens
tcataagtgggacagccatatcactaccccacaaagacctctagcttttagtttcttaacatattgacttaaattatcaaacttctggtcaagaggaggtttgtagtctgataaagaagtctcacactcatgttcatgagactgcaatactacatttttgccttttgtatcttcctgggaacacaagtgagcaattttcattttccccaacaagagtctgaaaggtgtcagaagagtacattaattaagcctcaagattattctgaacccaaggcctgaaattcattcatctatattatttatttcccaaattacatccagcatgctgtccacataactaatcagaggatgtgaatgaatgattaatttgttcaacaaatatttaatgagcatctactttgttccaggtattgttctgaatgctaaagatgcaacagtgaaccaaaaacacgaacatttctgccctcatgcagctcatattccaatggggacaggtagacaagaaacaatcatcataataaacaagtcrtagttttgaaggtgataagcatcatggaaaagagaaaaagtagagcaggaaggtgggataaggagcactgggaggaagggggcatgttgcacttataaaggggggtg

SEQ ID NO: 678241 - DNA, 448 bp, Homo sapiens
gactctctccaacctctgataaacactcctttcatttttaaaaatagcaatagactctgcagggaagttaggaggagggaatggatggggttgcatctagaaaacatgcaaatgcaacaaaaatatggcattctgataacttatgctgacaatggcaaagtggattaactgaaaagmgccacggtcaatcttggttgtctgaatgaagtcagcaattcaataatcattgattcaatgcttgccacgtgccggcaccaatctggattctggaaagaccacacaaactaggatggagccttattcctcagaatcactcctcctcttgtgagagagagacatgtacacaaataaccatcatgccactgagtatgatgaagggcagggaactgggaaacacgcacaatcccaaacagcagataagacccaaattacaaacactgagtgtacg

SEQ ID NO: 678242 - DNA, 1338 bp, Homo sapiens
tccttctttccttccatccttccattcttccgccccctttttcattctttcttctctgtctctcagaagagttacatttgcctgactgcctgcttctagtctattctcccatgctctgtgatttcttaaagatcatagcacttgccctggaagtcctctcttaacccaagcctctgatttctttgggtaaaaatttgaatttacttagggatgttagctaacctgtggctctttcacctaagaaattatagctattagcagaatctgcaaatttgtacaactggttcaacataggcttgccagatcaaccaatgacttgaactaactttgaagatctttcctccttttgtgaacataatttcactttgagatattttaatctcaacctagccattgtaagaacaaatcaaaacacaagacaatgatagcaaccaccgtaactggcacagaatgtactccccaacctaccccagaccccaagcgattactaggccaaaggtttcaaaagtaacaagacaattatttgaataattctgaatgcagaaactgaaaaaatgaagtgtacaaaaattgaagaaatacctgatgctatggtcatcctagatacaagttcttttggagacagagaaatacaaggtcataaatggaatcatagctgtggaaattagtctaattacacaaacacagggcctaaaattaattcagaaaatcttgaaggaattaaataaagtccagatataaataaatataaaaaaaacagtactcttgaccgatctggctattggatgcccaactgcctgccactggaaagggcagagccaacaacaaatactgccagccaggagatgagttttttcacctctctgcaaggctgaatagaaggaatttaatttgcccgcttggctcttatgcaatgccaggtaaccttagaataaagagggctttgagggagaaagccagacttccccaacatgttgctgcaatcatattctcctcttgtcagatgcctgcagacacagtgactgacttgtcccagactgctcattgctatcgctcagatccatgaggctgtgtctcccacagagaaggatgggagrtacaaaggctccaactgctctcactgtgaaaactccacagtgaaattccatcagacagaagccagctctctgctgagtgaattgggccttttatcagtcagatttgtatacattatagaaagagccaaagaagggagttactgtacacttcgtatatttttagttccctaggattagttgctattggactgaacgtttggggaagagaagaaaaaatgcaacttcagtcctctgtgtatgc

SEQ ID NO: 678243 - DNA, 1891 bp, Homo sapiens
acattaaaaataatagaagaaatttaccaatattatggtttaatttgatttaaaatttgatttggctttttaagagatagaactcttcctttgtaatgttcccttgataatgaacagcttcacaccaaagctttctgatccttaatagctcttgtaggttgggatttgttttcaaaggtgatttaaataattcccaaactgcttattttattcaaactaaaaatacttgagaaatcctgaatacaattgtttcatttcatcttttgtctcctgcacaaatgactttttactataaatcatactattactacgattgccacttttttatgagaatctgcaagtcttttttttttattacacaaagaaataggttcaacacagaagcagtacactaaaaatagggctgggaatcacaaagagattttgttgaaatctaggtgagaaattgagtaagaattcacaataaggcagaaaaatgtgccttaatttttggcctgaggttttccataaggagttaaggtaaatctttgtaggcaggagtgtggaggggttgggatggtattagttgtcaaggattttctgcagaccggcagaggatactttttctatccctggatactgaggtatgacccctgtggacttattttactttttagggtattggtaggaatttttgttagtgactcggttaggttaaccctgaacttactataacagacccaaatgctgccatggcaaaattcctttgcaaactgataggaaaataaactgcgtgagagctgagccttgtataggatatacctgttcaacaaaaacctggtattacaaaaaaaaaaaaaaaaggtgaggagcatagtgaattagcattttgtattaattcaataattcaactagctttattccaaagtgaccccaagtaaatcagatctgctgttcaaaagtaaagaaagaaaatacacttacccagaacaactccaaaagagtggagttgaaaaggaagaacaaacaaacaaacaaacaaacaaaaaccaaacccatagctgctgaagtttcagcctcagtgttatatgcattaatgtacaggagaggtatgtgtcccttgatgtccctggctctttaacaggcacgcatttcaaccatgggattcaccataagagtaaattttgacacattttgacccaggaagtaagatacaaaatttgacacgtctttggcatttagaaaaaacgtacaaactagaattccagcttttagttttctgggttgtttaggaagtcaattaaaggaaaatgacattcttcatgtgttttataaatgctatggaaattccctacctaaaagtgaatttaactgagcaatagccttttactaaggaaggtcaaattttcttctctttgaagcctttcaggctcctaaccagtttgcatattgagcttcccagaactattttcaactacctggggcagttgagcatgaagaacaccattctcsatgtctttagctacaaattggtacgcaaatgggctccggaggcctggtgaggaggggcacaccccttaaacccgtctgtttattactgaggaagttctgatcaagtttatggtgttaaagactccaacatatcaactccattgaaaagcaggacaagccattgtaaatatgaaccatcaaagcattagccatttcaatgaaatgaagcaaatcaattgtttttcagaaaggtgcctttcagatctcctttctcaggttctgagtttctgtattaagttcacattaaaacaacttgtgctaagaggattttaactcaggattttggaaggtcagtgagttggccagtaaaccatgatttccctaatctgtggcaaaacaacaaacatgctactttaaagcc

SEQ ID NO: 678244 - DNA, 656 bp, Homo sapiens
ttctcttttaactggttagatgttacttttgtataatacacaacctaccaacatggataggtaggtaaagagatagagagagatagataaagaaagaaatagagatggggttggaggggagagagagagagagagtcattttgcatcaggagccaggcactaagctaggtactacaaaatatagcatagaatttgaagtctggaaacagacaataagcagataattttaatacaagttaggcagagaaagtgagtgggtggagggggtattggcacaatcccatcagaaagaatttcaaagacaaaaagcccaaactgtgagaagtttaatgtagctagaggacagtggagctgtcagcaggtttccagtagggtgagtagatgatatgattaggctttgtgtccccatcaaaatctcatcttgaattgtagttcccccaaatccccataatccccatgtgtcaagggagacacaaggtgcaggtaattgaatcacgggagtggttycctagtgctgttcttgtgatacagagtgaattcttacgagatctgatggttttataaggggttcttccgccttcgctgggcacttctctttcctgccgacttttgaagaaggtgccttgcttcccctttgccttcccccgtgattgtaa

SEQ ID NO: 678245 - DNA, 623 bp, Homo sapiens
cttttatgaagaatactaaaaatgctatgaaaatactctctaaagccacctataactaatatattttcatatgtatcttttttcatttatgcccttctaaatttgagcttatgtcattagttaaatcagcaacaaaagaaagataatggataataagaaaaatgccttgtatttctatcaccttcctttcaagagtccargcatttttgtcgttagagccgatgcttagatgtgaaattgtttttactgagttattgatgactgtatctacgcagagcctaagtcaaattatagtatattatggaagcaatagcttccttcaatcttttgcattattgtactataagagccacctaagcccattacgaagctgccatgaatgttgtgtctagactataagtcatcttggttttaaccaaattaagtctctactacatgactcagatttagtatcttctgaacatagcaatgtaatctgcagccatgcaattattataagagaaaactaaaacctagtgccttacaaacaatgggcatacaataaatattagttgaactaaaaatatgacctggatctactacaaatctttcctatttttcttctaaaaatgaattaagagtta

SEQ ID NO: 678246 - DNA, 623 bp, Homo sapiens
cttttatgaagaatactaaaaatgctatgaaaatactctctaaagccacctataactaatatattttcatatgtatcttttttcatttatgcccttctaaatttgagcttatgtcattagttaaatcagcaacaaaagaaagataatggataataagaaaaatgccttgtatttctatcaccttcctttcaagagtccaagcatttttgtcgttagagccgatgcttagatgtgaaattgtttttactgagttattgatgactgtatctacgcagagcctaagtcaaattatagtatattatggaagcaatagcttccttcaatcttttgcattattgtactataagagccacctaagcccattacgaagctgccatgaatgttgtgtctagactataagtcatcttggttttaaccaaattaagtctctactacatgactcagatttagtatcttctgaacatagcaatgtaatctgcagccatgcaattattataagagaaaactaaaacctagtgccttacaaacaatggrcatacaataaatattagttgaactaaaaatatgacctggatctactacaaatctttcctatttttcttctaaaaatgaattaagagtta

SEQ ID NO: 678247 - DNA, 950 bp, Homo sapiens
ttttttttttttttttgagacagggtctcacattgtcacccaggctggagtgcagtagtgtgatcttggcttactgcaacctccgcctccaaagctcaagtcatcttcccacctcagccccccagtagctgggactacaggtgcatgccaccatgcctggctaatgtcttcatattttttgtggagacagagttttgccatattgtccaggctggtcctgaactcctgggctcaagcgatctgcccacctcggcttccacagtgctgggattccaggtatgagccaccagccctcacccaataggtgtttttttttttttaatccctcacctatctctcaccttcccagcttctcttctcttcttcttcttctaataataataataataataataatagagaggaggcctctcgctatgttgcccaggctggtttggaactcctgagctcaagtgattcactcccttggcctcccacagtgctggcattacaggcatgaaccattgcgcctggtcctctccctgcttctgggtctccaatgtccattataccacgacatgaggatgaggacttctatcattagattttcttctcttttactgcactattgccagaactaaagtatgatttttttctcagtatctggagaggatggtaagcacagaggactaatgctattaccctacagatgttttkcagtctttttttcttaccgaatttgtgagtattggctacacttactgggatcaaaatatgaactcaacaagaggcacaatgcaccactcagccctcagccttctttgtctaagaaagtaggtattctcttggtggaatttctgattcacagatgggtagtgacaggaagtttaaagttttgacaattcagaaatttgtttagcctcccaggcttgatctgaacacttgatgcctagcagtaagagaaaaacatt

SEQ ID NO: 678248 - DNA, 1159 bp, Homo sapiens
  misc_feature 12: n = A,T,C or G
agcacagcattnattattcacaaatctattgccagtagtacccaatgccctactactcttattagatctatatgcatagataaaaacagtaagtcttagtattttaggaagtatagtttttcagaaaaaaagatgtcagggttttattttcccagaaagacagatcacctgaacaagattgaagaagtcattatcaaataatattctttttttttttttttttttttttgagacagggtctcactcagtcacccaggctgctggagtgcagtggtgcaatcatagctcactgcagcctcaggtgatccaggctcaagtgatcctcccacttcagcctcctgagtaactgggaccacagacatgtaccaccacactcggctaacttttttctaatttttgtagaaaaggggcctcattatgttgcccaggctggtctcaaactcctgggctcaagctatccttccacctcggcctctcaaagtgctgggattacaggcactgagccactgaacttatcctcaaataatatttatttgtatctttacctagtccgtcaagatgatttgcgatacaatgactagtcacccagatcctcaaaagatgacagtattggactcctataccccagaaaaacagaaaaactagggctgtgaaaaggaaacatccttggatttattcagtcaaataaatgtttattatacacttgctatgtcccaggcattaccctgaagaaatgacaggaacaagattttgtgaccagaagctcaagaatgactttggccttcagkagagtgatcgtagctgaaaccagacagcactgggatgggtgagaagttggctacaaacaactattttaagaaatgtggcaggaaagtgaaaaagagaggaattttaaaagggcaatgtgaaatcaagggaggattctagttttttctgttttactttattcttgtctgtctctaagcatgtataaaggccaacagaaggaaggctttagtaagacatgaacacctgagtgaagtcctcacaaaggcggggtagatgggatccacagcccaggtaggagattggtcttagcataaatacaacctcttccactgtgactggggaggaggaacagtttttggcaggaagcccctgcgattctccacttacatct

SEQ ID NO: 678249 - DNA, 1187 bp, Homo sapiens
caatttaaaatattaatgcatcttacactaacccttcctcttctcctactttagtaaatataatcctactcagaggtcagcatgtgagccaaattaggccacagcctttgtacaggccgggagctaagcatggctgtgttttcccatgctaaaaacaaaaaaagaagaatatgtgatagaggccgtatgtggcccacaaagcctaaagtgttgactgtttggttcttcatagcaatagtttgctcatctgtcatcyggcttgaatattcctgtctcacacaggctagcattaacatagattggttagagcatatacatacttctgtgcccaacactggatcctttagatactaccctacacagacattattccttggtgcctcgtttaacaatgatatttacataaatgcatggatggatattatgaatttcttattgtaattgcaaatttgatatctacattttatttgagtgttaaaatgatcaaataattgtagtgaagtaataggcagtctttctataaccttgatttttctttgagaagtactgttgtacatacttttttttgtttctcaaatacaaacttataatgttcaactgcttcacatatttaagttttaatagattagaaacaataacaaacctatgatcatgtaccaagttgcttattgagttattctacttaaagatgttttcagagaaaataaaaggtcaagtgaaccagacattgggttatttggtttaattttctggaaaataggattgcctttatcagatcccagtgtctctcagtcctcatgcttggctgacagcttggcagtggctctgctgtggtggagatgggcggaggaagttagtctgtcagcaaaaagggctgtaaactgagccggggggccagggtcacctcatcttgacctgctcatcagtgatgggttttgtcagcatcagaaaatgtggctacatgatttcctttaatgctaattttgacttagaaagcaacctgtggagcagggctactgtggggtgtgacatctcagcgcagtgtctgttcattgcagctgcagtgggtgcccactcggtgcagctgcagtgggtgccaggtgtccttctcagccaggactatcagaacatcacagcagcatttaaaccaagagggagagcagatctgcacacatgcagcatggaag

SEQ ID NO: 678250 - DNA, 1187 bp, Homo sapiens
caatttaaaatattaatgcatcttacactaacccttcctcttctcctactttagtaaatataatcctactcagaggtcagcatgtgagccaaattaggccacagcctttgtacaggccgggagctaagcatggctgtgttttcccatgctaaaaacaaaaaaagaagaatatgtgatagaggccgtatgtggcccacaaagcctaaagtgttgactgtttggttcttcatagcaatagtttgctcatctgtcatccggcttgaatattcctgtctcacacaggctagcattaacatagattggttagagcatatacatrcttctgtgcccaacactggatcctttagatactaccctacacagacattattccttggtgcctcgtttaacaatgatatttacataaatgcatggatggatattatgaatttcttattgtaattgcaaatttgatatctacattttatttgagtgttaaaatgatcaaataattgtagtgaagtaataggcagtctttctataaccttgatttttctttgagaagtactgttgtacatacttttttttgtttctcaaatacaaacttataatgttcaactgcttcacatatttaagttttaatagattagaaacaataacaaacctatgatcatgtaccaagttgcttattgagttattctacttaaagatgttttcagagaaaataaaaggtcaagtgaaccagacattgggttatttggtttaattttctggaaaataggattgcctttatcagatcccagtgtctctcagtcctcatgcttggctgacagcttggcagtggctctgctgtggtggagatgggcggaggaagttagtctgtcagcaaaaagggctgtaaactgagccggggggccagggtcacctcatcttgacctgctcatcagtgatgggttttgtcagcatcagaaaatgtggctacatgatttcctttaatgctaattttgacttagaaagcaacctgtggagcagggctactgtggggtgtgacatctcagcgcagtgtctgttcattgcagctgcagtgggtgcccactcggtgcagctgcagtgggtgccaggtgtccttctcagccaggactatcagaacatcacagcagcatttaaaccaagagggagagcagatctgcacacatgcagcatggaag

SEQ ID NO: 678251 - DNA, 636 bp, Homo sapiens
cggcttcagtgcttggctcactttccctcaaatccatttccattttcctgcacaccaaccacaagggtgctttcccattctcatccagcaaccatttttctggagggctgcctcaggtggctagagccacattgcctatggtcacggagagcctttctgggaataaatggtttcctgagggcagcccttaaccagtgatggttggggacactagtgtagaaacactccagctctcttttaacgaataattctgaggtgcaacctctactatactcagatctctcctgcaggattcagtcagtgtagcctctatgagtcttttccaggtaacatacccgagggcttggcctcccagtgtgaatgtgtgtgcatgtgtgtgtgtgtttatgcattacatataaaatcarcatccatcccctaattctatttgtttgtaatggctcctatatacacatataggagtgtgtgtgtgaacatacatattattatatgtaataatatataattatatataaatacatattatatattataaaattatgttatttaatatattataaattatataacatataaatttaaaatgtttttataaatatataattatatattgtatataatatacaatttataaat

SEQ ID NO: 678252 - DNA, 1289 bp, Homo sapiens
  misc_feature 15: n = A,T,C or G
gggacaagatgatgnggcggggggtgggggcaaataataagcagtattggttccagatgcttctctggcccaagtatttgacatgcctatgggcaaattgaagatgccttgggcagcagatagaccactgccaagggttcttggtggaagggagtcactcaccagcattgttctgctgcttggtatttttgatgtaggcagaaaacttggaagagatgtcgatgcccgctgtgttggattcccggtgttttgcagccagtttggggtacctggaatggaggatgcagtgttctgtgaatcagtagacttggagctcctttaagggtgagcctatccctatcatgataagcaatacttccctttccagctgcatctacaaaatgttttgggggtctttatcctcatactatagggagggtgggcattctcagccctagggcatccatagaagaaaccagaggccagtgaggtgctgagatctgcctagggtgacacagtctgctaggcaaagaaccagaatgccattcaggggtctcaggatgtgtccttttcttgggaccaccaataagaatgtgccagtgggatggcgcaatcaaagttccctctgagcttgcctctctatctggtagggttctcaacacttcccttacccgctaaaataaccatctactgccagtcctgtgattataatcctagctacacagagctaattctgggagcaaggagaagccaggtatgttagcattaaaccatttctccaaaggaagaatacccacggtcctcttctgaaatgcccttacatgcttattatttgtgtgcagtaataacatgcagaaactaccaagctccaaaaaaggacatgtgttttcaattgttttattttattttatttggagatacatttgcaatgatccagcccccctctctctctctttcgtagagtctttcattttgaagccacartaatacaagaggcaggctggagttagaacgattggccttgagactgaaggaggtaaacttgctcatgtgggaacccagggcttggactcattagccccatcaaaatgaaaaaaatcaactcaaataattattatttcataagcattttatgggtatggccaggtagtggtgggaagagatgggagacagtcgccaggctatcattattttcaatgaatgtgcacctctgtgatctctgggtgaatcgtttttgactgtgggctggtgggttgccttacgtttaaaaagcaaaatcctttttgtttgttttgatgtttttgatagtt

SEQ ID NO: 678253 - DNA, 594 bp, Homo sapiens
tgaataacaaggattatagtaactttttcattctttatttttgactttgtggccttttggattttgcatgctttttcctatgactccacttcaggtgtttatagtgaaacataaacctctttttatcaaattccagtgcaagctttaatgacaagcwtattgtaattattcttgctacattcaaattgtaatgaatcaaaatggtatgtggctttttttgaaagatgatcttttagttgctatttcaacaaaccccccagatctggagcccagctaccttccctccatcttttgtaaattaaaaataaaaaaatggatatgatacaatatcctaaattatttctttggcccttttgagcccatactcagaaccctccaatgactttgcactaataataggataaaattcaaactccttgagctgcctctcagggaccctttctttttccagggttataaattctcccctttcaagacctcttcccctgcctcccctcccctctaggcaaacagcttgcccacctcctctgactaggctcaggttggctatgtctgcacttttgttcatgtcatttctctcttttggacagcatt

SEQ ID NO: 678254 - DNA, 594 bp, Homo sapiens
tgaataacaaggattatagtaactttttcattctttatttttgactttgtggccttttggattttgcatgctttttcctatgactccacttcaggtgtttatagtgaaacataaacctctttttatcaaattccagtgcaagctttaatgacaagcatattgtaattattcttgctacattcaaattgtaatgaatcaaaatggtatgtggctttttttgaaagatgatcttttagttgctatttcaacaaaccccccagatctggagcccagctaccttccctccatcttttgtaaattaaaaataaaaaaatggatatgatacaatatcctaaattatttctttggcccttttgagcccatactcagaaccctccaatgactttkcactaataataggataaaattcaaactccttgagctgcctctcagggaccctttctttttccagggttataaattctcccctttcaagacctcttcccctgcctcccctcccctctaggcaaacagcttgcccacctcctctgactaggctcaggttggctatgtctgcacttttgttcatgtcatttctctcttttggacagcatt

SEQ ID NO: 678255 - DNA, 638 bp, Homo sapiens
tgttgttaaacatgcttcaggtaaactaccctgtataaagattaatgggacagggatacaggtggacttttaggagccccaaacagtgcaatagcctgagaagaaagcgaagtagaaccttgtaagagcagtgcaccacagtttgaagcaagaagtgaacagtctagaaacaaaagaaaaagggcttttcacctgcagggaccaaagctgaacccaagaggctctggaggagcaactggatggaaagagcgagtcccagaggtccatcctggaaggaagggtcaaaccagggcaaggagggaactcccataccttgatgcagtgccaaccttacctacattgaatcagatgattttgttgctaaccggtccaatttacaaaagtatgtttttctgctgacttcttggactctcactgttttgcttctcgccctgccccttgcttttattttttacttcctttgttttctagaactggtgaatattcagggagatttgaatggagacttagaaagcctgagaaagttagagctgggattcaatgtctttggacackgttatcctttccacttggataacccatcgcaagcagttctaacaaaaaccatgcacatgtgacatgaagtctataccttttct

SEQ ID NO: 678256 - DNA, 630 bp, Homo sapiens
tagagggccacgtaggattattaattgacctagtttccatattgttgtgtcttagggagtagggtggcctgaggaggggaaggaagatggggaatggccagtctttggagtagtcagaacatacacatttatcaattaagtttgccatcttatatgggcatgagttgtgatgcctcaaagcaattaccatactaacatggaaaatcactgaycacagaacaccataacagatataataataatttaaaagtttgaaatactgtgagaattaccaaatgtgacacagagacagaaagtgagcacaggcttttgggaaaatggtgctgatggacttgcttgatgcaagcttgccacaaaacttcaatttctaaaaaaattctgtgaagtgcaataaagcaaagcataaaacaaagtatgcctgtattagcaattaaagtttgtgtatagtcaactatgttaatcttgtttcatagtttcttaattttctatatgcttaagagatttcctcctaagatatatatgtattattctacattttcttcaaatttgtttataatttttctttaacacattttcccattttttttctaattatactggcaattttataacacctttaattttaggaat

SEQ ID NO: 678257 - DNA, 584 bp, Homo sapiens
aagcaagatttggtgagatagtggacaatctagtcagacagatgaaaaaaaaaacctttaagtggtagtaggcacaggttttgactatcrggcaaattcagagaaggaggaaaaaaaacaaataaggatgacactgatactttgaggtttcgagactatgtacttaatgatgtaaactgggggtcaaaatgaagaagaaggaagaaattgaaggacaaagtgggctgggcatagtggctcatgcctgtaatcccagcactttgggaggccaaggtgggcagatcacctgaggtcaggagttcgagaccagactgggcaacatggtaaaaccctgtctctactaaaaatacacacacaaaataaaattaaccaggtgtggtggcagtagcctgtaatcccagctactcaggaggctgaggcaggagaatcgcttgaaccaggaaggcagagtttgcagtgagccaatattgtaccactgcattccagcctggttgacagagcaagactgcatctcaaaaataaataaataaatacgtaaataaataaaatattaaaaagaacaaagtgctcactttatttttaga

SEQ ID NO: 678258 - DNA, 584 bp, Homo sapiens
aagcaagatttggtgagatagtggacaatctagtcagacagatgaaaaaaaaaacctttaagtggtagtaggcacaggttttgactatcaggcaaattcagagaaggaggaaaaaaaacaaataaggatgacactgatactttgaggtttcgagactatgtacttaatgatgtaaactgggggtcaaaatgaagaagaaggaagaaattgaaggacaaagtgggctgggcatagtggctcatgcctgtaatcccagcactttgggaggccaaggtgggcagatcacctgaggtcaggagttcgagaccagactgggcaacatggtraaaccctgtctctactaaaaatacacacacaaaataaaattaaccaggtgtggtggcagtagcctgtaatcccagctactcaggaggctgaggcaggagaatcgcttgaaccaggaaggcagagtttgcagtgagccaatattgtaccactgcattccagcctggttgacagagcaagactgcatctcaaaaataaataaataaatacgtaaataaataaaatattaaaaagaacaaagtgctcactttatttttaga

SEQ ID NO: 678259 - DNA, 629 bp, Homo sapiens
tgttacatttaggaatgaaagtttgattttataagccaattaaaaaacagaattcccattagaaaaattaccttgtagcaagttttgctagattctaactgatctttaaagagggacattcagtaccctaatctaaatagcattgaaaactttccgtttcttttgggagaaattgagaattattttcccgagtttatgtgatgagagagaaaattatttaatcacaatcacgagcaacttrgaaagacaaaaacacaacttttatgcatatatgcatgtatgtgggggtagatggaggggtgtaaatccagagagggacttgattgtgagtttcttattttgcatttttattctcattggcagacagatttattttattttattttttgatgacaacactccatgtgtctttattttaatgtgattccatgaagaaacttgcttattgattacggtcctataactcagaaatgttaagttatggttttaaataggggttaattaccattgatgtgtgaatacaggttctaaaagaaatgcatgtcggaagagaaactgaactgaatagtattaattttactgttttcaaagctctcttctagctatgataaggagacagaatacatgtg

SEQ ID NO: 678260 - DNA, 1009 bp, Homo sapiens
aatctttattattacccacctggaagataagtattattatctcaatcttccacacaagaaaactgaagtacagatgtgtgaaggaacttgcccaagagcccacagccggcagcctgtgtgggactggagcctgcattcttcattctcagtgcaaaatcaaacagtgaattcctggggtcagagcagttggtcttaaagtgggtcaccttccctgcttctactggttgtttctccctttcctgattgccttctctcttccttctcattttcttgtttgcgactttgacttcacctcatcactcttcaccctttgtcctttactcagccttctactgtctcatgagctggattttctcctccagtgcaacacacagcaaaatatcaacagctacaaattgttttaagagtcagttgcagccattacaaattaagcttatggaaagttcttaatggtatggaaaaggcgggattgtgaattccctaaagcagcactgtcttgttcattgagctttccagcagtacaatgcaggcactcagatgatactcaatacacaatttttttttttttttttgagacggagtctcgctctgtcgcccaggctggagtgcagtggcacgatctcggctcactgcaagttccgcctcccgggttcacgccattttcctgtctcagcctcccgagtagctggractacaggtgcccgccactgcgtccagctaatttttttgtatttttattagagatggggtttcacggtgttagccaggatggtcttgatctcctgacctcgtgatctgcccacctcggcctcccaaagtgctggcatcacaggcgtgagccaccgtgcccggcctctacacaattttttaaggaatgcaatagtaagctcaaaaagcaggacacacagttccatgcacagtgcaatctcaggaagaaatcacatgtgtaaagtgaagccagggcagaaatgtgcttacctagtatccatagttgtgttaagataatggc

SEQ ID NO: 678261 - DNA, 1009 bp, Homo sapiens
aatctttattattacccacctggaagataagtattattatctcaatcttccacacaagaaaactgaagtacagatgtgtgaaggaacttgcccaagagcccacagccggcagcctgtgtgggactggagcctgcattcttcattctcagtgcaaaatcaaacagtgaattcctggggtcagagcagttggtcttaaagtgggtcaccttccctgcttctactggttgtttctccctttcctgattgccttctctcttccttctcattttcttgtttgcgactttgacttcacctcatcactcttcaccctttgtcctttactcagccttctactgtctcatgagctggattttctcctccagtgcaacacacagcaaaatatcaacagctacaaattgttttaagagtcagttgcagccattacaaattaagcttatggaaagttcttaatggtatggaaaaggcgggattgtgaattccctaaagcagcactgtcttgttcattgagctttccagcagtacaatgcaggcactcagatgatactcaatacacaatttttttttttttttttgagacggagtctcgctctgtcgcccaggctggagtgcagtggcacgatctcggctcactgcaagttccgcctcccgggttcacgccattttcctgtctcagcctcccgagtagctgggactacaggtgcccgccactgcgtccagctaatttttttgtatttttattagagatggggtttcacggtgttagccaggatggtcttgatctcctgacctcgtgatctgcccacctcggcctcccaaagtgctggcatcacaggcgtgagccaccgtgcccggcctctacacaattttttaaggaatgcaatagtaagctcaaaaagcaggacacacagttccatgcacagtgcartctcaggaagaaatcacatgtgtaaagtgaagccagggcagaaatgtgcttacctagtatccatagttgtgttaagataatggc

SEQ ID NO: 678262 - DNA, 617 bp, Homo sapiens
taaatacacttggcagcatgcctgatgaagagggtaactgagctagggaacatcatctaggtcaagctatttgcatctgttgtggaattagctgttttaagaaagtaagttttctacataatagaagcttacaccttttaaatatcaaatttcattttattttcaccattttttkggggaaatctttaaggtgttgttttccttttaaatctagtgtatttgaacataattcagcttttaatgtcttgaagctgacataaacattttttaaaattgcgtattgcagttgaagccctctaggagaacagagattttagggctctcccccatccacctgaccctgcaaatccacactgctagactttaagtgttatactgcttataatcacttcacttctcattccttggtgacgtgctattcatttttacattgctgtatatctgggtggccacttaacatcactttcctttgcccctttgagtctgtttttggtgactgttatactcttaagcttgaaaacttcaaatcttgacactagaagtttctgaataaatgaggtattactactggactttggtattcacttgttacatgaattagaaggtaacagtttcca

SEQ ID NO: 678263 - DNA, 644 bp, Homo sapiens
accaaaaataatgtattttatttgtaacttttctaaaaataatgttatactgatgtggataagtagtaaataaaacaccatgaaaaattatgggtccattgtttttatgcagatgcttctcaccaggtgatctaatttcacgttagctaagtaaaagccccaataaaaatcaattaagaagatttctgtctctgggaaaaatgatataaaagaggtgagayttaccctgctgacttaaacaacttaaaggctagacaaaatatataaaataaaggttttaacaacaccagacattgggcaatgagggacagtgaaacttgatggacagaaaacaacaaatgaagtatatcttatgattaccccagctatagtcttgacagggtctccaagcagcagtacccaaagaaggtactcagatggaaccaagaaaaatccctgatacaagaccaagagttgggaatctggagagaacaagaaagctagactaagaaagactaccagagagaagagaaatgcatattgacagaacaccggagagcggcagacggtcattcaggagtatttagcggattactgatgaaaacatgaatgtaagactagaaataattcctgtacccacctgtcaggatgagaaaactctcata

SEQ ID NO: 678264 - DNA, 644 bp, Homo sapiens
accaaaaataatgtattttatttgtaacttttctaaaaataatgttatactgatgtggataagtagtaaataaaacaccatgaaaaattatgggtccattgtttttatgcagatgcttctcaccaggtgatctaatttcacgttagctaagtaaaagccccaataaaaatcaattaagaagatttctgtctctgggaaaaatgatataaaagaggtgagacttaccctgctgacttaaacaactkaaaggctagacaaaatatataaaataaaggttttaacaacaccagacattgggcaatgagggacagtgaaacttgatggacagaaaacaacaaatgaagtatatcttatgattaccccagctatagtcttgacagggtctccaagcagcagtacccaaagaaggtactcagatggaaccaagaaaaatccctgatacaagaccaagagttgggaatctggagagaacaagaaagctagactaagaaagactaccagagagaagagaaatgcatattgacagaacaccggagagcggcagacggtcattcaggagtatttagcggattactgatgaaaacatgaatgtaagactagaaataattcctgtacccacctgtcaggatgagaaaactctcata

SEQ ID NO: 678265 - DNA, 644 bp, Homo sapiens
accaaaaataatgtattttatttgtaacttttctaaaaataatgttatactgatgtggataagtagtaaataaaacaccatgaaaaattatgggtccattgtttttatgcagatgcttctcaccaggtgatctaatttcacgttagctaagtaaaagccccaataaaaatcaattaagaagatttctgtctctgggaaaaatgatataaaagaggtgagacttaccctgctgacttaaacaacttaaaggctagacaaaatatataaaataaaggttttaacaacaccagacattgggcaatgagggacagtgaaacttgatggacagaaaacaacaaatgaagtatatcttatgattaccccagctatagtcttgacagggtctccaagcagcagtacccaaagaaggtactcagrtggaaccaagaaaaatccctgatacaagaccaagagttgggaatctggagagaacaagaaagctagactaagaaagactaccagagagaagagaaatgcatattgacagaacaccggagagcggcagacggtcattcaggagtatttagcggattactgatgaaaacatgaatgtaagactagaaataattcctgtacccacctgtcaggatgagaaaactctcata

SEQ ID NO: 678266 - DNA, 999 bp, Homo sapiens
tcacccctttagaagcgccttttatgtcaaggaagtggagtcatgatttacaggaatatgttgcttgcttaaaagtattttggtaaactcattacgacttttaacccataattcaatgatcatttgaaacttgattgtgctcaattattaatttacttagcttatcacactatccattgtggaacaccamaaggtctctcaaaccctaaatctattatgttattagcatatcagagtattttctccttatcaactcagcaataaccaaattctacagcactatcagaattaatttactcaataaatttgctcccaaaaagtttctcatgaactaagtttttataattattttaatcaaacttttgacttcgatctttttaatctaaattatttttcaaatccatattttcctttactattatttatagtgtctcatacccacagaaggaagttggaaatggaaatccatgtgcattttttttctagttccaggcttttcaaaataattagatgtctacaaatagtaaaaggtgaaacaacaaatgcactggaatattgctactatattcagattttgatcttctaaagagatttaattgagacattccccataaatatataccagtttatcctctagctgacaagtcctactgggcaataatgttttgtactctaggccatggctctgttattattctcaaaaatagtctttagtctcatgctaaaatgtataaacacatatttatgctcacagtatgaagtgtagattatgcagctttgaaaatagacatttaaggcattttctcccttttaaaaggagctatgtcccttaattttatgctaaatggtgttttctttactgtatatatagccattgcatttctataacaaatagtttcatactttgattagaatactgagcatgatttcatttcagtgttcggagcctgtcaagttcacataaaataaaataaaaacaaccatccttgtattagcaag

SEQ ID NO: 678267 - DNA, 643 bp, Homo sapiens
tgattgttattattacatatgaattgagggaatagccacaattaaccatgattaacattattaatatgattaacaagaagcttaaatataatcctttgcttaaggattaatttagagggagcattaaaaaccctgggcctttcttagaccaaatagcaagcatctgatattccttaayagatttttaaaataggcacaatttttatgacagcatcatcagagctgctgaaattttgaagctaaaaggtgtggtatagatatgaaacactgtagttagttttttttgtttaaatgttggactcatgattcaaaactttgagatcacatcatatactgtatgctccattcacctcgaatatgttcttctatttttttttcttcttggtgcatgtcattgcacataaattttgacacattctgaacagaacaggaaactacttgctgtcacaatgagtagtttgctacccaaagttagagtatttatttagacattaaatcagtactccttcgatgaattggaaattcaattatagtgaaaggaacaggtttggtgaccctttctgtgattacatcttgcaaacaaatgtatctaaatcataaaggactgacattttactaaacaagttgttgtactggccaactt

SEQ ID NO: 678268 - DNA, 1499 bp, Homo sapiens
gccctaaaatgtctttaacctcattagatatagagacatggatatgaaaaccacaatgaggcacacagaacatccaccagaatgactaacttcacaagattgaccacaggaagtgctagccaggacatggaacaaggagtgctctcacacactgatgaaggagtataactgggaacaaaactctggaagattatctgacattatatactaaagctgaatacatgcccaacagaaatgtagccacgtaggaaccaaaaaataaagtataagaatgtttacagcacttgcaatagccaaaagctggaaaatgccatatatgcatctgaatgtaagagagaaactgcagtagagtcacacartgagtcactctagaacagtgattttccaagcatgggctccagccccacagcaccagcatcagcatgcctgagaacctgctgaataaagaactctgcagggggccccgcaactgtactgcagcatgcattctgaggcacgctacagttttcagaagcattgatccacagcaaagaaataactaaaaatgaatttgaaaacatgttatgcataagccagaccaaaaattatatgtactatatgataccattcacatgaagttaaaaacaggcaaaaataaactatagtgttagttcaaggggaggagaatggacaataattgggaggaattataatgtgatttactcgggtattgccaaagttctattttttaacctaagttttggttacatgggtacagagttttaaaatactaatttaggctgtatacatattttatcagcttttctatatatgtgttaatttttttaaaggctttaagaaaaggagagtctagcttatcaatctcttagtacttcaatcacagaaatcaaaacacaaattgtaaaatatctaaaaaatgataatgaaagctctacatactgtaacctactgaatataactaaaacattacatagacaaagtttaaggctttaaatatttatattacatcagtaagaaagaagaaaaatcaatgaatgaataactaaaatgtttaggagaaagtaaataaacccaaggaaagcaaaagggaaaaggaacttaagattcaaaacacagaaaacagtaacactaataaatacatccaaatgcttttgttcaaaaaaataaaacagagctaataaaggggaaataggaaaatataggaaatggaaaaaagacaaagtaagaaatcagggaaaagtaaccaaagatgtggagaatattactaagagttataaaaagctactttgttcaacacaagtaacttatgaccttgaattactggatgctttttaggaaattataaattactaaaactgtttcctagagagagaaaatctatttggacaagtcagtattgacaacactgtcaaaaaaagtacccccaattcctcccctctgctccacatcacaataaataagcaaaaacgggacaaaggacccaaacctttagggaacag

SEQ ID NO: 678269 - DNA, 1448 bp, Homo sapiens
  misc_feature 577, 578, 579, 580, 581, 582, 583, 584, 585, 586, 587, 588,589, 590, 591, 592, 593, 594, 595, 596, 597, 598, 599, 600,601, 602, 603, 604, 605, 606, 607, 608, 609, 610, 611, 612,613, 614, 615, 616, 617, 618, 619, 620, 621, 622, 623: n = A,T,C or G
  misc_feature 624, 625, 626, 627, 628, 629, 630, 631, 632, 633, 634, 635,636, 637, 638, 639, 640, 641, 642, 643, 644, 645, 646, 647,648, 649, 650, 651, 652, 653, 654, 655, 656, 657, 658, 659,660, 661, 662, 663, 664, 665, 666, 667, 668, 669, 670: n = A,T,C or G
  misc_feature 671, 672, 673, 674, 675, 676: n = A,T,C or G
gaaaatggctctcatgaccaagttaatttagcataaaatataattgacagtaaaggtataaagtataaaaccatcagttaaaattctcctctgtcattcatatctttcctgcttcagaattacaatggaagagggtgttctcaatgtgtagaatttcaccgagatggtatagaattttgggctggacaaatatttctgtggtttccttaaacgagctgttgtaattttattgtttgagcgttaattagaataaagtgattttctcaccacccccccacccaaaacaaaattaatataggcatgctggctcacatctgcaatcctagcactttgggakttcaaagctgaggacctcttgagcccatgagtttgaaaccagcctgagcaacatggtgaaaccccatctctacaacaaatacaaaaaaattagctgggtgtgatggcatgaacctgtggtcccagctacttgggaggctgatgtgggaggatcgcttgagcccaatagtccaggctgcagtgagccgtgactgtgcccctgcactccagcctgggtgacagagtgagactctcaaaaaannnnnnnnnnnnnnnnnnnnnnnnnnnnnnnnnnnnnnnnnnnnnnnnnnnnnnnnnnnnnnnnnnnnnnnnnnnnnnnnnnnnnnnnnnnnnnnnnnnnttaaggtctgtcatacgcgccccgagaaaagcacccccctctcccctctctctttctgacagggtctctctctgtcatccacgctggagtggcagtcactgctcactgcagcctccacctcccaagctcaaaccatccttctacatcagccccccaagtagctgggacaacaagcatcagccaccatacccagctaattttttagttttttgtaaagacaggggtctcactatgttgcccgggctctaaacatcatttcttatttgtcattgctcccgatatgattctaacgtaccaggcctggaacagtgggctcacacctataatcccaccactttgggaggccaaggtaggaggatcacttgagtccaggagttggagaccagcccgggcaacatggtgagacctcatctctacaaaaaaaataaaataaaataaaatacaaaaaataatcaaaattagcctggtgtggtggtgcatgcctgtagtctcagctactagagagactgaggtgggagggtctcttgagctcaggaggctgaggctgcagtgagccaacattgcaccactgcactccaacctgggtgagaaaaggagatcctgtctcaaaagaaaaaaagccctgaaagaattcactgccaccagacccatcttacaagaaatgttcaagtgacttcttcagtctgaaaaaaaaatcgctaatgtgaaaaaaatggaagtacaaaacacactagtaaaattaaatacatagaaaaacccggaatgctctaat

SEQ ID NO: 678270 - DNA, 789 bp, Homo sapiens
ttgcacctgtcatagcactgtgctcgatggtggagcttaataaatatctttggaaggaaatgaaggacttggcaagtaaatatgctctgtgtgtgaaatatccattcctgctgctctgtgcargtgaagtcttggcaaacacttttgaatgatgagaatggcagcttaaggttttctttaaagtttaattgtatactaagttttttttttttttcttaacctggctacaaactgtgattagatgtcagttgaatgcatgccttcagtgaatcttaccccatagtcttttccccattttccccgttgcaacaccacctttcttttacatggataagtgtcttcttaatttgtcattttaccttgcaggtgcatcggatgctcatgttcaccacaactgtcctcacctgcattgcttttgttatgccgtttatatacaggggaggctggagtagggtaagtatatcttaaatagggtttttttttataaatccattttatgtcaaaacagattgctgttttattttcaaatgatgggtaaaaagatatttcagcattgatccctctttctttcccttttgaatcattggatggctctctcacatggttggaggttggggtatagtgaggatgtcagtacagattacttagcaatgaaatgtatttttagggtgcatcatgagttatatacatgctatagccttagtgaattttttctcactatagagtggtgacaattcaatgtgtgatatctaaggaacatgaacaatgtgagtggttttctctaactag

SEQ ID NO: 678271 - DNA, 605 bp, Homo sapiens
tctgccattaaaagtaattgcaaaaaccgcaatttttttgaaccaacctaacattttactcctctgcatttttttaagttgtttaaaatcagcatrttattaaaatgaatgcagaagcatttaaaccatgtgcattaattcattgaaatttctgaacagaagagagataatcaacttttgtatccgaagcatactgcatttcctcacttgagagaaaatatttaaaaacaaagtagaaagccaaaatatcagttcgacatctgatatttgcagaagtaaatagcaaatggtgaatatactgtatttgtgcaaacatttcatcatttggactgttgtttgaaaatttctgagtgttttgtttatagacatactaagatagttattcatgtctttctttggtgaactaaatgtttaataaattttagactcagtgagccgtgagcagtggctcacgcctgtaatcccagcactttgggaggctgaggcgggtggatcacgaggtcaggagatcgagaccatcctggctaacacggtgaaaccccgtctctactaaaaatacaaaaaaaaaatacaaaaaattagccaggcatggtggtgggcgcctg

SEQ ID NO: 678272 - DNA, 605 bp, Homo sapiens
tctgccattaaaagtaattgcaaaaaccgcaatttttttgaaccaacctaacattttactcctctgcatttttttaagttgtttaaaatcagcatgttattaaaatgaatgcagaagcatttaaaccatgtgcattaattcattgaaatttctgaacagaagagagataatcaacttttgtatccgaagcatactgcatttcctcacttgagagaaaatatttaaaaacaaagtagaaagccaaaatatcagttcgacatctgatatttgcagaagtaaatagcaaatggtgaatatactgtatttgtgcaaacatttcatcatttggactgttgtttgaaaatttctgagtgttttgtttatagacatactaagatagttattcatgtctttctttggtgaactaaatgtttaataaattttagactcagtgagccgtgagcagtggctcacgcctgtaatcccagcactttgggaggctgaggcgggyggatcacgaggtcaggagatcgagaccatcctggctaacacggtgaaaccccgtctctactaaaaatacaaaaaaaaaatacaaaaaattagccaggcatggtggtgggcgcctg

SEQ ID NO: 678273 - DNA, 649 bp, Homo sapiens
tacatgtattgaaatatcacactgtaccacataagtgtgtacaattatcttgtcaattaaaagtatactaaaggttaaaaaagaaatagcagggaaaatgtgtaggaaaagacaagatatttaaatggaaagaaagaagattaaatgatacatttctgtctttaagtatagaatttagcagtacggaaatagcatcttgagtgtcagggagctgaaacactgaacaaacttgtaagcttgtaaacgaggtttctagattcctcacattagagatgcttacaatcagatggacacagatgcgtgttagagaagatcctaagtagagaagtacrcttaggaggttaagggttgagttaaaaagttttactctttccagttgaattcaagagttcatcatagtgaactagcaactggttgtgattgcttctgttgtgtgcccagtagggattgaagttctgtgaagaatgggaaggatgtagtatccctgttcattaagatgcttcatgcaacctgataaaggacatatataaataaaacaaatagagaacaagacaagtcagtgaataatcaggccttgggttgtataggagtggttgtcactttaactgtaacagaacttaccagatgacatgagttgaaaaatatactg

SEQ ID NO: 678274 - DNA, 608 bp, Homo sapiens
atctggtgtctggtaagggcacttttcctcatttacagatggtcattttctcattcatatgatggagaatagagagaagaaacatgctttttctcatctctttttgtaaagggcaccaatgccttcacgagagtctcacccttatggcctaattacctcccaaaggtcctatctccaaataccatcacattagggattaagatttcaacatatgaattttttggagtcacaaacattcatcccacaacaatattacaatctcatgatgattgtcttagtaagcaataaataaatggtagtgcatttcttttctattccaattcaaaacattttttctagatatatgtaggaaaatgatacagatggagtgtttgagggtaaattatatggtaatgttacaagatatttattctctatatgaataatctagtaagacatgaggataacttrtagctacatatagatgtataaaaataaaaacaggtaaaatttgttgatcacttactgtgtgccaggcactaaagtgggaactttatatatgttttacttttaataagcaaaatgggctacataataaggggagttgaaataaatattgggtaatgtca

SEQ ID NO: 678275 - DNA, 608 bp, Homo sapiens
atctggtgtctggtaagggcacttttcctcatttacagatggtcattttctcattcatatgatggagaatagagagaagaaacatgctttttctcatctctttttgtaaagggcaccaatgccttcacgagagtctcacccttatggcctaattacctcccaaaggtcctatctccaaataccatcacattagggattaagatttcaacatatgaattttttggagtcacaaacattcatcccacaacaatattacaatctcatgatgattgtcttagtaagcaataaataaatggtagtgcatttcttttctattccaattcaaaacattttttctagatatatgtaggaaaatgatacagatggagtgtttgagggtaaattatatggtaatgttacaagatatttattctctatatgaataatctagtaagacatgaggataacttatagytacatatagatgtataaaaataaaaacaggtaaaatttgttgatcacttactgtgtgccaggcactaaagtgggaactttatatatgttttacttttaataagcaaaatgggctacataataaggggagttgaaataaatattgggtaatgtca

SEQ ID NO: 678276 - DNA, 666 bp, Homo sapiens
ggattataggcgtgagccaccatacttggccaaggagtctgaattctaatttgggctctaaaatgaatgtcaagttccttgtctgaaatgtggggataaaaccacatcatcttggtctcttcctagggctgttgtgaggatcacataaggtcatgaaaaaaaaatcatgaatgtggaactactttgaaaactataaattagcatccagagttgggactagagccaggtgacttgattcctgtgccctgggggcttccaaagggcctaagaaaccatggccactacagaagccttacatgtcatcatgccactctaaggatggctcaggcttagcctctggcgcaggcagcctgggaagaagaaagagtgcctggggaaccttggaccttgggaggaaggcctgaagttcttgctcagggacatcagtgggggatgctctcagctggcccctggggatggaggaaaggcagaggaggatgagactggcagttattaaaccwgaaagtgaggtagttactggcattccgaccagtttggggcagtttttctcatttccctatgcatgcaggtacatttcaggatgtgacttaagggcctcctgtccacacccagttggtgaagtccagggaagctggttctggccaggatggcaagaccagtggtctc

SEQ ID NO: 678277 - DNA, 1479 bp, Homo sapiens
ctgtttattcaaactcaactgccaagtcaccttccccacccagccctgctctggcctgttccatgagcgaggccctatttggtctggcatgactctgcctgccagctgctccagggccacaggtggttggacagtcagcgacaggaaggaaagtggtcagccacacgcagagagaagcagacacaaggtggaagtggctgagctgtaatccttaaactcttgaaggtgttaccagaaaggggcctgatcagaccccaagagagggttcttggatctcgctcaagaaagaattctgggcgggtccatacagtaaactaaaagcaaatttattaggaaagtaaatgaataaaagaatggctactccgtaagccctcagggctactggtyactcatttttatggttacttcttgattatatgctaaacaaagggtggattattcatgagttttcagggaaaggagtgggcaattcctcgaactgagggtttctccctttcttagaccatgtagggtaacttcctgacattgccgtggcatttggaaaatgtcatggtgctggtgggagtgtagcagtgaggacaaccaaaggtcactcttgttgccatcttggttttggtaggatttagccggcttctttactccaacttgttttatcagcaagatctttatgacctgtatcttatgttgaccccctttctcatcctgtgacttagaatgctaacttactggagtaaatgttctttactccagcctgttttatcagcaagatctttacgactgtatcttatgttgacccctttctcatcctgtgacttagaatgctaactcgctgggaatgaagcccagcaggttttagccttattttacccaggccctattcaagatggagttgctctggtttaaacgcctctgacaaaaaggtgacccaggccctccactgcctgggaccaacagccttctagacccccatgtgcccagctgctctatgctaagagctttaagcacagccagagcagccttcacaacctgactcatgcaggccactgccagcctatatgatctgacaacaccaaaacttctgggagcctcagtttccttgttaaagggaataatactaccatgatgcctggtgtggtttggatctgtgtccccactcaaatctcatgtcgaaatgtaatccccagtgctggaggtagggcctggtgggaggtgatgggatcatggaggcagtttctcatgaatggtttagcaccatccttcttggtgttgttgtgagttctcataagatctggttgtttaaaagtgtgtagcacctcctcccttgctctgtcttgctcctgctctcaccaagtgagacaccttactccccttttgcctcccaccatgattggaaagcttcctgaggcctccccagaagcagaagctgctacgcttcctggacagcctgcagaaccatgtgccaattacctcttttcttta

SEQ ID NO: 678278 - DNA, 1413 bp, Homo sapiens
tttcctcccagaagttggtacaaagacttttcattttaagatgattgtttcagtcaaaggatcaaaggcccacttttaaactcaggtgagaaattaacgctcttcattggggttcttttgtgccctcctttccctagagacctagacctcagtctttggctctgtttttaacaataaaaaagtgccccaccaccacccacaattaaggagtaaagggatgaaataataccaggatgatattacggtcctttgctagctgtgtgaccttggcaagtggcataaattctgagccctacactttacaggtgctcaaagaaggctgttaaggctggactgaacaaagtgaggagagtgacaagaggtgacaatgaaagatagagggatgagatctgcagggcctgtagactgtagaacacaaaaatttaatgagatgataaatgtaaaattttggcacatatcaactctccttaacattgattccttgcataccttgacattgacttcttcctggaaattccttctgcaacacagaatttctcatcctcatcttcattattgttttcttagtgctcttcttgttttaagtattttaaattgagtcacttcgtttataaatgtccattttctaagtgtcttgcatatctgtttctgtatgagaactctcaccaaaagtttatatgatgattgccagatgataaaagatttttctgaaattatttaaaggaaattattcatttttttcttacagtatgttatgatggatgtcatatatatgcaatgtatatcaaatttatttatgcaaatataaaatactaaacagcaaagttcaaaatgatttattttctttaaattatttgaaagtatccttttctattggaccacacttccttttgtatttcacatattttaatttcaactattgwgtcattttcttgattttaaaaatgatttcaccattagatttttgctatctttttataacaaatgagaaattattatttttttcatccatttcagcccttgtaaaagtatagcaatgataaggaagcaaagggtatgaaatagcttataaacaccttgctgaattgttcctgattggtcaatgacagacatgtctaatatcattgttgcacttattttgaggatgaaagctgataagtgagcttaactgctcaagggtcacacatttccaaccaattctcatgtgtttttctttgactaaggtggtgcagtgagctggctgcacaaatggccatgcagacccaggcggtgtttatacttctgttgttccatgagtgccctatgcactgattctctaagttaaaataataatagtaacaatgcctttcactttgctatcagtttgaatctgaacttgtccaagaaaggtgtttaccagatcaaggaaagaag

SEQ ID NO: 678279 - DNA, 1645 bp, Homo sapiens
catttaytgagcaccttctgtttgccaagtgttttggacagttaatatcatttaattcatacaatagatgtaagtaacccaaaattaccggtgaagatactgagccttagagaggttaagtaacaggtccaaggtcactctgctggaaagcagtgaagcctggggttgtctggccatgaaaacaatccactgcactacacacccaaccgaagaaaccaggttcaagggtgtaaggcaggagtcagccctgattcatttgaaggcagggtgacttgggaaaaaatatgtatttatttgcttataggctgtgtgagagataggaagcattaaggctgaaggtaagagacaagcagctgcagctgatttagttccagctatcacaatctccatgcacctaacagcagcagtgatagtaacaccttgtaattacaaaccacccttctcaaagatgctcagagctcttaatggacacattcacatccgtcttgccaacagctctggaatggagcagacagcacaattaccttccttttacaggtggagaagcaaatgcatttgcccaaggtcatccagggacagagggaccaacaaaaacaaaagccctcaaactactgtctagactgttacccaatggctatggggaaacaaattcaacaccctggttccagagacccatgggtgaaacatctatccattcagacttgctatgctctgtaaagttccctgtcaaaatgacccacatatccggaaatatgtgacaggaagggtctctatatccttcatccctccagatactcactcctggtacagaaacctttcttttgataaacagtacatttacattattgaaagcagagaaagctttatttgtcaaattgatgatctatcctaaagaaccccaaagccgtggccagaaaggtccccaataccattcccaggagggatgctaggatttgcctctctggccttgactacaagaagcaccaattgaagaaagcaggagccagaaggctaggagagagaaaaggaaaaagaagggagatcttgcagagaagtgtgcagaccccacatgtgggatgtccaaagtggactctgtatgggccatttcccaggtgaaccatgcagatggtaaagtgttatttagcaatagcgttgaacacccttggtgattatagctgactactggtataattgtgttcttgatgagtattgtatttttatgctcttccagatatttcaaggcttaatagcaagtttactcagggttcggaaagtattgtgtaaagcacaatactacagcatataaaaccagatagaactctatttttttttattttattatcctttaagttctagggtacatgtgcacaacgtgcaggttttttacatgtgtatacacgtgccatgttggtgtgttgcacccattaactcatcatttacattaggtatatctcctaatgctatccctccccccgccccccacctcacaacaggccctggtgtgtgatgtcccccttcctgtgtccaagcgttctaattgttcaattcccacctatgagtgagaacatgcagtgtttggttttttgtccttgcgatagtttgctgagaatgatggtttccagcttcatccatgtccctacaaagg

SEQ ID NO: 678280 - DNA, 1645 bp, Homo sapiens
catttattgagcaccttctgtttgccaagtgttttggacagttaatatcatttaattcatacaatagatgtaagtaacccaaaattaccggtgaagatactgagccttagagaggttaagtaacaggtccaaggtcactctgctggaaagcagtgaagcctggggttgtctggccatgaaaacaatccactgcactacacacccaaccgaagaaaccaggytcaagggtgtaaggcaggagtcagccctgattcatttgaaggcagggtgacttgggaaaaaatatgtatttatttgcttataggctgtgtgagagataggaagcattaaggctgaaggtaagagacaagcagctgcagctgatttagttccagctatcacaatctccatgcacctaacagcagcagtgatagtaacaccttgtaattacaaaccacccttctcaaagatgctcagagctcttaatggacacattcacatccgtcttgccaacagctctggaatggagcagacagcacaattaccttccttttacaggtggagaagcaaatgcatttgcccaaggtcatccagggacagagggaccaacaaaaacaaaagccctcaaactactgtctagactgttacccaatggctatggggaaacaaattcaacaccctggttccagagacccatgggtgaaacatctatccattcagacttgctatgctctgtaaagttccctgtcaaaatgacccacatatccggaaatatgtgacaggaagggtctctatatccttcatccctccagatactcactcctggtacagaaacctttcttttgataaacagtacatttacattattgaaagcagagaaagctttatttgtcaaattgatgatctatcctaaagaaccccaaagccgtggccagaaaggtccccaataccattcccaggagggatgctaggatttgcctctctggccttgactacaagaagcaccaattgaagaaagcaggagccagaaggctaggagagagaaaaggaaaaagaagggagatcttgcagagaagtgtgcagaccccacatgtgggatgtccaaagtggactctgtatgggccatttcccaggtgaaccatgcagatggtaaagtgttatttagcaatagcgttgaacacccttggtgattatagctgactactggtataattgtgttcttgatgagtattgtatttttatgctcttccagatatttcaaggcttaatagcaagtttactcagggttcggaaagtattgtgtaaagcacaatactacagcatataaaaccagatagaactctatttttttttattttattatcctttaagttctagggtacatgtgcacaacgtgcaggttttttacatgtgtatacacgtgccatgttggtgtgttgcacccattaactcatcatttacattaggtatatctcctaatgctatccctccccccgccccccacctcacaacaggccctggtgtgtgatgtcccccttcctgtgtccaagcgttctaattgttcaattcccacctatgagtgagaacatgcagtgtttggttttttgtccttgcgatagtttgctgagaatgatggtttccagcttcatccatgtccctacaaagg

SEQ ID NO: 678281 - DNA, 1645 bp, Homo sapiens
catttattgagcaccttctgtttgccaagtgttttggacagttaatatcatttaattcatacaatagatgtaagtaacccaaaattaccggtgaagatactgagccttagagaggttaagtaacaggtccaaggtcactctgctggaaagcagtgaagcctggggttgtctggccatgaaaacaatccactgcactacacacccaaccgaagaaaccaggttcaagggtgtaaggcaggagtcagccctgattcatttgaaggcagggtgacttgggaaaaaatatgtatttatttgcttataggctgtgtgagasataggaagcattaaggctgaaggtaagagacaagcagctgcagctgatttagttccagctatcacaatctccatgcacctaacagcagcagtgatagtaacaccttgtaattacaaaccacccttctcaaagatgctcagagctcttaatggacacattcacatccgtcttgccaacagctctggaatggagcagacagcacaattaccttccttttacaggtggagaagcaaatgcatttgcccaaggtcatccagggacagagggaccaacaaaaacaaaagccctcaaactactgtctagactgttacccaatggctatggggaaacaaattcaacaccctggttccagagacccatgggtgaaacatctatccattcagacttgctatgctctgtaaagttccctgtcaaaatgacccacatatccggaaatatgtgacaggaagggtctctatatccttcatccctccagatactcactcctggtacagaaacctttcttttgataaacagtacatttacattattgaaagcagagaaagctttatttgtcaaattgatgatctatcctaaagaaccccaaagccgtggccagaaaggtccccaataccattcccaggagggatgctaggatttgcctctctggccttgactacaagaagcaccaattgaagaaagcaggagccagaaggctaggagagagaaaaggaaaaagaagggagatcttgcagagaagtgtgcagaccccacatgtgggatgtccaaagtggactctgtatgggccatttcccaggtgaaccatgcagatggtaaagtgttatttagcaatagcgttgaacacccttggtgattatagctgactactggtataattgtgttcttgatgagtattgtatttttatgctcttccagatatttcaaggcttaatagcaagtttactcagggttcggaaagtattgtgtaaagcacaatactacagcatataaaaccagatagaactctatttttttttattttattatcctttaagttctagggtacatgtgcacaacgtgcaggttttttacatgtgtatacacgtgccatgttggtgtgttgcacccattaactcatcatttacattaggtatatctcctaatgctatccctccccccgccccccacctcacaacaggccctggtgtgtgatgtcccccttcctgtgtccaagcgttctaattgttcaattcccacctatgagtgagaacatgcagtgtttggttttttgtccttgcgatagtttgctgagaatgatggtttccagcttcatccatgtccctacaaagg

SEQ ID NO: 678282 - DNA, 600 bp, Homo sapiens
cccaatctactaactggtcaggacaaactgaccggttgacgtagtgaactggtgttggcccctagtgatctatgtatttttataggtgaccacaatgattggtttcatattgtgstgctcttccttaaatattgggattatattttttccacgttctatgtcctggcatccttttcagttttgtgactcatcaaatattagtgacattagctggttctctaattttgtatccatcaatatggtgtgctcgggctataagacttaggatgatataatgtagctgatgttttcttagcatttcttgattcattttgactttattcctgttaattggacaacgaaggcaaatggaactcaggagctaaggagttctgattttttaaaatgtcatccagcatggttataccgttgaccacaagtagtgagtatattacttcatttttgtactaagaaaaagttgaggagagaaccagatcttttgtcaaacttgtctttttttttcgggtatcagatcatttgatgtttagtcttctaggaattagtcttgcttatctgagctactgccttaaaaataagtaacactgtaagtggtgattgaaa

SEQ ID NO: 678283 - DNA, 871 bp, Homo sapiens
tgcacacactccaaatcaatcctgtttctctagctatagggtttctaactttcagcttgcccagccattatagaagaaccctatatgttttatagggtcaggatttgcttttaagggagtagagaagtcctgtacttgttcagaactgcctgggatttagatggaaagtctttcttattctgtaattcagtatttaaaaacacccacttgcctacagatataaatcacattcttcaatatcagttttattattaataaaaataaagattttaaaaatawataacatatgatatataacataataatatatattaataatatatatataatgctctttcttacctctaatctcttaattgattagattttctgaaaataagcagtcctaatacctaggacaataactcctactccctgtgttttaaatcaaacctctttcagctggaccattctgcctcctattcaattttcttattttgaatgataatgataaccaataaaacagaaaagtaaacgtctctgctcttcaggtacactatccaaatacatggaaaagctacttagtacaaaccacttgaaatgcagtagaatcagctaaaatagtgttctgttctttaatccagtctgctgcttctcctgtcaattggctggaacatgaattctaagaaatcactagatgttcacagcaggtgcaaaggtaagctcatgttctggggaggtccacattttccctgggtagcagatgttttgctacatgacatttagaaataagtcaaagttgttatttgttatgtataatgggtctcaaagaataaatgaaaagccttttactctaattcagaatgcattttgccactctgaaggatacatt

SEQ ID NO: 678284 - DNA, 675 bp, Homo sapiens
ttaaagtaccattttcaataaacaattgaataaaaaatccatctactaaatttgagtcttgcttgacatacagcagaagtccataggagctgaaggtctgaaattctagggagatgttattttgtggatttaaagccacattctgaaattctagataagaatctccataataacgaacacaactgaaatctgtggagtcagaaagaaaatacaatttaggttgaaataaatattcaatacctaggtttcacattattaacatagcatatgttttctctaatgactcatacrtctctttcctgcctctttcaagcccaggcacttctttcctttggaatagtcatggcagttttctcatgatttctttgtatttgatggcttcatgataaaatctcattgtaaggcaaggaaatcaagatgattactcttcaacactgcttttacttagattttatgttacaggttaacagaaaagggcacattttctaaatatgtacttatttcttctttatataagatattgatacaaattatgattaatattgttaataatttaatttgggaggtttgtgagggaatgctagagattattgagaggcatagaaattgttaaccttttgtattaacactctaaattatatgagtttcttaacaactctcaccttctgaatgata

SEQ ID NO: 678285 - DNA, 1880 bp, Homo sapiens
  misc_feature 638, 663, 664, 665, 666, 667, 668, 669, 670, 671, 672, 673,674, 675, 676, 677, 678, 679, 680, 681, 682, 683, 684, 685,686, 687, 688, 689, 690, 691, 692, 693, 694, 695, 696, 697,698, 699, 700, 701, 702, 703, 704, 705, 706, 707, 708: n = A,T,C or G
  misc_feature 709, 710, 711, 712, 713, 714, 715, 716, 717, 718, 719, 720,721, 722, 723, 724, 725, 726, 727, 728, 729, 730, 731, 732,733, 734, 735, 736, 737, 738, 739, 740, 741, 742, 743, 744,745, 746, 747, 748, 749, 750, 751, 752, 753, 754, 755: n = A,T,C or G
  misc_feature 756, 757, 758, 759, 760, 761, 762: n = A,T,C or G
gccaaaccaataaattctccaggagacagttttagaactgacagagtgtttgtgaattacttacaaattaagatattgactcaaattaggatattgttgtcttaaatctaagacaagaaataaagtaattttttaaaattaatggcagtatttttaattggtagatacttagaaaaatctaaaatcccatagattaggaggtcagaaaagcctaacttaactctcttttaatcccaaattctacccttcttcaaggacaaggtagaatttaagcggtgactttaaatggaaaaaggcccataatacacttgttattaaaggcaaactcaattattatgttaatataattatgttttagtatataattataatgtaatatatattatagtgtaatatatgcaatgattataagtagtatatagtatattaawaacttaatacaatacacatgcataattataactataccaacagacatgaataaaatataacatcagactctcatatttgtgctttacagaaaatacatgtgccactatcttcagcttctcagcagcaccttctaccttaatgttctacctggtggtgttcaatagtggagtgacaaatgctcacccatttgcattttgcttcatgancatactctatgctattttcgccttnnnnnnnnnnnnnnnnnnnnnnnnnnnnnnnnnnnnnnnnnnnnnnnnnnnnnnnnnnnnnnnnnnnnnnnnnnnnnnnnnnnnnnnnnnnnnnnnnnnngctacatgacatgcaattatatccttgctctaatcgctaatgtatcattttattatgtatttttgtattttaaaaatgtgtgttgtaatttttagcaatgtaaatattgatagacacaactgagttaacaaaaactccttggggttctcaataaacgttaagaatgcaaagagactgtgagatcaaaaagtttgagattgctgactttgcacttggtaagtgttataagaacctttcaaaagtccaaggttatgcagctaataacattttgaaaccaacttcatttgaaagtgcatgctcttttcccaacatcattctaccttaacaaattttctcatatccctgctctgaatacctggtttagggaactcatcccaatcatcattgcaataactcagcacaataaggtaattaacttatataattctaatatatgaaacataataacagcatttgggctaccatttcttttatgatgtgatttaagtgtacatgttgtgaatttccatgaaaggatgagttataccttattatttaaataggcaaattcccttagtttgactttctttaaatgctcatgtttctgaagtaatataatatgtatatatatatagcaccatggcactcctgcctgggagatagagccaaaaaaaaaaggaaaaaaaagctagccttcatagccttcatatataattatgtcccaggtataattctgtgtgttccactttgattgacttatttgcccatttataatatttacttcacaatattcattcatttaccaatttaaatcacacaaaaatttgtattaccccattttacaagtgagtagattttagcacaaagcacatgtgaagtctcaaaacttccaagtaacagagctgagttttgaactctgatcatctagctgaaatgtaaatgatcttaaattttcttaagatggagattgacaaattattacaattaagtaaataatagtaattattgtagacttgtaagtatatatcctttctttttcataaaaccaaagggaaagaaattctatacctctattcactagttagttttatggttcctaaatatcttcgtttaacctattgtgaattaatttttttccc

SEQ ID NO: 678286 - DNA, 618 bp, Homo sapiens
ggcaatggtgaaagatgttatgtgtggtggatggtggtggtggtgtgtaacatgagactttttgggggtggggcggggaatatagcattttccaattaaggaatcatgggaagcattcatagaacactgctattggtaaaaggcaaaatgtatttggggtattttaatcaccctgaagaaatatgtattttaagttgttacttttttttttcaatctttacattttaatttttctcttaaatttttttttcttttttttaaattattattatactttaagttttagggtacatgtgcacaatgtgcaggttagttacatatgtatacatgtgccatgctggtgygctgcacccactaactcatcatctagcattaggaaaagttgttacttttaaataactaatacatttagattttatagaagaaaattacattgagacattttttaactttagaaaaaaatttgtattaaaaatttctttggatctttttgctttttacactgtggtgaataatataggacttagattcttaacctactaacatctattgtctcaaaaacactgactaaataagatgttcttcaaactttgatgtccttttagaacaaataatact

SEQ ID NO: 678287 - DNA, 1065 bp, Homo sapiens
catcataccaagaggcttttcaaaatcagtaatcaagtggcactatcaggagaacctttataggaaaaaaaaaaagtcttaattgcccaatcaaaaggaaatacttgtattccttatgtcatttaccttaggaacaaggtaaatgattcagttacgctctgtattcatgctcttttactaaaaccttcttggggactaaaccaactgtaggaaaatatccaacaatttgacgtcatgttttcagaagacaaaaaaaaaaaaaaaaacccacgataaaaccctgttcactgaaatcccattcatacatttatttttttaccaaagtaatacatgcgaacaaaagcaatcaactggtggcagcatttaggcccactaagacacaaccacccattaccaaagaaggcctgcacatcattctgactcatgtttggaactttctctagagcacatctcttggtatttcctgcagatatacagcaagmaagatttcattcctgccagacaagctttttttttttttaatctccaccagtcagtctcttacagagataacctccagtcacaactctctctccaaatgaattcccaagttgccatggcaactaacaccttcctccaatactgtcaatatgcttcccaaccctaaaggcagccctcgatttactgccagaagtaccaatctcctcatgtaaaagagagtgccttcctttgctccaaaactatcatgagattctttagaagaccctctgttaataatattaatagtatcagctaccacctattgagggccaactttatttctattatctcatttaatcatttcaaaaaaaaaaaaaaacaaaaacactgcatggtagatatcactctctttactttacagatttaaataattataaatcggaggttatataacttgaccaagaggcagaaccaggatttgaacacagaatcttctggcccagattatctctgaggcttcctcctttgacacaagatcttttccagctcagaggagtaacttcatctgtcttgttctctcagcctaaccttgcttctttttctaaa

SEQ ID NO: 678288 - DNA, 666 bp, Homo sapiens
cattgcaaaggtgggtgtggggaaatcaagctattatctttaggtatattctattcctaggtgtttaaaacactaatattaaaaagtgatatggagcttcacctaccctctggcaatttgcagttattgtcctttgatcatgtaaagcaactgagatcatttgctcctgacttcacttcactaatctatatccttcattttttcctccaagtgttccttcttctgagtgcctagtgctgctccagtacctagatatctctctctccccctctctttctgtctcaatatccaatcaatcccaagctgtattacctctttaccaactttgggaaagtggaccagtatccaggcttggataagccaaggaaaaatactaaggaactgcttaaagctctagtagttcttctactttgctgtttctggctttggccatctaaagcaaagttccttggattggttgacagtgagatagtctctagattcttgtgtctctttttagtaggrccacctaagatgtatcatccattgtgtaatgagttcttgaccaaagaaaagaaatcttaaggtcttcggactctgtcatctttcttgtttgccactctttggactgtaatttgaagagaaaaaaccttgttttcttgtgaaaattttggatgctgagtagtt

SEQ ID NO: 678289 - DNA, 666 bp, Homo sapiens
cattgcaaaggtgggtgtggggaaatcaagctattatctttaggtatattctattcctaggtgtttaaaacactaatattaaaaagtgatatggagcttcacctaccctctggcaatttgcagttattgtcctttgatcatgtaaagcaactgagatcatttgctcctgacttcacttcactaatctatatccttcattttttcctccaagtgttccttcttctgagtgcctagtgctgctccagtacctagatatctctctctccccctctctttctgtctcaatatccaatcaatcccaagctgtattacctctttaccaactttgggaaagtggaccagtatccaggcttggataagccaaggaaaaatactaaggaactgcttaaagctctagtagttcttctactttgctgtttctggctttggccatctaaagcaaagttccttggattggttgacagtgagatagtctctagattcttgtgtctctttttagtaggaccacctaagatgtatcatccattgtgtaatgagttcttgaccaaagaaaagaaatcttaaggtcttcsgactctgtcatctttcttgtttgccactctttggactgtaatttgaagagaaaaaaccttgttttcttgtgaaaattttggatgctgagtagtt

SEQ ID NO: 678290 - DNA, 641 bp, Homo sapiens
ggggaaagtctaattgagcttgatttccctgtgacctgcagaggcaggagtcccagcttgactggtagagtgggtggggaaggcctcttctacagcacagccataaaaaatctggaattgtgacactttcccctaatgggcctcctgggactttacatgtcctgttgtggggagttgattttaacacaaaatctgtcaatgctytatccttttcaggtccagcttcataaaaatattcaaggaatcatgtcttctgattttgcttgatgatccctcttgggagccatatttgaaaggttacagtttgcattttcgacattaaagtttactttttaattttaaaaaaagttacaaagatgtaggacgtttggcttcttcaatacttatttgctagaagactttgggcaagttacctaaactctctgggcttcaatgtcctcccatacatgtaagctaaatgttccagggccacctatgcccatgggtaacaggccagcacaagaatatgctgaccaattgattcctggctgcataaccacagaatctcctctgttatttctaggtgcctagaggaggtctctcatagatgcccacgttctcttgacaagatatttggggaggacccctggctactgtcactg

SEQ ID NO: 678291 - DNA, 641 bp, Homo sapiens
ggggaaagtctaattgagcttgatttccctgtgacctgcagaggcaggagtcccagcttgactggtagagtgggtggggaaggcctcttctacagcacagccataaaaaatctggaattgtgacactttcccctaatgggcctcctgggactttacatgtcctgttgtggggagttgattttaacacaaaatctgtcaatgctctatccttttcaggtccagcttcataaaaatattcaagraatcatgtcttctgattttgcttgatgatccctcttgggagccatatttgaaaggttacagtttgcattttcgacattaaagtttactttttaattttaaaaaaagttacaaagatgtaggacgtttggcttcttcaatacttatttgctagaagactttgggcaagttacctaaactctctgggcttcaatgtcctcccatacatgtaagctaaatgttccagggccacctatgcccatgggtaacaggccagcacaagaatatgctgaccaattgattcctggctgcataaccacagaatctcctctgttatttctaggtgcctagaggaggtctctcatagatgcccacgttctcttgacaagatatttggggaggacccctggctactgtcactg

SEQ ID NO: 678292 - DNA, 632 bp, Homo sapiens
ttatctcaaaacacagctgtatcatgttttgctattggtacacctctaaagatcttctccaccgccctctgcccccaccccaagtccatgtgccatgaataaccttacttattatcactttttacaatgatgagcagcctctgagaatggaaaaataagtcaatggtaatactgtgttaggaaggatctgagtaggarggaacctgtcccctggctaccagaaacacaggactagacccagtaatacacacctagaatataagcctggataacaacagtgcaggggaaacactgtcctcaccaggatagcttttatatgcaagaatttaggtattataatcagaaacatttctagaaactatgaaatattagggaaaaaagccaacacattagccaacattgtactttacatttatgcaaattttaaactctatcggcacctcctagtagctttgggggaaaataatactctgtgcatcgtgtaatggataagaaaatgagttaaagggccgggtgcggtggctcatgcctgtaatcccagcactttggaaggccgaggcggatggatcacctgaggtcaggtgttcgagaccagcctgaccaacatggtgaaaacctgcctccactaaaaa

SEQ ID NO: 678293 - DNA, 632 bp, Homo sapiens
ttatctcaaaacacagctgtatcatgttttgctattggtacacctctaaagatcttctccaccgccctctgcccccaccccaagtccatgtgccatgaataaccttacttattatcactttttacaatgatgagcagcctctgagaatggaaaaataagtcaatggtaatactgtgttaggaaggatctgagtaggaaggaacctgtcccctggctaccagaaacacaggactagacccagtaatacacacctagaatataagcctggataacaacagtgcaggggaaacactgtcctcaccaggatagcttttatatgcaagaatttaggtattataatcagaaacatttctagaaactatgaaatattagggaaaaaagccaacacattagccaacattgtactttacatttatgcaaattttaaactctatcggcacctcctagtagctttgggggaaaataatactctgtgcatcgtgtaatggataagaaaatgagttaaagggccgggtgcggtggctcatgcctgtaatcccagcactttggaagkccgaggcggatggatcacctgaggtcaggtgttcgagaccagcctgaccaacatggtgaaaacctgcctccactaaaaa

SEQ ID NO: 678294 - DNA, 632 bp, Homo sapiens
ttatctcaaaacacagctgtatcatgttttgctattggtacacctctaaagatcttctccaccgccctctgcccccaccccaagtccatgtgccatgaataaccttacttattatcactttttacaatgatgagcagcctctgagaatggaaaaataagtcaatggtaatactgtgttaggaaggatctgagtaggaaggaacctgtcccctggctaccagaaacacaggactagacccagtaatacacacctagaatataagcctggataacaacagtgcaggggaaacactgtcctcaccaggatagcttttatatgcaagaatttaggtattataatcagaaacatttctagaaactatgaaatattagggaaaaaagccaacacattagccaacattgtactttacatttatgcaaattttaaactctatcggcacctcctagtagctttgggggaaaataatactctgtgcatcgtgtaatggataagaaaatgagttaaagggccgggtgcggtggctcatgcctgtaatcccagcactttggaaggccgaggcggatggatcacctgaggtcaggygttcgagaccagcctgaccaacatggtgaaaacctgcctccactaaaaa

SEQ ID NO: 678295 - DNA, 522 bp, Homo sapiens
gtaggattcatcatccctccagacaagcacttggttgtggtaaagatctggctctggttggaaggctgycccatcccactgagggtgattcaccagagcaacttaatcatctacggatcagaagctcaggttcatgtgagcagggtgggggttaagggaaagagagtctgagtaatgcttcacagtgggtgtggggacttgttataatagtaggcacgctgttgattaaagtacatgacagaagtaattgccagagatcccaaaccagccatcacctagcattagagatgtatctaatatcagacagaaagcctagtttcaactctgcagcagaggcctttgaaaagtctccagaagtaattggcacttaatcaatgcaatcattattacagcacatggctactgcagcttcaggccctcttgcaaccactgaactgcaaaagaggagactatgtctgtagaattttaccaccaacacaacatttgattcacaatctcagactagataggagtgaacatatt

SEQ ID NO: 678296 - DNA, 1401 bp, Homo sapiens
acagcccacacctcttccctaaaactccagaatcctataccctactgcctgattgacatttaataggcatattcaaaaacaaactcttgaattttctctccaaacttgtccttcatctccataaatagcaccatgattaccataaaaccttgaagtcactgttgactgcatccttggcatcttcctcactttctctcatattcatttccaatccatcagagtactgtcagctctactttcaaaatatgccccaaatcttcctctatctcaaagaccagataggaggctgctatcaaaatatgatgttttgattatataatatatattatattatagacttgatatattatattgtatactcacagctacacatttggcattagtggaaataaatgaaagatttcaatcaattcaaacaaggacaygttgggatggaatagggtatcgtcagtaaagaaactgacaataatccagaaacgggctggtaagtctcatttatcagctaatgtacacacttctgatagcagcctcttatctggtcccactgcatgttttctgtatcagccagagttcatttgcagataacagaagccattctagctatttgaagcagaaagggattcaaaacagttgtggtagattgatgttacaaaaatccttcctgtttcacccacctttttgcaattgccacaactcccataaagagatgaagtctatttttctctccttgtaaatctggcctagccctcggtttaattctgaccaatggaaagaggcagaactgatgctgtgtcacttccagacctagccttaagaggctttgcggctcccactctcaccctcttagaagaaagcagccgtcctgtaaggaagctcaggctagattactgaatgatgagagaccataggagagagaggtctcagcctttcaaggcatccctgccaaaatcctagacatatgagtgagacaaagtagggccactgacagctgaatacacccacatatgtggagccaggcaggatcagcagaattgcccagccaaactaagtttttggggtgcttattacacagcaagagataactgaaatgtcactaaatttagggattgcaaaaccattggagggttggtggggcaggctgtaaatgtggcctccaggaatgactcacagaataacaccacagaactggcctgttagaagaatcgccgttcctaccatagtctgaaagctaaggatcaagaagccatcaaccactttctagcttcagaaacacactatcttagtcatgctctggacatcaggaagtctccacaagtctgttggcttcagaatcataccacagatcaattttagatagcaaaatggataaagtgctgtgaccaccttttccccactgaagtt

SEQ ID NO: 678297 - DNA, 3204 bp, Homo sapiens
ttgcggctcccactctcaccctcttagaagaaagcagccgtcctgtaaggaagctcaggctagattactgaatgatgagagaccataggagagagaggtctcagcctttcaaggcatccctgccaaaatcctagacatacgagtgagacaaagtagggccactgacagctgaatacacccacctgcctgtggagccaggcaggatcagcagaattgcccagccaaactaagtttttggggtgcttattacacagcaagagataactgaaatgtcactaaatttagggattgcaaaaccattggagggttggtggggcaggctgtaaatgtggcctccaggaatgactcacagaataacaccacagaactgccctgttagaagaatcgccgctcctaccatagtctgaaagctaaggatcaagaagccatcaaccactttctagcttcagaaacacactatcttagtcatgctctggacatcaggaagtctccacaagtctgttggcttcagaatcataccacagatcaattttagatagcaaaatggataaagtgctgtgaccaccttttccccactgaagtttgttctgaaatcaagacttatgcaaatgcatataactagcaaaaagtaaattatataaacccctagctgcaagagaatctttttagcttttttattttttatgtttattttttgtggcagggtcttgctctgttgcctaggctggaatgcattggtgcaaacatggctcactgcagccttgagcttctgggctcagaccttcctcccacctcagcctcccatgtagttgggaccacatgtgcatgtcaccatgccccgctaatttcttgattttttctagagactggggtctcactttgttgccctgaatggtctcgaactcctgggctcaagcaatcctcctgtcttggactcccaaagtgtgggattaacaggcatgagctaccgcacccagcccacttttagctttttggcctaggcactgtgggtaggcatagaagaaagaatttttttaaaaatgctttgttcactgcgtaacgctcacaatagtgttcacacaaaagagatgctcattaaatatttgttaaatgattgaactaaagtttgataaagcaaaggcataacttagaaatgactgtctctagttcgcccaaagtatgaaattctgtatgcctaaaactctctttcagtaattctcttttatgaatatattctggaatatcaagaaagatctaggattcaggatttttttcagcccaatatttaccatctttactataagtgtacaaccatcccaagtcagacaagctgagtctatttgggttttttttgtaataaattttaattggaaaagatgaatttgggagaatgggaagaaggttttgaagggcaagcccttcagtcatttctgcttcctatggctttggccaccatctcactttgagggcttgttcttcaggatactgacagcttgatttctctgagtaatgtcacacaaaggaaattagctcagtatgtcttctactgaattccatctgtagctcaatgtttgaaggtatttgtgaacatgactacagagcaattttgataagacaaggcaatgttccagtctctgagaatattttccccaaagaactattttttaaaataccactgaacagcctgaaaacccacccacacatgagcaatctcctgcaatatacagaaagcttttcaggtgtcacagccataatagcaggtggttcctttgggtagaaaaattatggcaagaatatagcgacagaaagcaaactgttttgatattctgggtacaactttccccaagtgaatcattcccatatgcctacttttaccacgggcgcctttccagaggaagtgatttgtgtgaacggaggtgtagagatgcattctggtgggcacacttcattggtgcccatatttagcagatccaattaatcgtcagctatttgtcaacccattcctctgtaagtctcaaaatgcaaaattcgaatatgaatttgatacctatttttgctttccacataacaaatacataatcttgttatgaagattcagtagtgctcwtttaaggcaaggctgcttctgaaattccatatgaatagatttttaaatacaagcttataaagaaggctgagattagagcaatttgcaaaaggcagtcatttaattcactttttattatgaaatatttgagacatacaaatagcttaaagagcttatttactctgctgtaaacttttgttgcttgtaagataaaaatctggacttgtaaaaaagactttgtttctagatagaacagcaaagttgcaaagtaagagttttgcataatttttttctttctctatagtgtataagactagcatttttattgtttacagataaaccaaatctcccttactgaaaagggtgatgttgttgtccccatctcaatttaaaacaaaaatcaactaagctctaataggaaaagatgtgtacaggaagattgctaatggaaaacttttatttttacattttatttgtatttaatttttaaatttttatttgttttatttatttgaatggaagacaactgcattgaaaaataaaaagaaccgggtacggtggctcatgcctgtaatcccagcactttgggaggccgaggtgggtggatcacttgaggtcaggagttcaagaccagctgggccaacatggtgaaaccccgtctctagtaaaaatacaaaaaaattagctgggcattgtggcatgtgcctgtaatcccagctactcaggaggctgaggcaggagaattgcttgaactcaggaggtggaggttgcagtgagctgagatcacgccactgcactccagcctgagcaacagagcaagactccatctcaaaaaaaaaaaaagaaaaggaaaaaaagaaaaagaaagcacagttattaagctacttaattctgggctttccaaatcttagagtggtgtcatttgctagctgggtgaccacgaacaagttctttaacctctctgtgcctcagtttcctgatctctatggggaggataggatccatcagttaggggttacatgtgaagcacttggaacaatgcctggcacacagtaagccctctatcaatggtaactcattttcttctttaccctcaactagaaagtcagctccacatg

SEQ ID NO: 678298 - DNA, 918 bp, Homo sapiens
ctttatatagattattccataatccttactccaactttaggaaaaagatgttactagtatcccattttactgatgaaaaaagtgaggtgtaggacattcagttatttctccagggtctgcagctggtgaataatggaataggaaccttggttgtcgccagagtctaagttctacgtgttgctcatgaaatgcccctttttcgctgcgcagtcccgtatcttcacctattgaaatctcatccttctgctgggggcagtggatcacctgaggtcgggagttcgagaccagcctgaccaacatggtgaaacgctgtctctacttacaatgtagaattagctgagggtggtggcacttgcccgtaatcccagctacttgggaggctgaggcaggagaatggctggaacccaggagttggagkttgctgtgagccgagatcgtgcccttgcactccagcctgggcaacaagagtgaaactccatctcaaaaaaaaaaaaaaaaaaagaaaagaaagaaagaaatctcacctttctggtaaagcccaacgtttctgggattccttccttaattgctctgaccagaaataacccttctctctatttcacccacatagtgcttctcttaatagatctcatatggcattgatctcatactgccttatgtttggaatatttgtatttcattcttttttcttctaccagacttctgaatgtaggaatgttttgaagttgtgtagtgcaatgcaaagaatacaggctctggaaccagccctcagttggagtcttgtcagcatcacctccttgctgtgtgaccttgctgaagtcactcaacttctcttccaagcctccttttctgtgatgtggagataatgagacctgccttgctattcattgcagttgtgttaagagaactggctcagtg

SEQ ID NO: 678299 - DNA, 1019 bp, Homo sapiens
ggcaggtccccgacttgggtctccaccaactctccactgcaatgattgggatgatgatgtgtgcagtgatcaatgcaaaagaaagtaacaggaaaatctttcctctgttccaccctttctttttccttttatgaatgagatggtggagaaagagctaagcagtctcatacctcaatattcaacaggccaaggggactactacaaaagatgtttccattctactcacttccacccttcctccagcagggagaggcaacaagatagctgcactgaggaggttttatatagggagggaaatgatccattggccaagggtaccacggtgtactcgagaatgggctggcagtttattttcctcaagccatcaccaagtcaagtttaagctaatgctgataacaatttattgccgttatcatagttgcagagcaatgagagagcattaggacacccagctacagcggatgtctttgactccctcctctaaatgcattagcctctttaatcagatgatgtcataccacgtcccccatgcaatttttagagagtcatccttagatgactttatttattttgaagggcaagtcaaatgtaggaaatagtaagaaaagggaatgagggagagtgagactggcctagaccaccattgaaagggctctgctgcctttcattcttacctccatccccatcccctacccagttcttgcaaccatggtggatggattgctccagaaccagatccagggcaaagttttgtgaataaaagagaggctggaaaagcccattgaaccttcctaacgttgccagggatagatgtagaagacttgctttgtggtcttctctgatctgctcactggcaaagtgttctgttcattattttggtttcatctgaaggaaacaacagtatttacttcctgaagacgaggcaatgacctctggaaactccttccagtttaaggatttaggaaaataagcttttgtaccatcttttctttttctttctttytttttttttttttttt

SEQ ID NO: 678300 - DNA, 906 bp, Homo sapiens
tgaagaaagaggtagataaatataaattttccttcctgtctcacatacttactattgtagagatagaaagaattttttccttttcttaaattgagaaaagaccctttgttttaagatttttacacagattttacacagtgcaggataggtagcagcaagtgacatattatgagtgcatatgtgtacatacagcttttagcctgaaaatatggaaatcctaactcacatttagacaatttctaaaatgtgtgccgtccagttaaataatataccccaaatgggaaaagcaacagaaaaaaaaaaaaggactcatgaaaatatcaatgctggccgattgcagtggctcacacctgtaattccagcactttgggaggctgaggtgagagaactgcctaagcccaggagtttgagatcagcctgggcaacatrgtgagatcctgcctctatttatttaaaaagaaaatcagtgttaaggaagattgcttgtctgtattcaaaatgccaatcaccacttttaaatagaaaaggaaaaggtacattttaaaaatgcatattttaaaagtcctgtcaaataaataagcacaaatatgtaatttaaagttctgatgtgaaagaataatttagagctttcctagcaataggagctttgttaaacagtcgtgtggccagtggtgcctaagccctctgccatctcagctgcctgccagtgtcactgaatctctgccatttcagacacactgtagatgtggtgttaacttaaatggtgctcaggggaaaaaaaatacacatgttgtgtatggagaaaagcccaagttcttcctcttttttttaaataagctgccaaatcttgctgctggtgtttacattaacagaggaatgtgatattaatatttagctcactctgca

SEQ ID NO: 678301 - DNA, 558 bp, Homo sapiens
aggcaggagaattgtttgaacctgggaggcagaggttgcagtgagccgagacaagatcgcaccattgcactccagcctgggtgacagagcgagactgtctaaaaaaataaaaagaatgatccccgaaacacatccccataagaagcctttcaaaaagtccccatgaccttcaaactagtagcaaattcttactatacccaaggagagtaaagataacaccaagtacacacctgtaatcccagcactttgggaggccgagacaggtggatcatgaggtcaggagatcaaggccatcctggctaacatggtgaaaccccgtctctactaaaaatacaaaaaaattagccgggcatggtggcgggcgcctgtagtcccagctactcaggaggctgaggcaggagaatggcgtgaaactgggaggcggmgcttgcagtgagccgagatcgtgccactgcactccagcctgggcgacagagcgagactccgtctcaaaacaaacaaacgaacaaaaatgttaaatatttcccaagaacctgtgactagattatatctacataa

SEQ ID NO: 678302 - DNA, 600 bp, Homo sapiens
gtaaattttccagtttattcatgcctccctagtatcctaaactggggatgagtttcctattcactcaygtagaattattggcaggatcatcatcagtgttactctggcactgctaatattctcttctcagttctttggtttttccttagtctctgagtcctgatctgggcagatgtccattctgctcatccttccaggcagatggggtgtgttagcactgtgttcatttcctcctcctcatcttccatacttttcttcgtctttcccttttaatggttcagaagaatgctcacacgctgtattattatctttacagaataattgctcaaaagaatcttccggcaaacagttctgaacttggccacctagcgtgtagagcgtgcggtggcatcactgcctaacagatttagccacgcattccctgtattcctgtattcccatgccttctatcagcagtttaaaatttctgctgctctttgatggtaatgtcaggtccaggtctcctcagatcatgagtgccttttggtaaatccttgccttcccgtctgctgccatggaccttaattcctgtcatttgtgttggtctctgaacccaagtgg

SEQ ID NO: 678303 - DNA, 1525 bp, Homo sapiens
gaaatatgcttcccgattgattcccaagtagtcgccctgtaagattagagcttggaggtttctctgccaaacctgacaaaaatctgcaaaatgaacgttccagcactgaggtgtatttagcttctccttttaaccttctgcttcctctgctgttacaagttcactacccacgcccttcatgcatacgtgtgcattcaactgcccactggaatgggaccgtgggaacatgcacctgggcggacttgctcaatgtgtccccccaaaattaattagcaaaatttcttgttaacaacgcaaacttcatttctgcactttccccgctcccccaacaccagctgttaagtagctatggtaacaccagctgtggtgagactgtgacactcacaggcactgaagccaggtcaggaagcacagaggttcagagctggagctctggggtcaggcagacctggattgcaaccccagctgggtgacctcggacagctcttttgacctctctaagctttgttttcctcatctatgcatgaggacactagcagaacccgtgaggatgaaaatggtgcacccagcacatgccttgagacaaagcaaatgctctatgcatgttaactgtggatcattatttttattgtgactggttctgagacagcttctcctcaccaggctcttggattccacactgaacatcaaacacagggcacccatgaaaccctgtgagatctggaggggatgcaaaagaagacgacccagagctttgtccggcacctgcttccccaacttccaaaataaatgatgcccaggagtgtgagtcctggcatctgctgcctgggcctcctcacacctgaaggggaagctttttccaacagcttggactcaatgttctaacacggaattgatgaaatgtggtattgccggaaactgtgtgtggctgcccgggattcatcacaccgccctcccagatcgtgaggcttcaacaacacagactacctgggtgtctccactggcttcttacaactggaaactcacagcacatatcttccttagggaacgcatttgcctcggggtgaaccattcactggtaggaacactagtcgtgatcatcaggccacactgggtaggagggaagcggggaatgtattcatcgaacctccacagcacatcagtgaggtgagtcctccatgggccccttcccaaccctctcctacccagctgtgccctcgcttcttatttcaaaggaacatttcaggcagatggaacatatcacatgcacacaaagcagggtaccctcgggcagctttttccccaagctctcagaagagcttggttaatgatgtttgtattcagtcctttgtgttatcatataaaacaacatgcatttctgaatactcrtctagttctaatgttgattataaaggattactcattggaaggtcttacttaaaaatcagtgtcttgaccaggcatggtggctcatgcctgtaatcccagcactttgggaggctgaggcgggaggatcacgaggtca

SEQ ID NO: 678304 - DNA, 3342 bp, Homo sapiens
atcagtatttgcctgttaagtgtttactgattacattgtgttaaattgtttttaacacttatcactcagagagcaaaagtatttgatagtttgagacaaactgcttaaagaacttgtagctgcaaatcaatgctgtactaggatatcattttaawaacacatttaaactaagcatatgattttgcaacagacttatttgtcaatgattgttgaaaactaaaacttccctggccatcgtgaaattgtagtagaatatatatatagaaagcttggtgctgtttaaaaacagttacttcagtgactccttattgcttacagtatagagttctaaattcttatcctcaatacataaatccatagtctcctgctttaccattagtctccctcatgaactctaaagtagaagcttcttttcacttaccctcaatatagtttgtactctttttatagctctatttccatgcatttttattcaattcctttgcttaagatggtctcactaatcctttctttttgtaattattattatcaaaaattttgatattaaataatttcattgagcacatggtaactatacaatgttatttaagtacctgacattgattttctcctttaattcttctgataacccaatgcagcagatactattatgatcactatttcacagataagaaacctgagaccaaaaagattacatagcttgttcaaagtcctgataatacacactatatagtggctgagcttgatttcaaacccagttttatactgatacaagagttttgactcttgtgttattctacctggaatcagcaccctcaaaacacttttgtttcatattataactaattaaagatagtaaatggttctctggtgcaggttttttgctccttagttcagttaaatatgggttcttgtctcatggccaggaaaaattaggcatgtagcagattgaaaagtgaggagggtggaatttactaagcaaaaggaaaactgtcaacaaaaagaggggtcctgcacacaagttttcacctcacaagttgagtaccaggccaccatacacgagttgaagaggccagccttcttccctgtatgaggcgcaaattcctggtagctccaccccattcttccggtgaatatgcgggcccttagtctgagccactccaaattgatttatttcctttactgcgcatgtgttaagggatggaattttttgccgtgggcatgtttagacaaaccccttacacacaatgacccgggtgggttggagattctccagggatacttccctatttgcctaggcatttggctgtctctgcttctatcattttcacaaataaatatgatcaactgttgaaaaagaatttgtctcaaaatattatcagtgtaaaagcatgaccttctctttgtgtcttaaccacaaccatggagcctagttgttccaaataaaaggctagtcttgaaacactgtcaatatggtgagaactgatcctagttgggggccaaaaacttaggcataaatagtgttttccattacttcaaaataccatcaatcacaataaaatgatcagttattttgaaaacaaacaacttattgcccttgtttcattgaaatagataactgattttaagtcaatccatttatgtaaatataacctttgagtaatggcagtcgttaattttgggaatgacttacatttcattaacttggacacacatttttttcaaatgcattctgcattattaatgcatttagaagagatggtatactaataacctcttacatgtttatataagcataacattacattgcaaaagtattatatgtagaatttctcatataatcctaacaacaacctttgaatttctttttcttattttatagttaagttaattgatgttcagtgaaattaagtagttcacccaaggttatacattcagtacatgtcagatacaccactagaattaaggtatctaactctcagtccagtgccgtttccatttcaccaatccaagcatcttttctctcagagaaaggtgagagggtcatcaccttgaaattctttctttagaaagaccttacttcattactcttttcttattaatattcacatttccttatgtctcttaaatcatgacctctgtcaccaccaaagacatcctgagtttatgcttctcctaccatggtagaaccatagctttctttatagagaaacttttataggcaatttttgcggtgtttgtaagaatgctattttagaaatagcagtttttcactgatatagaggtagtctgttctgactattagaataaaatgtgaacaattctgaataaaaaagcaaagttgcataactgtgtcatatttttctgggctgagttttttaaacagtaggtctaggaaattgaatagaacagggttctcaatggatcctggatgtgctaactaattagtatgagtatcgagatctcttaggagcctatgtggaaagtgataaagatgaaaagtcatatagcgcagcactgcccaatgcaattataatgcaagctatatatataattttacatttttttgtaggcacaacttagaaaaataagcaagtaaaataaattcaataatatattttgtttaaccaaatatgtccatatagtataatttcaacatgcaataagtattttaaacatattaagtatataagtatatattttacactctttttttatgctaagattttgaaatctggtgagtattttttacatttatagtttatatcaatttggatcaaccatatttcaagtgtttattagccacatacaactagtatctactgtattagacaacaaagtctggaaatttttttgaagactgttccatacatggccatggaaatgctgaactgttgctaccatttggaaaagaataaggtatatttttaggcctcaagatatgagggtttctattagggctgatatagaagtagactaaaacagagtttatcaactctgtttatcaacttcagcactattgacatttttggctgaataattatttgctgtggtggggctgtcttgatcattatagaatatttagcaacaactctggccttttcccaatagatgtcagttggactccttcctagttgtgataagcaaacatgccttcaaaatatgttaaaaggccctgcagtgttatgggggtggggaatgtcaacctctggttcagaatgaccgatcagccaagcaaagttttttagacttaggctgggtgatacacaaaacgaggattctcaaattctgagctctgaatgtcaattttctattccattgtcaatgtgtgcatcttagatg

SEQ ID NO: 678305 - DNA, 3342 bp, Homo sapiens
atcagtatttgcctgttaagtgtttactgattacattgtgttaaattgtttttaacacttatcactcagagagcaaaagtatttgatagtttgagacaaactgcttaaagaacttgtagctgcaaatcaatgctgtactaggatatcattttaaaaacacatttaaactaagcatatgattttgcaacagacttatttgtcaatgattgttgaaaactaaaacttccctggccatcgtgaaattgtagtagaatatatatatagaaagcttggtgctgtttaaaaacagttacttcagtgactccttattgcttacagtatagagttctaaattcttatcctcaatacataaatccatagtctcctgctttaccattagtctccctcatgaactctaaagtagaagcttcttttcacttaccctcaatatagtttgtactctttttatagctctatttccatgcatttttattcaattcctttgcttaagatggtctcactaatcctttctttttgtaattattattatcaaaaattttgatattaaataatttcattgagcacatggtaactatacaatgttatttaagtacctgacattgattttctcctttaattcttctgataacccaatgcagcagatactattatgatcactatttcacagataagaaacctgagaccaaaaagattacatagcttgttcaaagtcctgataatacacactatatagtggctgagcttgatttcaaacccagttttatactgatacaagagttttgactcttgtgttattctacctggaatcagcaccctcaaaacacttttgtttcatattataactaattaaagatagtaaatggttctctggtgcaggttttttgctccttagttcagttaaatatgggttcttgtctcatggccaggaaaaattaggcatgtagcagattgaaaagtgaggagggtggaatttactaagcaaaaggaaaactgtcaacaaaaagaggggtcctgcacacaagttttcacctcacaagttgagtaccaggccaccatacacgagttgaagaggccagccttcttccctgtatgaggcgcaaattcctggtagctccaccccattcttccggtgaatatgcgggcccttagtctgagccactccaaattgatttatttcctttactgcgcatgtgttaagggatggaattttttgccgtgggcatgtttagacaaaccccttacacacaatgacccgggtgggttggagattctccagggatacttccctatttgcctaggcatttggctgtctctgcttctatcattttcacaaataaatatgatcaactgttgaaaaagaatttgtctcaaaatattatcagtgtaaaagcatgaccttctctttgtgtcttaaccacaaccatggagcctagttgttccaaataaaaggctagtcttgaaacactgtcaatatggtgagaactgatcctagttgggggccaaaaacttaggcataaatagtgttttccattacttcaaaataccatcaatcacaataaaatgatcagttattttgaaaacaaacaacttattgcccttgtttcattgaaatagataactgattttaagtcaatccatttatgtaaatataacctttgagtaatggcagtcgttaattttgggaatgacttacatttcattaacttggacacacatttttttcaaatgcattctgcattattaatgcatttagaagagatggtatactaataacctcttacatgtttatataagcataacattacattgcaaaagtattatatgtagaatttctcatataatcctaacaacaacctttgaatttctttttcttattttatagttaagttaattgatgttcagtgaaattaagtagttcacccaaggttatacattcagtacatgtcagatacaccactagaattaaggtatctaactctcagtccagtgccgtttccatttcaccaatccaagcatcttttctctcagagaaaggtgagagggtcatcaccttgaaattctttctttagaaagaccttacttcattactcttttcttattaatattcacatttccttatgtctcttaaatcatgacctctgtcaccaccaaagacatcctgagtttatgcttctcctaccatggtagaaccatagctttctttatagagaaacttttataggcaatttttgcggtgtttgtaagaatgctattttagaaatagcagtttttcactgatatagaggtagtctgttctgactattagaataaaatgtgaacaattctgaataaaaaagcaaagttgcataactgtgtcatatttttctgggctgagttttttaaacagtaggtctaggaaattgaatagaacagggttctcaatggatcctggatgtgctaactaattagtatgagtatcgagatctcttaggagcctatgtggaaagtgataaagatgaaaagtcatatagcgcagcactgcccaatgcaattataatgcaagctatatatataattttacatttttttgtaggcacaacttagaaaaataagcaagtaaaataaattcaataatatattttgtttaaccaaatatgtccatatagtataatttcaacatgcaataagtattttaaacatattaagtatataagtatatattttacactctttttttatgctaagattttgaaatctggtgagtattttttacatttatagtttatatcaatttggatcaaccatatttcaagtgtttattagccacatacaactagtatctactgtattagacaacaaagtctggaaatttttttgaagactgttccatacatggccatggaaatgctgaactgttgctaccatttggaaaagaataaggtatatttttaggcctcaagatatgagggtttctattagggctgatatagaagtagactaaaacagagtttatcaactctgtttatcaacttcagcactattgacatttttggctgaataattatttgctgtggtggggctgtcttgatcattatagaatatttagcaacaactctggccttttcccaatagatgtcagttggactccttcctagttgtgataagcaaacatgccttcaaaatatgttaaaaggccctgyagtgttatgggggtggggaatgtcaacctctggttcagaatgaccgatcagccaagcaaagttttttagacttaggctgggtgatacacaaaacgaggattctcaaattctgagctctgaatgtcaattttctattccattgtcaatgtgtgcatcttagatg

SEQ ID NO: 678306 - DNA, 3342 bp, Homo sapiens
atcagtatttgcctgttaagtgtttactgattacattgtgttaaattgtttttaacacttatcactcagagagcaaaagtatttgatagtttgagacaaactgcttaaagaacttgtagctgcaaatcaatgctgtactaggatatcattttaaaaacacatttaaactaagcatatgattttgcaacagacttatttgtcaatgattgttgaaaactaaaacttccctggccatcgtgaaattgtagtagaatatatatatagaaagcttggtgctgtttaaaaacagttacttcagtgactccttattgcttacagtatagagttctaaattcttatcctcaatacataaatccatagtctcctgctttaccattagtctccctcatgaactctaaagtagaagcttcttttcacttaccctcaatatagtttgtactctttttatagctctatttccatgcatttttattcaattcctttgcttaagatggtctcactaatcctttctttttgtaattattattatcaaaaattttgatattaaataatttcattgagcacatggtaactatacaatgttatttaagtacctgacattgattttctcctttaattcttctgataacccaatgcagcagatactattatgatcactatttcacagataagaaacctgagaccaaaaagattacatagcttgttcaaagtcctgataatacacactatatagtggctgagcttgatttcaaacccagttttatactgatacaagagttttgactcttgtgttattctacctggaatcagcaccctcaaaacacttttgtttcatattataactaattaaagatagtaaatggttctctggtgcaggttttttgctccttagttcagttaaatatgggttcttgtctcatggccaggaaaaattaggcatgtagcagattgaaaagtgaggagggtggaatttactaagcaaaaggaaaactgtcaacaaaaagaggggtcctgcacacaagttttcacctcacaagttgagtaccaggccaccatacacgagttgaagaggccagccttcttccctgtatgaggcgcaaattcctggtagctccaccccattcttccggtgaatatgcgggcccttagtctgagccactccaaattgatttatttcctttactgcgcatgtgttaagggatggaattttttgccgtgggcatgtttagacaaaccccttacacacaatgacccgggtgggttggagattctccagggatacttccctatttgcctaggcatttggctgtctctgcttctatcattttcacaaataaatatgatcaactgttgaaaaagaatttgtctcaaaatattatcagtgtaaaagcatgaccttctctttgtgtcttaaccacaaccatggagcctagttgttccaaataaaaggctagtcttgaaacactgtcaatatggtgagaactgatcctagttgggggccaaaaacttaggcataaatagtgttttccattacttcaaaataccatcaatcacaataaaatgatcagttattttgaaaacaaacaacttattgcccttgtttcattgaaatagataactgattttaagtcaatccatttatgtaaatataacctttgagtaatggcagtcgttaattttgggaatgacttacatttcattaacttggacacacatttttttcaaatgcattctgcattattaatgcatttagaagagatggtatactaataacctcttacatgtttatataagcataacattacattgcaaaagtattatatgtagaatttctcatataatcctaacaacaacctttgaatttctttttcttattttatagttaagttaattgatgttcagtgaaattaagtagttcacccaaggttatacattcagtacatgtcagatacaccactagaattaaggtatctaactctcagtccagtgccgtttccatttcaccaatccaagcatcttttctctcagagaaaggtgagagggtcatcaccttgaaattctttctttagaaagaccttacttcattactcttttcttattaatattcacatttccttatgtctcttaaatcatgacctctgtcaccaccaaagacatcctgagtttatgcttctcctaccatggtagaaccatagctttctttatagagaaacttttataggcaatttttgcggtgtttgtaagaatgctattttagaaatagcagtttttcactgatatagaggtagtctgttctgactattagaataaaatgtgaacaattctgaataaaaaagcaaagttgcataactgtgtcatatttttctgggctgagttttttaaacagtaggtctaggaaattgaatagaacagggttctcaatggatcctggatgtgctaactaattagtatgagtatcgagatctcttaggagcctatgtggaaagtgataaagatgaaaagtcatatagcgcagcactgcccaatgcaattataatgcaagctatatatataattttacatttttttgtaggcacaacttagaaaaataagcaagtaaaataaattcaataatatattttgtttaaccaaatatgtccatatagtataatttcaacatgcaataagtattttaaacatattaagtatataagtatatattttacactctttttttatgctaagattttgaaatctggtgagtattttttacatttatagtttatatcaatttggatcaaccatatttcaagtgtttattagccacatacaactagtatctactgtattagacaacaaagtctggaaatttttttgaagactgttccatacatggccatggaaatgctgaactgttgctaccatttggaaaagaataaggtatatttttaggcctcaagatatgagggtttctattagggctgatatagaagtagactaaaacagagtttatcaactctgtttatcaacttcagcactattgacatttttggctgaataattatttgctgtggtggggctgtcttgatcattatagaatatttagcaacaactctggccttttcccaatagatgtcagttggactccttcctagttgtgataagcaaacatgccttcaaaatatgttaaaaggccctgcagtgtyatgggggtggggaatgtcaacctctggttcagaatgaccgatcagccaagcaaagttttttagacttaggctgggtgatacacaaaacgaggattctcaaattctgagctctgaatgtcaattttctattccattgtcaatgtgtgcatcttagatg

SEQ ID NO: 678307 - DNA, 624 bp, Homo sapiens
gattactacagaatcacgcaggataaaaacttccagtagctctgatttaataaagggagaaagaagaaaggaagagagggagggaagaaaaaaagaaaaagagagaaaaaaaggaaaagaaacgaaaggagaggagagaagagggaaggaaggaaggaaggaaggaaggaaggaaggagagaaagaaaaaatgagggttgaaatacttgattgaggaacaggtgaggttaaaaaaagactgaagaattactgaactcattttgacatgttttaaataatggctggaaaatacaagggcacgtgcagtgcagttaaatctttcccactctttaatagaggggatacaaaggtcactgctgtgcaaagagaattgactactcccttcaatgcatggtgtgtccagtacctcttttatttattctgtagaggaaaagctggtctgattaggccttcaatattatcgcaggaacctgacacaaatttttaacaagcccccataatggcctatctatatattcaggccaattattacatactgactcaagcagttgggcagcagatattgtgcygttcactcagaaccccttttgaatcattttacatttcacacaatgcaaaagaaaa

SEQ ID NO: 678308 - DNA, 659 bp, Homo sapiens
tgaccattcttttttttttgatgtatcacaacatctcccccaacccccctcctatttttctactgtagccgttggctttcagttcaggtcactaatatatcacttacagttttctgcactggtcttagttcaattcagtttagtaagcattcagtgactacctactgtaaacaaacctgcatattggccaaaataagctaactgwcaaatagcacaacataagcccactgtggtttctacctagggttcctcaatcattacattttgtctctaaggggaccgttagaaatattccattcaagcacattcaaatagggctttgtgaggtgatgaaaatactctgcatgtgtgactactgagcacttgaaatgtgtctaataccactgctgcactaaatttttaatttaattttaatgtaaatagctatactactggcaaatctaatatggattttatacctgaggaaacacacctaaaaggttaaagttactagtccaagatcacatggctataaaacttctcagtcatggtacactttctttttctttctatacacacaccgagagagagagagagagagagagagagagagagagagagagagagagagagaaatagtgagagaccgatgttgcagcttgagtctgaaggcaggctgg

SEQ ID NO: 678309 - DNA, 659 bp, Homo sapiens
tgaccattcttttttttttgatgtatcacaacatctcccccaacccccctcctatttttctactgtagccgttggctttcagttcaggtcactaatatatcacttacagttttctgcactggtcttagttcaattcagtttagtaagcattcagtgactacctactgtaaacaaacctgcatattggccaaaataagctaactgacaaatagcacaacataagcccactgtggtttctacctagggttcctcaatcattacattttgtctctaaggggaccgttagaaatattccattcaagcacattcaaatagggctttgtgaggtgatgaaaatactctgcatgtgtgactactgagcacttgaaatgtgtctaataccactgctgcactaaatttttaatttaattttaatgtaaatagctatastactggcaaatctaatatggattttatacctgaggaaacacacctaaaaggttaaagttactagtccaagatcacatggctataaaacttctcagtcatggtacactttctttttctttctatacacacaccgagagagagagagagagagagagagagagagagagagagagagagagagagaaatagtgagagaccgatgttgcagcttgagtctgaaggcaggctgg

SEQ ID NO: 678310 - DNA, 650 bp, Homo sapiens
gacttagtgatacaaactacaatgtggatgaaccttgaaaacgttatccgaagtgaaagaagtcacacataaaaggccacatattgtatgattctattgacatgaaatgtccaagtgacacaaatccctagggatggaatgtagattattggttttcaggaaactgttgcaaaagaaaggtggaataactgctatttggcaggaggtttcatttttaggtgttgaaatttcttagaatttttagtagtaaragttgcataactctgtgaatttactaaaaacactgaattgaataaagagataaattttatggcctgttaaatatatttcaacgcagctgttaaaaagttaggaaaaattactcaaaggaaattaagaaagctctctttcaccccaggagcatttctacagttccagacatgcaatttctgctttaaacatctgctagtaaagtatttgaatacttgaagttcaaaaggtcaattccacagctatataaaggcagaaacagctggaaatagatgtcttcaattttattgaaaaggtaatgttaattggtattgcaaatatttgaatcagagaaaattgtaacaaatcaactagttaactgtgtaaaatatattgctacctccataatgtaagaagatttt

SEQ ID NO: 678311 - DNA, 640 bp, Homo sapiens
cttgcctctagggtctkactcaaagctggcagtgcaatttttctcttccaaggctgacccacttgtgcatggtgcagataattatttcagtctaaattcagcatcttaaaacctcacggccgggcgcagtggctcatgtctgtaatcccagcacttccggaggccaaggcgggtgaatcacgaggtcaggagatcgagaccatcctggctaacacggtgaaaccccgtctctactaaaagtacaaaaattagctgggcgtggtggtgggcgcctgtagtcccagctactcggaggctgaggcaggagaatggcctgaacccgggaggcagagcttacagtgagccgagatcgggccactgcactccagccggggcgacagagcgagactctgtatcaaaaaaaaaaaaaaaaaaaaaaaaaaaaaaagatctcacaagtattccatagtgttgcccaagaaaatcattacaagaggtacaagttgaagtataaacgttttatgggaaagcaaataacatatgattaaacatttgtcttataagtacgcacttaagaatgtctgaggcatctatcagttggagtctatggccatttactttcctcaaattggctactaaggcagggaaaagtgtatactat

SEQ ID NO: 678312 - DNA, 640 bp, Homo sapiens
cttgcctctagggtcttactcaaagctggcagtgcaatttttctcttccaaggctgacccacttgtgcatggtgcagataattatttcagtctaaattcagcatcttaaaacctcacggccgggcgcagtggctcatgtctgtaatcccagcacttccggaggccaaggcgggtgaatcacgaggtcaggagatcgagaccatcctggctaacacggtgaaaccccgtctctactaaaagtacaaaaattagctgggcgtggtggtgggcgcctgtagtcccagctactcggaggctgagrcaggagaatggcctgaacccgggaggcagagcttacagtgagccgagatcgggccactgcactccagccggggcgacagagcgagactctgtatcaaaaaaaaaaaaaaaaaaaaaaaaaaaaaaagatctcacaagtattccatagtgttgcccaagaaaatcattacaagaggtacaagttgaagtataaacgttttatgggaaagcaaataacatatgattaaacatttgtcttataagtacgcacttaagaatgtctgaggcatctatcagttggagtctatggccatttactttcctcaaattggctactaaggcagggaaaagtgtatactat

SEQ ID NO: 678313 - DNA, 640 bp, Homo sapiens
cttgcctctagggtcttactcaaagctggcagtgcaatttttctcttccaaggctgacccacttgtgcatggtgcagataattatttcagtctaaattcagcatcttaaaacctcacggccgggcgcagtggctcatgtctgtaatcccagcacttccggaggccaaggcgggtgaatcacgaggtcaggagatcgagaccatcctggctaacacggtgaaaccccgtctctactaaaagtacaaaaattagctgggcgtggtggtgggcgcctgtagtcccagctactcggaggctgaggcaggagaatggcctgaacccgggaggcagagcttacagtgagccgagatcgggccactgcactccagccggggcgacagagcgagactctgtmtcaaaaaaaaaaaaaaaaaaaaaaaaaaaaaaagatctcacaagtattccatagtgttgcccaagaaaatcattacaagaggtacaagttgaagtataaacgttttatgggaaagcaaataacatatgattaaacatttgtcttataagtacgcacttaagaatgtctgaggcatctatcagttggagtctatggccatttactttcctcaaattggctactaaggcagggaaaagtgtatactat

SEQ ID NO: 678314 - DNA, 972 bp, Homo sapiens
gtttagctgcttcatatagcttagtattttgtgttctagtttttttgtatttatctaattgtttaacacaagagagtaagtttatccctgttattctgtcttggtagaaaacaggaatccagatgctttcattatattatatatctttttctcattaatttatgggacatctttatgtgtctgtataaaattcctatatatagatagatagatagacagcaagactcttctgcacatctctgattttacttttcagtggattcaatggctttatagatttttttgatttgtcacattcaaaaatcttgatcaataatatgaagatctttgctatgttttattttacatgcttcattatattacatatcatttatgagtatgactcattgtgaataaatttttgtgtattgtgtaaggcaatatttttcccatgtggatatccaactaatctaacatcatttattaaatgttttaatccactgaattgcagtaacatctttgccataaaacatgtaactgaatatataatcctaatctctcttctgttccattggttcatttgtccatccttgcactagaaagacactattttaattatgataaatattgaaacagacaatgtaaattcctccaactttgttcttcttttaaaaaattgtattatttacccaataatttttattttccaaattcactttagaattggcttgtcaatgtacgcacactaacaattatggataaatttgcagagatgggtgctttaacaataattattttctcaatacataaacatgtatatgtgttcatttatttatgtkttcttttactttagcagtattttttaataattttttaaattcttcccattcctggaaactagtagctatatgtaaaatcttgattaaatttgggttattttttactaccttaattttaagaacaatttttatatttctactaagaattgcagat

SEQ ID NO: 678315 - DNA, 841 bp, Homo sapiens
tgggaataaataatcttatctacctcataaggatactgtgagaattacaggaattagtgtctataaagtacttagaagagtgcctggtgtatagagacccatttttctggaagctatagttctcttacaaaaagcccccagggaactatgagatggcctgtactaacatgctacccattgctaggaagagagactgaatgaaaagacatgagcactatgggacacaggtagaggaaccttgggttgaaggcaaagaatgagtgacgatcgcatgttaaaatgaagcacctactcctgggctaatgatgtgggattgtaagtggtcacatttgaatgcctgcaacattctatgtttagaaatgtggcctctaaggctcagctcagtatctgttcaacatctttgctaacctctagccaaagtgctgggtagcttttcctgagctctgcaaacaccttacaccctatagtgggttaaatcrtgcccccaaaaagatacgttcaagtcctaacctccaatatctgtgaatgtgactttattcggaaatagagtctttgcagatacaactaagttaagaagtgttcatactggatgagagtgagccctaaatccaatgaaccaatgatgggtgtcttttttttttttttttaagacgaagtcttgctcttttcccccaggctggaatgtgacggcgcaatcttggctcactgcaacctccgcctcccgggttcaagtgattcggttcaagtgattctcctgcctcagcctcccgagtagctgggattacaggcacctgccaccaagcccagctaattttttttatttttagtagagatggggttt

SEQ ID NO: 678316 - DNA, 656 bp, Homo sapiens
tggttgtgtaaataaattttaacagatgaacaaaagagccctggtagttaacagaacaattaatgtaaatctgtgacaagcctcttttcattctgctcagtcatacctgcttttatgtagggtggtggcagctgccacagtacccttcattgtttcttttgagaaatatttccataaattagtccaattccctttcagtaactgattgaaaaataatgagcggtcaggagaaataagcattgtttgttcaatgcatgattttttcttacttaggagtttgttttatctaaggggaatgaggaagacagatgctaaaaggagcagtggaagagataccagttctttgcttatgttctcaactagcactcactttggtttgctgaatctgaaaaaatacatttctgatttcttgttttgcatacttctttattaattatttagcgtacattgatcaggcagataaatgtgagaaccatttccrtctaatcagtttaatgatgtttctgacaatgctatactgtttcatataatacatgacaaatagataacaatttaaaattatttttgtcttcaattatgttgtctgctgactttgatagttaattggaattggtctagtttttagggctttccagtttttgaacaacttgaatttt

SEQ ID NO: 678317 - DNA, 1510 bp, Homo sapiens
tttgctgatcacatatatccctattaaagcagatctctttgtatctatttggcaaaacctccttaatcttgcagcaatctcagtttttttttttacrttgatagcctttatttctttaaaaattctattaatcaaactttctgcttatttggagtaaactctgcaggactggctagatttgcatggtgtgactgtaggtgttttttgaaaatagaactacagaagaaagtattcttggcttagttcttggtagcttcctgatagaagagatctgtagagtcagcgaatgtgcttggttctggagatcatgcctgaagccatttatctagtcatcatgtgcataacagactttactccatctcttaaatgatctgaaaaatactttatttttttttttttttactttttaaacataattgaaaagctaataactatggagtttttgctttttataagtttatagcagtggttctcaactaggggagattttgtcccctggggaacatttggtaatgtctggagacattttgtttttcacacctggggtggaagggggactgctactggtgtctagtgggtatagaagccagggatacacagggcagttctctacaacaaaaaattacccagaccagaatgtcaatggtgctgagattgagaaaccctggccagaggagtacactcccaaagtggttttggctgatagttgctacaagattggggctcaaatgtcaaatgggataatagtgccttaatagcagcctatttcagggcctttaaaatgctcacatgcatattgtctccctcagagataagatctagtattaaagactctcaaacatgttgaatcatggagcctttttttctgggggtttttgggcaccacatattctttatatgaggcattccttcgagaatgctagcttggagtgcccacaacaaatgacatacactcctgagtgagggagtcttggggaactgaaatgtacttgtattataggaaaagttattgcatttccatcccattccccactcccaccagatatgctgtagataaatgattatgagagtaaaatatgctgatcattgaaattttggacaatagttgggaagaaaataaaggcagcccattattatagcactcaaggagaatcattgttaacattacgttatgtttacatcagtatctttggtatctttttctatgaatgacagagtatgatccaaagatggcccatcaatatatatcccatcctacatgctctttttacaagatgactttaacactcatccaatgacaaatctctgcttcctccccttgaaactgggcatgcctgggactctggtagaagtgatgctgtgtgacttatgaggttagattagaaaatacatcagctccttcctggctttctctctcttgaatgcatgtcattcattatggccaccatgttgtgaggaaccccaagctaatctttacaaaacaactgcatggagagacccacatggacag

SEQ ID NO: 678318 - DNA, 1510 bp, Homo sapiens
tttgctgatcacatatatccctattaaagcagatctctttgtatctatttggcaaaacctccttaatcttgcagcaatctcagtttttttttttacattgatagcctttatttctttaaaaattctattaatcaaactttctgcttatttggagtaaactctgcaggactggctagatttgcatggtgtgactgtaggtgttttttgaaaatagaactacagaagaaagtattcttggcttagttcttggtagcttcctgatagaagagatctgtagagtcagcgaatgtgcttggttctggagatcatgcctgaagccatttatctagtcatcatgtgcataacagactttactccatctcttaaatgatctgaaaaatactttatttttttttttttttactttttaaacataattgaaaagctaataactatggagkttttgctttttataagtttatagcagtggttctcaactaggggagattttgtcccctggggaacatttggtaatgtctggagacattttgtttttcacacctggggtggaagggggactgctactggtgtctagtgggtatagaagccagggatacacagggcagttctctacaacaaaaaattacccagaccagaatgtcaatggtgctgagattgagaaaccctggccagaggagtacactcccaaagtggttttggctgatagttgctacaagattggggctcaaatgtcaaatgggataatagtgccttaatagcagcctatttcagggcctttaaaatgctcacatgcatattgtctccctcagagataagatctagtattaaagactctcaaacatgttgaatcatggagcctttttttctgggggtttttgggcaccacatattctttatatgaggcattccttcgagaatgctagcttggagtgcccacaacaaatgacatacactcctgagtgagggagtcttggggaactgaaatgtacttgtattataggaaaagttattgcatttccatcccattccccactcccaccagatatgctgtagataaatgattatgagagtaaaatatgctgatcattgaaattttggacaatagttgggaagaaaataaaggcagcccattattatagcactcaaggagaatcattgttaacattacgttatgtttacatcagtatctttggtatctttttctatgaatgacagagtatgatccaaagatggcccatcaatatatatcccatcctacatgctctttttacaagatgactttaacactcatccaatgacaaatctctgcttcctccccttgaaactgggcatgcctgggactctggtagaagtgatgctgtgtgacttatgaggttagattagaaaatacatcagctccttcctggctttctctctcttgaatgcatgtcattcattatggccaccatgttgtgaggaaccccaagctaatctttacaaaacaactgcatggagagacccacatggacag

SEQ ID NO: 678319 - DNA, 642 bp, Homo sapiens
taattttgaaaatagtgacttattccttctatgacttaacaatcacttagcgttctttgtttcttttccactggacttaagcaccttgatagcaggaaccatgtttggttttatttgctgtttgtatctctagagactagagcagtatctgggacatagcagctgtttaagtaaataattaaaatcaatgagtaaatgaatgcaagggtgaatgagccaagataaatatttaattttaaaaattcaggacaattttagatttatagaattattgcaaagatagtatagagagttgctgtataacctaaacccaacttatcctattaacattttatattagtatgatacatttgtcacaattaatgaagcacaatattcatatattattrttgtctaaagttaatactttattcagatttcatcagttttcccctaatgtctttttttctgttccaggatcctacattgagaagttatgtcccttcaggctcctcttggttgtgacaatgtttcagatttttcttgttttgatgagtgtgatagttctgggaagtattagtcaggtattttaaagaatgtttttcagttgggatttgcctgattatttcatcatgattaaagtgaggtgatgtgtttttggga

SEQ ID NO: 678320 - DNA, 642 bp, Homo sapiens
taattttgaaaatagtgacttattccttctatgacttaacaatcacttagcgttctttgtttcttttccactggacttaagcaccttgatagcaggaaccatgtttggttttatttgctgtttgtatctctagagactagagcagtatctgggacatagcagctgtttaagtaaataattaaaatcaatgagtaaatgaatgcaagggtgaatgagccaagataaatatttaattttaaaaattcaggacaattttagatttatagaattattgcaaagatagtatagagagttgctgtataacctaaacccaacttatcctattaacattttatattagtatgatacatttgtcacaattaatgaagcacaatattcatatattattattgtctaaagttaatactttattcagatttcatcagttttcccctaatgtctttttttctgttccaggatcctacattgagaagttatgtcccttcaggctcctcttggttgtgacaatgtttcagatttttcttgttttgatgagtktgatagttctgggaagtattagtcaggtattttaaagaatgtttttcagttgggatttgcctgattatttcatcatgattaaagtgaggtgatgtgtttttggga

SEQ ID NO: 678321 - DNA, 848 bp, Homo sapiens
tgtagctctctatgtgccataattccaaccactgaaagagatattgtttgaggcaacaatataataaaattaacagacatttggatgattacaaaattatctatcattacaatattatgttaagagggctcagttagccagtagcttcatatactgcacctctaaacccatttcatctagctcatgcctagcatctgataacaatagcagactttggctgtaccattataaatccctcagtatcattatctgacaacttaaagtacatgctctactataagtcatttttgcttacgaggacactcacactcactgatctagttactttattgtcaatcttcattttaaaaattaccaaaaaaagttcattccacatggaacactatgcagccataaaaaaggatgaggtcatgtcctttgcagggacatggatgaagctggaagccatcattctcagcaaactatcacaaagacagaaaacaaaacattgcatgttctcactcataggtgggaattgcacaatgagaactcaaggacacagggcagggaacatcacacaccagggtctgtcgtagggtgaggggctgggggagggacagcattaggagaaatacctaatgtaaatgaccagttaatgggtacagtaagccaacatgkcatatgtatacctatgtaacaaacctgcatattgtaaataaataaaataaataaataaataaataaatggaaaaaagttaattccagaggctttcattattcattcattactttgcttaccttttggggctacttttgacagcagaaaaagtacttcaaaaataaaaatagtatttccctttctgcaatat

SEQ ID NO: 678322 - DNA, 669 bp, Homo sapiens
gttatcaaggaccagatcctcatcaacttgccactctgacttctgaattggttaacttgatcctcagcctggttcctctcacaaagaaaatactgtacatccacagcaatccctgcccaaacattcagacacaataacatgcaaaagaaaaagacacttcttagcaatgaaaaagcaaccccagaaacttcccagcaggcctcacctctgatttcattggtcaatgtctaaaatcatcaccagcaagggaaatggggccagtaacaactggtttgagcacaagcgtacccacctctccgtgggtggagattaagcaacttcctctgaagcttgtgtggagaagaaaatacatgaaaaaaatctgggctctgttttgaaagaggtagaggggatgtataaatgaatattgggaagaaaaatcattagggctttctgttgctttattgcttcaaaatagcaaatgttaacttaactgactaatttgaacatataaagatctatggttattacagagaaataaacagggaagaggagaagaaggaagggagggaaggaaagtcatgttcatgattgtgcrtgccactcctacaggctatgaaagtagttactgaaaatcatagatgtctgcaggaggatctgtgtatgctagacagattttcagagataaaa

SEQ ID NO: 678323 - DNA, 677 bp, Homo sapiens
ttgtaactttagcttgtttattttcattgtgtgtgtgaagtattcttccacattcttatatgaacatgccacaatttattgatccatgtaatttttgagggacatttgggtcatattcaatttagagttaataatgacattatstttattcttacacaaatttctgatattcatatgtatgcatttttggggggtatataatatacatagagagagaggtgtaaaactgctggatttgttaaaataatttaaagtaagaaagtttactacatgtaagggcttctgttccttttgttaatttacatcctaaatagattcctgaattcatgtgtttctagtagatgtaaaactaataataacaacacagttaacccaggcaaacagaattcttaagcaatacctgagatgaaaaaatacaaaaacatgcctgaatgaaaatctggttctaaagtgttactgatataactttaaaatatagtcatcatgagtcaaaaaataaaaatgaatctaagtttactgaattctaaagcaatgatttcaaatagtttcacaatttttcagaactgcccctttaattcttataattcaagtgaactttattttggttgcatccatcacttgctataaaatttttgaaattttggtttctataactgcttagttttaaatacaaaaat

SEQ ID NO: 678324 - DNA, 626 bp, Homo sapiens
gtttgtcccatcagatatgccttgacataacgtagggataggaggtagtcatttgacagccaaaaatgccttatcatttagataattatcagttctacttcataggaacattgccaagcagcaaagggaggagagaatttcaggttggtaggtgtacttagcagtacaccatgaatgccatcaagaagtagggcattaaggagaataaaaatggccattgcatttgtcaatgcagaggtctttgttgaattcagcagtgctgggcagaccagcatcytgataataaagaagggtacttgttatgggttttattgggtccccaaaaagataatgttgattttctaactccagtatctcattttttgaaacagtattgttgcagatgtaattaaaatgaggttataataaattagagtaagcccttaactcaaaacaattggtgccattataagaggatgaccatgtgaagacacagacacacagaaaaaacaccatgtggtgactgaagcagagattggtgtaatgcaactacaagtcaacaagcaactatgattgacggccaccaccaaggctaggaagaggcaaggaaagattctactcaaatactcaaattcttggaggaaacc

SEQ ID NO: 678325 - DNA, 626 bp, Homo sapiens
gtttgtcccatcagatatgccttgacataacgtagggataggaggtagtcatttgacagccaaaaatgccttatcatttagataattatcagttctacttcataggaacattgccaagcagcaaagggaggagagaatttcaggttggtaggtgtacttagcagtacaccatgaatgccatcaagaagtagggcattaaggagaataaaaatggccattgcatttgtcaatgcagaggtctttgttgaattcagcagtgctgggcagaccagcatcctgataataaagaagggtacttgttatgggttttattgggtccccaaaaagataatgttgattttctaactccagtatctcattttttgaaacagtattgttgcagatgtaattaaaatgaggttayaataaattagagtaagcccttaactcaaaacaattggtgccattataagaggatgaccatgtgaagacacagacacacagaaaaaacaccatgtggtgactgaagcagagattggtgtaatgcaactacaagtcaacaagcaactatgattgacggccaccaccaaggctaggaagaggcaaggaaagattctactcaaatactcaaattcttggaggaaacc

SEQ ID NO: 678326 - DNA, 626 bp, Homo sapiens
gtttgtcccatcagatatgccttgacataacgtagggataggaggtagtcatttgacagccaaaaatgccttatcatttagataattatcagttctacttcataggaacattgccaagcagcaaagggaggagagaatttcaggttggtaggtgtacttagcagtacaccatgaatgccatcaagaagtagggcattaaggagaataaaaatggccattgcatttgtcaatgcagaggtctttgttgaattcagcagtgctgggcagaccagcatcctgataataaagaagggtacttgttatgggttttattgggtccccaaaaagataatgttgattttctaactccagtatctcattttttgaaacagtattgttgcagatgtaattaaaatgaggttataataaattagagtaagcccttaactcaaaacaatyggtgccattataagaggatgaccatgtgaagacacagacacacagaaaaaacaccatgtggtgactgaagcagagattggtgtaatgcaactacaagtcaacaagcaactatgattgacggccaccaccaaggctaggaagaggcaaggaaagattctactcaaatactcaaattcttggaggaaacc

SEQ ID NO: 678327 - DNA, 626 bp, Homo sapiens
gtttgtcccatcagatatgccttgacataacgtagggataggaggtagtcatttgacagccaaaaatgccttatcatttagataattatcagttctacttcataggaacattgccaagcagcaaagggaggagagaatttcaggttggtaggtgtacttagcagtacaccatgaatgccatcaagaagtagggcattaaggagaataaaaatggccattgcatttgtcaatgcagaggtctttgttgaattcagcagtgctgggcagaccagcatcctgataataaagaagggtacttgttatgggttttattgggtccccaaaaagataatgttgattttctaactccagtatctcattttttgaaacagtattgttgcagatgtaattaaaatgaggttataataaattagagtaagcccttaactcaaaacaattggtgccattataagaggatgaccatgtgaagacacagacacacagaaaaaacaccatgtrgtgactgaagcagagattggtgtaatgcaactacaagtcaacaagcaactatgattgacggccaccaccaaggctaggaagaggcaaggaaagattctactcaaatactcaaattcttggaggaaacc

SEQ ID NO: 678328 - DNA, 1240 bp, Homo sapiens
caatgttgagatttatttatttatttttatttttattttattttttgtttttgagactgagtcttgcactgtcacccaggctggagtgcagtggtgcagtctctgctcactgcaacctccacctcccgggttcaagtgattctcckgcctcagcctcccaagtatctgggattacaggcacccgccaccatgcccagctaattttttgtatttttagtagagacagggtttcactatgttggccaggctggtcttgaactcctgacctcatgatccgcccacctcggcctcccaaagtgctgggattacaggtgtgagccactgtgcccagccaagaatgttgaattttatgtgccttgctctttggagcaaggcacccatatgaaagtcatgcactaacatgcatgcaaaacatgaatgctgaatatattttaattttgcccatgaaagtttgattgatttgctacacagtaacatttataaagttgtgactcatgtagcctagtcctcaaaggatatgacatttaaagagaaaacgccaaacacagtttcctagacagtaaaaggcctggctgcttctgtttgcatttcttgaacttctgccatcgccaggaggagaatatatcctggctagtccacaggtcccaggagaaggtgagagacatctgcagcaaagccacccatgcctgaacccagcctagatcagccagcatcagataatctagattcatgagaacaaatgagtgtgagtttgggggtaatttgttacacagcactttgtgtcaaaagctaactgatgcagggacatagcaaagtaattagtaagctcttgttccactctataaacactttaggtgcttcgtgtcaccaaataattctgcaacacattatctcattgattctttactatcactctgtgaagtgtgaatcattatgtctacaaatgagcacgctgaggcttattctatgttgtagacatattttgggatgtgccttcacgctatagtcccttacatgggaattcctctgccttagtacttgctgaatggacttgcctaggaaatctcttctgtaatacacagccctgctctcctatggcttggatatagctgattggaccagcaatgggcactcgattcaacatcaaccaatcagggatggccaatgaccaatcagattctctatcttgagaattagaattaagatttagagacaaaaactatttagagatgaaggatca

SEQ ID NO: 678329 - DNA, 1240 bp, Homo sapiens
caatgttgagatttatttatttatttttatttttattttattttttgtttttgagactgagtcttgcactgtcacccaggctggagtgcagtggtgcagtctctgctcactgcaacctccacctcccgggttcaagtgattctccggcctcagcctcccaagtatctgggattacaggcacccgccaccatgcccagctaattttttgtatttttagtagagacagggtttcactatgttggccaggctggtcttgaactcctgacctcatgatccgcccacctcggcctcccaaagtgctgggattacaggtgtgagccactgtgcccagccaagaatgttgarttttatgtgccttgctctttggagcaaggcacccatatgaaagtcatgcactaacatgcatgcaaaacatgaatgctgaatatattttaattttgcccatgaaagtttgattgatttgctacacagtaacatttataaagttgtgactcatgtagcctagtcctcaaaggatatgacatttaaagagaaaacgccaaacacagtttcctagacagtaaaaggcctggctgcttctgtttgcatttcttgaacttctgccatcgccaggaggagaatatatcctggctagtccacaggtcccaggagaaggtgagagacatctgcagcaaagccacccatgcctgaacccagcctagatcagccagcatcagataatctagattcatgagaacaaatgagtgtgagtttgggggtaatttgttacacagcactttgtgtcaaaagctaactgatgcagggacatagcaaagtaattagtaagctcttgttccactctataaacactttaggtgcttcgtgtcaccaaataattctgcaacacattatctcattgattctttactatcactctgtgaagtgtgaatcattatgtctacaaatgagcacgctgaggcttattctatgttgtagacatattttgggatgtgccttcacgctatagtcccttacatgggaattcctctgccttagtacttgctgaatggacttgcctaggaaatctcttctgtaatacacagccctgctctcctatggcttggatatagctgattggaccagcaatgggcactcgattcaacatcaaccaatcagggatggccaatgaccaatcagattctctatcttgagaattagaattaagatttagagacaaaaactatttagagatgaaggatca

SEQ ID NO: 678330 - DNA, 634 bp, Homo sapiens
ccagatgaacaggaaagagttttttctctagcccagtctcacgctgacaaccgcyggcttcatgagccaggcctccaggaaggcatcagagcagttccccgagaggacccccaaaggaactatcaggcagattccccaggtatagctaggcgagattacatgatttcctgcctagttgaagggcttaaaaaggcagcacacaaagctgttaattctgacaagctaaaggaaactacccaaggtaaaggcgaaaacccagcccagttcctggcccgcttggcagcaacccttagacgctttaccgccctagacccagaggggccggaaggccgccttattctttttttttttttttagatgtattttacttttatttttttaatctttgggcacaaagatttgacacattatttcaaaagaatacaactactcatccagtaggaataaattcaacaaacattaattgatgagcaaagtactggctttaaaaaaataaactaagtaaattttttttcccttgggtaataaaataataataaaagaagagacattgggttaagcacccttagggcaaaataaaaatgcaattggtttctcaaaaacttgcttttgacatctcaaaaaaagtcatgct

SEQ ID NO: 678331 - DNA, 634 bp, Homo sapiens
ccagatgaacaggaaagagttttttctctagcccagtctcacgctgacaaccgctggcttcatgagccaggcctccaggaaggcatcagagcagttccccgagaggacccccaaaggaactatcaggcagattccccaggtatagctaggcgagattacatgatttcctgcctagttgaagggcttaaaaaggcagcacacaaagctgttaattctgacaagctaaaggaaactacccaaggtaaaggcgaaaacccagcccagttcctggccygcttggcagcaacccttagacgctttaccgccctagacccagaggggccggaaggccgccttattctttttttttttttttagatgtattttacttttatttttttaatctttgggcacaaagatttgacacattatttcaaaagaatacaactactcatccagtaggaataaattcaacaaacattaattgatgagcaaagtactggctttaaaaaaataaactaagtaaattttttttcccttgggtaataaaataataataaaagaagagacattgggttaagcacccttagggcaaaataaaaatgcaattggtttctcaaaaacttgcttttgacatctcaaaaaaagtcatgct

SEQ ID NO: 678332 - DNA, 603 bp, Homo sapiens
tcctaaagataagattgagttgggagagggataatgacctaaaggatgatcaaacatttcaactcagtctttcaggttcctgggaagtctaacaaagaactactgctccaggagggaccagctgcaactgtgaatgatggatttcraatttaagagtcgatacagatattagagattatctattccatactttttattttacagataagaagcctgatgtccaatgagataagttagttgtctaataccatataactaacagacagtggaactatattagaattcccagatatctgactccatccagttcaattcacatacaaaaaaaaggataagaaataatgtatttttgatcatagccatcttagataaaaattattaaagcctgaaagaatcaaatattgcaacaatgttgggttttgaacagatgctacattacatgaacaactgaaatggtgaaagctcctgtttttatggatagctacctgtataacaattggcaatattagctctgtattattttgatattatattatctgtaatctacatatggctccatgtgctcctcacctctgccactcctgccttatttcttttcttctc

SEQ ID NO: 678333 - DNA, 603 bp, Homo sapiens
tcctaaagataagattgagttgggagagggataatgacctaaaggatgatcaaacatttcaactcagtctttcaggttcctgggaagtctaacaaagaactactgctccaggagggaccagctgcaactgtgaatgatggatttcgaatttaagagtcgatacagatattagagattatctattccatactttttattttacagataagaagcctgatgtccaatgagataagttagttgtctaataccayataactaacagacagtggaactatattagaattcccagatatctgactccatccagttcaattcacatacaaaaaaaaggataagaaataatgtatttttgatcatagccatcttagataaaaattattaaagcctgaaagaatcaaatattgcaacaatgttgggttttgaacagatgctacattacatgaacaactgaaatggtgaaagctcctgtttttatggatagctacctgtataacaattggcaatattagctctgtattattttgatattatattatctgtaatctacatatggctccatgtgctcctcacctctgccactcctgccttatttcttttcttctc

SEQ ID NO: 678334 - DNA, 603 bp, Homo sapiens
tcctaaagataagattgagttgggagagggataatgacctaaaggatgatcaaacatttcaactcagtctttcaggttcctgggaagtctaacaaagaactactgctccaggagggaccagctgcaactgtgaatgatggatttcgaatttaagagtcgatacagatattagagattatctattccatactttttattttacagataagaagcctgatgtccaatgagataagttagttgtctaataccatataactaacagacagtggaactatattagaattcccagatatctgactccatccagttcaattcacatacaaaaaaaaggataagaaataatgtatttttgatcatagccatcttagataaaaattattaaagcctgaaagaatcaaatattgcaacaatgttgggttttgaacagakgctacattacatgaacaactgaaatggtgaaagctcctgtttttatggatagctacctgtataacaattggcaatattagctctgtattattttgatattatattatctgtaatctacatatggctccatgtgctcctcacctctgccactcctgccttatttcttttcttctc

SEQ ID NO: 678335 - DNA, 1016 bp, Homo sapiens
tgaggaaatgtatcaatccctgggcatgtgcctttggcagacgctggattaccaccaaatatgcccagcaattattctccaacatttcccagcttcgctgcaataagggtagcatgtgacttattctggccaatgaaatgagagtgacactgaagcactatcacttccaagcacaagcactttcactgaggcagcgaaaagcctgtttgtgagtatccagtctcttttcttctctgctgtagtgactgggaggtcatgcttcagatgaggcaataataagatgcttgaacttctgtcagatttgattctcttgtggagcccaggaatttgcatccaagtccaatctagtttagaaatcttgatagcctcagcttctacaaaataccaaaaactcatgkcttgtgactgcccattggatatctttttattagctttaatgtcactctaaaatattttaatttttttctcatttccaaacatttttgtacctgtttgccttcaacatcaggcatagttaaatgtcaaaggcagaattatcttgtactgcaacagtgtctttgcattgtatgttaaaaaatacatatgcttagtggtcagattctgattaaattctcaattttcatattttttataccactgaatcagaatccagaagcaaattgtcattgtcatcagtggctaatcaatgtatggattggtgtttaggttatataaaacaaatgctgtgactatcagcccaccaaaaatacttggttatcttcaaatatgctagacttgagactggaaagtggttgtccacccagatcctgcatttcccagtctacttggaattaagcatggccatatcattgagttccaacctgtggattgtgaatggaagtaatgagtgccacttgcagatctaaatcattcttcaatatcgtgctcttttttggtcttttcctttgttggcaggctagaatgaaaaggactccccagagtaatcttagaagacgcattttaaagagggaagagac

SEQ ID NO: 678336 - DNA, 1016 bp, Homo sapiens
tgaggaaatgtatcaatccctgggcatgtgcctttggcagacgctggattaccaccaaatatgcccagcaattattctccaacatttcccagcttcgctgcaataagggtagcatgtgacttattctggccaatgaaatgagagtgacactgaagcactatcacttccaagcacaagcactttcactgaggcagcgaaaagcctgtttgtgagtatccagtctcttttcttctctgctgtagtgactgggaggtcatgcttcagatgaggcaataataagatgcttgaacttctgtcagatttgattctcttgtggagcccaggaatttgcatccaagtccaatctagtttagaaatcttgatagcctcagcttctacaaaataccaaaaactcatgtcttgtgactgcccattggatatctttttattagctttaatgtcactctaaaatattttaatttttttctcatttccaaacatttttgtacctgtttgccttcaacatcaggcatagttaaatgtcaaaggcagaattatcttgtactgcaacagtgtctttgcattgtatgttaaaaaatacatatgcttagtggtcagattctgattaaattctcaattttcatattttttataccactgaatcagaatccagaagcaaattgtcattgtcatcagtggctaatcaatgtatggattggtgtttaggttatataaaacaaatgctgtgactatcagcccaccaaaaatacttggttatcttcaaatatgctagacttgagactggaaagtggttgtccacccagatcctgcatttcccagtctacttggaattaagcatggccatatcattgagttccaacctgtggattgtgaatggaagtaatgagtgccacttgcagatctaaatcattcttcaatatcgtgctcttttttggtcttttcctttgttggcaggctagaatgaaaaggactccccagagtaatcttagaagaygcattttaaagagggaagagac

SEQ ID NO: 678337 - DNA, 630 bp, Homo sapiens
ttttagtttactttatttttatcaaaggtggcactggagctgacttgaagaaataatagtgctagttaaaaaggctaattacaaatctaatttctttccaaaatttcttttagaactaagctaaatgaaaaaaaaaattagacctttttttttttgaaaatgatggtttcctaatcctatattagtgagctgttaattttattttctgaattattaacaatcacttggaaacattataataattttggtaattggggcagaatactctagtcatgtcagtggagttcctgaaatgaaggaatcatccaagtgtttaaagaataaccctccacctggatgtgggagcaattgaatctgttttgtttttggtttttggttttgggctataattttttctctaagcaggcctattttagatccaaagatgcaggctctcaaagaccatagaagataggacatttccaagagtaataccaaaggtttttccccagttcttttytactctgtctgcctgtcttttctacaaaagcaaagcaaagaatcaaacactgcccaatgaattcaatacatgtaaacgaaactgggcaatgagaccccaatcttcatggcttaagcatgtaatcatcagat

SEQ ID NO: 678338 - DNA, 1052 bp, Homo sapiens
catctgcaaacagggacaatttgacttcctcttttcctaattgaataccctttatttctttctyctgcctgattgccctggctagaacttccaacactatgttgaataggagtgatgagagagggcatccttgtcttgtgccagttttcaaaggaaatgcttccagtttttgcccattcagtatgatattggctgtgggtttgtcataaatagctgttattattttgagatacgtcccatcaatgcctaatttattgagagtttttagcatgaagggctgtttagttttgtcaaaggccttttctgcatctattgaggtaatcaggttacctactgaggtactggagattaggacttcaacatatcttggaggacacaattcagcccataacagtggcaaagacaaatagtgactctgtgacactgaaggtatacagaaaggtggagttaaatatttatttttatttaatgaagggaatataatcactggttgttcagaattttacatttcctctctaatttttgataccaaatgtctgcctctgattttttttttgttttgttaagcacatattttgatttttttcttaaataatttcaacttttattttagatatggtggtgtatgtgcaggtttgttacctgggtatattgtgcgatgttgaggtttggggtaagattgatcccatcacccaggtaccaagcttagtacccaatagttagcttttcaacccttgcccccttccctcccttcccactctagtggtccccagtgtctgttgttgccatctttatgtccatgagtacccattgtttagctcccacttataagtgagaacatagggtatttggttttctgttcttgcattaattcagttaggataatggtctccagctgcatccatgttgctgtaaaggacatggttttattctcctttatgactgcaaagtattccgtggtgtgtatataccacattttctttacctaatccaccactgatggacacttggattgattccatgccttggctattgtgaatagggctctgata

SEQ ID NO: 678339 - DNA, 1052 bp, Homo sapiens
catctgcaaacagggacaatttgacttcctcttttcctaattgaataccctttatttctttctcctgcctgattgccctggctagaacttccaacactatgttgaataggagtgmtgagagagggcatccttgtcttgtgccagttttcaaaggaaatgcttccagtttttgcccattcagtatgatattggctgtgggtttgtcataaatagctgttattattttgagatacgtcccatcaatgcctaatttattgagagtttttagcatgaagggctgtttagttttgtcaaaggccttttctgcatctattgaggtaatcaggttacctactgaggtactggagattaggacttcaacatatcttggaggacacaattcagcccataacagtggcaaagacaaatagtgactctgtgacactgaaggtatacagaaaggtggagttaaatatttatttttatttaatgaagggaatataatcactggttgttcagaattttacatttcctctctaatttttgataccaaatgtctgcctctgattttttttttgttttgttaagcacatattttgatttttttcttaaataatttcaacttttattttagatatggtggtgtatgtgcaggtttgttacctgggtatattgtgcgatgttgaggtttggggtaagattgatcccatcacccaggtaccaagcttagtacccaatagttagcttttcaacccttgcccccttccctcccttcccactctagtggtccccagtgtctgttgttgccatctttatgtccatgagtacccattgtttagctcccacttataagtgagaacatagggtatttggttttctgttcttgcattaattcagttaggataatggtctccagctgcatccatgttgctgtaaaggacatggttttattctcctttatgactgcaaagtattccgtggtgtgtatataccacattttctttacctaatccaccactgatggacacttggattgattccatgccttggctattgtgaatagggctctgata

SEQ ID NO: 678340 - DNA, 1497 bp, Homo sapiens
tttctaatagatgactctaaagaatatcagttattgtttcataatttatagacacttctttttcaatagcttataataattattttgaaactatgacaaaaacattcttaaatgtataaatcaaggtagaaagaaaaagaaaagctgaaagattttcttttttttattattatactttaagttttagggtacatgtgcacaacgtgcagktttgttacatatgtatacatgtgccatgttggtgtgctgcacccattaactggtcatttagcattaggtatatctcctaatgctatccctcccccctcccctccccaacaacagtccccggtatgtgatgttccccttcctgtgtccatgtgttctcattgttcaattcccacctatgagtgagaacatgcggtgtttggttttttgtccttgagatagtttgctgagaatgatggttccagcttcatccatgtccctacaaaggacatgaactcatcattttttatggctgcatagtattccatggtatatatgtgccacaagtcaagaaaaacaaagggaaacttgctttgacatattttaaaacatgttataaatccatgtaaatggttgaattttatacaaaacaatgaacaattcagccagtcaaaacagaagtatcactgagggaacaccttaagctaacaaaatatttgtagaaaattcatagcatcacatatagtcaaaaaataagaattatttaaaattgctaagaaaaagggcaacctatatgaacacatatacaatgataccccccacccaccattgcatgagcataagacacataggaaatatgaaggaaaatattgtctgatctcaggatcaagatggatcttatatccatcaaacaattaaaataagccacaaaaatctacaatatagtttacttttctttcagtgatgtacacaatttaaaacaagtaaaataaaaatgtacataacaaatcaatacaaaattttcatagatatcacaaacgatgttaatgctctagggagttttgaaaaccaatttactctgattttcctattggaaagttcatgttcaaaaaatccacaagagaagaactgcaattgccaatagcatatgacaaaaatttccaaattaccattgatcaaaacacattatagtatacatggaatgacattcattgttgtgatatacacgatagcacagattaaatgacacttttatcttgccaaacagagaaaatgttttagaaaataacatccagtactcatcagggtataataaaatgtccagttttgtagcctcaaaatagcaaagcagtacaacctgtcaggattgcagttttacaatatttatcaaggtatcttcttaaatacagatcccttaatagatgaactctaggtattaaaatgaagaaaataattaatagctaagtaattagttgtaaaggagaatgctcaattcagtgctattttgatagcaaaatataagaaataagg

SEQ ID NO: 678341 - DNA, 1607 bp, Homo sapiens
  misc_feature 142, 143, 144, 145, 146, 147, 148, 149, 150, 151, 152, 153,154, 155, 156, 157, 158, 159, 160, 161, 162, 163, 164, 165,166, 167, 168, 169, 170, 171, 172, 173, 174, 175, 176, 177,178, 179, 180, 181, 182, 183, 184, 185, 186, 187, 188: n = A,T,C or G
  misc_feature 189, 190, 191, 192, 193, 194, 195, 196, 197, 198, 199, 200,201, 202, 203, 204, 205, 206, 207, 208, 209, 210, 211, 212,213, 214, 215, 216, 217, 218, 219, 220, 221, 222, 223, 224,225, 226, 227, 228, 229, 230, 231, 232, 233, 234, 235: n = A,T,C or G
  misc_feature 236, 237, 238, 239, 240, 241, 1527: n = A,T,C or G
tagagtgcacactctgttttaagagattaaggatatttttcagagttcttctcaatgaaatcagggaacctctaggagaaggtaaaaggtgttgtccctctgccaactgaacagaagccaaaaatataatataaattatgannnnnnnnnnnnnnnnnnnnnnnnnnnnnnnnnnnnnnnnnnnnnnnnnnnnnnnnnnnnnnnnnnnnnnnnnnnnnnnnnnnnnnnnnnnnnnnnnnnnataccaaacgaaggaaggctactagataccctaaattctacaggcaggaagcaaactgataaaaccactcagctgtaatgctacaaaaaggaaaaggaaaaggaaagatgactcagcagatggagtcaaaatcccagtggccaaagactagagctaatgaagattatttgcagactttgaactctaattgaagaaatattgctggaattagtccagcaatattttttayggttgaaaaatagtgatatacttcgaatgtttgtcactaacaaaataaaagatttgacacagaaaatcacaatgcaaaataattgtgttattcacaagctataatatttacaatgtttaagagaaagggctcctgtcatcttaggcaccttcatgaaaataaagttcttttcattcgcttaaaagaacttaagcaaaagttgtgtgacgtacacattctttactcattttaaattaaattatatgcaacattatttaaagataatagcataatttaaatgtgaggacctgcttgcatgccctttgataggctcaagtaagagactattataggaaggtgcccttgaagggctccgtagggctccagtataacctcaacctaccacacatggccatcactcggaaattaggtcttgaattggaaggagcactagaaaagtatgtgtttaaaatacactggaatgaataatttttttcctagagtatttttaactttgtttaattgtggtaaaatagtcataatgtaaaatttactattgtaaccatttttaaatttacaattcagggcattatgtatattcacaacatttttgaatatgctgttagcaccatccatctctagaacatttttatcatttcgaactgaaaatttacacccaaaaaacagtaaatcttcatccctctctcttcccagtatctggtaaacactattctactttctatctctatgtatttgccttttctatgtacctcagataagtaaaattatgcaatatttgctctttctttgtggctaatttcacttagcataatgttttcaaggttcatccatgttaaaacatgtattagaagtttattccttttaaagtctggattatattcctgtgtgtgtgtatgtgtgtatgtatacaatattttatatttgtgtgcaaaactgaattctaaagaatttaattttgcaattactgattttcctgagatcctaaagggttaatgtgcttttggaattttctctgggtttttggctttgttttgttggttggttgattggtttttanttcaacttttattttaaattcagggggtacatatacacacacaacacaacatgcatttatccattcatcttgtcatgacc

SEQ ID NO: 678342 - DNA, 1607 bp, Homo sapiens
  misc_feature 142, 143, 144, 145, 146, 147, 148, 149, 150, 151, 152, 153,154, 155, 156, 157, 158, 159, 160, 161, 162, 163, 164, 165,166, 167, 168, 169, 170, 171, 172, 173, 174, 175, 176, 177,178, 179, 180, 181, 182, 183, 184, 185, 186, 187, 188: n = A,T,C or G
  misc_feature 189, 190, 191, 192, 193, 194, 195, 196, 197, 198, 199, 200,201, 202, 203, 204, 205, 206, 207, 208, 209, 210, 211, 212,213, 214, 215, 216, 217, 218, 219, 220, 221, 222, 223, 224,225, 226, 227, 228, 229, 230, 231, 232, 233, 234, 235: n = A,T,C or G
  misc_feature 236, 237, 238, 239, 240, 241, 1527: n = A,T,C or G
tagagtgcacactctgttttaagagattaaggatatttttcagagttcttctcaatgaaatcagggaacctctaggagaaggtaaaaggtgttgtccctctgccaactgaacagaagccaaaaatataatataaattatgannnnnnnnnnnnnnnnnnnnnnnnnnnnnnnnnnnnnnnnnnnnnnnnnnnnnnnnnnnnnnnnnnnnnnnnnnnnnnnnnnnnnnnnnnnnnnnnnnnnataccaaacgaaggaaggctactagataccctaaattctacaggcaggaagcaaactgataaaaccactcagctgtaatgctacaaaaaggaaaaggaaaaggaaagatgactcagcagatggagtcaaaatcccagtggccaaagactagagctaatgaagattatttgcagactttgaactctaattgaagaaatattgctggaattagtccagcaatattttttacggttgaaaaatagtgatatacttcgaatgtttgtcactaacaaaataaaagatttgacacagaaaatcacaatgcaaaataattgtgttattcacaagctataatatttacaatgtttaagagaaagggctcctgtcatcttaggcaccttcatgaaaataaagttcttttcattcgcttaaaagaacttaagcaaaagttgtgtgacgtacacattctttactcattttaaattaaattatatgcaacattatttaaagataatagcataatttaaatgtgaggacctgcttgcatgccctttgataggctcaagtaagagactattataggaaggtgcccttgaagggctccgtagggctccagtataacctcaacctaccacacatggccatcactcggaaattagstcttgaattggaaggagcactagaaaagtatgtgtttaaaatacactggaatgaataatttttttcctagagtatttttaactttgtttaattgtggtaaaatagtcataatgtaaaatttactattgtaaccatttttaaatttacaattcagggcattatgtatattcacaacatttttgaatatgctgttagcaccatccatctctagaacatttttatcatttcgaactgaaaatttacacccaaaaaacagtaaatcttcatccctctctcttcccagtatctggtaaacactattctactttctatctctatgtatttgccttttctatgtacctcagataagtaaaattatgcaatatttgctctttctttgtggctaatttcacttagcataatgttttcaaggttcatccatgttaaaacatgtattagaagtttattccttttaaagtctggattatattcctgtgtgtgtgtatgtgtgtatgtatacaatattttatatttgtgtgcaaaactgaattctaaagaatttaattttgcaattactgattttcctgagatcctaaagggttaatgtgcttttggaattttctctgggtttttggctttgttttgttggttggttgattggtttttanttcaacttttattttaaattcagggggtacatatacacacacaacacaacatgcatttatccattcatcttgtcatgacc

SEQ ID NO: 678343 - DNA, 1886 bp, Homo sapiens
gcagcctctttatagactcatcattgagatgccaaattatcacccatgttctctgtacaactggatattaaaaaaaaaaaaaaagcaggaaccatgatcttcagtttttctctagaaataaatatccacacttggatatagaagaaaaatgcttaaatgaggttttctgtttccactgcaacaaaatatactgatatattttaacagtgcctaagagacaatattttaaagtggtagattttgctgctaatgtaacctgaaaatcctcaataattagagggttagcatattctaggatgtatatatcaaaaattgtgttatgtttcaacattttaagcatgcatgcatgtatatgtagacacaaatgttccaaataattttcattgtcattgtatagattctacagtatttcttgtcatttttatgcacttgtcaaaacaactgcagaaacatttattggttagtttctgctttaggattttattttcagttgacatttgctaactggctattagtcattttttttttttatctctagaaagaactccaaatccaatgcaattttgtcttattattttccccagtgctgaattatttgaacttctaaggcctttttatgtgggtgtagaaagataaaatacatcaaactgaaccttttaataaaatttcaatgaagtgataaatcagatagctattgcaaacaatgtagaagtacacttgtgccattaaatgatgcaagaagctcatctagcataaatgagttgtttggaaatcaaagaaacatccctctgtttaatatttcctgcaaattgatccttcaaactctattttttagcaaaataacttgttgtctttgaattgggatatttgcaggtatttatcagcaataaccatgttttcaattacactaaagtctcaaagtttgaaagtacaaacctgttattgtgtatttattgacttttattttaaagtttaatttgtaccagtgaagaactccagtgccttctatattagaaagtaatattaatactttttttgagaacatacatatcagataactgaaatcaataagttgacaatattcttataaaacaaagattgatagaactatgtcatacatgctcaccttttcaaagggggtaagtttgagcttctgcattcccttggtgttttcaagattgttttgatgagtttgttgttagtaatatttttaatagtatattttctctagtcttccaaaagaccaaattcaaagagattaagaaagaagtttgtcactaaagagaatcttctttgtctaacctaagtagtaagaaaacaattcaagctaccccattctcttttacctcctataggaattgagaagaaatgggacatgtaagctgctcagatttwcttggtgcacatcctggatctctgtgtaaatatttccagcatatatgacacaattcaaaatatcaaatatttatgtttttatacttactgttagagttcagattgaatggttacgtatggaagttttgtaatatttagcaccattcttggatttgattagtgtggttaagttagttgtctatgatagaaacccgggcttctattagtactctgtaaacctaaattcttagactatcaagattgaacaagggattttaataactggaagaggcaacacctcccttttttaacaacacatcacctcaaacccatgttaggccaaaagaagctttcttgggtaaatataccctctaaaactgaaaaaatactcacttttttaaaaaagatactcttgttgttgttaattattcaaccaaaaagaagagggatctgtagtgggtggagaagacaggaattagagtacatcacagcatttgctcagtagcatttca

SEQ ID NO: 678344 - DNA, 1886 bp, Homo sapiens
gcagcctctttatagactcatcattgagatgccaaattatcacccatgttctctgtacaactggatattaaaaaaaaaaaaaaagcaggaaccatgatcttcagtttttctctagaaataaatatccacacttggatatagaagaaaaatgcttaaatgaggttttctgtttccactgcaacaaaatatactgatatattttaacagtgcctaagagacaatattttaaagtggtagattttgctgctaatgtaacctgaaaatcctcaataattagagggttagcatattctaggatgtatatatcaaaaattgtgttatgtttcaacattttaagcatgcatgcatgtatatgtagacacaaatgttccaaataattttcattgtcattgtatagattctacagtatttcttgtcatttttatgcacttgtcaaaacaactgcagaaacatttattggttagtttctgctttaggattttattttcagttgacatttgctaactggctattagtcattttttttttttatctctagaaagaactccaaatccaatgcaattttgtcttattattttccccagtgctgaattatttgaacttctaaggcctttttatgtgggtgtagaaagataaaatacatcaaactgaaccttttaataaaatttcaatgaagtgataaatcagatagctattgcaaacaatgtagaagtacacttgtgccattaaatgatgcaagaagctcatctagcataaatgagttgtttggaaatcaaagaaacatccctctgtttaatatttcctgcaaattgatccttcaaactctattttttagcaaaataacttgttgtctttgaattgggatatttgcaggtatttatcagcaataaccatgttttcaattacactaaagtctcaaagtttgaaagtacaaacctgttattgtgtatttattgacttttattttaaagtttaatttgtaccagtgaagaactccagtgccttctatattagaaagtaatattaatactttttttgagaacatacatatcagataactgaaatcaataagttgacaatattcttataaaacaaagattgatagaactatgtcatacatgctcaccttttcaaagggggtaagtttgagcttctgcattcccttggtgttttcaagattgttttgatgagtttgttgttagtaatatttttaatagtatattttctctagtcttccaaaagaccaaattcaaagagattaagaaagaagtttgtcactaaagagaatcttctttgtctaacctaagtagtaagaaaacaattcaagctaccccattctcttttacctcctataggaattgagaagaaatgggacatgtaagctgctcagatttacttggtgcacatcctggatctctgtgtaaatatttccagcatatatgacacaattcaaaatatcaaatatttatgtttttatacttactgttagagttcagattgaatggttacgtatggaagttttgtaatatttrgcaccattcttggatttgattagtgtggttaagttagttgtctatgatagaaacccgggcttctattagtactctgtaaacctaaattcttagactatcaagattgaacaagggattttaataactggaagaggcaacacctcccttttttaacaacacatcacctcaaacccatgttaggccaaaagaagctttcttgggtaaatataccctctaaaactgaaaaaatactcacttttttaaaaaagatactcttgttgttgttaattattcaaccaaaaagaagagggatctgtagtgggtggagaagacaggaattagagtacatcacagcatttgctcagtagcatttca

SEQ ID NO: 678345 - DNA, 1886 bp, Homo sapiens
gcagcctctttatagactcatcattgagatgccaaattatcacccatgttctctgtacaactggatattaaaaaaaaaaaaaaagcaggaaccatgatcttcagtttttctctagaaataaatatccacacttggatatagaagaaaaatgcttaaatgaggttttctgtttccactgcaacaaaatatactgatatattttaacagtgcctaagagacaatattttaaagtggtagattttgctgctaatgtaacctgaaaatcctcaataattagagggttagcatattctaggatgtatatatcaaaaattgtgttatgtttcaacattttaagcatgcatgcatgtatatgtagacacaaatgttccaaataattttcattgtcattgtatagattctacagtatttcttgtcatttttatgcacttgtcaaaacaactgcagaaacatttattggttagtttctgctttaggattttattttcagttgacatttgctaactggctattagtcattttttttttttatctctagaaagaactccaaatccaatgcaattttgtcttattattttccccagtgctgaattatttgaacttctaaggcctttttatgtgggtgtagaaagataaaatacatcaaactgaaccttttaataaaatttcaatgaagtgataaatcagatagctattgcaaacaatgtagaagtacacttgtgccattaaatgatgcaagaagctcatctagcataaatgagttgtttggaaatcaaagaaacatccctctgtttaatatttcctgcaaattgatccttcaaactctattttttagcaaaataacttgttgtctttgaattgggatatttgcaggtatttatcagcaataaccatgttttcaattacactaaagtctcaaagtttgaaagtacaaacctgttattgtgtatttattgacttttattttaaagtttaatttgtaccagtgaagaactccagtgccttctatattagaaagtaatattaatactttttttgagaacatacatatcagataactgaaatcaataagttgacaatattcttataaaacaaagattgatagaactatgtcatacatgctcaccttttcaaagggggtaagtttgagcttctgcattcccttggtgttttcaagattgttttgatgagtttgttgttagtaatatttttaatagtatattttctctagtcttccaaaagaccaaattcaaagagattaagaaagaagtttgtcactaaagagaatcttctttgtctaacctaagtagtaagaaaacaattcaagctaccccattctcttttacctcctataggaattgagaagaaatgggacatgtaagctgctcagatttacttggtgcacatcctggatctctgtgtaaatatttccagcatatatgacacaattcaaaatatcaaatatttatgtttttatacttactgttagagttcagattgaatggttacgtatggaagttttgtaatatttagcaccattcttggatttgattagtgtggttaagttagttgtctatgatagaaacccgggcttctattagtactctgtaaacctaaattcttagactatcaagattgaacaagggattttaataactggaagaggcaacacctcccttttttaacaacacatcacctcaaacccatgttaggccaaaagaagctttcttgggtaaatataccctctaaarctgaaaaaatactcacttttttaaaaaagatactcttgttgttgttaattattcaaccaaaaagaagagggatctgtagtgggtggagaagacaggaattagagtacatcacagcatttgctcagtagcatttca

SEQ ID NO: 678346 - DNA, 1886 bp, Homo sapiens
gcagcctctttatagactcatcattgagatgccaaattatcacccatgttctctgtacaactggatattaaaaaaaaaaaaaaagcaggaaccatgatcttcagtttttctctagaaataaatatccacacttggatatagaagaaaaatgcttaaatgaggttttctgtttccactgcaacaaaatatactgatatattttaacagtgcctaagagacaatattttaaagtggtagattttgctgctaatgtaacctgaaaatcctcaataattagagggttagcatattctaggatgtatatatcaaaaattgtgttatgtttcaacattttaagcatgcatgcatgtatatgtagacacaaatgttccaaataattttcattgtcattgtatagattctacagtatttcttgtcatttttatgcacttgtcaaaacaactgcagaaacatttattggttagtttctgctttaggattttattttcagttgacatttgctaactggctattagtcattttttttttttatctctagaaagaactccaaatccaatgcaattttgtcttattattttccccagtgctgaattatttgaacttctaaggcctttttatgtgggtgtagaaagataaaatacatcaaactgaaccttttaataaaatttcaatgaagtgataaatcagatagctattgcaaacaatgtagaagtacacttgtgccattaaatgatgcaagaagctcatctagcataaatgagttgtttggaaatcaaagaaacatccctctgtttaatatttcctgcaaattgatccttcaaactctattttttagcaaaataacttgttgtctttgaattgggatatttgcaggtatttatcagcaataaccatgttttcaattacactaaagtctcaaagtttgaaagtacaaacctgttattgtgtatttattgacttttattttaaagtttaatttgtaccagtgaagaactccagtgccttctatattagaaagtaatattaatactttttttgagaacatacatatcagataactgaaatcaataagttgacaatattcttataaaacaaagattgatagaactatgtcatacatgctcaccttttcaaagggggtaagtttgagcttctgcattcccttggtgttttcaagattgttttgatgagtttgttgttagtaatatttttaatagtatattttctctagtcttccaaaagaccaaattcaaagagattaagaaagaagtttgtcactaaagagaatcttctttgtctaacctaagtagtaagaaaacaattcaagctaccccattctcttttacctcctataggaattgagaagaaatgggacatgtaagctgctcagatttacttggtgcacatcctggatctctgtgtaaatatttccagcatatatgacacaattcaaaatatcaaatatttatgtttttatacttactgttagagttcagattgaatggttacgtatggaagttttgtaatatttagcaccattcttggatttgattagtgtggttaagttagttgtctatgatagaaacccgggcttctattagtactctgtaaacctaaattcttagactatcaagattgaacaagggattttaataactggaagaggcaacacctcccttttttaacaacacatcacctcaaacccatgttaggccaaaagaagctttcttgggtaaatataccctctaaaactgaaaaaatactcacttttttaaaaaagatactcttgttgttgttaattattcaaccaaaaagaagagggatctgtagtgggtggagaagacaggaattagagtacatcacagcatttgctcartagcatttca

SEQ ID NO: 678347 - DNA, 687 bp, Homo sapiens
ggaggtttttcagatttctctttaaccatcttttatagttccttttcctaccccctcatctgactcttctttcattcttccacatttgctggcactctcttgagtagattttggcctcaagaccatgtgacttatttttggattccagtgggttattttcactaaagaaggttggttttttaaaaagattttagaaatattagagttagatgaagaggattgttagaagatgtttatcttatcgaatatcagtaattttacttttttctttaaggtaaagactaataaattaaaatcttttaaggtaaagacaaattaataactgggatcagaagaactgataaaaattatagtgggaagtggtgggggggtatggggacattttaataaaagtaaatatttcttgagatttttacccaggcatttacaaaaattataattattccgttcagagaattggcctgtcattttttccttgtgctttgaccttatcaaaaattrggtcttgtttttttatcccagaactcatgttttaaaatggaatgccaggcacagtggctcactcctatagtcccaacactttgggaggccaaggagggtgggtcagttgaggtcagtagttcgagaccagcctggccaacatggtgaaaccctgcctccactaaaaatagaaaaattagccaggcg

SEQ ID NO: 678348 - DNA, 1154 bp, Homo sapiens
tggagcccagtgtagagtttcaccctatgcattagggagaaacattttaacaatcaaaccatacttcataaataaatctttattagggattgctttacaatgaaaaaaaccaaccaaccaaaacaaaataaagttctagactaatacctaaaaaacaaagatccagaatatataaccttactagttcctcattatgtataagtggaaacaaagacagtcattaatctgatttcttgctaaacttctaaagtgctgaggagaaaatccgtcacagtaatatgctctgagatctgtcaccttgttccttcctgtccagggctaggggactcttcctccatgaagtaccctttcctcacccacaacacatactccatccatcaaagggaaactttcagtgtcaggtcatggaatttgggaaaactggaagatttctgagcagaggagtgacataatgaaagcagtgttttaggaaagaggaggtgggcaggccygagtgaccacagacacacaaatagggtccgaaggaatgtatctactaactgtccatccttgcttcttactagcacaacaaaatagtgcttggaaacagtaaattgcttacattcctgtagaaagcattaggcttgaatctcaaagtatttggtaactattacaaccctgtaccattcaaatggggaaaacaaactgatttcactgaactaactcagcatattcacatagaataaaggtatcaaatttggccttggagtctttcattgtattctgctttcaagattcaaaaaaatacaaatgaacaaagagaagacaaaagtcttatttaggaactgagggttcatccaccagttttataagctactgactcctttacagttacttacactagattggtaaatgtcctgaaggtggtcagagttgagccaacagaaaggttattccccgactgactctccctggggcacagtctcctggcccctctccatcttcccctaaagtatggaatatctcatgtaatttattaaatacggtactgaaagtgaaaaacagaagggttgtatgggtactcaccatcaacatacacagctgaaagcacactgggcctgggcccaggaaaagatcaaaattcaaagtcggaagtacaatttctaccgaatgca

SEQ ID NO: 678349 - DNA, 1552 bp, Homo sapiens
ttgtacatgggaagcatatttatgatgagactaaacagcagtcatttatttgctgttattgatagtggtgaacatttatgaaaaagaagtaaaaaaccccttgccggccagatgcggtggctcatgcctgtaatcccagcactttgggaggccgaggcaggcggatcacttgagattgggagtttgagaccagcctgacgaacatggacaaaccccgtctctactaaaaatacaaaaaattagctgggcgtggtggtgcatgcctataatcccagctactcaggaggttgaggcaggagaatcgcgtgaacctgggaggtggaggttgtggtgagccgagatcacaccattgcactccagcctgggcaacaagagtgaaactcagtctccaagaaaaaagaaacaacaacaacaacaaaaaaacaccttgcctcctcatgctgccttatggctgtactcaacatttctattcctgtgttttggtgactatgtggtatgctgagatcaaatgaaagtagcaattcccttcatagcagataaaacctgtgaattgtagcacgggacttttaaaaatattttttgtaaagcatttttagatctggtaccttgaaaagtactagaaaaatcaatatcattgccagtgcttatttccacctcagtccatagtttctcatatgtatgattttcagctattttttccatgggtaagttaagttgcattcagtataggttagcaatggtaatatattttacaaaatactaagtactttctagagacctagtattagttcacatttttaagtaataaaaagtttaactagaaaaagagcattctctttaaaattagggtataatttatatacagggaaatgtacagattaattattcagttcgatcagtgttgacaaacgtatacaaaagtgtaacccatattttggtctgatgtagaacatttctgtcaccccagaaggtaagttccttcatgccctttctcagttattccctctgtcttcaccagaagcaatcactgctgagttctattactatagatttgttttgcctactcctagaacttcagataagtggaatcatacagtatgcactctttcgtgtttggcaatctttgctcagcataatatttttgagtttcttctagttattgtatgtatttgtttttccatttattgctgagtagtaatccactgtatgcatgtaacaaattcacttctgattaaagagtcagggctgggtgctgcagctcatggctgcrgggattacagaatcccaacacttcgggaggttgaggtggaaggattgcttgagcccaggacttcaatgccagcctgggcaacatagcaaaactctgtatctacaaaaaaaaaagggaaaaaagtcagatccaaaaagggattaagtgataaatacttttcacctttatcaggttttgaacattgttgagattatctggttacactctttttaaagagaggaagggaaacgtggtaataaagcagaaagaaagagtgaggagggggaaagaggagagtccttc

SEQ ID NO: 678350 - DNA, 1552 bp, Homo sapiens
ttgtacatgggaagcatatttatgatgagactaaacagcagtcatttatttgctgttattgatagtggtgaacatttatgaaaaagaagtaaaaaaccccttgccggccagatgcggtggctcatgcctgtaatcccagcactttgggaggccgaggcaggcggatcacttgagattgggagtttgagaccagcctgacgaacatggacaaaccccgtctctactaaaaatacaaaaaattagctgggcgtggtggtgcatgcctataatcccagctactcaggaggttgaggcaggagaatcgcgtgaacctgggaggtggaggttgtggtgagccgagatcacaccattgcactccagcctgggcaacaagagtgaaactcagtctccaagaaaaaagaaacaacaacaacaacaaaaaaacaccttgcctcctcatgctgccttatggctgtactcaacatttctattcctgtgttttggtgactatgtggtatgctgagatcaaatgaaagtagcaattcccttcatagcagataaaacctgtgaattgtagcacgggacttttaaaaatattttttgtaaagcatttttagatctggtaccttgaaaagtactagaaaaatcaatatcattgccagtgcttatttccacctcagtccatagtttctcatatgtatgattttcagctattttttccatgggtaagttaagttgcattcagtataggttagcaatggtaatatattttacaaaatactaagtactttctagagacctagtattagttcacatttttaagtaataaaaagtttaactagaaaaagagcattctctttaaaattagggtataatttatatacagggaaatgtacagattaattattcagttcgatcagtgttgacaaacgtatacaaaagtgtaacccatattttggtctgatgtagaacatttctgtcaccccagaaggtaagttccttcatgccctttctcagttattccctctgtcttcaccagaagcaatcactgctgagttctattactatagatttgttttgcctactcctagaacttcagataagtggaatcatacagtatgcactctttcgtgtttggcaatctttgctcagcataatatttttgagtttcttctagttattgtatgtatttgtttttccatttattgctgagtagtaatccactgtatgcatgtaacaaattcacttctgattaaagagtcagggctgggtgctgcagctcatggctgcggggattacagaatcccaacacttcgggaggttgaggtggraggattgcttgagcccaggacttcaatgccagcctgggcaacatagcaaaactctgtatctacaaaaaaaaaagggaaaaaagtcagatccaaaaagggattaagtgataaatacttttcacctttatcaggttttgaacattgttgagattatctggttacactctttttaaagagaggaagggaaacgtggtaataaagcagaaagaaagagtgaggagggggaaagaggagagtccttc

SEQ ID NO: 678351 - DNA, 579 bp, Homo sapiens
ttcgccattgctggccaggctggtctcgaactcctgacctcaagtgattggcctgccacagcctcccaaagttctgggattacaagctcaagccaccaygcctggccttaattttattaatcggaacactaaaaaggaatttttttttaaaaaaaacacacagatggttgatataatgaatcttttagaaagatttattaaagcttaaagaatcaagaggggatgaaagagagtctactatacaaaaggtggtaagtagcaaatggcctacgttaaaattatattttctatctgattgattctttaaaacattctctatggcttaagtgctttataaacaaataaaaactttagaaaacactttcaaatacaaacaggtgggcccatttgtggtataggtgcaaataacaataaaaattgatagcacttaggatcttccatcaccatacaattttactctaaggcggtcaatgtttaacacatcctttaaagtaatgtgaagtcataaatacaccttaaacattaattgaataacatttcattaagtacttacttgaccttatcaatttaaaaagaact

SEQ ID NO: 678352 - DNA, 579 bp, Homo sapiens
ttcgccattgctggccaggctggtctcgaactcctgacctcaagtgattggcctgccacagcctcccaaagttctgggattacaagctcaagccaccacgcctggccttaattttattaatcggaacactaaaaargaatttttttttaaaaaaaacacacagatggttgatataatgaatcttttagaaagatttattaaagcttaaagaatcaagaggggatgaaagagagtctactatacaaaaggtggtaagtagcaaatggcctacgttaaaattatattttctatctgattgattctttaaaacattctctatggcttaagtgctttataaacaaataaaaactttagaaaacactttcaaatacaaacaggtgggcccatttgtggtataggtgcaaataacaataaaaattgatagcacttaggatcttccatcaccatacaattttactctaaggcggtcaatgtttaacacatcctttaaagtaatgtgaagtcataaatacaccttaaacattaattgaataacatttcattaagtacttacttgaccttatcaatttaaaaagaact

SEQ ID NO: 678353 - DNA, 618 bp, Homo sapiens
tgtaacttttggattattgctgtatgtcttgccttttgtctttttgcatggaagtaattgtcaccaaaaattgtctctcttctatttttttgtcccaaatttacaacatatgtcttttcttaggagaaatttctggtgccagttgattgtttctttctagaaataacatattcatagacacatacacaaatgtggctaattcatcacaaaatatacccatgtaacctccacattacccccctgactctaaaataaaaataaaaacaaatgtagctgataaattgaatagccaaacttaaaaataaactttttttcttttaaatccatcactgtcyctattaaacttgtgagccagcttctttctgcagaaattgaaaaagtcttgagtccagtttcatcatttctggttgtttcagatgataaaaagtcctccagtcattttattccccctaaaccagtcgcaattcaattattgttatctttctttcagaataataagtatggcatttaaaaatattatgcaattatttgttctcttgttttggtttcttttttgaggattccaaccatagttgcttgatccaccctcgtcttctatatttattatttcatgtttaa

SEQ ID NO: 678354 - DNA, 610 bp, Homo sapiens
ataaaaataaaaatacttcatatttaaaaataatatttagtgaaataaatgagacaaaaggctgaatggcaaataatatgtatatatgtttgtgtatatatacagagacagataaaacatatttccatcctgctttttattttaaatctcatttatatatacatagatagaaaattggcacattttatattccccacactagtgactgcaaaggcacttatagcactttggcatttattttgcgcaataagaagtggaatgtggtttgattgcttctgcactgtcctcggatgccgttccaccttcgagagtccaggttgctctgtctttctgagtttgagtctgtctaggaaggataactggggamgaagatcctgactgaaagtatcctggggccaggtgcggtggctcatgcctgtaatcccaccactttgagaggctgaggcaggtggatcacttgaggccaagagttcgagaccagcctggccaacacggtgaaaccctgtctctaagtaaaatacaaaaattagcagggcgtggtggcaagtacctgtaatcccagctactcaggaggctgaggcaggagaatcgcttgaacgcaggaggcaga

SEQ ID NO: 678355 - DNA, 458 bp, Homo sapiens
tctcctccccctccttccctaatctcccaccacatgctctttcttttccgctttaattcccttccctctgcccccsttccattctcacacatttccattaggaagcacagaggggcccaccatagggtctgtgggaaatggaaatggtgactccacacaggaaacacggctccacctcatgagaagcctgggaaacgggcatgacagcaagacagtttggaagggtattaaaaagggaaccgctagatcctgaatgctgtccaaataaatgcacctttgagtcccagtgaaacatatgattttctgggcaaatctaatatgtaaattattcacaccagatattttaaaatattaaaatgatgttatacatctataaatacactggcattttattactcaaaataatatggtgagtcagaatataaaaaccacgaatgaagtccctatcccaaatcaga

SEQ ID NO: 678356 - DNA, 458 bp, Homo sapiens
tctcctccccctccttccctaatctcccaccacatgctctttcttttccgctttaattcccttccctctgcccccgttccattctcacacatttccattaggaagcacagaggggcccaccatagggtctgtgggaaatggaaatggtgactccacacaggaaacacggctccacctcatgagaagcctgggaaacgggcatgacagcaagacagtttggaagggtattaaaaagggaaccgctagatcctgaatgctgtccaaataaatgcacctttgagtcccagtgaaacatatgattytctgggcaaatctaatatgtaaattattcacaccagatattttaaaatattaaaatgatgttatacatctataaatacactggcattttattactcaaaataatatggtgagtcagaatataaaaaccacgaatgaagtccctatcccaaatcaga

SEQ ID NO: 678357 - DNA, 458 bp, Homo sapiens
tctcctccccctccttccctaatctcccaccacatgctctttcttttccgctttaattcccttccctctgcccccgttccattctcacacatttccattaggaagcacagaggggcccaccatagggtctgtgggaaatggaaatggtgactccacacaggaaacacggctccacctcatgagaagcctgggaaacgggcatgacagcaagacagtttggaagggtattaaaaagggaaccgctagatcctgaatgctgtccaaataaatgcacctttgagtcccagtgaaacatatgattttctgggcaaatctaatatgtaaattattcacaccagatattttaaaatattaaaatgatgttatacatctataaatacactggcattttattactcaaaataatatggtgagtcagaatataaaaaycacgaatgaagtccctatcccaaatcaga

SEQ ID NO: 678358 - DNA, 605 bp, Homo sapiens
tgctatgatggtacaatggctgtgtcactaagtgataggaagtttttagctcataatcctatgggaccatcatatttgcagttcattggtgaccaaaacatcattaggtggcacatgactgtatttctatgcatgctgatacacaaaatgtaaagtatccttatttttcttttgccatcaggtaaagttacatttatgcccaaaacactggagaatagttaattcactgactacagaggaattctgatgggctaagactagggtgaaaatggcaagctctatatgttacatatgtttaagtgtaaacaaagaagygtatacatgaacacatgtgtgtgtctaaaattgcattttgtatacgctaatttttccctcacagtaggaagcttgcagttattaactgtagcaaagtcttctggtcccctaccccaatagctgttctccccttcttctttagtgacaaaactctcaagtacatgactgcccccaagtaaagctttcccagctttctttgcagctagatagctccctatgacaaattctggacaatgaaatgcacgtggaagtgttttgtgcagtttacaggaagcttccttaaaagacca

SEQ ID NO: 678359 - DNA, 601 bp, Homo sapiens
cctacttgtaaagtcttgtcaagttcccacttaagcactgcatgttactttttacaaaaggaagaaatgaagaagttggtgagttgatatttccctcaccctgtcaaagtctgggtctttgactctgaagtccattttttttttttttttttgagacagagtcttgctctgtcacccaggctggagtgcattggcgcaatctcggctcactgcaagctccgcctcccgggttcacaccattctcctgcctcagcctcccgagtagctgggactacaggcacccgccaccacacccggctagtttttttgtatttttagtagagamggggtttcaccatgttagccaggatggtctcgatctcctgaccacgtgatccgcccgcctcggcctcccaaagtgctgggattacaggcgtgagccaccgcacccggcctctgaagtctatttttaatccaaaggccttagaaggtcaacttctgaacccataagattccagcagtgaacccaatgtctgttcgcccacttcctcatttttttctttccatcttccctcactgtgtccccttcctaggaatgagtccgaggtccacttactgtttt

SEQ ID NO: 678360 - DNA, 633 bp, Homo sapiens
ttggatctttcctgctttctcttgtgggcatttagtgctataaatttccctctacacactgctttgaatgcgtcccagagattctggtatgttgtgtctttgttctcgttggtttcawagaacatctttatttctgccttcatttcgttatgtacccagtagtcattcaggagcaggttgttcagtttccatgtagttgagcggctttgagtgggattcttaatcctgagttctagtttgattgcactgtggtctgagagatagtttgttacaatttctgttcttttacattcgctgaggagagctttacttccaactatgtggtcaattttggaataggtgtggtgtggtgctgaaaaaaatgtatattctgttgatttggggtggagagttctgtagatgtctattaggtccgcttggtgcagagctgagttcaattcctgggtttactcttgagatcctggacaagagagaccttccacagatctggggtatctcttttcagtctaatgtgtgttgttctactccagatttttaaaaattgcttactagaaatgaaacaattatgtcaaacattgaaataaataatattgaaaccttatagttattccaacttttaaagtattctaaata

SEQ ID NO: 678361 - DNA, 890 bp, Homo sapiens
aatctactaacaataacgaatccactcttgtaataatattaatacattcatgagagcagagtcctcatctaatcacctcttattaggacccacctcccaacactgctgcattggagattagtttctaacacatgaacttacgggtgacacattcaaaccatagtagtaatgttacaatatactttccacagaaatcatacctgattcttccaattaatagatgtgaagagactaaatcagcatatttattgcagaatgaaacttgatatrtctccaacacattttataaacaacagagtttgatttttatccatctaagtaataatttttggacaatttttagtatgtatactattccaaacttgttccccagttgatagcttaagagatgcaaatgcttaatttggacattaatattctatgatataatgctttaaaaggcaaaatattgtggtcagggaggaagaacgatttacatcactgaacctcaaagggtactctcaatttattctctccatttctcatcttctgcttgagctgttcactcacaattcccaaatcaatgaaattataatagaatcaattcccatttataattctgtgattgttctgtaagaaatcctcgtatcattttttaacataagtcttcttaagagtataactgaagaaaacaggctatttcagcaatggtacttaaaagacacactgtttgtctgttattggtgtataagaatgcttgtgatttttgtacattgattttgtatcctgagactttgctgaagttgcttatcagcttaaggagattttgcgctgagacactggggttttctagatatacaatcatgttatctgcaaataggaacaatttgacttcctcttttcctaactga

SEQ ID NO: 678362 - DNA, 650 bp, Homo sapiens
ttttagttcctcttcaccaatacatacttcctataattgatcccagtttctttcaggctgaattcttcacaaccaaaagtctaacaaaatcagtatgtgataagtatacatgaaatcttttctttttctttttctttttcattctttctaaatagaactatctcacccaaccatccacacacacamaaaaaaaaggaaaaaaagctgcttctttgaatgcacagataaattttatgacaaggagaagcagaagtttgatagcacaagcttccaaacagcacagtacagtaaatagatacaagtgacaaaataagattaatttccatgaaagaaaatattcaattttcacactggaaaaggtcgatgttcatacataggtgtgccagagataccccttttaagtccatcttgcatttctccaatgttttccatttgagaatcactgatacaaagaaacatgggtttcattacaagatctaaacactgcaatctgcatgaagaaaatcatattacaagctaaatattatccatttggatttgcagccaagttacagtccactaaatcctaagtacttttttttcccaactaaagctatattgcatttcaactctcttgttagaaactgatgctaggaattgacaagataata

SEQ ID NO: 678363 - DNA, 1923 bp, Homo sapiens
attaatttgaccacctaaaattattctggaaaaacagggaatggggaataagactgaccacctctcagctgctgtacagctgtgaaggtaaactgctggtaataaggcagttgggtgttgaagacctagatatcttgaaaagaaagtatgcatcccccttgtgttttcttttattttaaataaagcattatgagacataaaattcacacactataaattcactattttaaagtatacaactcagtaattttagtatattctcagagttgtgcatctatcactattatttacaataactttagaacatttttatcacagccccccakagaaatcctatacccattagcactcaccattcctcccttcacctgccctaagcaatcactaatctactttctggctctgtgcatttgcctattctggacatttcatataaatgaattaaacaatatgttgcattttgtgtctggcttctttaactcagtatagtgttttcaaggttcatccatgtgctatctcagtgaatacttcattcgttttggtggctgaataatatttttttgtatggatataccacattgtgcttatccactcatcagttggtggacatttgggttgtttctaccttttgtctattgtaaataatgttgttataaatatttgcatacaagtttttgtgtggacttacgttttcatatctctttattgtacaactaggagtgaaattgctaggtcatataggtaactctatgtttaattttttgaggaactgccaaattgttttccaaagtggctaccccattatacaatcccaccaacataagcaccatgtaccttttttaccctttctcagctttccgtgcacaggtaggaattttttttaatctaatattgttgagattgaaataaaccattaaagggaagtttgagtccagtcccagacgatagggaaagaatgatgtaactaactcactcagaatatttatttttctatgttgttagttttagattgtcttcctctatattagatctaattttaagacaattcattatagcttcaagagtagctgttggattattctcatgtgcttagaattgagagtattaatacgggtttccttttagctaaaggggtggtttctttgagaagagaaaatgacaatgtcatgggcccctttcagttgaaactggaagtgcttgagtacattgggtacaccgtttcttccaaagagctctccacattcccagacatggctcatagggtccttgctcttctacagtaaaacacgagatttggttttcctaaatatctatggaagaactgagctgggattaaaccccagcagttacaactccctcctacctctctgggtattactttccaaattcctccagccattccttaaaagttagctgttctcagggttccttcctagctctgcttctcttcttgtgttgtatacaccaggatttccaaatctattgggaaagaggccaggcgtggtggctcacacctgtaatcccagcattttgggaggccgaggtgggcagatcacttgaggtcaggagttcaagaccagcctggccaacatggcaaaaccccatctctactaaaaataaaaaaattggccaggcatggtggcacatgcctgtaattccagctactcaggaggctgaggtgggagaactgccagaacccaggaggcagaggttgcagtgagccgagattatgccactgtactctagcctgggtgacagggcaagactcagtttcaataaaaaaaaataataaaaattttaaaagctattgggaaagaaaggaaactttttatctgagaagtatgagcccctttgaattatctggcccagtgaggcattgaaatgtgacagcagtcacctctcactcctcccttgagctaagta

SEQ ID NO: 678364 - DNA, 1923 bp, Homo sapiens
attaatttgaccacctaaaattattctggaaaaacagggaatggggaataagactgaccacctctcagctgctgtacagctgtgaaggtaaactgctggtaataaggcagttgggtgttgaagacctagatatcttgaaaagaaagtatgcatcccccttgtgttttcttttattttaaataaagcattatgagacataaaattcacacactataaattcactattttaaagtatacaactcagtaattttagtatattctcagagttgtgcatctatcactattatttacaataactttagaacatttttatcacagccccccagagaaatcctatacccattagcactcaccattcctcccttcacctgccctaagcaatcactaatctactttctggctctgtgcatttgcctattctggacatttcatataaatgaattaaacaatatgttgcattttgtgtctggcttctttaaytcagtatagtgttttcaaggttcatccatgtgctatctcagtgaatacttcattcgttttggtggctgaataatatttttttgtatggatataccacattgtgcttatccactcatcagttggtggacatttgggttgtttctaccttttgtctattgtaaataatgttgttataaatatttgcatacaagtttttgtgtggacttacgttttcatatctctttattgtacaactaggagtgaaattgctaggtcatataggtaactctatgtttaattttttgaggaactgccaaattgttttccaaagtggctaccccattatacaatcccaccaacataagcaccatgtaccttttttaccctttctcagctttccgtgcacaggtaggaattttttttaatctaatattgttgagattgaaataaaccattaaagggaagtttgagtccagtcccagacgatagggaaagaatgatgtaactaactcactcagaatatttatttttctatgttgttagttttagattgtcttcctctatattagatctaattttaagacaattcattatagcttcaagagtagctgttggattattctcatgtgcttagaattgagagtattaatacgggtttccttttagctaaaggggtggtttctttgagaagagaaaatgacaatgtcatgggcccctttcagttgaaactggaagtgcttgagtacattgggtacaccgtttcttccaaagagctctccacattcccagacatggctcatagggtccttgctcttctacagtaaaacacgagatttggttttcctaaatatctatggaagaactgagctgggattaaaccccagcagttacaactccctcctacctctctgggtattactttccaaattcctccagccattccttaaaagttagctgttctcagggttccttcctagctctgcttctcttcttgtgttgtatacaccaggatttccaaatctattgggaaagaggccaggcgtggtggctcacacctgtaatcccagcattttgggaggccgaggtgggcagatcacttgaggtcaggagttcaagaccagcctggccaacatggcaaaaccccatctctactaaaaataaaaaaattggccaggcatggtggcacatgcctgtaattccagctactcaggaggctgaggtgggagaactgccagaacccaggaggcagaggttgcagtgagccgagattatgccactgtactctagcctgggtgacagggcaagactcagtttcaataaaaaaaaataataaaaattttaaaagctattgggaaagaaaggaaactttttatctgagaagtatgagcccctttgaattatctggcccagtgaggcattgaaatgtgacagcagtcacctctcactcctcccttgagctaagta

SEQ ID NO: 678365 - DNA, 1923 bp, Homo sapiens
attaatttgaccacctaaaattattctggaaaaacagggaatggggaataagactgaccacctctcagctgctgtacagctgtgaaggtaaactgctggtaataaggcagttgggtgttgaagacctagatatcttgaaaagaaagtatgcatcccccttgtgttttcttttattttaaataaagcattatgagacataaaattcacacactataaattcactattttaaagtatacaactcagtaattttagtatattctcagagttgtgcatctatcactattatttacaataactttagaacatttttatcacagccccccagagaaatcctatacccattagcactcaccattcctcccttcacctgccctaagcaatcactaatctactttctggctctgtgcatttgcctattctggacatttcatataaatgaattaaacaatatgttgcattttgtgtctggcttctttaactcagtrtagtgttttcaaggttcatccatgtgctatctcagtgaatacttcattcgttttggtggctgaataatatttttttgtatggatataccacattgtgcttatccactcatcagttggtggacatttgggttgtttctaccttttgtctattgtaaataatgttgttataaatatttgcatacaagtttttgtgtggacttacgttttcatatctctttattgtacaactaggagtgaaattgctaggtcatataggtaactctatgtttaattttttgaggaactgccaaattgttttccaaagtggctaccccattatacaatcccaccaacataagcaccatgtaccttttttaccctttctcagctttccgtgcacaggtaggaattttttttaatctaatattgttgagattgaaataaaccattaaagggaagtttgagtccagtcccagacgatagggaaagaatgatgtaactaactcactcagaatatttatttttctatgttgttagttttagattgtcttcctctatattagatctaattttaagacaattcattatagcttcaagagtagctgttggattattctcatgtgcttagaattgagagtattaatacgggtttccttttagctaaaggggtggtttctttgagaagagaaaatgacaatgtcatgggcccctttcagttgaaactggaagtgcttgagtacattgggtacaccgtttcttccaaagagctctccacattcccagacatggctcatagggtccttgctcttctacagtaaaacacgagatttggttttcctaaatatctatggaagaactgagctgggattaaaccccagcagttacaactccctcctacctctctgggtattactttccaaattcctccagccattccttaaaagttagctgttctcagggttccttcctagctctgcttctcttcttgtgttgtatacaccaggatttccaaatctattgggaaagaggccaggcgtggtggctcacacctgtaatcccagcattttgggaggccgaggtgggcagatcacttgaggtcaggagttcaagaccagcctggccaacatggcaaaaccccatctctactaaaaataaaaaaattggccaggcatggtggcacatgcctgtaattccagctactcaggaggctgaggtgggagaactgccagaacccaggaggcagaggttgcagtgagccgagattatgccactgtactctagcctgggtgacagggcaagactcagtttcaataaaaaaaaataataaaaattttaaaagctattgggaaagaaaggaaactttttatctgagaagtatgagcccctttgaattatctggcccagtgaggcattgaaatgtgacagcagtcacctctcactcctcccttgagctaagta

SEQ ID NO: 678366 - DNA, 674 bp, Homo sapiens
tcatcaccaagcacagacagcttcttagaagcagaaaccgcttgctcagagagatgcctatttaggttaaagcagactcacagcttggcaaatgagcagcctttacaactgctctccaaatgaggcagtggtttcagtgggttattcttaaaacttaattctgcatccgtcttctttcttcagcttttcattagctcattacctctcccaagctccaccttggccttccaggtccyccaccatccacgcaaggaaaaagatgcagaacaattgaccgtggggctgtggggaggggcaggaagggaaaggaactgggttcagatggtgatgtctgctctttacaagtaaagtagagggcactgaaggtggacagtgtcaccaagcacagctgcagcagcatcttggggaactatagctcctccacagaccccccagcaaacatcgctcagcagagtcagcttcacagaaaagtgcagggcaaagtgacctttggaaggtgttcgttgatgcaccaaggtcaccagatctagggttccaagatctacctgccttcccttctgatgggtcctgttaccaatttcctttgataatcttatcccatctgtcttccagagcccttatccccagcagacactgccagaaaatattctcataaatttagttccattccagaa

SEQ ID NO: 678367 - DNA, 498 bp, Homo sapiens
ggtggcacacacctgtagtccctgctactgaggaggctgagacaggagaattgcatgaacccaggaggcagaggttgcagtgagctgagctcgtgccactgcactccagcctgggcaacaaagcgagactccgtctccaaaatactaaaataaaaataatatatatawatttttatttttttatatgtatatatatataagttcttgctcccacagctgtggtccctttagctaaaagagtttgaaatggctatagtgtccttggagacctatttttgaggaggaggctgagagcttccttcctctgcccagccccccttctcccatgacttttttttcctctctttttcagaaatctgatgctgtcaggcccaagcattggccaggaaaggactcagtacagacaggaccactcagagaaacagtaagataagtccacgtatttacaatactctgaaaagcaaattgtccagagaggggaagagaactagctgttct

SEQ ID NO: 678368 - DNA, 498 bp, Homo sapiens
ggtggcacacacctgtagtccctgctactgaggaggctgagacaggagaattgcatgaacccaggaggcagaggttgcagtgagctgagctcgtgccactgcactccagcctgggcaacaaagcgagactccgtctccaaaatactaaaataaaaataatatatatatwtttttatttttttatatgtatatatatataagttcttgctcccacagctgtggtccctttagctaaaagagtttgaaatggctatagtgtccttggagacctatttttgaggaggaggctgagagcttccttcctctgcccagccccccttctcccatgacttttttttcctctctttttcagaaatctgatgctgtcaggcccaagcattggccaggaaaggactcagtacagacaggaccactcagagaaacagtaagataagtccacgtatttacaatactctgaaaagcaaattgtccagagaggggaagagaactagctgttct

SEQ ID NO: 678369 - DNA, 600 bp, Homo sapiens
tcagaattaagttttcaacacatgaactttggaggatacatgcaaaccatagcatatattttcttacttctggactactttctttgttatcagaattagatcgttctttattcaagcaagtaatttagtattaacttaatgatctcaatatatatggtatattaaaattacagtgtatcacatgacctactctggtttcttagtttgagaattaaaaccagtattgacaaggtttattaaattcttgcttttaggaagtaatatttatttgacatgtaaatgcttcctattttattttacacattgaaatagaaatgataaatatggattgtgatagagtctaatatctggataaaacttttaggagaaaacaaaaaacmaacagaagtactattctatgaactttattacctactgcttagaaaagttttttatcaggaaataattgatgtggtttctttgtatagcaatcacacaaaatagagtgatagcatagctctcttcttgtatgtggaaaaactatgaactatagatgtactatatgttttaattttttcttaattatgaaagaagttacattgaatggaatagatagatatc

SEQ ID NO: 678370 - DNA, 2342 bp, Homo sapiens
aaacccaagttaaaatcatccaactgaactcaatcaactcacagacccatgagagataataattctttctttaagtcattcagttttggagggtttttttcctgcagaaatacctaattagaatcatctatcattctaaagctaaggtagagtagtcaatccatttttgcttaaaaaacctatataattttttaaagtgcgtaacaaagaaattttattttatgccaatgtgttagtctgggttctcaaaagcagaaactatgtagtaatgccaaactgagaagtgcaaactcagggaaccaatagtgaaagaaaaaagaaatgaagaagaagaaaagcaaataaatgttggtgtattcccaagatggttacagttgtataaacacagctgctctctaaatcatgcaaaggtctctggttaggtcatatggagctatggtacctcaaaataatcccctatggagagcaaaacagaggaattaatcctgtagatccttcccatgggttgtctctcattaatcaaaatatgcccaaagggcatttatttcctcacccttccagatggtattgcctcagcctactggacagctgctgaagaatcctcaatcatagccatcaacagggcataccatttgagtctgaggtttgtaggaatagccaaagactctattggtggtattagtccaagctttggtgccatagttgctggagcttttgcttaactggggcagtcaatcctctatcagagcctagccctcactgtgggaaaccctgaattatccatgaatcttaacaggtgaagtcaaatatattagtccattttcatgctgctgataaagacatacccaagacttggaaatttacaaaagaaagaggtttagtggtctcacagttctatgtggctggggaggcctcacaatcatggcagaaggtgaaagcatgtctctcatggcagcagacgagagaagagagcttgtgcagggaaacttcctgttttaaaaccatcagatctcgtgagacttattcactatcacaagaatagcatgggaaagacccacacctatgattcaattatattccaccaggtctctcccacaacatgtgggaatttggagagctacaattaaagatgagatttgggtggagacaaagccaaaccatattataaaagtaatagcagttggagcactccattgaacaaatgcctggggatcaggaaccatgtacaatcaaataaatcaggagagttacatgtgttkcatgtgatacaattcaccccatgggccacttggattctttctcatactcctatgatacccagatctagagttatgaaataggaagaggtggtgctcaccttaacttatgttcagggctacatgtacaggtttgttatataggtaaacttgcgttatggggagttgtacagattatttcatcaactgcatattaaacctagtacccattagttattttttcttatcttctctttcctcccacccttcaccctcgataagccccagtgcctgttgttcccctctatgtgtccacgtgttctcactatttagctcacttttataagtgagaacatgtagtatttggttttctgtttctgtcttagtttgctagggaaaatggcctccagctccatcatggtttttttaatggctgcataatatttcatgatgtgtagataccacattttctttatccagcctactattgatagacatttaggttgatttcatgtctattcaccattgtgaatagtgttgcaatgaacatacacagtatgtgtctttatgatagaacaatttatattcctttgtgtatatactttgtaatgggattgctgggtctaagggcagttctgtttttaggcctttgaggaattgccacactgttttccacagtggatgaactaacatatactcccaccaacagtgtataattgttactttttctcttcaaccttgccagcacctgttattttttgacttcttaattatagccattctgactggtgtgagatggcatctcattgttgttttgatttgcatttctctaatgatcagtggtgttgagctttttttcatatgcttattggtcacatgtatgtctaattttaaaaagtgttcatgtcatttgcacactttttaatagtgttgttcatttatttcttgtaaatttgttgcaagcttaatcattcagggttaaagctatttgcaatattattgaaaagactaatgaggattagaaaacaaagctacaactacacctttcgccataattattatttactatttccctttcccatcactcattttagaactttctttctc

SEQ ID NO: 678371 - DNA, 762 bp, Homo sapiens
attcttttgtgactggcttctttcacttagcataatgttttcaagactcctccatgtgtaacatacatcagtactttattcctttttatgactgagtaatatttcactgtatgcatgtgccatgttttatttatccattcatcaattgatggacatttaggatgtttccatcctttggctattataagtaatgctgctataaacatttatgtacaagtttttgtgtgcgttaatagggttttaagcagagccatgacacctgacttacgttttaggaggatctatcaaagcaatgtgaattaagaaattatccaccaaaatgaacatttgcttattataaaaatgcaaatttctagatgtagttaaataaactatacccattattttattcacctgcaataaactgagccattattgtagttggttttctgaagcacatgatcctaccttgcaaataaacgagcatcttggtttggattttgagctggcctgccttagcacttcacaggtcratcaatattaaagagttctagtccctgccagcagtaattgacacctttaagttagctgtgtgagctgagaggtcaagaacccaatccatatagatggaattgttatcgtaataggcaaaaatacctgtcttcatgggattcaggatagaagtagagggaaaaagggtggctaggtgaattcattagccaatagcgctgccattgcttgaacactatgtgaactttatttagtctccagttcttcttaaaa

SEQ ID NO: 678372 - DNA, 583 bp, Homo sapiens
aaaagaaattgttttttggttgaaatttatacccagtcatgggaggattaagggaatgccatgaatgcatacttcaatattttataattatatatatcatatatgacatgtgcagaattatatgcatataaatatttaattatcactgcctttagggagaaagtccagtgattaatcaaaaccttacacttaggagacaaaaatagaaacaaaaacagatggattcgactttaactttgtttattgctatcgaatttcccattacagcaccatgcttattagtagaaaatataaacattggaagtgtattacatttcttcagctcaacatcttcagtaaaaggaagataatgccacccagcatgcagaattaatggctggcttttcttcatttaactttctatattgagattcattcatagtgttttatacacacatttttattcatttttattgtgatgtaatattttgttttatggatgtacaagaatgtatttatcccttctgatgctgggggactacttgatgatttttagttkgaagctattttgatgatgccgcagtgaacgtgtttatatgttcca

SEQ ID NO: 678373 - DNA, 1597 bp, Homo sapiens
ttgttatggccacataacctagtttatcctgactaatataaagagtttctaaaaagtgcccatgagtcttatgaagaccatactggacccactatgtttacttgttcctcagagaatacaaatcttaagcatcattatgaccagagaaagatacaactatcccacttgtaccaggcctctggtatacatagataccttcctagttctaggcagattctgttcaagatagcaacactaccaagggctttgtggcttcattttaaagcaatgatgaaagaagatattgttgacaatctctaaagctacactgagatttgaataactcgaacgatgacctcatagcagctttgcatggtaataattactagtaaattactgagattccaacatgttagtggacatctttcaaccttggccttacactaatcctgcaacatctggattattatctccaatttgcatataagaaaacaggccagagaagagatacgacttgcttaagttcacctaagtcatttagaggagagttacgagtcaaacccagatatatctgacaccaaacccaagctctttttacgaagctaatctgtctcttaaagctcacaagaaggataggtaaaaatagaatcttacctagaattgttcatctttactctaacaagaaaaataaaaaataaaagaagtgttgcagggacagatagtgcttgctaaatcttcatttcctcctctgcattacccaatttctccagcaaatagtctgaggccatatagctagttttggccaatgaactaagagcagaaatgacatttgttctttgcaggttgaggtagttaaaagtcagtgtgtttcttctgtcttctttgcctccgcttacctgacatgacacataatccagttggcacatctataggacagaagaggacctctggaccgtcctgatattgtatgtgagaaataagtcccattatattaagccaggtgcaactgtcttttagagacctatattattgttgttgctgttttttacttactggactagaggttaacagaacacaattaatcttaacggttcattacatattttgatccttagtttttgcacgactcacttttacttattttagtagccatttagttatttttttaaatgtatgcattcacatttaaaaccacctctaacaactaaaattagaacttccataataaccatctaactccatggttcctctacaaactctttctcctctcttctctcacacagagtaamcatcaccctaaatcctatattcttcattcccttgattctcttagtatatggttttattgtatctatgtgtattcctaaaaagtatgtgtacttattagattttgtttctaaacttataaaagtagtgtcatgtcataattatttgaaatctaattatatttaatattacattactaagacgtatcactttatttattttgacttgtatacattaaactttattccttttcttttcttagacatgtcctgatgaatctcctttccaagtcttaagtaaatttatttagttgcctatacacttactatcagaggagcaaaatctagaaata

SEQ ID NO: 678374 - DNA, 1411 bp, Homo sapiens
ctttcgaagctttgggctttgaaacaatgttttgagcactaggcagagtctgggcttatccatggcaattctggaccagtgggaagagcactgagcttgcagtcagagaccctggattttagttccagtccccttcacttaccacttatgtggcccagggtggtcacagtacactcttcttctgagccttatctgtacattaaggatggtaaaacctattttatcttattttggaggtttaatgtagatagtaaatatgaaaggaaaatttaaaatgcataaatggcacatacacgtgagaaatgattaattttgtcagccatccacaaattcctactcagttgctattgtgactaatctgcttaaactctggcaggatttaaagtgtaaaccactgggaaagagaaaagctaattgacccagcccaggtctatgaccttgaccacaatggcatggttctcttgacactacacaattttcctatttgtagatagtctaattctcccgctttaatttccaggttggtcagtcaaaacagtacagtatttaaagccagagagacaaggtctaaggtttcagggacacttactgtatgtctgggttgggacaagttacttagactgtcagagccttggtttacttatatatatataaaaaaaaaaactgcaggcaactcacatagctgttgtaaggattgaatgtgagtagactctcaatatatgtgactgcatttgaatatgatatttaggtcatgttctgtgtgatgcttttgtgccaaaatcacactttatattaggtcaccttagcatacgcgtgaccccagagaaaggaaacacatgagggagtgcatccatgtcactgcatagctaattgagtgtggcaataagaactttcgcaattctgaggatgaaacatctggtgactgttgcagggataattactgtcctttataattgcaggtattcctagacataatatttcctagcattcttgaattcacacaaagtagcaatggttggaataccttttggacgtttatatttcatggtatacttttatggtacacataatagtcttttttggtcttacaatgatatgtatatctttctcctacacaagaactctggtaacttcccccttcttttaggattgtaagccttagtttcccttaacaggctacacagggatgcacttgaatggtgctgaatgttggaaactgtggttctgtctgtatggctgctggtgtatrtgggttatttaattaacatggtagattagattttgtggtagaacaaagtaaagattgtattcaacatgagaactggtgaatcatataaacaatttcactttactgggggccctgtgtctgccctttaaagggaatgacagaggatcaggaacatggagcttt

SEQ ID NO: 678375 - DNA, 583 bp, Homo sapiens
tgtagagatttggtcttgctgtgttgcccaagctggtgttgaactcctggcctcaatcccaaagcactgatattagagctgcaagacactgtgcctggtagtcctctttcacatggtgggagaagttgtaaaggaattattattatattttacattaactaaagaccaaactttaaagatttcattagtttccccctgacatcctatttctgttctgaaatcccatccaggacaccacattctattctgctgtcctgtgtccttgggctcctcttggctggacagtttctctgactctccttgactttggtgaccttgatagttttgagtactggtcaggtattttgtaagcatgaccaaccaacagtatttgtgtgatgtttttcttatggttagcctggggtttggagtttyggggaggaagaccacagaggtgaagttccattttcatcacatcatgtcagggtacatactggcaacctgactcatcactgttgatgttaccttgaccatccggttggggtagtttatcaagtttctctactgtaaagctaattatttcttccctcctttccatactgta

SEQ ID NO: 678376 - DNA, 294 bp, Homo sapiens
tgacctcaagactatcagattctaaggcacttgccaggaccctgctacacaatcccatttctcctacctgcagccaaacatttccacttagaaggtggcatacaaccagaatagctagccagatgcagtggctcacgcctgttatcccagcactttgggaggccgaggtgggtggatcacctgaggtcaggagttcgagaccagcctggccaacatgktgaaaccccatctctactaaaaatacaaaaattagccgggtgtggtggtgcgtgcctgtaatctcagctactcagg

SEQ ID NO: 678377 - DNA, 897 bp, Homo sapiens
cacgcttttgcaattcataaatgctcttctttcaccagcaaattcaatcatttcatgttaaaagggaaaaaaaaaaagagtacgagtaaaaatctagctatttttgggagtctttttcccccctcagagaaatgagggcaaaaaaatacatcagctatttcgaagacaaaatctgagtgcagtttggaggattataaagaagaaaaatgtaatttcttatcaaataacagtgatagattggttttgttttgtttaaacttcagtggttaagaagtcccaatataaaccaaatggaatgctttttcagggatcttgcagtttatttttgtcaaaatttggtcaaaaatatcaaagaaattaaatcagtcctttgtaagctcacttatagaaaaacagatattaggcggttccagagatagcagtgggccgaattcctctttataactgcccttggtaatataagttggagaaatccattggctttcatggtgaaatctaggacactatgggctacagggctatttatstaccttctgcagcactgtggaaaaggctacaaagaaaacaggcagtatgcctaatggcagtcaaattatggtatcttgatttttagaaaattaaggttgcaaacagtttttgaacaccctgagtgtgcctcaatgtgtgacacatggctaaacattcacatatgctaactagtccttacaacctctacctgagcaagataggtcttgtcatttccatttcacatatgagaaaacacagtctcagatgatgcctaaaacatctatctaacacatggaggagctagtgggatacacacccacatctgcatgactcctattcatggctactgtggattacattgctttctcttagtatccaaacctccacctt

SEQ ID NO: 678378 - DNA, 1459 bp, Homo sapiens
tactttatgatatttattaaatatacaaaatctagttaacttgataaaattaacttaaaacatttacctcattaaaatgtttttctagtttttcctattaataaaaccatttaaaagtattcctaatagaaacatttatttttctctttgcaataacttttaggataaattgttagaagggtttgtaaaatataagcctgtatgtatacatgaaataagacataattttcaggatattcttaaatattgtattcatgcttccaacaaagaatgagaaacttgatttgactacaatcaatgtatgtaagtatgtgtatgtatatatgtgtatgtgcatgtatttttcacttgaggaaactaaagtgtcaaaacaaaccattcaatgaataatggtaatttcaagtggagttgtagatttttgaaaagaaactgattgtgagacttgaaatacaattttaggaagtttcataaaaacacagatattatattagtacatgtttttaatataatggtttgattgtatttcaaatgtaattcttatatattcttacaattttagtgggagggtggtggaagccttaggttatctttgtctttctagagtgtgttgagtgattgaaatcggtacccacaagaggaacaatacatttttagacatgcattgaaaaaacaaacatatgtaaaaactttattattattggggttttgaaaatatccacatctttctacacttagaaagacagaaggttcggttttctttccaaagaaactaacaacactctatagacattgaatgtggaaatagagggaatacacaagtgaaaggaattttcctattcttttttttatgtagaatgttgctctagagcatatttttcattgccaccagaacactgtcagtgccaacgctgtagacgacaggattgagtgtaagtgcaaggaaagcatagaatatttctagaaacttaacctggcctgaaatgtggatgatttaagtctcatatacatatgtgaaaatgaatgagtcccagtatgttacaactgcaatcatgaggatggaccaagtggaaaatgaccttttccatgcctgtgataatttcatctagaggacacctcacagaatttggacagaagaagcagaaatcatagagaaaggaatgagcaaaaatatgatgctgcttacattaactcctcattcaccctctartgtttctacataagagaatctgatgtagatataagaatatatatttctttcctaaaataagtttcaatttgtttacttactaagccaggtagcagtttattaagcagaatcgatttacttaggcactatagagactagtggctaatagcctcttaaactctctaagcgaatacaaaattttaccttattttgtctaattaatgtcttgcatcctttacttatagcataagaactcaatagaaaaagctgcgt

SEQ ID NO: 678379 - DNA, 1229 bp, Homo sapiens
tatatactttcacatattaatacgtaaattataaaatttataaatacattagtccaggtttctgtctttcaagatgctttatgatcatcaaaacaaataacaaacattaaaaaattattttccatcttattaacaactacttgtttgaataaaatgagcttagattttcccttttgtaaaataaatgcagaagtatgtcaccgacaatatataaatgattattttaatttttgtgaatattgagattcttcataaacagatcacttaatcctattttaatttccttgaataacaacagttgtgtgctatgacctagaagagttagaaaagataagcacctcaatgaagtttataaatgtatgtgtaattagtcctgcctgttttttatgttgttgttttgttttgtttatttgtttttgagacagagtcttgctctgttgcccatgctggagtgtagtggtgtgatctcagctcactgcaacctcagcctcctggagtcaagcaattctcgagcctcagcttccgagtagcttggaatacaggcaccactaccaaacccggctaagttttgtatgttactagaaatggggtttcaccatgttggtcaggctggtctcgaactcttgacttcaaatgatccacccaccttggcctcccaaagtgctgggattacaggcgtgagccaccgyacccagccattcctttccgttttgactgttttgacccacagctttgtaaaatgtgatgatacacacagattcagacttcagggcagtggtgccctgcatgagctgatcgtaaataaatttacaaaatcaataaacactgctgacaactcaaatcaacacacctatatccgaagttaacttttccccactccctggagttatatcattcttctcgttttacttgtttaatcaatgatttactttattatcataattccatgccctactgaatcatatgtccttagctgacttctggcccattttaggtctcattaattgctttttacaagaatgatttaattgttttagtggtctttgatgtaaaaatattttcagctatgcataaattctccttctctgtatttcatactggcttttacattttttagagttcatatcatctacgcaataatacctgtattttttcttcagaaattggaagcaatccacaatttatttcttatctccctcatcatcttacttccaacaccatatgtccac

SEQ ID NO: 678380 - DNA, 1296 bp, Homo sapiens
tcagggctctgtgcctccattcaacatctgaatctaaagtaaaatttatcttcttaagcgaaaaataaattaacaacacaaattaacatggatgagggggtcagaaatgtttatgatcaggcaagaaaagagctaaaatgttcagggtgctatggaagaattaagtaaatgtttctggaaatctacgtgggtagctggaaatcactgatctaaaccaggatggtgagagtaaggtaagtgatctctagcccttgaggactaaactctgatttttttttgtcttgcccaaattcctatctaaggggtctgggragtcatgccctacaaatcataaattctcattagatgagttttatttaaccccgtatataatgatttactttccaacctgactctggcataacattaggagacaaagataaaatcaaaatattttaccccaaaacatgtttctttgccatattttgaaatggccctgcaaaacttttctttgtaggggaaaatttgcatctgtaaagaatctctattgacatagctacatctttttcttccagactctcccaatcctaaagagattaactaaaatctgaataggaaacatttgtcacctattgtctctaaggacagccactataacacttcaaaaagactttggtctccacagtctttatcttaaccagaacattccctttctatctatcccaggtcttcagacaaactcaatcctcaaccagaaaatatgtaaattcacctatagcctggaggccccccacctttgagctcttccaccttgatggaccaaaccaatgcatttcttaaatgtatttgattgatgtctcatgcctctctaaaatgtatacaaacaagctgcgcccagactaccttgggcacaggttctcaggacctcctgagggctgtgtctcagtccatggtcattcatatttggctgagaataaacctcttcaaatactttacagagttctactcttttcgtcaacaccctgtagatcgtctcccacctacagctggcctctccaagtttttgtggagggccaaggaagcattggttggagaggagaggagagcacagagggggtggtttgtggcatagagcaaaactggagctcctctctttgaatgcaaaatacaatgttggatcttttagtccatctgtgaatctatattaagcaattggtgaacgtattttaatatatttgttattacagtaaagttttatacaagcatatttcactgactttacatacgaagtgcttatattttaacacctcttgatga

SEQ ID NO: 678381 - DNA, 602 bp, Homo sapiens
tgactatttatttctcaatatgacttctgtaaactggagagcctccatatattgaaaacattcaaccagttatttgtgatctttactcccagatccactaaactgattatacttacaggcatttaaaaactgtgtcataaaacagaattggtctctgcccttaaggaatgaataatcaatcacagtttctataaagcaaataattccactgacataaaaacaatgtgtagtcagaaagaaaaacacctttttttgtatcctgggaaggaaactctcatagaaccagttgcttacatatagcaggtctttgctaaaagaaaaggtaattagtattatgaaatgtgtccaccacagcaaagctctaaactagacactgtatatacatcatttcccatcatttcctctgttcatcacaataatcttatagcgaagtatttcttattcttattctttttttttttttttttttttgagacggagtcttgctctgtcgccaggctagagtgctgtggcgtgatctyggctcactgcaacctccgcctcccaggttcaagggattctcctgcctcggcctctcgagtagctgcgattatagccatgca

SEQ ID NO: 678382 - DNA, 624 bp, Homo sapiens
tcaactctgccacagatctgccttgaacacttaagctaagacgttacctcccctgaaattctggaccatcttttgtaaaaatagaaataatattactcaagttaaaggattgtcatgataattaaatgaacagacttaaatgaaatcttctgacccaggctcagcaaatattgatttctttcccttcctcctgtcttcccttcttcagtaaragagaagcctatttgagtgtcaaaaactgcctcaaacccaaaagacaatgcattagaaaatgccctggaaattataaactatatcattgtgtcatgctaattaaaaagtgcctaagctgccagtaggcccaggttgggttcaagtctatacttcacaatttattggatgtgtgactgttggtaattaatgtacctagcctcagttttctcctctgtacaatgggataacagcccctatctcagatggtggtcactgaaaagtttcaatcaaagaatgtgtataatgtgctcaacaaggtttttatcatgtagtagcatgtactcaaaagctgttagctagaagatccaccttttaactatcttggttatgatctaattctactctttctcccagaagtaatagggaaagtta

SEQ ID NO: 678383 - DNA, 624 bp, Homo sapiens
tcaactctgccacagatctgccttgaacacttaagctaagacgttacctcccctgaaattctggaccatcttttgtaaaaatagaaataatattactcaagttaaaggattgtcatgataattaaatgaacagacttaaatgaaatcttctgacccaggctcagcaaatattgatttctttcccttcctcctgtcttcccttcttcagtaagagagaagcctatttgagtgtcaaaaactgcctcaaacccaaaagacaatgcattaraaaatgccctggaaattataaactatatcattgtgtcatgctaattaaaaagtgcctaagctgccagtaggcccaggttgggttcaagtctatacttcacaatttattggatgtgtgactgttggtaattaatgtacctagcctcagttttctcctctgtacaatgggataacagcccctatctcagatggtggtcactgaaaagtttcaatcaaagaatgtgtataatgtgctcaacaaggtttttatcatgtagtagcatgtactcaaaagctgttagctagaagatccaccttttaactatcttggttatgatctaattctactctttctcccagaagtaatagggaaagtta

SEQ ID NO: 678384 - DNA, 666 bp, Homo sapiens
ttttgtgattttaaccttttactatctaagcatttcttttactcacttccctaagtacctttttgtaacgtattatgttgacctttgaaatcagaaaattcattgctggtgagtttgcactgaaagctgcatcgactcattacgtcagtgatgaatctaccttctgcaaaggaatctgatgacgtggatcaagaagaataaaaacgtctttccctttctgccgaaactcgctcatttgagcataattactacatgctggtactcacatatctcatgaagtacgatataatacaaatcaagtttacagatgagaaaacactagctcagtgactttaaggaagttgcccaagatcacacaggtagtagatcagkggtcaatctcaagccttctgactctaaagccagttctccttccacagtgccagccttttcaggttaccccataatcctactcctggggattcatgctgagaaattttacttgctaattttaaaatcaaaactaaaaaagtgttcgctgtgttgttcattgtgattccaaaaactggaagcaagctaaatatcaattataaaggaaaaatgaagcaaactgtgacaatattattcaacaacaaaaattaaaatattatagactgtagcaacatagaaggttttcatgactgaaaa

SEQ ID NO: 678385 - DNA, 491 bp, Homo sapiens
gtggaatgtgaatacttcagagatattgttgagaagtggactccagtccaaggaagaatctctcttctcaaagagctgatgttttacggcctcctgatgctggrtaaggaaagccatggagggaattagaaccacggtagggtaagggcctgaccctatgttccactgactgtcattccaaaaaactttttttcaatgccacaaggctagtttgaggcaaacgttttgatgcagggtaggctggtgaaaaaaaaaaaaaaaaaaaaaaaaaaaaaaaatatatatatatatatatatatatatatatatatatattcagagaataagctcacattcccaaatatttgcttgtacctgaacaggaacaccaaaattaatgaaaggcagtgtcatgtagtggaaagggagtgagctgggagttgggtctttttcaaatcttggctctgatacctgtgctgtttgaccttagcctgcctcttagccctcccagg

SEQ ID NO: 678386 - DNA, 491 bp, Homo sapiens
gtggaatgtgaatacttcagagatattgttgagaagtggactccagtccaaggaagaatctctcttctcaaagagctgatgttttacggcctcctgatgctgggtaaggaaagccatggagggaattagaaccacggtagggtragggcctgaccctatgttccactgactgtcattccaaaaaactttttttcaatgccacaaggctagtttgaggcaaacgttttgatgcagggtaggctggtgaaaaaaaaaaaaaaaaaaaaaaaaaaaaaaaatatatatatatatatatatatatatatatatatatattcagagaataagctcacattcccaaatatttgcttgtacctgaacaggaacaccaaaattaatgaaaggcagtgtcatgtagtggaaagggagtgagctgggagttgggtctttttcaaatcttggctctgatacctgtgctgtttgaccttagcctgcctcttagccctcccagg

SEQ ID NO: 678387 - DNA, 1237 bp, Homo sapiens
  misc_feature 394, 395, 396, 397, 398, 399, 400, 401, 402, 403, 404, 405,406, 407, 408, 409, 410, 411, 412, 413, 414, 415, 416, 417,418, 419, 420, 421, 422, 423, 424, 425, 426, 427, 428, 429,430, 431, 432, 433, 434, 435, 436, 437, 438, 439, 440: n = A,T,C or G
  misc_feature 441, 442, 443, 444, 445, 446, 447, 448, 449, 450, 451, 452,453, 454, 455, 456, 457, 458, 459, 460, 461, 462, 463, 464,465, 466, 467, 468, 469, 470, 471, 472, 473, 474, 475, 476,477, 478, 479, 480, 481, 482, 483, 484, 485, 486, 487: n = A,T,C or G
  misc_feature 488, 489, 490, 491, 492, 493: n = A,T,C or G
acacatttttaatgttccagggctcagcacactattttcaataggtgcttatttcgagtcagctacattttccagaatgccttccctgactgccccacacccagactgaggtgagcttggtttctgcgtgggctcctataagacccccttctcagacacctggcacacagtgatgaatgggaaacaacagaattctgcttccggatgcatttactcactccactgggggaaaggaccattcaatacatgaaaacaaaactatctacaggctgctgcccgtcgctgaatgaataaataaaatgtggtagatacatgcaaataagagaatattattctgccttaagaatgaagttagttctgacacatgctgcaacatggatgaacctggaaatannnnnnnnnnnnnnnnnnnnnnnnnnnnnnnnnnnnnnnnnnnnnnnnnnnnnnnnnnnnnnnnnnnnnnnnnnnnnnnnnnnnnnnnnnnnnnnnnnnnatgaaagtaagcatgtgagtctgaattcctgggagggggacaattgtttccctgccctggtccaggccagacagacccgccagtctgttcctggtagtaaagcgcatgtgtctatctaatgtgccttttgaggatgtggcccttttgggtctttgttttaaacaatgtctcagttgtatctccctgccctgtatagaaaggcttcatcccctgtcctgagtgttaaggaccaagcctatatctgacaaatgtgcttttcttgcccccttccttggacaggtctttgaaccaggcagggtgcatgtgtgtgtgccttcagaggtcctcaggtcaggaaagattaagagccctatgatgtgtaggtgggtggggtgctgtatccacatgaaagtcagggtaactrttaacttctttgggcctttggttgaccctgagattggagcagggctttctaaatgagatgatgtagatcagtctttgccttcttcaggactgatgaagcccatgatgccccaggagtccctcaatgggacaggctgtcgctctgaggatcagaactgtgtgcccccactccaagaaagaaaagtgacccccatcgactcaccccctgtgtggagcccagagggctacatggcactgcagagcaagggctacccgctcccgcacccgaagtcgagtgacaccttggctatggacatgcgtgtcaggtgagatgaagcctggtcctgctgccttgccactgaa

SEQ ID NO: 678388 - DNA, 614 bp, Homo sapiens
tttcttcagctaaaatataacattaatgatttaaatgtcacctgttatgtgaattttgaaaaaaaaaaaaaaaaaaaaaaaaaaaaaacttccagggtagggaatagatgttccaaatcaaacaaaaaacaaatcatattggtgtttcaagggtgcacagtttcagcaatcctacaaaatgtggcatggtatgggaaaatgataaraaaggttaattaaggcaccaaagcccagctgcagagagggcccaacagggcagagcacatttcaagaaaattaggctgggtgctttgggaggccaaggtggaaggactgcttcaggccaggagttcaagaccagcctgggcaacatagcgagactccgtgtctagaaaaaattacctgggtgtagccccagctttttagaaggctgaggtgggaggatcagttgagcccaggagtttgaggctgcagtgaactatcatcgtgccactatgctccagcatgggcaacaaagcgagaccccatctttaaaaaaactaaaaaaaataaaataaacatgaactgtcgtgttcttagagagtgaagatgacctcctctgaggtaaagacaaggtcagacagaggtgttcatgg

SEQ ID NO: 678389 - DNA, 644 bp, Homo sapiens
tgagtgccaccttatctctataactgtataccctttctattgctcactccagccagatgcaatatccttgccaagcaccctcctgtctcagggcctttgcacttgccagtccctgtgcctggaaggcttctcccctagatttttgcatgacttctccctccctcccttcagatctttgctcaaatgccttctttttagtgtatgtaaaatgacaaacccatacccattccttatcccctcctctgaattttctcttcagcaattatcagcagcaagtgtcccaaagtttctattaacttatttctgttgtctctttcttccctccactagaatgtaagctttatgagagcagagacttttgtttgttcactgctttatccttagcacctaaaacagtgccttactcatasttacctcaatatttattgccaaatgaatttctgctttataatctgattatatttttccactctctcttagagtctaactagttatgatgtctgtagcatacttcttgggacttctaccatgctcgtgtggcttggagtcatccgatacctcggtttctttgcaaagtacaacgtaaggaattccacggatctccatgctgttggtatttctctcaaagttattgcactgctttg

SEQ ID NO: 678390 - DNA, 634 bp, Homo sapiens
aaatgttagctcagagcaaaacagagaaggcagcagcgaatgataccgtatcataatctggaaagtgggatgaccaatcttctcaagccaatagatactgtctgcgcaaagttatttgtgggaacagaggtaaattggaattatctgcttttagaattaatacttatttatagtaaaatatgttattacaatatagactgtacatttttgatgtgtaaagacataaaagttattccattttcatattttagtatgcttgtttgcattgaacatttttaactctgatacctcatagtttcacctttaaaatgttcatgaacgtatgtggacaaatctgtaaaattgcatactttttaactaataatatattgttcaatctacaaatattcatcaaatacatttatcatttgaaagaaaccataataagtgttagagatttactaataaactatagtgttgtgttgggttaacacaatactagtagaagaaaaaaaaaaaactcactcatttcgaagagataaataacaattggatataataatgataatggctgccattttctaaggacatactrtaataataaccaaagcgagttcacatttactggacatttcatatgtatcagtgtactgtg

SEQ ID NO: 678391 - DNA, 1020 bp, Homo sapiens
gtgaatatgatcattcttgactttcagttctgtatttcgtgcccctttgctcaaactatgtctctcagttcttctcacttgcttcattaaaatattttatatctattactctatttttwtaaaaaaaaacacttttgatatgttcctccttcacagaaaagaatgtggctacctcaaacactttattaggattcactcattttttattacaggaggttaaataaaattggtattatgatggcctctgtatggaaaatgtgtcgtttttagagttccggccacagaaactgacctatgaacggttttctaaaggagaagggtgtgcctgtggaaagttcacggcaacgggagtttgactcctcttaaggtatgaagaggaagacaggctaaagtctcaagaaacttctgactcaataggggaaagctatcaaatttcccaaaagttgtgcgattttggttagcacatcacaaaggtgatgagcagctcctgagagtgaaacccacatcccatttctggggagaactacgtagttggttccctctacataaaatatcagagtctacatcctgacacccataagaaacctctcccacctttctcttactaaccttttcttccattctcagtttacaatgacacacaattttgtttcccacaagtaccgttcaaccagagacacacacacttacacatacgtatatatttcatatatatatatatatatatatatatatatatatatatgtttggagagcaggaaacgggggagccaaggtctgtttgtactcacaactttggctcaactgtgctggggtggctggaggtttgaccacggaggaggggcccgctggcagcgccaaccggctgaactgtgcgccttttcataaaggccgaggaactggggttagccacactacaaccctcccacctgagggaaaggcctgtttgttctggaaggcacagcctagccttatttaactaactgcaagcagttaatataagcattcccaaggcagcaa

SEQ ID NO: 678392 - DNA, 1020 bp, Homo sapiens
gtgaatatgatcattcttgactttcagttctgtatttcgtgcccctttgctcaaactatgtctctcagttcttctcacttgcttcattaaaatattttatatctattactctattttttwaaaaaaaaacacttttgatatgttcctccttcacagaaaagaatgtggctacctcaaacactttattaggattcactcattttttattacaggaggttaaataaaattggtattatgatggcctctgtatggaaaatgtgtcgtttttagagttccggccacagaaactgacctatgaacggttttctaaaggagaagggtgtgcctgtggaaagttcacggcaacgggagtttgactcctcttaaggtatgaagaggaagacaggctaaagtctcaagaaacttctgactcaataggggaaagctatcaaatttcccaaaagttgtgcgattttggttagcacatcacaaaggtgatgagcagctcctgagagtgaaacccacatcccatttctggggagaactacgtagttggttccctctacataaaatatcagagtctacatcctgacacccataagaaacctctcccacctttctcttactaaccttttcttccattctcagtttacaatgacacacaattttgtttcccacaagtaccgttcaaccagagacacacacacttacacatacgtatatatttcatatatatatatatatatatatatatatatatatatatgtttggagagcaggaaacgggggagccaaggtctgtttgtactcacaactttggctcaactgtgctggggtggctggaggtttgaccacggaggaggggcccgctggcagcgccaaccggctgaactgtgcgccttttcataaaggccgaggaactggggttagccacactacaaccctcccacctgagggaaaggcctgtttgttctggaaggcacagcctagccttatttaactaactgcaagcagttaatataagcattcccaaggcagcaa

SEQ ID NO: 678393 - DNA, 658 bp, Homo sapiens
atggtggcctgtaatcccagcactttgggaggtggaggcaggtgaatcacttggggtcaggagtttgagaccagcctgatcaatatggtgaaaccctgtctctactaaaaatacaaaaaaattagccaggcatggtggcatgtatctgtagtcccagccactcaggaggctgaggcaggagaattgcttgagcccaggaggtggaggttgcagtgagctgaaatcacgccactgcactccagcctgggtgacagagtgagacgccatctcaaaaaaaaaagaaagaaaaaaaaaagaaattatttagactaggggtctcaaactcaaatgccaataagtgctaactaagcaggtgatgtaagtgaatgatctggagggaaggggaggacttgtgtaaaccaaagagcatatgtcatgtctggagagaaagaccaattatttctctaaggaaacgcaatctgagtgttgccagacttttcaagagcagtcagatttcatgcaaaaacctgaatttttaactgttgaggactaattaataaaaattataacactactttgcaagccaagtaacwcacacctgcagtctgtactttctccccagctactactagtttctgatctctgatctggctcaactctctcaattatacatgacaaa

SEQ ID NO: 678394 - DNA, 658 bp, Homo sapiens
atggtggcctgtaatcccagcactttgggaggtggaggcaggtgaatcacttggggtcaggagtttgagaccagcctgatcaatatggtgaaaccctgtctctactaaaaatacaaaaaaattagccaggcatggtggcatgtatctgtagtcccagccactcaggaggctgaggcaggagaattgcttgagcccaggaggtggaggttgcagtgagctgaaatcacgccactgcactccagcctgggtgacagagtgagacgccatctcaaaaaaaaaagaaagaaaaaaaaaagaaattatttagactaggggtctcaaactcaaatgccaataagtgctaactaagcaggtgatgtaagtgaatgatctggagggaaggggaggacttgtgtaaaccaaagagcatatgtcatgtctggagagaaagaccaattatttctctaaggaaacgcaatctgagtgttgccagacttttcaagagcagtcagatttcatgcaaaaacctgaatttttaactgttgaggactaattaataaaaattataacactactttgcaagccaagtaacacacayctgcagtctgtactttctccccagctactactagtttctgatctctgatctggctcaactctctcaattatacatgacaaa

SEQ ID NO: 678395 - DNA, 1257 bp, Homo sapiens
  misc_feature 158, 159, 160, 161, 162, 163, 164, 165, 166, 167, 168, 169,170, 171, 172, 173, 174, 175, 176, 177, 178, 179, 180, 181,182, 183, 184, 185, 186, 187, 188, 189, 190, 191, 192, 193,194, 195, 196, 197, 198, 199, 200, 201, 202, 203, 204: n = A,T,C or G
  misc_feature 205, 206, 207, 208, 209, 210, 211, 212, 213, 214, 215, 216,217, 218, 219, 220, 221, 222, 223, 224, 225, 226, 227, 228,229, 230, 231, 232, 233, 234, 235, 236, 237, 238, 239, 240,241, 242, 243, 244, 245, 246, 247, 248, 249, 250, 251: n = A,T,C or G
  misc_feature 252, 253, 254, 255, 256, 257: n = A,T,C or G
tacaaggtagggtcttaaggctcagtgtgagtgaaactttacacatataattacataaaaaatgttcatgtataatttatatatgctatgatatatataaacatacatacaatttcaatgcttatattttataaattataatatataaatcataaaannnnnnnnnnnnnnnnnnnnnnnnnnnnnnnnnnnnnnnnnnnnnnnnnnnnnnnnnnnnnnnnnnnnnnnnnnnnnnnnnnnnnnnnnnnnnnnnnnnnatccaattattacgaattcgagctcggtaccctgtacagcataccactgtactgaatactgtgggcaattgtgacacaatggtgagcatttgtgtaactaaacatgtctatacatagaaaaaggtacagtgaaaagatggtattacactctacggaaccaccactgtgtatgcagtatattgttgactgagacgtcgttacgcagcacatgactgcatataaaaagccaaattgctactaatttcagaatataaaaaatccctataactcattaaaaaatcgccaaacagaaaataagggcacagggataaattttatatacaaatgcaaaaattaaacaaaaaatacaagaatgtacaactctgtgtaataaataaagatttaaaattttaatgaagaattaaaggcaataccacatatctcttaaaagcacacattctggagacagagaatgtggattcaagtactgtctcaaccagttagtatggcaccatttctgcattaaaaaaaaaaaaaawatatatatatattttggatctgtttcctcatctgtaaaattgaaatgataatataatctgtctgtggtagccagcctccaggattgccccaaataactcttacatgctggtattcatgcctgtgctgttccctcctacatagcagaatggggatgaaccatataaccattaggatattgcagaataacaaagtgtgatatctaaggctatgccgtaaaaggcattgtgactttgccttgctctcttttggatcatctgccctgggaaaagccagctgccacatcatgaggatgctcgagcagcccagaggaaaggtccacatgtaagaaaccaagatctcctaccaatagccagcaccaacttgggagccatgtaagtaaaccactttgaaaacagatattctacgcaagtcaagccttcaaatacctgtagttatttgataactgcaactacactaaataacctacatcttcattgtaaca

SEQ ID NO: 678396 - DNA, 629 bp, Homo sapiens
tcttttaaatcgtatattctgtatagtacaataattacatgttatgtgtcaagcactgtgcaatcactggacatataaactcatattctggtgttaaatagacattgaaatgactatgaatcaataagttcagtactctaacagaatttatattaagtgtgaagatatatgaaaaagtgagagtagcaaagataaaatgattttctcaatctcccttggttgctgcagtcagctgatttttaagtctacagaaaatatatggaatgttttacgtatatgttctcactccccatttccattatgatagcactctccatatctytcacctggacaactataatagcttcctaaataatcactcctatgaggttttttttgtcctcctcactgcactcaacatttcccctagagttatttttttaatctagttaaaattttatgcctttaccgaatacttgcattattctcacactacttctccaaaaaaatcttagtaaaatttaattcacaatcacatgtacacacatggatgcatacacatgtatttgtgtatgtgtatgtgcacaatatgaagttccaaggcaaggtgatttgaggtaatgatagttttaacaccccattataagaat

SEQ ID NO: 678397 - DNA, 945 bp, Homo sapiens
caaatggatttcttcccatgaacaaatgtaaaagtatatctttcatgtagtgtgtttttttccaaattgtgtgaatatgatgctaacatcattgatattttgaaatatacatcatggaaatatcagtttattcacatcatattcattaatagtatggctgaaaagacactcaagacttttcttgataacaatattaactcttgtgaaattagaattttgtaaaaatgatttttcctgaaataaccgggatattatttcttgcataactgttaaatacactactggggtctctcagacatctttaaagctaccattatgtttatcaaaatggatctcttaattaaatgaagctagctattgatttcaccagatttggtaacaaaattattgctctagctttggagttggtaaatattttgtgcatgaaagaccaggatagtacatattttgtacaaattttaggtttttcaggacatatatggtcttatatttttattttttctcacaatctttaaaaatgatttaaaaaaattagctcaccagatgcacaaaagcaggtcacagacctgatttgtctctcagtttgctaaaggtcactgtagcttgtttttagaggaaaaatagtatttatgatatgcatgatatcacacgacacacatttggaatgagacctttgttggaagaatgtgtaaggccaaataagtataatttcttaaagattaacattttgatctaaataattactttattataaggtgtgatgactctgtcctaggtaagctaaattatttaagtattaataaacataagctaatcactataayaaataatgccttaatgtcaactttcttttaacatgataagaactttgttacttattaatgacagaatccaagcacacaaacttccacttgataacttagagaatcatgcactttgagtttt

SEQ ID NO: 678398 - DNA, 900 bp, Homo sapiens
gctgtttacccagtgactgaggcttgggtccaaattcctggggccagtacaggggccaggctgaagcggaaaccttctgggcatgatgggcacagggctgcagtgggcgttgttgggacctaggcacagtgcgtgggggtgccagaccccgagaggtgtccctgtgcctgtcccctgtttgaggcaggtgccacccacagtcttggagtcaccccaagtgtgtgtcccccctctctgaagctgttggtgctggtggcaatgctgggcccagtaggtcccagcaactccctgagtaatgtgtcccctaaggcagctgtgctgtgtggcagaggagtcctgagctggctcggatcagcccaacctcacctggcctcattttaagggcctctgagtcctcccacaaatttcccagtcaagccaggctggcttcctctctggatcaggacactgggtcattctcgactcaagtggagagtcctctgcttttatatctatccgtggagacacagctcagtcccacttttttcatgaagcttttctgatttctcagattattagtttcatctgtccatctatccagttgtccatctgtctgttcatctattcatctgtctgtccacctgtttattcatgtctgtccgtctgttcatctgttcgtctgtctattcatctgtctgtccatccatctatcacccactggaggattccactccatctcactctcctgtactcctcctctggccctcakgcaggatttttcttttttaatgtttctggtaccagcagtattaacagctccattcttaaagaagcaataccttggccgggcgtggtggctcacacctgtaatcccagcactttgggaggctgaggcgggtggatcacaaggtcaggagatcg

SEQ ID NO: 678399 - DNA, 2654 bp, Homo sapiens
tgtggatggacacaaatgagtggttttaagattatgtttccttcccttgtttttaaaaaacatttataataagtaaaattcttcaacaagagcaaaatcatatcagtttctagtatcagtgtttgccaaagactgctctttaaaataaagggatcacctcagtccaatctacttgacatgatcctaccttgtcagacaagctagtcaagatttggaaaaggcaactacatttcaatcctttgaaaatctacataatcctaagcacagacttatcaggattggtaatgggtcaagtttagggacacgttacaattacaatgtaatttttggctgtagttgatcagcaagtttacatccatatattcatccaagttgctcttcctcaaaaaaattaatatgttgacatttctacctgcaagatttgtgattcatgttttaattattacaattttcatataacatgttttagaatacctgatattgtgggtgatctcaatttcttcctgggtgatctttcctggtttaatatttgtatgattccaatgataaatctcagataatataaatagcaaaaaattaaaatactgagaaaataatatacaacttattaggggagaaagaggaagagatgctcccttagtggcacacagaaggtgggatgcctggtctgctttttctatatttttgcatatttggggttcagaaaactgaaacccatagagtcaccatatgctacatacactgaacctaaagtaataagtagttctgaaagagaacagaggagaagagggactccctacagggataaatggtccagacttaaggtatggcttatttatgctttcaacaccccagggactacaatcccagctgaccaattaaacttcgagagtttcagtggagatttaaggtcctgggattacttctggaaaaaaattaaaaagcttaccgtgcaattggcccaatactcaaaccaaaatctaatggacagaaaatatacaatttacaaacttgtgctttttttaaatgttaattaaaaatatgtttattaaacccacagatttttttagttggaaattttaaaattaaatttgattaatgaaaaaataaaatataaggaaaaatgacatttggaagcaaaatgaagaatttcagaagaaagaaaacattcaactaaatgatcttttgaacatattgaattcagtttgctagtgttgagaatctttacatccatgatcataaaataaattggcctgtaattttcttataccgtccttgtctgacattggtgttagggtaatgcatgaaaaaatgtgttggaaagtgcaccctttttaattgtttggaaaagtttgagaatagcattaatctgtctttagatatttggtagcaatcaccagtaaaagcatcaagtcctgaacttttaagtttattattattattattggtgatttaatctctgtactagttattaatttgttcaggtttattctttcttcaggacatacatgtctaagaatttatccatttcttctacgttactcaatttattgacataattggtcatgataatctcttatgaccctttgtattttggtagtattgactaatttctcctgctttacttatagttttatttgagtcatctctcttagttttcttggtttgtctacctaaaggtttgccaattttcctcacgtttttacagaaccaactcctcgtgttactgatcttttcttttgtctttcttatctgtttaattctgctctaacctttataactttcttctttcttctaacttttggcttttttcttcttttctaattcccagagtgccaagttaggttgcttatttgggatcatttctctctctgtctcagtagctatcagaactacttttgctgtaccccatgatttggtatgttatttgtccatttttgtttgtctcaggatatttttaaattgtctttatttttsggtccatttgttgtttatgagtgttgagagtggggtattataatcccctactattatcatattgctgtttatttcttttttgtgttctgctcatgtctgctccatccattttggtgttccaatgtttcctgggcctatattgaggcaccctaactaataacactttgcacatcaattcatctcatttctcacaaaagcaaacagaacaaaactgttcaaacatacataagggagtcctagttgctgatacaaacttttagatagtcttccaatctttttatcctactttaattctccaatgatataataaacatccaagacaaaaaaaatgaaaaaagcacaaatgattccttcactgaaatcaggagacaaaggcaatccatcaactataaattacatgtaaggaaggggaagaaagtcacggacactcatcagaattggtacagaaactccatattggaagcaggaagtccggcagagaagagacccagtcaaggtcactggtggtggtaatgataaaaaataccaggaaatattattccccaagaaggagagggtcctctcacaagtgtaaactgctatacccaagcctgatgaacacggagccaggtagcaatctgaggattattgaagagatagatgcagggagtatacctgggaaagaagtggtggagata

SEQ ID NO: 678400 - DNA, 1216 bp, Homo sapiens
ctgccacatggatgaaccctgaaaatgaagtgaagtaagtataaaggcaaatattgtatgattctactcatttgaggtaccctgttggaggccgaaagagtgagggtcgtgatcaactgagtaccccactggaggctgggtgagtaagcagcaaaactgcttctcataaatgcagaatgttggcaaactgacaaactgcgtttgccacacagaggttatgctgagggcggtcacgccccaggcacaagtgtttcttgttattaggtacgtctgaaagtctgatagcaatgatgtgaacctgtaatcaatcaagtagctgaccaattgtgacatcctcctccctgctctttctacccaataaatacggagggctgagaagctcgggcggctgcctttactgactagcagctgggatctctcttcttcccctaagcgagcctttccttaaaaccattttcttctgtcttttgttactatttctacgttcatttcttcattcagtcctgtaatgatggtctcaagtagtaattgtacaagtctgtcacaagtggtgcctgaacaggggcatctagggacaagtatagacctgaagaggcctggagggataaatagattagcagggatagagagaaagagtataggtagggaaagacaggaacttgcaggaactaacagggaccatggggacagatagggatagataaagactagcagagaccagcagaaacttgcagggacagacagggtcctatagagacttgaacgaggaaggtctgctggaacagaarctaaaactagccagacaaacgagaagccccattacaagtctgccagcagcaacataaggctagtgctctaaaaaggtacttgtcagtgccccagaggtttgaagaacgggaagtttttgaatcagggtagcatggggaagaatttggttatttttttctttcatttggagtttggtacataccttttctgttatttcagggccggagagactattttgccccacttagagcacctatcaaaagtggtaaacgagggagaatgaaaactggctggcagcatcttttgtggctacagaaatgctcactttgactatggcttatgaggctacaaatgtggattgggaacgtgcagtggcacctgtgaggtgtgcagaaagttcaggaggttttcttagtttttcaagatgtgggaactgagcttcactact

SEQ ID NO: 678401 - DNA, 646 bp, Homo sapiens
cagaagagcatgaactgaggaagactgacaccaccaggatgtgagggatgcaggtggaaaaggcctttgttctgtctgctcctcttggaaacccgagcacggtcgaaaagatgtgaatgtaagacctgatgataaagatgaaacagccgccacctacccccagagcagagacaacaatcatgacctcattgctgaaggtgtcagarcaagagagcttcagcagagaggggatgtcacagaagaattgatgaataacgttggaccgacagaagggcagctggaatgtgctgccagtgtgcatgcctgcatagacaagaccactgagtagggaggccagtgtcatctggatgcagattcgagagttcacgatcacagggtagtgaagtggctggcagacagccacatagcggtcatgagccataatggtgagaaacagaagctccacatatacaaaaaaaaccacgaggaagacctgagctacacatcccgccttagaaatggtggtgctgtccagtagggaattgacacatgaggtagggactgtaacagaaatgtagcaggcatccaagatagacagattcctgaggaagaagtacatgggcatgtgaaggctgctgtcacaggtggtgacggtcacaatgaggat

SEQ ID NO: 678402 - DNA, 2464 bp, Homo sapiens
ggtaaatacagtatgtgtccaaaatatttttaagcaggacaaattatcacatggaaggttcagcagaaccttcactgtaraagagggagacaggaggcttgggctgtatcactcccacttaccagccatgtaaagttggcaacattcttcacccaaggaaaattccctccatctgtaaaagcagaatcatggtgtgtactactgtgatcaatttaaacaatatgggctcattcagtgacgtagtccttgattcactgattgttcaatcaatatatacacctaatgctgctatcacaggagttttgtgaataaatgaaacagaataagtgcctaaatctcatgaaatttaaattttattagaaaagactgacactgaactgttaaacatgtgagaaagaataaaatattccagaaagttttaagtgctttgacaaaaactcacaaggtaatatgctggatgagaaagggtgtgtgtggctgagggaagaacgggagttgattagttaagtggaagtgcttggaagccagcaaactgctatgaaaatataacacatattgtcactctcattccaaactaaggttttctgtttgctttatgtaaagagaagcacactgtgtatctgttgagttgatttaataaattatactaaacttggtatttccaaaccaaataataatttgcacttttgctactctgacttgacttctccacacattagtttgagagactgaattatgaagctagaataaaacttaaaacactggttgacataataatctaaccctgagagaactaagattatgacaacaaataatgcttttaaaatttgattaatttttagtctaaaattttattattctaaagatttttcttcttgctagtaaaagtctgaattggcaaatctgaagacttatgctgatagatatatcaatcgattgattgttagacagataatagatagacagatagatgatagatagatagacagatagacagatacataaaattacaagggaatcccttgtaatatcaattagtataccttaaagttttgatactctgcaagtatttttttaagttttaactggaacactttcgaatgaagccacaatttgttttattgaaacattaccactataactatactgcttataaatctctgcatttatagaaaataaccttatattcctttcatttaagagctaaagagttgttatgactaggaaagttactacaaccggcccccattgaaagaagaggtgtagactgagcacacccagtatatggaaatccatgattagagaagaaagcctagtatatggaattcagtaacatttattaagattgaatattgtgttgctatttgcatatatacaaacatttgtgcctgtattttgaataaattataattttgctctacatgtataattcttatatcccagatttaagcaacctagctatttttctccataggagcaatatttattgataatcaaaataaagaaatagagtttgcacttcaaagttttatgaatgttgtagtcattcaccatcagtaaacagtttgttttttaaataattgatctaaacaaatcacattagttttgtcaaaatagatcactcgacctggtaagaagtacttatatttctgtgcttttatatgtagatgtttgaagtcttctgaaaatggacttctgctagcacaaccttaaatctctgtaaatatattaaagttggtaaaatgctacacattaccacaagttgaagtctttaaacatttgaaatattttatttcttctattttgttatttatgatataaactctggtttaaactttattttgttgattaaagggtcaattcgtcaataagatataacaattgtaaatgtttatgcacctaacatcagagcacctaaatatgtaaaacaaatattaaaggatttaaaggaagatctagactgcagtacaataataataggggccttaaacttgactttctatgtggcaacataacatacttccaagagtagaaaactgtggactaaaaaacagggtttgcttcttgcctaaaccacttactagctctctaaattattctcaataatcttaaccatcaaacatgatggtgatacaggtcttaaaaatttactatatataaacatttccaaaactatcatacaattaaaatggtaggtactgtgaagaaaattcttcaacttattgctcatgtagtatggtaggtatttccttataaattacaattcttacctcaaattaacaaaatgatcaaattatatatttgaaaatttcatttcctacattcatttacaacttaaatactctaggtaaacaaatttgtccatatagataatatttttatctttctcttaaaaaaaccctaaagtagtgattttgaccaagtggaatgattgaatgaatgttctccacatggccactaaata

SEQ ID NO: 678403 - DNA, 2379 bp, Homo sapiens
acaccagcaacagctgaactgtgtgtatctattcccagctccacacccagtcatgcggtcagttatggtgggagtatttaccccatggatgtcaatgaatgcaaagcagggctccctgtccacagagccggctgttaaatatttgccagcccaccactgttccaaccacactcaccgtgtgtgcatgcacacacatatacacaccccatatatactccataccatacactcacacacagccagaaatcccagtgggaatcatccccagagatcaggaagtccagcttccctccatcacaaggatccccttccaagcagtcggccccagtcccatccactccttatcccctccctggggagccccacatgctgctccatcaagagctctccaccctgcctttggtgtctcagaagggcttggactctcgattcacgcaggtcacaagctctctacccctcaattcccctcttctgtaccttgaggatgaaacgtgatgctgtccttgagagtgcagcatgataagtgcttcataaatatgaaaatgtgccctacgagctccacccttccaagccccgcagggcatcaggctcccccagcccgaaggtccagaacacaccaactctgtgcccaccagcatcccacacagatctgaccattcccaacttgcccctgtcctttcttcccacagtggtcaaaatgcgcatcaaggagatcaagatagagaatggggaccggaagctgattggagcccagaaaaagaagaagctgctcaagccgggccccctgaagcgcaaggacaccaagcggctggtgctgcacatgaagaatggcgcgggctgcccctgcccacagctggacagcctggcgggcagcttcctggtcatgggccgcaaagtggatggacagctgctgctcatggccgtctaccgctgggacaagaagaataaggagatgaagtttgcagtcaaattcatgttctcctacccctgctccctctactaccctttcttctacggggcggcagagccccactgaagggcactcctccttgccctgccagctgtgccttgcttgccctctggccccgccccaacttccaggctgacccggccctactggagggtgttttcacgaatgttgttactggcacaaggcctaagggatgggcacggagcccaggctgtcctttttgacccaggggtcctggggtccctgggatgttgggcttcctctctcaggagcagggcttcttcatctgggtgaagacctcagggtctcagaaagtaggcaggggaggagagggtaagggaaaggtggaggggctcagggcaccctgaggcggaggtttcagagtagaaggtggtgtcagctccagctcccctctgtcggtggtggggcctcaccttgaagagggaagtctcaatattaggctaagctatttgggaaagttctccccaccgcccctgtacgcgtcatcctagccccccttaggaaaggagttagggtctcagtgcctccagccacaccccctgccttccccagcttgcccatttccctgccccaaggcccagagctccccccagactggagagcaagcccagcccagcctcggcatagacccccttctggtccgcccgyggctcgattcccgggattcattcctcagcctctgcttctcccttttatcccaataagttattgctactgctgtgaggccataggtactagacaaccaatacatgcaggttgggttttctaatttttttaactttttaattaaatcaaagaaaacaataactggtttggaccaggtggtttctttgtcagctggttcccaagaggtggggggagagggaggtttagaatggagcttcaaaaagaagcccttatcttaacccatggcctggccacatagacctccttggaatgcctaagaaaagcaaggcctgtgtttttgtagtacatagcaagggtcaccctgtcattctgaccgctaagtgagggatggagatggccgttcttttgtccctgaggaggaatggaggtgccaagttcccagcttctcccacagtcagaagactcccatggtcctgcagcagctccccgaggaggtcagggcctgatcagaggagtccaagaaggtggggccacagggaactatcgtgaaaagcctgaggccgaagacgtgtcactcctccccttcggctttcacacaccgcgggcactgctccttacctgtccctggtccagcagcatgagcatcacctgggagctggttagaaagacagcatctggccgggggtgcggtcgctcatgcccataattccagcagcttgggaggctgaagcgggaggatcccttaagcccaggagttcaag

SEQ ID NO: 678404 - DNA, 660 bp, Homo sapiens
gccctcaccaactcaaggtacccgagagcacacagggctgggatctgtggctcctgaggtcttagcgcacctgattkccccggaagacggacagcggctgagccatggactctccatgggacaagatgaggtccagcatcccgtctccgtcgaagtcggtcaccacaccccctacaaacaatgcagatttcacctctggccgtaatccaggagacccacaaaggagacacgctcccaaccaagtgcagtatccacagccctgggcgtgggagccagagaaagcacagcaccggggcaggaaggctggggcttggcacccatctcctatccttcctaacagcagcctcatgataggactcacgggacagacatttccttccttcccctggtctttgcatggagagggtgtgtgcaaattactcagaccacatggtcttctttctggtctttctattatggtttgaataatacacacctgttatatttgcacaggttttttttttgtcaatttaccaagtgtttgcatatacataggctccttttggtcgtcattacaacccaaagaggtgaagagggcagatataattatccccattttatgaatgtggagaacaagacccagagggtaaagtcacttttccaagaccacaaagtgaggca

SEQ ID NO: 678405 - DNA, 617 bp, Homo sapiens
gggacacaactaccttcaaccaaccttccttgtccttcaagtggcccctgggtttcctagttctggatgctacccagggtttaaccccactcaatgctacctcctccatgccctcttggaccatcctgctggaagcaatcccttctttcttcatgggctttattactttctgcctgtgttacagctctgtataaatgcatctgatctcccctggtagaatgtgagctctctgcaggctgggaccttgcattgttcatctttgcttctcttgcagtatctaacacagtgcttggctctcagaaagctccaagcacatgtctgcaggatacaaaggtgaattccagaggcaaagagaggaaaggggtccctttgggttgcagcggttctgtttggaactctgaatcttgatgttatttatttcagaaacgtctgctagaaaagtcctgctctttctctgcactcagctgatgatggcagtgagctttcctctagaatttttctcacttggtgtattctcacagccttgggtgctctgccctagatgtgtggggcaatgatgggaaggtagggygtaaggaagaattggcatcgcacttcctaccacattgcaggttgca

SEQ ID NO: 678406 - DNA, 617 bp, Homo sapiens
tggaattgtctccccacttaccctcccatgagtattttctggctcaatctaatcacctaggtggtggaattgcggtaactctgagtgtgtgtatgtgtgcatacgtgtgtgtgtgtgtgtgtgtgtgtgtgtgtgtgtgtgwgacagaatttggaggcaaggaggaggcccgtttttatcacactagtcaactcactttacgttcagggatctatttgtctttaagcagagggagaggtatttttccttaaaatcacttgaggcagctggctgaggccagattccgacagaatctgatgggggacggggcctaaaatagccttcagctcctccccaccctctatcttgcaggcagagaggagtcggggcccagttctttcccaagccctctcctccaccagctgaccccagaaatactttatttagaaaatcaatctgaaagcaacaggaaggactttcattcctaccagcaccttgtcacacatcaatttcatttaaggctctacaattccacagctgtgaggcgcaggcaaagtccttagcctggccaagactcaagctcctcatctgtaaactcccaggactgaccgttaagtggcaaacatgatgcatgtggc

SEQ ID NO: 678407 - DNA, 617 bp, Homo sapiens
tggaattgtctccccacttaccctcccatgagtattttctggctcaatctaatcacctaggtggtggaattgcggtaactctgagtgtgtgtatgtgtgcatacgtgtgtgtgtgtgtgtgtgtgtgtgtgtgtgtgtgtgtgacagaatttggaggcaaggaggaggcccgtttttatcacactagtcaactcactttacgttcagggatctatttgtctttaagcagagggagaggtatttttccttaaaatcacttgaggcagctggctgaggccagattccgacagaatctgatgggggacggggcctaaaatagccttcagctcctccccaccctctatcttgcaggcagagaggagtcggggcccagttctttcccaagccctctcctccaccagctgacyccagaaatactttatttagaaaatcaatctgaaagcaacaggaaggactttcattcctaccagcaccttgtcacacatcaatttcatttaaggctctacaattccacagctgtgaggcgcaggcaaagtccttagcctggccaagactcaagctcctcatctgtaaactcccaggactgaccgttaagtggcaaacatgatgcatgtggc

SEQ ID NO: 678408 - DNA, 663 bp, Homo sapiens
tgagctcccttgacattgtaaggtcactgcaaccaagggttcattaccacattgtgaagagtcagcttcaatgtataagctgctgtccagagaaacctaaagaaactaaagaaagcagaccartcattaattgtatgtgtcgtattagtttgctagggctaccataacaaaatactatagactgggtggcttaagccacagaaatctctcacggttctggaggctagaagtctgagaccaaggtgctggcaaggttggtttcttctgagccctttcttcttggcttgcagatggctgccttctcactgttctcacctggtctttcctccatgtgcaagtacctcaggtgtctcccagtgtgtcctaattcctctgtttataagggtaccagtcaggttagattagggcccaccctcacggcctcattttaactattacctctttaaaggcactgtttccaaatacagtcacattctgaggtactggaagttaaggtattaacatatgaatgtgggggacggggcacaatttagcccataacatatgttgcagtgagtggaagagcatccttctaccccctgctaatagctctgtgcacttggaacttcagaatgtgaccttatttggaataaaggagctaaatgatttgaacacagggataca

SEQ ID NO: 678409 - DNA, 613 bp, Homo sapiens
tttcttcttttccagaaacacctttaacaacagttattggtaaatctctactttgaagcccttacttttccatttaccccatttaaagcagtagctagctcagtttagcagaaaaggcctgggctttgaagccaggaagacctgactctatatgaccttgagcaagttaatttacttgcctaagggtaatttcccacctataagacgctaagaactctacctccctttgaagatgagcatgaacattagataatataaataaaatatctggtacatgcttaagaatcaataactagtagctataataattagtggctataatgtttctcattcaatgttccatgtggctcactacggttataaaagaatttccgttttccatgaaataaaatgcagaaacatgtsatatataccctgtgggtttcccccaccttttaagccccactatcaattcctcttggtaacattttaaaatgtgatttctactctttaacttcaccacttgctatggtcaccatggatcctcccaaatcaacagcagagtcctcattctttaagaccttttagagactggcattcatactggcagctggccatcttagtcctgtggaca

SEQ ID NO: 678410 - DNA, 657 bp, Homo sapiens
aaaattaaaatgtggccttagaatatcaagtattgttaaatcaccggccgggcgcggtggctcacgcctgtaatcccagcactttgggaggccgaggcgggcggatcacgaggtcaggagatcgagaccatcccggctaaaacggtgaaaccccgtctctactaaaaatacaaaaaattagccgggcgtagtggygggcgcctgtagtcccagctacttgggaggctgaggcaggagaatggcgtgaacccgggaggcggagcttgcagtgagccgagatcccgccactgcactccagcctgggcgacagagcgagactccgtctcaaaaaaaaagaatatcaagtattgttaaatcaccttcaaacatgaaattgggaggtaatgaactcaagtttggggaaatatgttccatctttatttttactaacttctaactgaaacttagcatcactgtcaattaggaacatagcagaaaaaaacctggttaatatcagcagaacctctttgtcacctgcagaaatcaaaaacatttccacatcacattgtagtagctgcagatcttaaaataccatttatgctagccaatattttgaagtcacagtagctactagatttgatactgatgattaatatataaataaaaacacataatgat

SEQ ID NO: 678411 - DNA, 657 bp, Homo sapiens
aaaattaaaatgtggccttagaatatcaagtattgttaaatcaccggccgggcgcggtggctcacgcctgtaatcccagcactttgggaggccgaggcgggcggatcacgaggtcaggagatcgagaccatcccggctaaaacggtgaaaccccgtctctactaaaaatacaaaaaattagccgggcgtagtggcgggcgcctgtagtcccagctacttgggaggctgaggcaggagaatggcgtgaacccgggaggcggagcttgcagtgagccgagatcccgccactgcactccagcctgggcgacagagcgagactccgtctcaaaaaaaragaatatcaagtattgttaaatcaccttcaaacatgaaattgggaggtaatgaactcaagtttggggaaatatgttccatctttatttttactaacttctaactgaaacttagcatcactgtcaattaggaacatagcagaaaaaaacctggttaatatcagcagaacctctttgtcacctgcagaaatcaaaaacatttccacatcacattgtagtagctgcagatcttaaaataccatttatgctagccaatattttgaagtcacagtagctactagatttgatactgatgattaatatataaataaaaacacataatgat

SEQ ID NO: 678412 - DNA, 407 bp, Homo sapiens
gaatgtttaagtgctgttatccaccgcgtgctgagctctgccaaggaccaccttataccagctgaaggtgtcaggctcttatattttrtggtagatagttgttcccttcatggagtttaaagtatcgtggaggagtgtacgttcccaggaaatgaaatcatttcgccaaattcacttgactgtcatcattaatgttggttgctgtccctgcagcagctttctttcaaagttgatttatcaagaagagtccataggttgagaaaagggataaaataattcatatcatgagggcctgaagtagtaggaagtcagatggcaatgaaggaagccaaaaagggctccccacctgggtctagtatctgtccatgacagagactaaagtccaagcctctgtcacaccccagtgc

SEQ ID NO: 678413 - DNA, 1592 bp, Homo sapiens
tggaaaaaaatcataaattacccagaacctgggaaagagggttttaaccttgttatatgacataagtcacctaataggaaatgagcattttaaaagatgccaacaaaaagctgataatcctgagtctctggtccaactgattccccgttagattcacactcttatccccattaatggttacataggtaaacatatgtactcagtctctttctttggtattttttgagagagaagtcatttaagtgaatatgtattcaacaaacctttcatgagaatcttttggaggcgaggcattgtactaggcactttgagggatgcagctccttaagtacaatattgtccctactagcgaggtaagaaacataaagaaagcaacataaaaatggcattaggccttgtgagaagtataggagcacgcttttggaggtcagagaaaaagaaggtcacatttgcctgagctgcgttagaaaagattgggtgttgaagccaaatctcctggtaaaatgtgcaagaaatccatcttacttgcaatgtagggacaaaataggatggcttccattatcttttaaaataatttggagatttaaaatgtatacatatcttcaatcctaactttcatatctttagttttccagtatgagattaagataaatatgtgcatgaatggcacttatcctcaaagtctttatcccacaggctaatgggcagagtcttggtatgttaataatgcttctgaagaaagagcagaaatgtagctgaacatgagaatgtttgagttacttattcaaagatatgctaaatttaacctcaaagaaatcactttagtggtatctctgaatgtcttctaaaataagatcaatttccctctgtctgggatattttagatatggccttgcttaatggtgaaagagtagacaagaagctgaactattagtgtttcttccatttccaagactctctgatgaccctctcagccaataaagtacaagcaagtggggctgagaaacaattaattgccctgttgaactcatgctgtaagagaagttgtgcaatgtccggggacacattcagtgaatactttagaccaaatactgtgctaagcagagggcctggaaaggtgaatcttatacagtccccatgacagcactcagctcagtggggcaacagtgaacatgcatctcctacattaccatcaatcaatatataacataataagtgcacaaaaaaagtgaaaacaagtactatggggtagataattctccaggatagcctgcacagaatgatctcatttgataacataaaccccaaagttagaaaaatgcaagaataaaaacaccaaacatatacaaggggargaaagctgtgcccatattgtcctgtttattagaaagaatgaagattatttattcactcacagtctagaaagaagagctttgcattgtctttctggtagttactttcatggagccattcagacctacccagcctcatgtatgatcaggatgggccttattttcaagtggaatcttgaggttttgtgaggaagtgttctacagccagcctttctgacccactaggctctttcatactgt

SEQ ID NO: 678414 - DNA, 606 bp, Homo sapiens
tagtttttgtagagacagtagctcactttgtcacccagggtggtgttgaactcctggcttcaaatgatcctcctgcctcagcctccttaagtgctgggattataggcataagcctctgcacccgaccagaagaatttctatatgaggtgtttccacttccagaacttcccttcctgtcttcaggaaagtagtatgggttctgagtcatgccttagacagaaatgcggtatgctgaggaggraagaggagttagagaaagtgataatgcttttcctttcccctaaggatgcaaaaagaattcctaattgcagttttctatatgcatattatacttcaatacaaagttattcaaaaatctcttgtctggcctgtattctgtctagctcatgcacagtcactgttaggcatagctgacatccaccctccatcaagcactgaataggggttatacctgtgtgtatgatcaaatccattagatggaagagattgaggtcagtgatcttggcttctggcattcagaatcaatggatctgtttggtgcttctttcctttgaagaaagaaatctttccattcataccctactcctttttttgcaattgcatggg

SEQ ID NO: 678415 - DNA, 606 bp, Homo sapiens
tagtttttgtagagacagtagctcactttgtcacccagggtggtgttgaactcctggcttcaaatgatcctcctgcctcagcctccttaagtgctgggattataggcataagcctctgcacccgaccagaagaatttctatatgaggtgtttccacttccagaacttcccttcctgtcttcaggaaagtagtatgggttctgagtcatgccttagacagaaatgcggtatgctgaggaggaaagaggagttagagaaagtgataatgcttttcctttcccctaaggatgcaaaaagaattcctaattgcagttttctatatgcatattatacttcaatacaaagttattcaaaaatctcttgtctggcctgtattctgtctagctcatgcacagtcactgttaggcatagctgacatccaccctccatcaagcactgaataggggttatacctgtgtgtatgatcaaatccattagatggaagagattgaggtcagtgatcttggcttctggcattcagaatcaatggatctgtttggtgcttctttcctttgaagaaagaaayctttccattcataccctactcctttttttgcaattgcatggg

SEQ ID NO: 678416 - DNA, 569 bp, Homo sapiens
ccaagacaccatttattatgttcctgacttaaaaagatatttataggatcatatatatgtayacacatatgcatgcacatgagtatgaatgttttagttttatattgctgctataaaaaactaccacgaatttaaaggtttccaaaaacgtacctttataattttacagttttatagtcaagaagtacagtagcatccttaattccatcttcaaagtctcttttgcatggcaggtaacatattcacacaagtaacatgaggtgaaggccaaggagataaaatcctaccttccttggcagatgaatcttgatctcttttatacataatgaaaacacctttaattaattcaactataaaatcaatagtttaattaatttttgagtatgtcagtagacttcataatgttatatgtaggtacatccagattaaaataacacacacacacacacacacacacaaaaccacctgatattgttagtgtaagcctttatttcataaaacaaattttattatttttaaaacagtgatataaattcatcaataagtagttgcaattaaatctaatttta

SEQ ID NO: 678417 - DNA, 569 bp, Homo sapiens
ccaagacaccatttattatgttcctgacttaaaaagatatttataggatcatatatatgtatacacatatgcatgcacatgagtatgaatgttttagttttatattgctgctataaaaaactaccacgaatttaaaggtttccaaaaacgtacctttataattttacagttttatagkcaagaagtacagtagcatccttaattccatcttcaaagtctcttttgcatggcaggtaacatattcacacaagtaacatgaggtgaaggccaaggagataaaatcctaccttccttggcagatgaatcttgatctcttttatacataatgaaaacacctttaattaattcaactataaaatcaatagtttaattaatttttgagtatgtcagtagacttcataatgttatatgtaggtacatccagattaaaataacacacacacacacacacacacacaaaaccacctgatattgttagtgtaagcctttatttcataaaacaaattttattatttttaaaacagtgatataaattcatcaataagtagttgcaattaaatctaatttta

SEQ ID NO: 678418 - DNA, 569 bp, Homo sapiens
ccaagacaccatttattatgttcctgacttaaaaagatatttataggatcatatatatgtatacacatatgcatgcacatgagtatgaatgttttagttttatattgctgctataaaaaactaccacgaatttaaaggtttccaaaaacgtacctttataattttacagttttatagtcaagaagtacagtagcatccttaattccatcttcaaagtctcttttgcatggcaggtaacatattcacacaagtaacatgaggtgaaggccaaggagataaaatcctaccttccttggcagatgaatcttgatctcttttatacataatgaaaacacctttaattaattcaactataaaatcaatagtttaattaatttttgagtatgtcagtagacttcataatgttatatgtaggtmcatccagattaaaataacacacacacacacacacacacacaaaaccacctgatattgttagtgtaagcctttatttcataaaacaaattttattatttttaaaacagtgatataaattcatcaataagtagttgcaattaaatctaatttta

SEQ ID NO: 678419 - DNA, 1391 bp, Homo sapiens
gagtgtctttccagatgataagtcctttgacttaggacattgaaggtgatctagtggcttattggaaatgtgtaggggtctaagcactttaccactctatgtatggaagcactgcagagcgacaaccataaacatcttatgttggtgggggtttattgttatttctagaaaatgaacagtatttgttgctgacctcccagaatacatttttgacaaagttaaaggaagaatgctgtacattagccaagaaactggaacaaatctctcaaaaaaccaggtaggtgatgttatagaatactttcaagagcactgtttgtgtgattactctaatttttccttaaaaaacatcatttgcactgttttatagtctaatgtcaaaattaggtatctgctgatgatttctttgaaaatattttctacatatggacattttcttaattgtctatacgcttttatgttttttcatggttatgtgtatgtactattatttgacatttcaatgtttagaattgaaaactgtgaaatttcaggaaagaaggatcaatatggtaataacataaacatgcagataaatcaagcagttataaaatcttacataggtatggttaacacattttaatctattgttacaattcaccatgaacacaaaagctgtctttaggttaaatgataacagatgaaatgtgtatatataaaaatgaaagtagatggtactttgaaataaataaaccaaaactattcttcccttctcctaaaattgttatattttaatagaacagccatcattcattttatagcatactactcttttataaatccattgattggaatcttaatgacttttttctatacactttctagtcagattatctcaatgaataaattatttcatattctaaactgcaagaagcccgactccccatctcagctccgacagtaactgaataatcttggacaaatgtatttgacctacttggactatagtttcttcttttgtaaatgaaagacattggacagaatcactttaaattgaactatagaaggcaatattcacataactgataagatgtcaaatactactttatatgataactcaatgaaaaaattgcctgtgtgtcwtcttttctgcatttttctgaaactcacatagatctattgagagcaggaaatatggctcagcaaacaaactactgacctagatgtttcattcgggaaggatttctgggagtatcagggcatatctgatcactctgagctccatcttggaatcctgcatcaacaagctgtcttagctgatagaacccccatccctgaatcttttggggaatcagagggctcgtgcatccaactctccctgctcaccaggaaggcagaggctcctgtaaccacca

SEQ ID NO: 678420 - DNA, 1391 bp, Homo sapiens
gagtgtctttccagatgataagtcctttgacttaggacattgaaggtgatctagtggcttattggaaatgtgtaggggtctaagcactttaccactctatgtatggaagcactgcagagcgacaaccataaacatcttatgttggtgggggtttattgttatttctagaaaatgaacagtatttgttgctgacctcccagaatacatttttgacaaagttaaaggaagaatgctgtacattagccaagaaactggaacaaatctctcaaaaaaccaggtaggtgatgttatagaatactttcaagagcactgtttgtgtgattactctaatttttccttaaaaaacatcatttgcactgttttatagtctaatgtcaaaattaggtatctgctgatgatttctttgaaaatattttctacatatggacattttcttaattgtctatacgcttttatgttttttcatggttatgtgtatgtactattatttgacatttcaatgtttagaattgaaaactgtgaaatttcaggaaagaaggatcaatatggtaataacataaacatgcagataaatcaagcagttataaaatcttacataggtatggttaacacattttaatctattgttacaattcaccatgaacacaaaagctgtctttaggttaaatgataacagatgaaatgtgtatatataaaaatgaaagtagatggtactttgaaataaataaaccaaaactattcttcccttctcctaaaattgttatattttaatagaacagccatcattcattttatagcatactactcttttataaatccattgattggaatcttaatgacttttttctatacactttctagtcagattatctcaatgaataaattatttcatattctaaactgcaagaagcccgactccccatctcagctccgacagtaactgaataatcttggacaaatgtatttgacctacttggactatagtttcttcttttgtaaatgaaagacattggacagaatcactttaaattgaactatagaaggcaatattcacataactgataagatgtcaaatactactttatatgataactcaatgaaaaaattgcctgtgtgtcttctyttctgcatttttctgaaactcacatagatctattgagagcaggaaatatggctcagcaaacaaactactgacctagatgtttcattcgggaaggatttctgggagtatcagggcatatctgatcactctgagctccatcttggaatcctgcatcaacaagctgtcttagctgatagaacccccatccctgaatcttttggggaatcagagggctcgtgcatccaactctccctgctcaccaggaaggcagaggctcctgtaaccacca

SEQ ID NO: 678421 - DNA, 1391 bp, Homo sapiens
gagtgtctttccagatgataagtcctttgacttaggacattgaaggtgatctagtggcttattggaaatgtgtaggggtctaagcactttaccactctatgtatggaagcactgcagagcgacaaccataaacatcttatgttggtgggggtttattgttatttctagaaaatgaacagtatttgttgctgacctcccagaatacatttttgacaaagttaaaggaagaatgctgtacattagccaagaaactggaacaaatctctcaaaaaaccaggtaggtgatgttatagaatactttcaagagcactgtttgtgtgattactctaatttttccttaaaaaacatcatttgcactgttttatagtctaatgtcaaaattaggtatctgctgatgatttctttgaaaatattttctacatatggacattttcttaattgtctatacgcttttatgttttttcatggttatgtgtatgtactattatttgacatttcaatgtttagaattgaaaactgtgaaatttcaggaaagaaggatcaatatggtaataacataaacatgcagataaatcaagcagttataaaatcttacataggtatggttaacacattttaatctattgttacaattcaccatgaacacaaaagctgtctttaggttaaatgataacagatgaaatgtgtatatataaaaatgaaagtagatggtactttgaaataaataaaccaaaactattcttcccttctcctaaaattgttatattttaatagaacagccatcattcattttatagcatactactcttttataaatccattgattggaatcttaatgacttttttctatacactttctagtcagattatctcaatgaataaattatttcatattctaaactgcaagaagcccgactccccatctcagctccgacagtaactgaataatcttggacaaatgtatttgacctacttggactatagtttcttcttttgtaaatgaaagacattggacagaatcactttaaattgaactatagaaggcaatattcacataactgataagatgtcaaatactactttatatgataactcaatgaaaaaattgcctgtgtgtcttcttttctgcatttttctgaaactcacatagatctattgagagcaggaaatatggctcagcaaacaaactactgacctagatgtttcattcggraaggatttctgggagtatcagggcatatctgatcactctgagctccatcttggaatcctgcatcaacaagctgtcttagctgatagaacccccatccctgaatcttttggggaatcagagggctcgtgcatccaactctccctgctcaccaggaaggcagaggctcctgtaaccacca

SEQ ID NO: 678422 - DNA, 612 bp, Homo sapiens
tcagtttacttctttgtagctgctttgtagctccatgggctaattccttaatcttaaacttcatcttcctcactttcttgatctccaaaatgctaccttgtaggttgtgaaaactgcctaaartaatccacaaaaaggtctttagaatagttcctggcacaacgttagtgcttaacaaatgtttcacattgctattcattcatatccttcattcaacatatttattaggcccttaatacatgctgagctctgttctggattctgggattgcagcaggaacttcagagacttagattctaaatggttgtttatttatattataggttaaattgactcttgtgagttagtctgtgaaccaaaataccatgtttacataatgttatttctaaggcaaaatgccttttgaattttcaacaactgatttatggaacgacattttggaccacgacttgggatatgcctatgatgttctaagtgtttgtgaacatgtgaatgtgtgtgtgtgtgtgtgtcctctattcgatggtgaaaattttcagtatgagccccaagtaaaatttcaagagggatatatctatctagttgcttctttacaatcgtattttcagcata

SEQ ID NO: 678423 - DNA, 574 bp, Homo sapiens
gaacagcatagaggaaaccgcccccatgatccaatcacctcctgctgggctcctccttcgactcatggggattatgaaaattataatttgagatgagatttgggtgaggacacagagcaaaaccatatcaccaatctatccaaaccacgaatctaccaatactacttcctatgtcttgatacttttgatttctccaagatattatcaattccctggattactaaaaaatcaatgtattctagctggtcttggccgtcttccttttaccctagttcctataccacagagatctagagattaaacataaatcttactatcggctgggtgcggtggctcacacctgtaatccttgcactttgggaggccaaggcaggtggatcacgaggtcaggagttcaagatctccctggccaacatggtgaaaccccgtctctactaaaaatacaaaaattcgctgggcrtggtggcacgtgcctgtagtcccagctactcgagaggctgagacaggagaatcgctggaacccaaaaggcgagggttgcagtgagccaagatcccaacacagcagtccagcctg

SEQ ID NO: 678424 - DNA, 582 bp, Homo sapiens
tcctagctcactgcagccttgacctcccaggcacatgccaccacacctgggtaatttttcttatgttttatagagatggggtcttgctgtgttgcccaggctggtcttgaactcctggcctcaagcaatcctcctgtcttgtcctgccagtgttgggatttcaggcatgagccaccacacccagctgagattaacattttgctgtatttccttataagctttcgctatgtgtatatagatatatttttaaaatatatcttgggttyaggtttctatcatttgtcaccttgaaagtttgtgttatgacacttttctcaatctaaaatttattttcgccaacccccattgttaaacgcttaggttttcatttttggtactattcttaataatgcagcactcactaaacttttatataaatttgtgacccagtctctgataatttctttagaacttcattttattttaatcctgagatgggctaataaatcaggaaagcacaaaatgccattactttggtttttacaaatacttaacctagaaaccttttttctttgaaattcatcccacaaagtattgagattg

SEQ ID NO: 678425 - DNA, 582 bp, Homo sapiens
tcctagctcactgcagccttgacctcccaggcacatgccaccacacctgggtaatttttcttatgttttatagagatggggtcttgctgtgttgcccaggctggtcttgaactcctggcctcaagcaatcctcctgtcttgtcctgccagtgttgggatttcaggcatgagccaccacacccagctgagattaacattttgctgtatttccttataagctttcgctatgtgtatatagatatatttttaaaatatatcttgggttcaggtttctatcatttgtcaccttgaaagtttgtgttatgacacttttctcaatctaaaatttattttcgccaacccccattgttaaacgcttaggttttcatttttggtactattcttaataatgcagcactcactraacttttatataaatttgtgacccagtctctgataatttctttagaacttcattttattttaatcctgagatgggctaataaatcaggaaagcacaaaatgccattactttggtttttacaaatacttaacctagaaaccttttttctttgaaattcatcccacaaagtattgagattg

SEQ ID NO: 678426 - DNA, 658 bp, Homo sapiens
cctacctttccctaaagttctttagcatatttaaatacaagaacatagcatttaaaaatccttatctcataatgccaacacctgcaacatttctagatctgcttctattgtatcctctcttaattgtaggtgacattttcttgattctttgcatgtctcataatttctaattatatttaacactagagactgaaataaatatttattttccccaaaaygacatatgcccttctatcaggctgctggagtgtccagtgattattactaatcagataattgaggtgagtttggactttgtggtagttttagttaggtgcaaatcatcactagcttcaaatgtctgacggactccagagatttctttatgcattagagtctggctactagctgtacaaattgaggcagtctctcgctcctttacagctcagctgcttgttttgtcagtgactcatgagttctcttttcataccagcttcacccttggcattctttaccttaggagtaactccctctactctgtctccttgcattgacttttggaagacctctgcgttatgccaggtcaaagttcaaagtgtcctgaaaaaaaatttttttttttttttcagttctgctaccctttctcggattttttttttattcagtgactttactatat

SEQ ID NO: 678427 - DNA, 625 bp, Homo sapiens
gcattaatctgcccctaaatttgcatgtgcttgaaagtgggcataagtgagaataaacacagctgctaagaatccatatgttgctgactctgggcaaactgcctgtgagctagccctgctctgcaaggagcagtaccyttcaataaaagattagctaacaccaccagctcacccttgaattattttctgggcaaagccaagaactttcctgagctaagccccagtttgggggctcacctgtcctgcatcagatggatggaaagatggatggatggatggatggatggatggatggatggaaggatgaatgaagagattccaaatcaacctttctcccatttgggttctgaatggcctttaccatcagcagacttcatctgggttggggccatcttaattcatcagaaagatcttgataaggtaatatctcatcagtgaaaggtaggagatgagtctcaatcttcttcctctccaatttacccccctcttaatttagtaatcatctctgccaaccaggatttttggaagaaagtctagccaaaaaagttcctattaaattaatatagaatcttccctgtggtagggaaatggagcagtgtaatgaatccctactcacctaacattc

SEQ ID NO: 678428 - DNA, 661 bp, Homo sapiens
cctggaaattaagtcttttgtatcattacattcaaacatttttatttgatccatttcttacattttttattagaaacatatgtgatatctttcctttgtgtggcatcattaaatatagagctagctccagctgaatggctaatgacatgtgtgagatgccagtggagagactgggaaagtaagcaactacccgtggtaagaaaagtacttaaaacttggaaataaggcaaaagagtaggtaggatgtccctttctctgtcttacrgagtatactgagttgaataatcactccctcaaaaaaaaaaaaaattcatgttcctcccagaacctcagaatgtgaccttatttggaagtatggttttgcagatgtaattagttaagactaagtcatactggagtaggttgggccctaaatccaatatgactggtgtcctgaagaacaccatgtgatgacagaggtagagggtgacatgtctacagggcaaagaatgccaaggatggtgtgttagtctgttctcgcattgctataaagaattacctgagactgggtaatttacaaagaaaagaggtttaattggctcacagttccacaggctgtataggaaacatggctggggaggcctcaggaaacttacaatcatggcagaaggtgaaggggaag

SEQ ID NO: 678429 - DNA, 596 bp, Homo sapiens
ctgctttccctattcagcccagagttggggtggtgggagaagaggggttggagtgaatccatctctattcaaattccagctgggattactctaggagtcttcctggcttgttttgggcycaaactcagctacattgtttattggctcccaaagtcgggattgaagagtgaaaagatgcaggcaatgaatccttctgcacactcctccccaacctttccagcgcttttctacttaggaggccagtggaagggaggagaggccatgccctagcccacaggggacaaggttcattgttcttccaggcttggttcactctgcttttgattcagaagctctttccctacccagcaagactacactttcttgccttctttctattttttctttttgtgcgtataaacggtatgttgtgatatattctcagtgcttgtgcccaccttggaactctgttcttgctcttcattccgcatgtgatactctggtccaagatcttggccaggtgccttctgctcaaatattgtctcagaggtgcttcccttgaaaactcggtgctgtttccatagttactctatttgatcactctaagtttggttgtc

SEQ ID NO: 678430 - DNA, 596 bp, Homo sapiens
ctgctttccctattcagcccagagttggggtggtgggagaagaggggttggagtgaatccatctctattcaaattccagctgggattactctaggagtcttcctggcttgttttgggcccaaactcagctacattgtttattggctcccaaagtcgggattgaagagtgaaaagatgcaggcaatgaatccttctgcacactcctccccaacctttccagcgcttttctacttaggaggccagtggaagggaggagaggccatgccctagcccacaggggacaaggttcattgttcttccaggcttggttcactctgcttttgattcagaagctctttccctacccagcaagactacactttcttgccttctttctattttttctttttgtgcgtataaayggtatgttgtgatatattctcagtgcttgtgcccaccttggaactctgttcttgctcttcattccgcatgtgatactctggtccaagatcttggccaggtgccttctgctcaaatattgtctcagaggtgcttcccttgaaaactcggtgctgtttccatagttactctatttgatcactctaagtttggttgtc

SEQ ID NO: 678431 - DNA, 596 bp, Homo sapiens
ctgctttccctattcagcccagagttggggtggtgggagaagaggggttggagtgaatccatctctattcaaattccagctgggattactctaggagtcttcctggcttgttttgggcccaaactcagctacattgtttattggctcccaaagtcgggattgaagagtgaaaagatgcaggcaatgaatccttctgcacactcctccccaacctttccagcgcttttctacttaggaggccagtggaagggaggagaggccatgccctagcccacaggggacaaggttcattgttcttccaggcttggttcactctgcttttgattcagaagctctttccctacccagcaagactacactttcttgccttctttctattttttctttttgtgcgtataaacggtatgttgtgatatattctcagtgcttgtgcccaccttggaactctgttcttgctcttcattccgcatgtgatactctggtccaagatcttggccaggtgccttctgctcaaatatygtctcagaggtgcttcccttgaaaactcggtgctgtttccatagttactctatttgatcactctaagtttggttgtc

SEQ ID NO: 678432 - DNA, 626 bp, Homo sapiens
cttgtccacataccctagtgcaaatgtgcatgattttctttagtgtataccttcaagggcaataatrtagatgcttatgttactaaagaatgccaaactgtaccaatttatactcccaccacctagtataggagttcttgttccaaatccttgttaccattatctgattttgccagacttttttcatttttttttttttgagacgaagtcttgctctgtcgcccaggctggagtgcagtggcgcagtgtcagctcattgcaaccttcgcctcccaggttcaagtgattctcctgccttagcctcccgagtagctgggattacaggtgcctgccaccacacttgcgttaattttgttatgcttatgtagagatggggttttgtcatgttggccaggctggggcttttttcttgtttatggtaggtttggaatggaaaacaactcctttaaccctaccttaatctcaccttaatgcatgctacctttccaaagggcaagagtgttatctcctgtggagtctgtcccttcagatacgtagctcataactgcttgaggtgggtaaatagtgtttgactctgtatattgcggaccaagacagaaaatgcctgcattagcacaattctaggt

SEQ ID NO: 678433 - DNA, 626 bp, Homo sapiens
cttgtccacataccctagtgcaaatgtgcatgattttctttagtgtataccttcaagggcaataatatagatgcttatgttactaaagaatgccaaactgtaccaatttatactcccaccacctagtataggagttcytgttccaaatccttgttaccattatctgattttgccagacttttttcatttttttttttttgagacgaagtcttgctctgtcgcccaggctggagtgcagtggcgcagtgtcagctcattgcaaccttcgcctcccaggttcaagtgattctcctgccttagcctcccgagtagctgggattacaggtgcctgccaccacacttgcgttaattttgttatgcttatgtagagatggggttttgtcatgttggccaggctggggcttttttcttgtttatggtaggtttggaatggaaaacaactcctttaaccctaccttaatctcaccttaatgcatgctacctttccaaagggcaagagtgttatctcctgtggagtctgtcccttcagatacgtagctcataactgcttgaggtgggtaaatagtgtttgactctgtatattgcggaccaagacagaaaatgcctgcattagcacaattctaggt

SEQ ID NO: 678434 - DNA, 626 bp, Homo sapiens
cttgtccacataccctagtgcaaatgtgcatgattttctttagtgtataccttcaagggcaataatatagatgcttatgttactaaagaatgccaaactgtaccaatttatactcccaccacctagtataggagttcttgttccaaatccttgttaccattatctgattttgccagacttttttcatttttttttttttgagacgaagtcttgctctgtcgcccaggctggagtgcagtggcgcagtgtcagctcattgcaaccttcgcctcccaggttcaagtgattctcctgccttagcctcccgagtagctgggattacaggtgcctgccaccacacttgcgktaattttgttatgcttatgtagagatggggttttgtcatgttggccaggctggggcttttttcttgtttatggtaggtttggaatggaaaacaactcctttaaccctaccttaatctcaccttaatgcatgctacctttccaaagggcaagagtgttatctcctgtggagtctgtcccttcagatacgtagctcataactgcttgaggtgggtaaatagtgtttgactctgtatattgcggaccaagacagaaaatgcctgcattagcacaattctaggt

SEQ ID NO: 678435 - DNA, 626 bp, Homo sapiens
cttgtccacataccctagtgcaaatgtgcatgattttctttagtgtataccttcaagggcaataatatagatgcttatgttactaaagaatgccaaactgtaccaatttatactcccaccacctagtataggagttcttgttccaaatccttgttaccattatctgattttgccagacttttttcatttttttttttttgagacgaagtcttgctctgtcgcccaggctggagtgcagtggcgcagtgtcagctcattgcaaccttcgcctcccaggttcaagtgattctcctgccttagcctcccgagtagctgggattacaggtgcctgccaccacacttgcgttaattttgttatgcttatgtagagatggggttttgtcatgttggccaggctggggcttttttcttgtttatggtaggtttggaatggaaaacaactcctttaaccctaccttaatctcaccttaatgcatgctacctttccaaagggcaagagtgttatctcctgtggagtctgycccttcagatacgtagctcataactgcttgaggtgggtaaatagtgtttgactctgtatattgcggaccaagacagaaaatgcctgcattagcacaattctaggt

SEQ ID NO: 678436 - DNA, 626 bp, Homo sapiens
cttgtccacataccctagtgcaaatgtgcatgattttctttagtgtataccttcaagggcaataatatagatgcttatgttactaaagaatgccaaactgtaccaatttatactcccaccacctagtataggagttcttgttccaaatccttgttaccattatctgattttgccagacttttttcatttttttttttttgagacgaagtcttgctctgtcgcccaggctggagtgcagtggcgcagtgtcagctcattgcaaccttcgcctcccaggttcaagtgattctcctgccttagcctcccgagtagctgggattacaggtgcctgccaccacacttgcgttaattttgttatgcttatgtagagatggggttttgtcatgttggccaggctggggcttttttcttgtttatggtaggtttggaatggaaaacaactcctttaaccctaccttaatctcaccttaatgcatgctacctttccaaagggcaagagtgttatctcctgtggagtctgtcccttcagatacrtagctcataactgcttgaggtgggtaaatagtgtttgactctgtatattgcggaccaagacagaaaatgcctgcattagcacaattctaggt

SEQ ID NO: 678437 - DNA, 674 bp, Homo sapiens
cagaaccactgagcaaatccaaacttctgtttgttgggatgagaacgcccacccagagagagagagaaaagagctctctgcaggcacacaggtctggggggagcttgtgctgtcagtcatgcatgaaacctttgagtgggggagctggcagggagctctgccctgtgctttgcagcacatgccgctctcatcacactggggatccctttgctcaggtgctgggcctctcctgtggactgagagttccttcatggtgggatctatgtttattctgctcacgtccagcgctcagaaaggggccttgaatccgaaggacagacagttggggaggttgccagaatagagggtgttactgagtcacacacaggaacctcattattttccccaccaggctgtggagttatttgtcctcagcaagtgaccaggagtgatttccaaggcccattacactaatgacctaatcaatttatccagctcttttctttcaagacacagagtgtctgccctcctccctgtagccctgcagactggccctggggtgtcagcccgagtctccttttggggattggtgggcactgatgttytagatggtgagtgatgccacagagcccctcacagcgggattcaaggcaggattcttaggcctgacatcctgccccctccccagggcccct

SEQ ID NO: 678438 - DNA, 708 bp, Homo sapiens
gtttaggatagtacaaatctatagagtcagaaagtagattagtggttgctggagctgggaaraggatgggaatggagagtgactgctaatgggactgggtttctttttgaggtggcaaaaatgttctaacttaggttatgctaattgttccactattctgtgaatacaataaaatgcactgaactgtgtactttaaagggtgacatatgtgaattacatctcaataaagctgttttttaaaaaaaaaaggtcacagagccctgaacagtgtggtagaagtgaggggagatggacatggcggaaggccctggacacacatctttatccctttgtgtggctacttgcagttcccgccaaaccggacccatctctttgtccccagaggcgaagtccagtggaccttggtttttcacttcaagaccagttttggggtcaaggctatttcaacatggcagacagtaagagttaaataaatgcttggtgaatgaacctacattgcatcaatgtacaggccaccagaagtacttaaggctggagcagtctccagggctggggaggggatctcagcaggtttttaaaggaagggacagaacttaagagctcctaaaatgttccttcagaagaaccctgagtctagaggagagttaactcatacctaacgtgcagtgagaaaagtctcacattttttctttaaattcttgtgctgta

SEQ ID NO: 678439 - DNA, 610 bp, Homo sapiens
ctggaaattgcccacctctttcctggaaaactcatgaataatccaccccttgtttagcatataatcaagaagtaaccataaaaccagcagcccttggggctgctctgtctatggagtcattcttttattccttcactttctaaataaacttgctttcactttactgtatggacttgccctgaattctttcttgcgtgagatctaagaaccctttcttggggtccagatcggactgcttttctagtaacaaaaccacaaggtcctttaaggcccaaaggagatcaacagttaggtggaaattacctagtctttcaaaaatgtctctgcctcgtcctcaaatcaattttttggtaggttagtttataaacttctgagtagatrcaatatacagtattttagttcagatttaggcaagaaggtgatgagtcaagtattaccagttaagaagtatagtttaagatctctgttcctccttttggaacagggcagtcattttcagtccatttatgaatataagatccaaagaaaatatttttatttttattttcaactgatacttttcttccatcaactaacaactattaagttcttattctatgcaaggtactat

SEQ ID NO: 678440 - DNA, 1606 bp, Homo sapiens
tggaggttgcagtgagccgagatcgcaacactgcactccagccaggcaacagagggagactctgtctccaaaaaaaaaaaaaaaaaaaaaaaggtagaaagaagaatggtggttactaggggatgggctgattataggggtagcgggaaaggttgtcaagatgctggtcaaaggaaataaaacttcagttggataggagaaataggttcaagagatctattgtataaaatgattattataggtaataatayattgcattcttgaaaaatggtaaaatatttctaattcatatacagcaaaaaagttagaaaaaaattcaaataacacatattaaaagaacacagctacattattccaaaaaagttgtaatataggaatatattaataggattgaatagtcatatattaaattttaaaatttatttagcattgcttaaaataaaaattctattccaaatatgaaagagaaaaatagaaattatgtaatactataatacttttaattatgaaagatattagccacttaaaaaaaaggatacagatagacacattcagacatttcattaaaagtttaatatacaaacagactgtattacatccatacaatggaatagtattattcatttataaaaataaatgagctttcaagccatgaaaaagcatgggggaaacttgtatgcatattgctaagtgaaagacaccagagaatttagagggtcaagttcagagcctctgaaaaggccatgtactttatgattccaattatatgacatccaggaaaaggcaaaattatagagacagtaaaagatcagtggttgccaaggattcaaaagaattgagatagtgctgaatatgtggagcacagaaggattttagggtggtgaaaccattgtgtaggatgctataatggtggatacacattatgcatttatcaaaactcattaaaattgtacaacacaaagagagaactctaatgtaaactatggactttaatcataaatgtatcaataataaatcatcaactgtaacaaatgtactacactaatggaagttgttaataataggggaaaatgtgtatggaaatggaaagggagggggtccaggaaagtctactttctgcacaattcatctgtaaacctcaaatttcactaaaaaataaattatatatttttaaataacaatatgttgtttttaccatatcctcagttagtagatatattgtgttaaaacaactttgctgtgtttgcagccctggactgggaaggtggaaggggaaagaaaaatgaatatcatagtaatagctagcattaatgtgtctattatgagggaaaaatgtgctatattatttggaagattttcacctctattgatactcactacaaccctacaaaatttgtagtgtgatttcctttttacaaatgaaaaacaaaaccagaatagctaacccgaaacctgagatcttaaggaaagtatggctccaaagatgacttaacaatgctcatttcccactatttttctgtacaaccattcaaatatatcatatccatttctgttgttttactggctttgttatttccctgcccaaaatgatattcttttttctcta

SEQ ID NO: 678441 - DNA, 1606 bp, Homo sapiens
tggaggttgcagtgagccgagatcgcaacactgcactccagccaggcaacagagggagactctgtctccaaaaaaaaaaaaaaaaaaaaaaaggtagaaagaagaatggtggttactaggggatgggctgattataggggtagcgggaaaggttgtcaagatgctggtcaaaggaaataaaacttcagttggataggagaaataggttcaagagatctattgtataaaatgattattataggtaataatatattgcattcttgaaaaatggtaaaatatttctaattcatatacagcaaaaaagttagaaaaaaattcaaataacacatattaaaagaacacagctacattattccaaaaaagttgtaatataggaatatattaataggattgaatagtcatatattaaattttaaaatttatttagcattgcttaaaataaaaattctattccaaatatgaaagagaaaaatagaaattatgtaatactataatacttttaattatgaaagatattagccacttaaaaaaaaggatacagatagacacattcagacatttcattaaaagtttaatatacaaacagactgtattacatccatacaatggaatagtattattcatttataaaaataaatgagctttcaagccatgaaaaagcatgggggaaacttgtatgcatattgctaagtgaaagacaccagagaatttagagggtcaagttcagagcctctgaaaaggccatgtactttatgattccaattatatgacatccaggaaaaggcaaaattatagagacagtaaaagatcagtggttgccaaggattcaaaagaattgagatagtgctgaatatgtggagcacagaaggattttagggtggtgaaaccattgtgtaggatgctataatggtggatacayattatgcatttatcaaaactcattaaaattgtacaacacaaagagagaactctaatgtaaactatggactttaatcataaatgtatcaataataaatcatcaactgtaacaaatgtactacactaatggaagttgttaataataggggaaaatgtgtatggaaatggaaagggagggggtccaggaaagtctactttctgcacaattcatctgtaaacctcaaatttcactaaaaaataaattatatatttttaaataacaatatgttgtttttaccatatcctcagttagtagatatattgtgttaaaacaactttgctgtgtttgcagccctggactgggaaggtggaaggggaaagaaaaatgaatatcatagtaatagctagcattaatgtgtctattatgagggaaaaatgtgctatattatttggaagattttcacctctattgatactcactacaaccctacaaaatttgtagtgtgatttcctttttacaaatgaaaaacaaaaccagaatagctaacccgaaacctgagatcttaaggaaagtatggctccaaagatgacttaacaatgctcatttcccactatttttctgtacaaccattcaaatatatcatatccatttctgttgttttactggctttgttatttccctgcccaaaatgatattcttttttctcta

SEQ ID NO: 678442 - DNA, 1304 bp, Homo sapiens
tgatcttacatcttattcatatggagtaataatctgagctatagttcttaatcatggttatagatttgtgttacctgtgaaaattaaaaaaatsaaagtgtccaagattcaaagtccagaaatactgtttcaaatggtatggggtacgttttaggcattagtgtatttattaaagctttagagctgactctgatatgaagataaaattagataccacttcttcatagagagatataaacttgattatgattgagaagcaatatctgaacacttctcaaaaaataacactgaatactgaagcaagattgagaaattatatgggtactcttaatcacctgctttatttgtactagataattttaataacctgcacacttgaaaaatatttaaatatagtcatttgaaagttctgtacttcgtctaatttcccatttaattaaatatcatttatttaatttaatttgacaaatatttattgagctcttgctatacccaaggcacttttctccgacattgagaaatcagaaagtgtaaaatttgattatagagcttatgtcaagtggaaacacaaacatacatagttttttaattaaaaaaatgataatgccatgatggagtattctggtacataaagtatacaaacttcctccttctccccaagacacaggcaacttaatggagctgtcaaagattttcatgaagtgggtagcatttgagatggatacaagaaaatgaataggatttttactgcagaacataaagaagaattgagcaggctgggtgcagtggctcacgcctataatccgaacactttgggaggctgaggcaggcggatcacgaggtcaagagatcgagaccatcctggccaatatggtgaaaccccatctctactaaaaatacaaaaattagctaggagtggtagcgcgcctgtagtcccagctactcaggaagctgaggcaggagaatcgtttgaacctgggaggtggagtttgcagtgagccgagatcatgagtctgcactccagactggcaacagagcaagactccatcgaagaagaaggaggaggagaagaagaagaattgagcgaagatttggagccataaaataagtgatgttttgaggaatttggctagatcaggaagatgatagaaaggagtgtaggggccagattactgaaggctacagatgttttctacccagaattattgatcctatgatcattgcagaggtacatatggtatagaaacagaagacataatctaattctattcctccaaggaatgtttagtgatatttgggaaaat

SEQ ID NO: 678443 - DNA, 1304 bp, Homo sapiens
tgatcttacatcttattcatatggagtaataatctgagctatagttcttaatcatggttatagatttgtgttacctgtgaaaattaaaaaaatcaaagtgtccaagattcaaagtccagaaatactgtttcaaatggtatggggtacgttttaggcattagtgtatttattaaagctttagagctgactctgatatgaagataaaattagataccacttcttcatagagagatataaacttgattatgattgagaagcaatatctgaacacttctcaaaaaataacactgaatactgaagcaagattgagaaattatatgggtactcttaatcacctgctttatttgtactagataattttaataacctgcacacttgaaaaatatttaaatatagtcatttgaaagttctgtacttcgtctaatttcccatttaattaaatatcatttatttaatttaatttgacaaatatttattgagctcttgctatacccaaggcacttttctccgacattgagaaatcagaaagtgtaaaatttgattatagagcttatgtcaagtggaaacacaaacatacatagttttttaattaaaaaaatgataatgccatgatggagtattctggtacataaagtatacaaacttcctccttctccccaagacacaggcaacttaatggagctgtcaaagattttcatgaagtgggtagcatttgagatggatacaagaaaatgaataggatttttactgcagaacataaagaagaattgagcaggctgggtgcagtggctcacgcctataatccgaacactttgggaggctgaggcaggcggatcacgaggtcaagagatcgagaccatcctggccaatatggtgaaaccccatctctactaaaaatacaaaaattagctaggagtggtagcgcgcctgtagtcccagctactcaggargctgaggcaggagaatcgtttgaacctgggaggtggagtttgcagtgagccgagatcatgagtctgcactccagactggcaacagagcaagactccatcgaagaagaaggaggaggagaagaagaagaattgagcgaagatttggagccataaaataagtgatgttttgaggaatttggctagatcaggaagatgatagaaaggagtgtaggggccagattactgaaggctacagatgttttctacccagaattattgatcctatgatcattgcagaggtacatatggtatagaaacagaagacataatctaattctattcctccaaggaatgtttagtgatatttgggaaaat

SEQ ID NO: 678444 - DNA, 1304 bp, Homo sapiens
tgatcttacatcttattcatatggagtaataatctgagctatagttcttaatcatggttatagatttgtgttacctgtgaaaattaaaaaaatcaaagtgtccaagattcaaagtccagaaatactgtttcaaatggtatggggtacgttttaggcattagtgtatttattaaagctttagagctgactctgatatgaagataaaattagataccacttcttcatagagagatataaacttgattatgattgagaagcaatatctgaacacttctcaaaaaataacactgaatactgaagcaagattgagaaattatatgggtactcttaatcacctgctttatttgtactagataattttaataacctgcacacttgaaaaatatttaaatatagtcatttgaaagttctgtacttcgtctaatttcccatttaattaaatatcatttatttaatttaatttgacaaatatttattgagctcttgctatacccaaggcacttttctccgacattgagaaatcagaaagtgtaaaatttgattatagagcttatgtcaagtggaaacacaaacatacatagttttttaattaaaaaaatgataatgccatgatggagtattctggtacataaagtatacaaacttcctccttctccccaagacacaggcaacttaatggagctgtcaaagattttcatgaagtgggtagcatttgagatggatacaagaaaatgaataggatttttactgcagaacataaagaagaattgagcaggctgggtgcagtggctcacgcctataatccgaacactttgggaggctgaggcaggcggatcacgaggtcaagagatcgagaccatcctggccaatatggtgaaaccccatctctactaaaaatacaaaaattagctaggagtggtagcgcgcctgtagtcccagctactcaggaagctgaggcaggagaatcgtttgaacctgggaggtggagtttgcagtgagccgagatcatgagtctgcactccagactggcaacagagcaagactccatcgaagaagaagsaggaggagaagaagaagaattgagcgaagatttggagccataaaataagtgatgttttgaggaatttggctagatcaggaagatgatagaaaggagtgtaggggccagattactgaaggctacagatgttttctacccagaattattgatcctatgatcattgcagaggtacatatggtatagaaacagaagacataatctaattctattcctccaaggaatgtttagtgatatttgggaaaat

SEQ ID NO: 678445 - DNA, 638 bp, Homo sapiens
atcactaaatgaatttcttcaagtggatattaaatacacaacaaaaacttaaaatcaaaccttatgataggtatgataactcttatgaagaaatatgkttttttttcttcctttactgtcagtttttcaaatttgggatttttttgctttatttactaattttaaaactttaaaatgttacattttaaattggcaaaactagtcttagaccttgactaataaaatattttattttgagtaataggtctagcatagcaatttgttaaactttatttaaatgtgaaaagattaataaaagaaaccatagcatcaaatattaaaattctgcttgaaaaaaactgagactaaaatagtagattcatagttacatataaaccattaagacgtattagtacatgtattatctcattttctaagatatagccttaattttaacatgtatattataaagtttaaataattacgaaaaagtatttttgcatgcacttccgagcatgcaatattttatattcttatatgctatcaaatgcagctaatattttactcaaaaagttcatgttttaatattttaactcttcaaatttataggcagtaaatttactaatcatgcaatacaaatgcatctaatcaccaagaat

SEQ ID NO: 678446 - DNA, 621 bp, Homo sapiens
gttagttaaggctatattgcgttttccatacttagatgtaaaaggcttcataatgtaaaatgatatggtgatgttttgaagttggatgaagttaaactatggttaagaaaggaatgaaagtaataaaacatttagaaaacacttttatgtaagctaagaaataatatatcagtttacaatttaggaagatggttttaaataaaataaacacaactgaatgtaaatatatttggttcaattgaatataactgaaagctcaagaaacctgatatcatacactcataatcccatttgataagagtaaataaaagtgaatgcagcatattagctagttagcactatgccaaaaggtttccaattagaaagagtaacacttgggtgtggtgggggggcaacacatcgtcaggatcagtaatacgactcacactccaaaccaaagtaactcccacattgcaaggactataatgtcgacagattcttaatatagtyattatcatccatactaatatacagctagcctatttgctcttttcttggcatagccccttgccgattttggattagctagaatatctatatagctgaattcactggtatctcaccagtgctcaacccattcca

SEQ ID NO: 678447 - DNA, 621 bp, Homo sapiens
gttagttaaggctatattgcgttttccatacttagatgtaaaaggcttcataatgtaaaatgatatggtgatgttttgaagttggatgaagttaaactatggttaagaaaggaatgaaagtaataaaacatttagaaaacacttttatgtaagctaagaaataatatatcagtttacaatttaggaagatggttttaaataaaataaacacaactgaatgtaaatatatttggttcaattgaatataactgaaagctcaagaaacctgatatcatacactcataatcccatttgataagagtaaataaaagtgaatgcagcatattagctagttagcactatgccaaaaggtttccaattagaaagagtaacacttgggtgtggtgggggggcaacacatcgtcaggatcagtaatacgactcacactccaaaccaaagtaactcccacattgcaaggactataatgtcgacagattcttaatatagttattatcatccatactaatatacagctagcctatttgctcttttcttggmatagccccttgccgattttggattagctagaatatctatatagctgaattcactggtatctcaccagtgctcaacccattcca

SEQ ID NO: 678448 - DNA, 1178 bp, Homo sapiens
tggtttttaaggttttttcctgtattctttttttctaaatccatactctctttcctggtttgctaaacacaggcaaattctaacacctttataattctaaggatgcaatgatacaaagcttaattcaaatggttaaatattcctttgtggcctggtatggtggctcatacctgtaatcccagcactttaggaagctgagatgggaggatggcttgagccgaggagttcaagaccaacctgggcaatataggcaaaccttatctctattcgaaaaaaacaaaaaaagaagctgactttgttacaattgatatagccacaaaaggaaaaatcaaaaatataaagaagcaaaaaacatgacttcctacttcttgtccttggaaccaaatagagtctggaggcatttcacaaaagcaataggtccttcagacagaaatttagatatctttgtgcaagcagcattgcatgtgattctgtacaaaagagaaaaaggccacaaagcaggcctgacaaccatgaatggaaagaaagctatagaagaaaatatgagcaaaaaaaaaaaaagaaagaaatgcaatttttatgacataatccttccaggaaaatgcaaagtaaattagagagcatagttgcatacttaaaaaaaaaaagacattcttgtttctaacttccaaatcataaaattttctctaattgtataaacttggcttagattaccaatggattttgaattaaatctctatacaatgtctcccttgacttatgaccctccaataagctaaaataacactcaactattactcttaagaactaagaaaacaacaggttttaaacctgcctctaaaacttcattgacattataattatatggcctaattattaatgatagtcacatctgggactccaaaaatatatacataagagttctggtttttctttaacattcaggatattctactcactgtggctatgtcccaaaaggtataataaaatctggaagaaaatttagatactttcaaagttctaaatctgcatcatgcactggaaattgagacgtgaagctagtctttgttagaytttccctgtgtcctggaaattttttttctattctcacctctctgccctcctttttattcacatctgcccaggctaaactgctagcacgggacatgtgaagtcca

SEQ ID NO: 678449 - DNA, 1715 bp, Homo sapiens
taagggtaagaagtaaaagtgatttctttttatagggaacataatagttaaacatcttttgggagaaatgaaggcacgtgtttagtataaacctttggaagctccagaaggcagtaacgtggcttgcccttggcacatttctgaaccttcttattttatattccatttccagagggttttctctcagttatctgtcatctaaccatccagtaagatggaccttactggtaaatattacctaaagcagaacctttctcaggggggagttgcatcttaaagcgtgtctgctgaagtctgacttccttcaaagcaaagaatccctgactgaagaactccattgactgtccaaagataattggagaattattttggatagcattgtccaaaagtttcaaatcccactctgtatgattgcccaatcttaaacttgacctaaatttcttttgccactggataccgattgcatgtcagattttggatatcctgcagtgagtgaaaccagatgaggcccttactctcagggggtttatggtctagtgggagagagggtggtaataacgtaataaaaaataggccaggcctgatggctcactcctgtaatcccagtgttttggaaggctgaggtgcaaggatcacttgagcccaggaatttgaggttgtagtgagctacgatcacactactgcactccagcctgggtgacagagtgagaccctaaatctaaaataatattaataataataaaaaataggaaaaattacaactgcaacaagacctgcagagagaatggagtgtattttaagtatgttttaaggcacttttggggagttggaggcctgcagacctttctgcagcagatgcataataaaatcttagaacagtctgctgtatcctgctcagctccggatcccatttccaaatatatatccattttccccatttyttaatcctaggggactctgctcttcattgggttctttttgttttagatggagtctcactctgttgccaggctggagtgcagtggcacgatctcagttcactgcaatctccgcctcccaggttccagcgattctcctgcctcagcctcccgagtagatgggattataggtgcgcaccactacgcctagctaatttttgtatttttagtagagatggggattcaccatgttggccaggctggtctcgaactcctgacctcaagtgatctacccaccttggcctcccaaagtggtaggattacaggcgtgagccactgcgcctggccctcttattatgtcttatctcattggacaacttcagacttctaaacacaaacactgcttctcccgacagtttttgttgggttctgctggtcttggacaagaagccttttatgcttgcctcctaactttctcttttctttgaacgccattttggcagctttacacttccaccttttgattttccaccatttgatgctgtcttctgatccatggtaatgcttcttgttctccgagtaagcactttctcatgtatgtaatggttaaagttcattgggagaagcttcagcatgtttattttcaaggttttgaggcaacgtaaatgataagagattacgtttcacatagaggaatgggtgaatgtgaatgagaacttcaaaggggacatatgaattcactggatgtggtacatttccttcagggagcacagcgtgctaagcagatgttaactccaa

SEQ ID NO: 678450 - DNA, 2134 bp, Homo sapiens
gaggggcaaacattcgcatctacttcatagagctgatattaggattaataaaagccaatccaagtaaagtgcttggcatggtctgaccctcaataagtactcaataaaatatttcagctacttgaccaggcatggtggctgatgtctgcaatcccagcactctggaaggccaaggcaggaggaccacttgaggccaggagttcaaggccagcctgggaaacatagcaagattccatccttacaaaatttttcaaaagtagccaagtgtggtggcacgcacctgtagtcctagctactcaggaggctgggggaggaggatcacttgagttcaagagtataagcctgcagtgagtgagctatgatcacgccaccgtactccagcctaggtgacrgagtgagactttgtctttttgaaacaggatagctgtctcaaaatagtagctggaatattactttgaaataataatattccagctactattattatcgatcccagtttacaggtaaagctcaggtaacttgcctagtttacacagtagcagagcagaatttaaactgaggtctaactcttagaactgtgttattttacagcactacactgccaatataaatgttctatctccagaacacttgctttagccgtttcagtgttgaaacgtcactaggctacccctttttctgtttgttcttttcttctttcatcagagtatttctagtcttgtattgctttgctagtccatttgtttactcaagcagcaagtcaggtgctgaaactttgggcctgtgtatatttgaaaatagcatacagtattcagtcgtttaagtgtattttaaaaatacacacatttagaaatcttcagcataaaaactgctattcaaataaaaaaacaatacatacttcctacaaaatagagaaaacaaaatgaaaacactataggaaactgaaatgatatttttacaatacagcactaaacactttattatttcaaatagcaaatttggagacgtgtgtgtgtgtgtttgtgtgtgtgtgtatgcactggtattcaggcatagtgatagtgctaattccatcacttaaattgaattttctagtttgttttgtccttgtcaaatgttgttaatttcatccatatttagatttccagaaatcctatcagccttccatggaattctgaaactaagtgacatttaacaattttcttgtataacttaggctctttctttctgccttcatactaaatatgagctacaggctaagattttaatagaataaatatttgtgccagttttcagtgtctccatgcatgcttgtatttagccctgactgcgatgttttctaattgctgctttacatttctccactaccagataataacttccttttggtaatttagttttatctatggatctttagtgtcttttgaatgaatgatgaataaaaagcaaaatgactatgaatgaatattacttttaatttttgtgactagaaatcattgattcatttgtttaagcagtagtatactgactgatgacttggtatgttgaaaacactacatatttatttcattcaaaaacactgacatgtaggtacctctatgacctccatttaaaaaaaagaataaaggcaattaaagagaagcttagaaacttgctcaaggtcacagagcttgtaagtgttggggctaggatttggctcttgtcagtctgactccaaaattggagcggttagcttatgtactagctactacactactccttcccctaaaggttggagtataaatctcaaacagaacacagtttctgtttgaaatagaaagcgaaatagaatgtgcaagatttaggcaagatcaaaggacaattgtcagccactaccaaagccacacacacaaaatttgaattgatagaaaagatatgctaaaactaaggtataccaatggataaagttagctttcgccactagtgaataattaagctttggaaaaataaaacaagttagagagaagacaccccaggaaacataacaggacatacagaaggtggagccatggagatcatgaagcagggaggaagcaatttgcttttgttgtaggaagattgacattcaagagagatatcattgggggtcattgaa

SEQ ID NO: 678451 - DNA, 2134 bp, Homo sapiens
gaggggcaaacattcgcatctacttcatagagctgatattaggattaataaaagccaatccaagtaaagtgcttggcatggtctgaccctcaataagtactcaataaaatatttcagctacttgaccaggcatggtggctgatgtctgcaatcccagcactctggaaggccaaggcaggaggaccacttgaggccaggagttcaaggccagcctgggaaacatagcaagattccatccttacaaaatttttcaaaagtagccaagtgtggtggcacgcacctgtagtcctagctactcaggaggctgggggaggaggatcacttgagttcaagagtataagcctgcagtgagtgagctatgatcacgccaccgtactccagcctaggtgacggagtgagactytgtctttttgaaacaggatagctgtctcaaaatagtagctggaatattactttgaaataataatattccagctactattattatcgatcccagtttacaggtaaagctcaggtaacttgcctagtttacacagtagcagagcagaatttaaactgaggtctaactcttagaactgtgttattttacagcactacactgccaatataaatgttctatctccagaacacttgctttagccgtttcagtgttgaaacgtcactaggctacccctttttctgtttgttcttttcttctttcatcagagtatttctagtcttgtattgctttgctagtccatttgtttactcaagcagcaagtcaggtgctgaaactttgggcctgtgtatatttgaaaatagcatacagtattcagtcgtttaagtgtattttaaaaatacacacatttagaaatcttcagcataaaaactgctattcaaataaaaaaacaatacatacttcctacaaaatagagaaaacaaaatgaaaacactataggaaactgaaatgatatttttacaatacagcactaaacactttattatttcaaatagcaaatttggagacgtgtgtgtgtgtgtttgtgtgtgtgtgtatgcactggtattcaggcatagtgatagtgctaattccatcacttaaattgaattttctagtttgttttgtccttgtcaaatgttgttaatttcatccatatttagatttccagaaatcctatcagccttccatggaattctgaaactaagtgacatttaacaattttcttgtataacttaggctctttctttctgccttcatactaaatatgagctacaggctaagattttaatagaataaatatttgtgccagttttcagtgtctccatgcatgcttgtatttagccctgactgcgatgttttctaattgctgctttacatttctccactaccagataataacttccttttggtaatttagttttatctatggatctttagtgtcttttgaatgaatgatgaataaaaagcaaaatgactatgaatgaatattacttttaatttttgtgactagaaatcattgattcatttgtttaagcagtagtatactgactgatgacttggtatgttgaaaacactacatatttatttcattcaaaaacactgacatgtaggtacctctatgacctccatttaaaaaaaagaataaaggcaattaaagagaagcttagaaacttgctcaaggtcacagagcttgtaagtgttggggctaggatttggctcttgtcagtctgactccaaaattggagcggttagcttatgtactagctactacactactccttcccctaaaggttggagtataaatctcaaacagaacacagtttctgtttgaaatagaaagcgaaatagaatgtgcaagatttaggcaagatcaaaggacaattgtcagccactaccaaagccacacacacaaaatttgaattgatagaaaagatatgctaaaactaaggtataccaatggataaagttagctttcgccactagtgaataattaagctttggaaaaataaaacaagttagagagaagacaccccaggaaacataacaggacatacagaaggtggagccatggagatcatgaagcagggaggaagcaatttgcttttgttgtaggaagattgacattcaagagagatatcattgggggtcattgaa

SEQ ID NO: 678452 - DNA, 652 bp, Homo sapiens
ttgtaaagaagagttgtgatcttaaatttcaaagagctcacttggtcttggcactatggttgggagaaagatagagtacatgttccttctactcagcctaactcacattccaatagtacttactacgtaaggytgttatggggaatgaatacatacatgcatgtaaagtgctttaaacagttcctactgagtggtaaatggtatataagggtttgttgttattattattcttatttaaataggaaattagtttgtatgttgcagtatatgttcttgtgccttcctcatgtgatcagttacctatttagagggcaggttcttagagaacagatgctttgttttttgaatggagtgtgtgtgtgtactcatgtcgtatcatacaggagtgttaagaaaaaaaaggtaaaagcctactcctccttaatgaaccttctgtcttgcctcttcattgaaataataccaactatcttatagtgtagatgcaatgaaatctgtaggtacaaatttaaattctttccaccaaaccaagcctgaaacatggaaactaaggcttccaacaagcagagtaaccaagcacattgtaagtacacatttcctttgatctttgcaggtatctcacttctgatagtcttctaagaagcttttccaaatc

SEQ ID NO: 678453 - DNA, 615 bp, Homo sapiens
gaggagcctgaccaacttggggaaagtttaaagatctcatcacgtggagaataggggaaggcaccaacacgtattgagtgtctactttgagcttaagggagaaggagaaaaggcagggaataaacggaggatggaataagaataggtaatcttccttaggtttaaataataagtgcttgccataggaaggagccccagaacacagttatcaataatagagactcacacagagcattctacactagagctgctgtcctcttgaccagaataagggtaaggtgtgtgtgcgtgtccaggaaagtaggcagctaggaggtgatcagagcatacactmctgccgccacaattctaagtgtcttcccctaggggaatcctatttcttctcaggcacatttgtttattcattccatgttcactcttgttatttacttcttgccaggctttgtgttaagaattggggaaacaaggttgaataaacccagtctgtaaagaaaaggagctcacagtctggaggggcaaatgggcattgtgcctgcaagttggcccactgagagcctaagaagtgaagttatgaatccaggattactcagttatcaatgaagtgattaaacatca

SEQ ID NO: 678454 - DNA, 3284 bp, Homo sapiens
gctacaacatgaatgaaccatgaaaacatttggctaagtgaaagaggtcaggcacaaaaggccacatactgtattatttcattcatataaaatatctaggataggcgaatccatagaaacagaaaatggattcgtggttgccagggctggggaagggattcatggggagtgactggttcatgggcatggagtttcctttggaaaggatgaaaatcgtgtggaattagtggtgatggttgcacagcatcgtgaatgtactaaatgccactgaattgtgtactttaaatggttgaagaggtaaattgcatgtgatgtgtattttaccacaaatttttacaaaaggaactccagrtatccttcagccctgagatgcaaggtatattgtttctcaggtgggaagcaaacctgtgtggcatgtgtaccccagggtcccccagccagagatggttctcctgcatggctgtaactaagaacactgggctggagctgaaccccagagactggcctcactcctgtaggaatagcacaaccataggttgctggaaacctcccctggtggagaaacaagccttgcttcccggagaagccagggctgggcccagcttctgtagagaggcagagcagcgctgggcggaggagtatgtgcccagctggaaaattgcagggcgtcttgtcttaaatataatattaaatcggcacctttaattagtacacttagaaaaggtcactagcaattacctgggacacaaagaaggcatgagcaggcaagagcccatgaagaagctgaaaaggaccattttgagcagcacataattgaggggaaaatggataaaagtccgggaaattacagggtgggtgacagcagctgatggccccatccctgtcctgcccagcgccccccttcttgggaggacctgagcgtcaagcctgagagagccatttgggatattgggcccagttgtgcaaccttggctggaaggccagggtggtcttcccagaatcctcttggccagctgggagcttggccccagatcctccacctgggctgggccctgaggtacagcaggtgaggattgcggtccagggggctgcaggctgccatggactcattgttgcacctggacaagcaaggcgcttatgggcctcagtttccccatctggaatctgcccaaggctttgggaggtaactcagtgtttcccaaactttgccactagagattacctgagagcaatggaaaagaaatgtatactcctagaagtcaggggaggctagaaattcatttatggctttagattatatctttacaaataaattaaacataaataaattaggccggacatggtggctcgcacctgtaatcccagcactttggtaggccgaggtgggcagatcacttggggtcaggagttcaatatcaggctggccaacatgatgaaaccccatctctactaaaactacgaaaaattagctgggcatggtggctgatgcctgtaatcccagctactggggaggctgaggcaggagaagcacttgaacctgcgaggtggaggttgcagtgagctgagatcatgccacttgcactccagcctgggtgacagagcgagaccctgccacccaaaaaataattaattaatcaatcaaatgctgctcccaatgtcttcctgttcgttttagtataaaacatttatttgtcaccgggcaatgcaaacgctttggaaagatgtgcttggtttatctgtgactttcacatacttcctcttacaccgtctagaaagagcaatgaactgggaatctgggagtctggaaacttgggtttgaaccctgcctttgtggctcaccattgtgctttgggcaacttgccaaatgccttcagcttttccaactccgaaatgggagggttgggctctgaagatgtcccaggattttactcctccttctcaccttctcccatcaccttggatgctgccatttcctgctctgctgttctgctgtttgaccttggagaagctgcttcacctctctgagactcagcttcctaatctgcaaaatggatagaataacaactaccaaacagacttgctgggaggatttaatgagagaatccacatgaatggaccttgtgtctggcatatcataagagcccagtgaatgtccaatgtcttccttttccagatcttgggcttcttgttaggatctgataggtcatgtccatgaagtcctgaatcttgagtttacatattgagtgttgagatatctgtgctgtggaaagaaatgtaggctctgagccccaaatgcctgggatgtggattccagctctgccatttgctgaccatgaggacatggtaatcacctcatcactctttgttgccttatccgttaaatggggggaattgcattatggactgaattagtgcatggaaatagctcagcttatgcctggcttatgattagggctcagaaatgtttgctagcatcatcatgttagaactgtcctaaaagttcttttctagataaaattccaagaatttggaatcctttctttctatctagcttgattttcagagctatttggtaaatgtgagagtcagtatttggggcaggtagtgtctgtctcattttataggggaaactgaaacctggaaataagtgatttgccttaggccatggctccgatctcctcacccctttgagaatcagaggaagactatagacattgtcttcggaaaatgacgcgctgtacacttatcacattttgtatacagttctagtgagtttaaggacctcctgaagctaaggagaccaaccatcccagtttgcctggggcttcctggttttagcacatgtgctgggaaatgcttcagtcctgggcaaagcagggcagttagtgaccctacctgaaagctacacaggggagctgtgagccccaggagatgatgccctgcacttcttagggagggtatagaccaggcatcctgaagcctaggtgccctcaggccagggctttgcttcctggtaagggatgacacctgcctctcaatccccttcttgaggatgggaactagaccttgtcacccagttctagactggagttccttgaggctcagctacatcttcttaacctctgtgtactccagtgctcatcataagggcagcacctggtcactcttgaatgaatgccaaaagattttgcaaagtattctgaattagagaaggtgcttccatttgcaaaagacagaagtccaactaaactgacttaggccaaagaaaaggttgcaaggggaat

SEQ ID NO: 678455 - DNA, 626 bp, Homo sapiens
cagcgtgctgccggtagcacatccaaagcactctccacttgctctgcacatatcatggtagtgacgctgttctttggcccttgcatttttgtttatgtgcggcctttcagtaggttctctgtggacaagctgctgtctgtgttttataccatttttactccactcctgaaccccattatctacacattgagaaatgaggagatgaaagcagctatgaagaaactgcaaaaccgacgggtgacttttcaatgaaatccagccttccatagtgttagatgtttctattcattcagcagatataatttctttaatataattctgctcaaagatttcattctgacactacattgatataatttgtaatgtgttatattacagagaaacagtttatttcaagaaaaaatatatcattttattttatactacaaatatgtatatataatgtattacatatatacataatgtatgtatttatattacaaatatatatacatgtaagtatatatgtatatatatttttgtatatatatacaaagcttaaaatatatatacgtacatacatgtatatatgtaatgtaaaataaaatgatatacatgtcwtttatttattcagagaaacgatatat

SEQ ID NO: 678456 - DNA, 532 bp, Homo sapiens
cccacaagctaagaagagtttttatatttttaaagggatgtaaaaaagaaaaaaatgcaacagtaaggaacaatatgcaacagagactatatgcacctcataaagtctaaatatttaatatctggcctgttacagaagaaatttgccaatctctattctatatgatcaattatctcctatyctattcacatatatgtggtagcctgtatattacaaaatagctagaagagagtgttggaaataaatttttggtgctgcaaaagaaatagcacttgaacatgaattttctcagcaaggcaattttacttccatagaagggtgtgtctcatggatggagcaatggtgagagcacacctgaacaagggaggggaaggggttcttatccctgacacaggtagcccctgctgctgtgtcattccactattgactagggttggactgcacatctaagctaattcagattggctattttaaagagaacagaggtacgagccagagtggcaggatgagtagtttggcgggaacagttaca

SEQ ID NO: 678457 - DNA, 532 bp, Homo sapiens
cccacaagctaagaagagtttttatatttttaaagggatgtaaaaaagaaaaaaatgcaacagtaaggaacaatatgcaacagagactatatgcacctcataaagtctaaatatttaatatctggcctgttacagaagaaatttgccaatctctattctatatgatcaattatctcctattctattcacatatatgtggtagcctgtatattacaaaatagctagaagagagtgttggaaataaatttttggtgctgcaaaagaaatagcactygaacatgaattttctcagcaaggcaattttacttccatagaagggtgtgtctcatggatggagcaatggtgagagcacacctgaacaagggaggggaaggggttcttatccctgacacaggtagcccctgctgctgtgtcattccactattgactagggttggactgcacatctaagctaattcagattggctattttaaagagaacagaggtacgagccagagtggcaggatgagtagtttggcgggaacagttaca

SEQ ID NO: 678458 - DNA, 532 bp, Homo sapiens
cccacaagctaagaagagtttttatatttttaaagggatgtaaaaaagaaaaaaatgcaacagtaaggaacaatatgcaacagagactatatgcacctcataaagtctaaatatttaatatctggcctgttacagaagaaatttgccaatctctattctatatgatcaattatctcctattctattcacatatatgtggtagcctgtatattacaaaatagctagaagagagtgttggaaataaatttttggtgctgcaaaagaaatagcacttgaacatgaattttctcagcaaggcaattttacttcyatagaagggtgtgtctcatggatggagcaatggtgagagcacacctgaacaagggaggggaaggggttcttatccctgacacaggtagcccctgctgctgtgtcattccactattgactagggttggactgcacatctaagctaattcagattggctattttaaagagaacagaggtacgagccagagtggcaggatgagtagtttggcgggaacagttaca

SEQ ID NO: 678459 - DNA, 532 bp, Homo sapiens
cccacaagctaagaagagtttttatatttttaaagggatgtaaaaaagaaaaaaatgcaacagtaaggaacaatatgcaacagagactatatgcacctcataaagtctaaatatttaatatctggcctgttacagaagaaatttgccaatctctattctatatgatcaattatctcctattctattcacatatatgtggtagcctgtatattacaaaatagctagaagagagtgttggaaataaatttttggtgctgcaaaagaaatagcacttgaacatgaattttctcagcaaggcaattttacttccatagaagggtgtgtctcatggatggagcaatggtgagagcacacctgaacaagggaggggaaggggttcttatccctgacacaggtagcccctgctgctgtgtcattccactattgactagggttggactgcacatctaagctaattcagattggctattttaaagagaacagaggtacragccagagtggcaggatgagtagtttggcgggaacagttaca

SEQ ID NO: 678460 - DNA, 1918 bp, Homo sapiens
taaatatatttggaatgatgaaaactttactttgcacttggcttatttgctatggacaaatttattaattttggtggaggtattgtcaacatktctaacaggtagatgtaaatctttaattggtataaaatctaagaaagtgaaactgcagttgaaagttacaacttccagccaaaactgaaacaagtaaagtttacaaggaacttagctaccacctagtgaatactgtgtttttttgctttgctttaaacaagaaaccaagagttaggaagatggaaaatttactaaaatgggctggagtctttccagtcttctaagagcaagctaaaggcagacttaaatcttacagcttccaaagaggcggtcaagctggtaactctctcaccattacccaaaatagcctttttcacaggcaaatttgaacattactttgagatatttccttccactggaacccatcagccaagttcagaattccagtggacatcacaacccattaagtcaccattagaaattaaattcttctgaaagtggcaaggcagatagtaacaagaaatgacctggatatcaaaacaattgttcatagtttaaaatgtattgcctaccatagattcaaaattcaaagtctttaacttcactaaaagtataagttattcttccaaatttcaggaggaactaaaaatgtataatacctcttacaatctaatttgcaaagtgtaacaatttgctcagagttattcttccaagagattttacattaagcataattggtcagatagattgaaatgtctagagaaaaatagaaactgtgtttcaggctaccaaagaaagagtagtcaaaagcaattcttcagtctgcacccaaaatgttgttctttttataaaaaatgaagaatctgatgaaaaactaagcaaatagactgtaattgcagtctttgagcatctcagtcttaatcccatgttatgtataagagaactagggtataggggaatggttcctaacttacccaagtttccataattagcaagcaaaagaagtgaaattgaaatccagtctgtttttgtagtctacgcaccttttcataacactatgctacctcaaacagtaggttctggacaccacatttgtaaataaccttcttccccaaatctagaaacagcatgcaatgtaagagtttgtggagaagaatccctgggtgaatatgcaaagactaatttattgctcttataaactcaagacaaagaaaaggaatgtacattcctacaactgtaaaattcaccttctcacacctagtggggttttgaaaatgattacatgcatccatgtgataaaattagcaaatagcattgattgaaaggactcaaacacaaaacacaaacacaaaacagtacataatatacaagcacatccatagaaaatctaaatggaaatatagcgggtaatagtggctcccaaaattcacatctaacaaaaatctcagaatatgacctaatttagaaatagagtttttcaggtcaggcgcggtggctcacgcctgtaatcccagcactttcggaggccaaggcaggcagatcacaaggtcaggagattgagaccatcctagctaatacagtgaaaccccttctctactaaaaatacaaaaaaattagctgggcgtggtggcgtgcacctgcagtcccagctattcgggaggctgaggcaggagaatggcgtgaacctgggaggcagagcttacagtgagcccagatcgcaccactgcactccagcctgggtgacagagcgagactctgtctcaaaaaaaaaataaaataaaatagagttttgcagaaataattaaggtaaggaccaaaatgagatcatactaattagtgtggacacaaactgcaatgagtgtctaaaagagacaggaaaggacac

SEQ ID NO: 678461 - DNA, 1918 bp, Homo sapiens
taaatatatttggaatgatgaaaactttactttgcacttggcttatttgctatggacaaatttattaattttggtggaggtattgtcaacatttctaacaggtagatgtaaatctttaattggtataaaatctaagaaagtgaaactgcagttgaaagttacaacttccagccaaaactgaaacaagtaaagtttacaaggaacttagctaccacctagtgaatactgtgtttttttgctttgctttaaacaagaaaccaagagttaggaagatggaaaatttactaaaatgggctggagtctttccagtcttctaagagcaagctaaaggcagacttaaatcttayagcttccaaagaggcggtcaagctggtaactctctcaccattacccaaaatagcctttttcacaggcaaatttgaacattactttgagatatttccttccactggaacccatcagccaagttcagaattccagtggacatcacaacccattaagtcaccattagaaattaaattcttctgaaagtggcaaggcagatagtaacaagaaatgacctggatatcaaaacaattgttcatagtttaaaatgtattgcctaccatagattcaaaattcaaagtctttaacttcactaaaagtataagttattcttccaaatttcaggaggaactaaaaatgtataatacctcttacaatctaatttgcaaagtgtaacaatttgctcagagttattcttccaagagattttacattaagcataattggtcagatagattgaaatgtctagagaaaaatagaaactgtgtttcaggctaccaaagaaagagtagtcaaaagcaattcttcagtctgcacccaaaatgttgttctttttataaaaaatgaagaatctgatgaaaaactaagcaaatagactgtaattgcagtctttgagcatctcagtcttaatcccatgttatgtataagagaactagggtataggggaatggttcctaacttacccaagtttccataattagcaagcaaaagaagtgaaattgaaatccagtctgtttttgtagtctacgcaccttttcataacactatgctacctcaaacagtaggttctggacaccacatttgtaaataaccttcttccccaaatctagaaacagcatgcaatgtaagagtttgtggagaagaatccctgggtgaatatgcaaagactaatttattgctcttataaactcaagacaaagaaaaggaatgtacattcctacaactgtaaaattcaccttctcacacctagtggggttttgaaaatgattacatgcatccatgtgataaaattagcaaatagcattgattgaaaggactcaaacacaaaacacaaacacaaaacagtacataatatacaagcacatccatagaaaatctaaatggaaatatagcgggtaatagtggctcccaaaattcacatctaacaaaaatctcagaatatgacctaatttagaaatagagtttttcaggtcaggcgcggtggctcacgcctgtaatcccagcactttcggaggccaaggcaggcagatcacaaggtcaggagattgagaccatcctagctaatacagtgaaaccccttctctactaaaaatacaaaaaaattagctgggcgtggtggcgtgcacctgcagtcccagctattcgggaggctgaggcaggagaatggcgtgaacctgggaggcagagcttacagtgagcccagatcgcaccactgcactccagcctgggtgacagagcgagactctgtctcaaaaaaaaaataaaataaaatagagttttgcagaaataattaaggtaaggaccaaaatgagatcatactaattagtgtggacacaaactgcaatgagtgtctaaaagagacaggaaaggacac

SEQ ID NO: 678462 - DNA, 1918 bp, Homo sapiens
taaatatatttggaatgatgaaaactttactttgcacttggcttatttgctatggacaaatttattaattttggtggaggtattgtcaacatttctaacaggtagatgtaaatctttaattggtataaaatctaagaaagtgaaactgcagttgaaagttacaacttccagccaaaactgaaacaagtaaagtttacaaggaacttagctaccacctagtgaatactgtgtttttttgctttgctttaaacaagaaaccaagagttaggaagatggaaaatttactaaaatgggctggagtctttccagtcttctaagagcaagctaaaggcagacttaaatcttacagcttccaaagaggcggtcaagctggtaactctctcaccattacccaaaatagcctttttcacaggcaaatttgaacattactttgagatatttccttccactggaacccatcagccaagttcagaattccagtggacatcacaacccattaagtcaccattagaaattaaattcttctgaaagtggcaaggcagatagtaacaagaaatgacctggatatcaaaacaattgttcatagtttaaaatgtattgcctaccatagattcaaaattcaaagtctttaacttcactaaaagtataagttattcttccaaatttcaggaggaactaaaaatgtataatacctcttacaatctaatttgcaaagtgtaacaatttgctcagagttattcttccaagagattttacattaagcataattggtcagatagattgaaatgtctagagaaaaatagaaactgtgtttcaggctaccaaagaaagagtagtcaaaagcaattcttcagtctgcacccaaaatgttgttctttttataaaaaatgaagaatctgatgaaaaactaagcaaatagactgtaattgcagtctttgagcatctcagtcttaatcccatgttatgtataagagaactagggtataggggaatggttcctaacttacccaagtttccataattagcaagcaaaagaagtgaaattgaaatccagtctgtttttgtagtctacgcaccttttcataacactatgctacctcaaacagtaggttctggacaccacatttgtaaataaccttcttccccaaatctagaaacagcaygcaatgtaagagtttgtggagaagaatccctgggtgaatatgcaaagactaatttattgctcttataaactcaagacaaagaaaaggaatgtacattcctacaactgtaaaattcaccttctcacacctagtggggttttgaaaatgattacatgcatccatgtgataaaattagcaaatagcattgattgaaaggactcaaacacaaaacacaaacacaaaacagtacataatatacaagcacatccatagaaaatctaaatggaaatatagcgggtaatagtggctcccaaaattcacatctaacaaaaatctcagaatatgacctaatttagaaatagagtttttcaggtcaggcgcggtggctcacgcctgtaatcccagcactttcggaggccaaggcaggcagatcacaaggtcaggagattgagaccatcctagctaatacagtgaaaccccttctctactaaaaatacaaaaaaattagctgggcgtggtggcgtgcacctgcagtcccagctattcgggaggctgaggcaggagaatggcgtgaacctgggaggcagagcttacagtgagcccagatcgcaccactgcactccagcctgggtgacagagcgagactctgtctcaaaaaaaaaataaaataaaatagagttttgcagaaataattaaggtaaggaccaaaatgagatcatactaattagtgtggacacaaactgcaatgagtgtctaaaagagacaggaaaggacac

SEQ ID NO: 678463 - DNA, 576 bp, Homo sapiens
catattttaacatagaaatgactaggtcaagatctactagcattttttaatgggcctggtctatgtttccaaagtgtctatcaaaaagttttcccaaatctgcagtgtaggcctgccggctggagacccaggagagctgatgacacagatgaaggtctgaggcagtctggtrgtctgatggggaattctcccttgctttgaaaggctggtccttttgttctatgcaggccttcaacttactggaggagctccgcccgcattatggagagcagtccactttactcaaggctcaccattttaaatgttaatgttatccaaaaatgccctctatgttgtatcataaataaagccaccacatttagtaaatctttccttacctccaaatccagtattcacttaatctggttgtcaaaaacttctctataattctttattttacacaatatatctgtaccacctaatgactgcatttcagaaacaaatcacactgaagctaatagactgcttctgcagactttctttagtaatcattatctgtgtgtttaaaagacagaaacagaacttagattttgcaac

SEQ ID NO: 678464 - DNA, 576 bp, Homo sapiens
catattttaacatagaaatgactaggtcaagatctactagcattttttaatgggcctggtctatgtttccaaagtgtctatcaaaaagttttcccaaatctgcagtgtaggcctgccggctggagacccaggagagctgatgacacagatgaaggtctgaggcagtctggtggtctgatggggaattctcccttgctttgaaaggctggtccttttgttctatgcaggccttcaacttactggaggagctccgcccgcattatggagagcagtccactttactcaaggctcaccattttaaatgttaatgttatccaaaaatgccctctatgttgtatcataaataaagccaccacatttagtaaatctttccttacctccaaatccagtattcacttaatctggttgtcaaaaacttctctataattctttattttacacaatatatctgtaccacctaatgactgcatttcagaaacaaatcacactgaagctaatagactgcttctgcagactttctttrgtaatcattatctgtgtgtttaaaagacagaaacagaacttagattttgcaac

SEQ ID NO: 678465 - DNA, 2158 bp, Homo sapiens
ttagtaaagaacttttgtaataaatatgaacatgcatgagatataagtcaaatacagactaattgttatattattttatatattaaatcgttggattacatcataataacttgcaagttgaagttaaattttttcattattatttggatttatattttaatttaaaaacaccattggtttgtatacaaaatcaatgtcatttttttctgattacaaacttagtatttatttgcttttagatgatttacacatcataaagagttctcagaaattagaactttaatcgagattatttattacaacatcttttaatatccattttaaaaacattgttgaggtataatttatatatcataaagttcactcattttacatgttcaattcaatggtttttagtgtatttacagagttgtacaactatcaccagtatctaactgtagaacaactttgattcaatagcaaattgagttcctttatgtttgtttcccgagttttccatctgattatttcaactttctgttcacttaatctttattaaaaagtatattaaatacaattatgttttagatttacaagcgaaatttttcagggacataaaaaggaaaagaatatcaataaaagtatagctctatgacctgtgatatatgtgctagaatgggtgtcagaggaatctgactaaacttcctaagaattattgctttgtgattatgtcccttctacccgttggggattttggcttcagacttaaaatttcagactaaagatgggtagcatctaattgtcaaaaaaagtgttgcaattaaatgatttaatgtaatgtttttatagaaattcaaggagaagcaaagcaattttgaattttcattatcttgacaacagtctggttgagatgggtgctatttgggtggactaaagaagatatggtaattattaatccctttagattctaaaaatctattactatatcaaattctcattattagactatttcacaactagaataagttactttatttccctgtagaagccttacaagactcttcttttatgttacattcttcaattttataaaggaacaacattaaatgaaggagagtcctgcatcttttttgtaatttctcatgaaggattctatgtgataccccttattaaaagctttatacaatattttcctctcagtgaggagagtgagactccagtttattgctcataaaaaaaactaattatgggacctatgcatcctgttccatttcatctgaaaactcagagctacgttttaaaataacgtgatgaacttattagtcaatcatgtgtaatggtgaaaacaccctcaaaaatgattgcataggttttatgctctggtctttgttgagaggtcttggaaatatctttttcagtgaaagtcatcctaactgcattttcktactcattaatcatcctccctttattttcccactctccccactacccttcccattgtctagtaaccatttttatactatctccatcagtttattttgctcagcttccacataataatttaaaatatttttaaaagaaagtcattctaaatcatctcggagaaagtttataaataataaatctataaatgatctaattcatttatagatagatttatgtatctaatcaaataggctttttatcccaaatacaattaatttaaaaatgataagagcaaaaataaaaatctgtggggtgaagaaactaaataaaacctaggttaagtgatttatttcttcttgtattgattggtttttataccaaataaagtgagatgaagaactgtgttagtgtcttatagatacagtctgaatgagtgagtgtgtaagtgagtaaatgaataaggaagaagatagcctgactactgccaagagaggtcctggaagggactgagattttcaaaattccaaaggaagtattatggagataaccaagttggtaaaataattaaaaaatgattgactaaatattttaaatagatgattttatattatataaattgtaccttaataaagtggttgggaaaaaaaaggaaatattccaagcagattaaatatggaagaaatctcaacattatggctctataggaagcaatttcttgagttgaaatttaactggaaaataagatgcaaatgcc

SEQ ID NO: 678466 - DNA, 2158 bp, Homo sapiens
ttagtaaagaacttttgtaataaatatgaacatgcatgagatataagtcaaatacagactaattgttatattattttatatattaaatcgttggattacatcataataacttgcaagttgaagttaaattttttcattattatttggatttatattttaatttaaaaacaccattggtttgtatacaaaatcaatgtcatttttttctgattacaaacttagtatttatttgcttttagatgatttacacatcataaagagttctcagaaattagaactttaatcgagattatttattacaacatcttttaatatccattttaaaaacattgttgaggtataatttatatatcataaagttcactcattttacatgttcaattcaatggtttttagtgtatttacagagttgtacaactatcaccagtatctaactgtagaacaactttgattcaatagcaaattgagttcctttatgtttgtttcccgagttttccatctgattatttcaactttctgttcacttaatctttattaaaaagtatattaaatacaattatgttttagatttacaagcgaaatttttcagggacataaaaaggaaaagaatatcaataaaagtatagctctatgacctgtgatatatgtgctagaatgggtgtcagaggaatctgactaaacttcctaagaattattgctttgtgattatgtcccttctacccgttggggattttggcttcagacttaaaatttcagactaaagatgggtagcatctaattgtcaaaaaaagtgttgcaattaaatgatttaatgtaatgtttttatagaaattcaaggagaagcaaagcaattttgaattttcattatcttgacaacagtctggttgagatgggtgctatttgggtggactaaagaagatatggtaattattaatccctttagattctaaaaatctattactatatcaaattctcattattagactatttcacaactagaataagttactttatttccctgtagaagccttacaagactcttcttttatgttacattcttcaattttataaaggaacaacattaaatgaaggagagtcctgcatcttttttgtaatttctcatgaaggattctatgtgataccccttattaaaagctttatacaatattttcctctcagtgaggagagtgagactccagtttattgctcataaaaaaaactaattatgggacctatgcatcctgttccatttcatctgaaaactcagagctacgttttaaaataacgtgatgaacttattagtcaatcatgtgtaatggtgaaaacaccctcaaaaatgattgcataggttttatgctctggtctttgttgagaggtcttggaaatatctttttcagtgaaagtcatcctaactgcattttcttactcattaatcatcctccctttattttcccactctccccactacccttcccattgtctagtaaccatttttatactatctccatcagtttattttgctcagcttccacataataatttaaaatatttttaaaagaaagtcattctaaatcatctcrgagaaagtttataaataataaatctataaatgatctaattcatttatagatagatttatgtatctaatcaaataggctttttatcccaaatacaattaatttaaaaatgataagagcaaaaataaaaatctgtggggtgaagaaactaaataaaacctaggttaagtgatttatttcttcttgtattgattggtttttataccaaataaagtgagatgaagaactgtgttagtgtcttatagatacagtctgaatgagtgagtgtgtaagtgagtaaatgaataaggaagaagatagcctgactactgccaagagaggtcctggaagggactgagattttcaaaattccaaaggaagtattatggagataaccaagttggtaaaataattaaaaaatgattgactaaatattttaaatagatgattttatattatataaattgtaccttaataaagtggttgggaaaaaaaaggaaatattccaagcagattaaatatggaagaaatctcaacattatggctctataggaagcaatttcttgagttgaaatttaactggaaaataagatgcaaatgcc

SEQ ID NO: 678467 - DNA, 2158 bp, Homo sapiens
ttagtaaagaacttttgtaataaatatgaacatgcatgagatataagtcaaatacagactaattgttatattattttatatattaaatcgttggattacatcataataacttgcaagttgaagttaaattttttcattattatttggatttatattttaatttaaaaacaccattggtttgtatacaaaatcaatgtcatttttttctgattacaaacttagtatttatttgcttttagatgatttacacatcataaagagttctcagaaattagaactttaatcgagattatttattacaacatcttttaatatccattttaaaaacattgttgaggtataatttatatatcataaagttcactcattttacatgttcaattcaatggtttttagtgtatttacagagttgtacaactatcaccagtatctaactgtagaacaactttgattcaatagcaaattgagttcctttatgtttgtttcccgagttttccatctgattatttcaactttctgttcacttaatctttattaaaaagtatattaaatacaattatgttttagatttacaagcgaaatttttcagggacataaaaaggaaaagaatatcaataaaagtatagctctatgacctgtgatatatgtgctagaatgggtgtcagaggaatctgactaaacttcctaagaattattgctttgtgattatgtcccttctacccgttggggattttggcttcagacttaaaatttcagactaaagatgggtagcatctaattgtcaaaaaaagtgttgcaattaaatgatttaatgtaatgtttttatagaaattcaaggagaagcaaagcaattttgaattttcattatcttgacaacagtctggttgagatgggtgctatttgggtggactaaagaagatatggtaattattaatccctttagattctaaaaatctattactatatcaaattctcattattagactatttcacaactagaataagttactttatttccctgtagaagccttacaagactcttcttttatgttacattcttcaattttataaaggaacaacattaaatgaaggagagtcctgcatcttttttgtaatttctcatgaaggattctatgtgataccccttattaaaagctttatacaatattttcctctcagtgaggagagtgagactccagtttattgctcataaaaaaaactaattatgggacctatgcatcctgttccatttcatctgaaaactcagagctacgttttaaaataacgtgatgaacttattagtcaatcatgtgtaatggtgaaaacaccctcaaaaatgattgcataggttttatgctctggtctttgttgagaggtcttggaaatatctttttcagtgaaagtcatcctaactgcattttcttactcattaatcatcctccctttattttcccactctccccactacccttcccattgtctagtaaccatttttatactatctccatcagtttattttgctcagcttccacataataatttaaaatatttttaaaagaaagtcattctaaatcatctcggagaaagtttataaataataaatctataaatgatctaattcatttatagatagatttatgtatctaatcaaataggctttttatcccaaatacaattaatttaaaaatgataagagcaaaaataaaaatctgtggggtgaagaaactaaataaaacctaggttaagtgatttatttcttcttgtattgattggtttttataccaaataaagtgagatgaagaactgtgttagtgtcttatagatacagtctgaatgagtgagtgtgtaagtgagtaaatgaataaggaagaagatagcctgactactgccaagagaggtcctggaagggactgagattttcaaaattccaaaggaagtattatggagataaccaagttggtaaaataattaaaaaatgattgactaaatattttaaatagatgattttatattatataaattgtaccttaataaagtggttgggaaaaaaaaggaaatattccaagcagattaaatatggaagaaatctcaacattatggctctataggaagcaatttcttgagttgaaatttaackggaaaataagatgcaaatgcc

SEQ ID NO: 678468 - DNA, 673 bp, Homo sapiens
gatctcagckcactgcagcctccacctcccaggttccagcgattctcttgcctcagcctcccaagtagctgggattacaggtgtgtgccaccacactcagctaatttttgtatttttagtagaggcagggttttgcgatgttaaccaggctggtctcgaactcctgacctcaggtgatccgcctgcctcggcctcccaaagtgctgggattacaggcgtgagccaccaaacccagcctataaacaattgttctaataaaagaaatgtgaactagagaaaaccatttaaggaagtaatcaaatttagtcaaacgggacttcctgagatttcacttacttaaaagtgaataaatgtatacattttattcttcaaaacaacagaaaacctgggttagatgggttaaatgatggttaaacaccaagaaagatctccaattccacctcttctgtctgtatatttaaacactcaatccattactgaataaaatattatatatatacagacgtcccaagaaataaattactgtaacattgcctgaaatacactcttaatctaatcctcaaggcatgcagacattacagagatagggatcagggtgtaagctgtctttaatttcaaaaagatgcttaacagctcattacagtagtgcacttgctgaactgatgactgatga

SEQ ID NO: 678469 - DNA, 673 bp, Homo sapiens
gatctcagcgcactgcagcctccacctcccaggttccagcgattctcttgcctcagcctcccaagtagctgggattacaggtgtgtgccaccacactcagctaatttttgtatttttagtagaggcagggttttgcgatgttarccaggctggtctcgaactcctgacctcaggtgatccgcctgcctcggcctcccaaagtgctgggattacaggcgtgagccaccaaacccagcctataaacaattgttctaataaaagaaatgtgaactagagaaaaccatttaaggaagtaatcaaatttagtcaaacgggacttcctgagatttcacttacttaaaagtgaataaatgtatacattttattcttcaaaacaacagaaaacctgggttagatgggttaaatgatggttaaacaccaagaaagatctccaattccacctcttctgtctgtatatttaaacactcaatccattactgaataaaatattatatatatacagacgtcccaagaaataaattactgtaacattgcctgaaatacactcttaatctaatcctcaaggcatgcagacattacagagatagggatcagggtgtaagctgtctttaatttcaaaaagatgcttaacagctcattacagtagtgcacttgctgaactgatgactgatga

SEQ ID NO: 678470 - DNA, 673 bp, Homo sapiens
gatctcagcgcactgcagcctccacctcccaggttccagcgattctcttgcctcagcctcccaagtagctgggattacaggtgtgtgccaccacactcagctaatttttgtatttttagtagaggcagggttttgcgatgttaaccaggctggtctcgaactcctgacctcaggtgatccgcctgcctcggcctcccaaagtgctgggattacaggcgtgagccaccaaacccagcctataaacaattgttctaataaaagaaatgtgaactagagaaaaccatttaaggaagtaatcaaatttagtcaaacgggacttcctgagatttcacttacttaaaagtgaataaatgtatacattttattcttcaaaacaacagaaaacctgggttagatgrgttaaatgatggttaaacaccaagaaagatctccaattccacctcttctgtctgtatatttaaacactcaatccattactgaataaaatattatatatatacagacgtcccaagaaataaattactgtaacattgcctgaaatacactcttaatctaatcctcaaggcatgcagacattacagagatagggatcagggtgtaagctgtctttaatttcaaaaagatgcttaacagctcattacagtagtgcacttgctgaactgatgactgatga

SEQ ID NO: 678471 - DNA, 594 bp, Homo sapiens
gatttttctaatcaattctgaaaaatccccagaggtcaccaggggtccttaacatattagaaaggaaagaaagactgttgcaaaagctacaatcatcgtttctacaaaatatgtaacctcaaacccttgagacgacttcatcaaaccaatccatttataaatcttgcaagctatacaaactgaaatcagaactgctttccaaaaagaaactctgggccaatttatgatggcccacatcaaaataaacttcctaggcaaataaggacacaggagaaagcagctttctctatgtgttggtacagccttagcatagcctattcccttcacaaaagttatactgaagagagtctaccatgggaaagggaaattacaatcatgagcattrtacattaagtattaattactttacacagaattgtcatatgtcttaacactaaagggaaaatggtttgtactgggtataataaagtagcaaaaaaaaaagaaaaagaactcaacattatgatatatggaaatcaatgcaaatatgtttcattacttctattacttgaatcagaattcaaccctggattggtttcatacaaactactatga

SEQ ID NO: 678472 - DNA, 619 bp, Homo sapiens
taagggctccaagactttactccaccaatgagattttcaggtttctctcccacagcaagtcaacatgtatattcctcttcaacccaagtcatgggagcccaaatgccccttatgcttcatttacttcagtattttcctcctaccacaccaccttcctgcatactagccggctatccagcaaaacttcatcctcggctctgaatataaattgtcccaactgttcctctgaacctaatactatttatctgcacyactgctttctattattggttacatataatgaggtttctaagttaccttgcataattatcttgccattggaataaagaaaatgaagatcctgagaaattgaaagatattttggattaagatgtaatcttttgacaaaagggggaaaaaagcttggacttacaaccagaaactttcttaaagtgttactaatattgcttcacaaagaaaaataaacagtgaacaaaagtgatgctccccactttaatgagctgatttaggcctgatcatgattacaattgcaacatccctagggcagataagctggtgaggtacagaacactatttctgaggaaagtgtctcagaaaaaaaaacctttgaccttattaa

SEQ ID NO: 678473 - DNA, 619 bp, Homo sapiens
taagggctccaagactttactccaccaatgagattttcaggtttctctcccacagcaagtcaacatgtatattcctcttcaacccaagtcatgggagcccaaatgccccttatgcttcatttacttcagtattttcctcctaccacaccaccttcctgcatactagccggctatccagcaaaacttcatcctcggctctgaatataaattgtcccaactgttcctctgaacctaatactatttatctgcaccactgctttctattattggttacrtataatgaggtttctaagttaccttgcataattatcttgccattggaataaagaaaatgaagatcctgagaaattgaaagatattttggattaagatgtaatcttttgacaaaagggggaaaaaagcttggacttacaaccagaaactttcttaaagtgttactaatattgcttcacaaagaaaaataaacagtgaacaaaagtgatgctccccactttaatgagctgatttaggcctgatcatgattacaattgcaacatccctagggcagataagctggtgaggtacagaacactatttctgaggaaagtgtctcagaaaaaaaaacctttgaccttattaa

SEQ ID NO: 678474 - DNA, 619 bp, Homo sapiens
taagggctccaagactttactccaccaatgagattttcaggtttctctcccacagcaagtcaacatgtatattcctcttcaacccaagtcatgggagcccaaatgccccttatgcttcatttacttcagtattttcctcctaccacaccaccttcctgcatactagccggctatccagcaaaacttcatcctcggctctgaatataaattgtcccaactgttcctctgaacctaatactatttatctgcaccactgctttctattattggttacatataatgaggtttctaagttaccttgcataattatcttgccattggaataaagaaaatgaagatcctgagaaattgaaagatattttggattaagatgtaatcttttgacaaaagggggaaaaaagcttggacttacaaccagaaactttcttaaagtgttactaatattgcttcacaaagaaaaataaacagtgaacaaaagtgatgctccccactttaatgagctgatttaggcctgatcatgattacaattgcaacatccctagggcagataagctggtgaggtacagaacactatttctgaggaaagtgtctcagaaaaaaaaamctttgaccttattaa

SEQ ID NO: 678475 - DNA, 1994 bp, Homo sapiens
gacgaagcccctgccaaagccagaggggctggagtaggtagaaagccgccaaggagtccgagcgttctaggtattgacaagacttgaattttagacttcaaaattgtgacatcagtgaatgttccccaaacagatcgcagcctggctcctggaggtctggatgtgctaggtgggtcagtagggttggaagagggcccttgcatcttttttgctctgtttacatttgtatgtctgctagtatacagagtagctaagggatccaaatgggggaaggccttgggttctaaactggcctttcatccaagtcctgctaagagctcttgttcctcagtttccccggctagaatgatgaaaacattgacctatttctcagaacaaggtaggtcaggggtttggaattacttatctggactactgcataagtgctccactcagcagattgctcctggtgcaacacacatactgggaaacgatgtgatgacactagcacaaaggacagtttatagttattttctgtggttcctcgttttttggtgttttttttttgtttttttttttttttttagacgaaattttgctctgttgcccaggctggagtgcagtggcacgatctcagctcactgcaacctctgcctcccagggtcaaacaattctcatgcctcagcctcctgagtagctgggattacagatgcccaccaccatgcctggctgatttttttgtattttagtagagacggggtttcaccatgttgaccaggttggtctccaactcctgagctcaggcaatccgcctgtcttggcctcccaaagtgctaggattacaggcatgagccactgcagcggccggttccttgtgtcttaaagcaaacacaggcacagtattctgggcaaaccagatgttaatagcttgacctctctgtcaaaggaggacttggttgcttaagacccttaaagctgtcaaagttatagcttctccaggatactatcatcctcacccatttcttattctctttgcagggagagatcatctctcaaaaagctcccatcagagcaaccattctgggactttgagcagaatgcttaaggcagtggttctaaaattccacaccacctgttcttccagttgtgtcctctctgagctgcctctgacggtcacattccatggccatgtgccacagcagacttgtgatactgattttagtgttgtccttggccattgggggaagggaggaaggagwgagaagagaaggggagagaagaagagaaatgggagtggggtccattcatccatctctcttgtcattaggggcccagcagttcccactatggtacctaggaaactagcttggacctggaggccatccagtgacctagtctgggccagtaaagccaccaggccattttcctgcttcggacatgctttctcagctgccctcccccttagctaaggctgaaatgactcatcttcccgtgccctagttccacggggtttcatctctgtgactcgggacagaggccttggttgccaccaaaggcagcttatggtgtagcttcaggtctggcctgactcagtggccttccctcagctattcactacagaggcagttaatgaagaagacacaagggtagcaggcctgagggataacttcaaggctaacgtgtcttttttccagtacttactcttcttttgaattttaagaattccagattttattctaagtcagagaatactgtgagaaaggattttattgtatccactctctccaaatggtgtgaacatctggatttgcatccttcccatgacagatatcacaaattgggttgggttttgcatgctgaggatgatttttggtattcagctaacacccttcctttaaggaagttagaacacttgataaattttaagcttttgatcctcagtagtacccctggaaaattaaggtccagtgaggtaaattgtcttgattaattatatgacatgcactgctttttgg

SEQ ID NO: 678476 - DNA, 1502 bp, Homo sapiens
gtggattccccccaaaatatactgtttctctaaatgacatctacacataattgaacttgaagaaaacatactcatagcatattattgaatatattccaaatctctagtaaatatggttaaggaaaataacacttaggaaaagcgtatcatttcagggtttgtgatggctgagacaaaaattctgagcataatttgatgggtatatatcttaggccttagaaagaataacttcaaaatataagagacaggtattgcttcccgagcattaacttgagacacaagaaggttggatatgcttttaaaagtaaaaatcttactcccacaagttgcttattagttgcaagggaaaaatattaattatacatcagagaaatcagacattttgataaagtgattagcattaaccataaccctttcctgcctccagaagtgacatcctgagaaagagacaacgcttacgcagcacaaagacagctaaaacctaaaccaaaaacagaagtgcttttaggataagatactttattttttttttttttttgagatggagtcttgctctgttgcccaggctaaagtgcagaggcacgatctcagctcactgcaagctctgcctcccaggtttacaccattctcccgcctcagcttcctgagtagctgggactacaggtgcctgccaccacacccagctaattttttgtatttttagtagagacggggtttcactgtgttagccaggatggtcgacctcgtgattcacccgcctcatcctcccaaagtgctgggattacaggcatgagccactgtgcccagccaggataagatacttttaaagtactatttggagaaagaaggagaaagcaggtaccagcaactcactgcctcaaaatgggaatacgtgttaattagggaaagtagggaaactgttccattgtttcctttattcttatgtggcaggtagaggacggtttccttagttctctaacacaatggtcccctaactttctgggaccagggactggtttcttgggagacaatttttccatatgatggggggttggggaaatagtctcaagatgraactgctccacctcagatcatcaggcattagattctcatgaggagctctcaacctagatcccttgcatgcacagttcatactagggtttgcactcttatgagaatctaatgccgcagctgatctgacaggaagtagagctgagacagtaatgctctcctcctgctgtacagctgggttcctaacaggccttggaccagtattggtctgtggcctgggggttggacatccctgctctaacaaacactgagaaatacagacaatcagaacagccttgtgatattgttaattaccggcctggcaaaagttcatcagggatgtggttgagggatttaaactataaaatagcaaggctggactagataacctcttgtctttctcacttcttgcagtctatgtaagataactgagatgcagttggaaaaaacca

SEQ ID NO: 678477 - DNA, 660 bp, Homo sapiens
taaaattcctctttgtactctttctctttttttctcagactggccaatgcttagggaaaatagaaagaacctacgttgaaatattgggggcgggttcccccaatacagactctcatgttcaagtcctagatttgccagctatgactttgggcaagtcagcaagaattctctcatctcaaaatgagagctggataacttcttaggcccctagaacrcttgaaattatgccatcataagacataacggctgctgctgatgcacacttcttaaataaaccaaaggaggaaagacaatctgatgataaggatgagaagtctgattacaaaaaatgaacgttttgttcagcttaagtaatgagatatactacaggtacagaagtttgagagaataacaaagtgggagatatagcagacctaatccttcctaaattgagtgcaaaatcatgagaatgctttaataatattttttaataaaatgtaatatatgaataattttctattttcaacttgtcagtcaacaatgccatctttaattatgagaatgctaaatatatttctcaatttcaagttatattatagccaactggagctaagtcatccaaccgaactcatttttccttaaaaggtggttttgtgttttattcttggtactagataagat

SEQ ID NO: 678478 - DNA, 1260 bp, Homo sapiens
gcatgayagaatattatgcagccagtatgtatgtttgtaaaataataataagagaaaaaatgcaaagttcaaagttgagcttcatagtacaattaaaaactagaaaaaataaatctaacgtatgtatagacaaaaaagcaaaggaactattccaaatatcagttgattttagatagtggacccatgacgagtttttcctccctgctttctactgctctatactaagtatgtgtcaagctttatttgaaaaactcaagtacaagtccacggtacaacctagcactctgggggcactggcactccaaaagaaagttgccttcccactccaggagaaaagaccatctcaccggggaccgctgtgcccaccccaggtctgaaacgtcccctatccgcggacggaagcatcttcaggggtcgctggagaaccgtgggggcgcgagcgcgcagcttccgcgaacacccgggaagaccgcctgcggcgcaccgccccgggggctttggctgacgatcacggaagctccgccgggcgagggaggacggcagcagcccggagagaaggtctctgcagagcggggacgcagggtcccgggtgacactcggcgaggggagcctcccctttgactgtctcgctgagacctctcaggcttctagtcttcaaacacgagggttgaattattcggagagctcagcagtaagcggattcagaaggggaaagccgagggagccataaactgacaagtgctgcgacactgtccggactcaccaggggccgaagtctaaccactgcccccacccgcggggccagggggcgcctcccctcgaggcagaaccctgtccaagtgcgcggagaaacgcaaagcgcggcagggacggctccctgaagcccaccgggtaaaagcaatgccagacatcaaaaccaggagcctccgagagccgtcatcggacaagataggaagaagagtccctaatagggccctaaaataccccctaagtttgtccctctggggtgaatttgaagtcttcagagctaagtggctgattatgagcctcagcacctcgggtcccaggtgatattttggagatgagactccaccctaaagggatagcaactctgtaaaagctgaaaaagaattcctacataatatcaataatcacaccagaatggatctcttctgtaaattaacattttaaaagatatctttaccaataaagagatttaaagggagtgtttcttgtaaatacggttaataagcatgtcga

SEQ ID NO: 678479 - DNA, 691 bp, Homo sapiens
  misc_feature 68, 69, 70, 71, 72, 73, 74, 75, 76, 77, 78, 79, 80, 81, 82,83, 84, 85, 86, 87, 88, 89, 90, 91, 92, 93, 94, 95, 96,97, 98, 99, 100, 101, 102, 103, 104, 105, 106, 107, 108,109, 110, 111, 112, 113, 114, 115, 116, 117, 118, 119, 120: n = A,T,C or G
  misc_feature 121, 122, 123, 124, 125, 126, 127, 128, 129, 130, 131, 132,133, 134, 135, 136, 137, 138, 139, 140, 141, 142, 143, 144,145, 146, 147, 148, 149, 150, 151, 152, 153, 154, 155, 156,157, 158, 159, 160, 161, 162, 163, 164, 165, 166, 167: n = A,T,C or G
gttggttttaaatttgaagtcttgttacaaattgctcagtatataaatttatttatatgaatacatannnnnnnnnnnnnnnnnnnnnnnnnnnnnnnnnnnnnnnnnnnnnnnnnnnnnnnnnnnnnnnnnnnnnnnnnnnnnnnnnnnnnnnnnnnnnnnnnnnnacgatgtgcctggatgactgattacgaattcgagctcggtaccttctccgagcagaaagaaaagttaataaagcgtcaagaagatttagataggggttacaaatcratcatggaactgatgaatgtacttgaacttcggaaatatgaagctattcagttaactttcaaacaggtatgtttcgctttgtagttaaaacatacacacagaggacaaaagcttccagctcttttcagtttgtaaagattttaaagctgttttcctcattaccaggtgaatctaatacatgtgaacaaacctagcatataggtttacagtaacttgaatgttttacacagcccttagaaggatctagtctgttatccttgttcttaagattaaaaaataattggttgcttttaaatattttacttaagtgttatatataattctaagcaaaatttatatttcaatctgcttttgttttaaggtatctaagaacttcagtgaagtattccagaagttagtacctggtggcaaagctact

SEQ ID NO: 678480 - DNA, 691 bp, Homo sapiens
  misc_feature 68, 69, 70, 71, 72, 73, 74, 75, 76, 77, 78, 79, 80, 81, 82,83, 84, 85, 86, 87, 88, 89, 90, 91, 92, 93, 94, 95, 96,97, 98, 99, 100, 101, 102, 103, 104, 105, 106, 107, 108,109, 110, 111, 112, 113, 114, 115, 116, 117, 118, 119, 120: n = A,T,C or G
  misc_feature 121, 122, 123, 124, 125, 126, 127, 128, 129, 130, 131, 132,133, 134, 135, 136, 137, 138, 139, 140, 141, 142, 143, 144,145, 146, 147, 148, 149, 150, 151, 152, 153, 154, 155, 156,157, 158, 159, 160, 161, 162, 163, 164, 165, 166, 167: n = A,T,C or G
gttggttttaaatttgaagtcttgttacaaattgctcagtatataaatttatttatatgaatacatannnnnnnnnnnnnnnnnnnnnnnnnnnnnnnnnnnnnnnnnnnnnnnnnnnnnnnnnnnnnnnnnnnnnnnnnnnnnnnnnnnnnnnnnnnnnnnnnnnnacgatgtgcctggatgactgattacgaattcgagctcggtaccttctccgagcagaaagaaaagttaataaagcgtcaagaagatttagataggggttacaaatcaatcatggaactgatgaatgtacttgaacttcggaaatatgaagctattcagttaactttcaaacaggtatgtttcgctttgtagttaaaacatacacacagaggacaaaagcttccagctcttttcagtttgtaaagattttaaagctkttttcctcattaccaggtgaatctaatacatgtgaacaaacctagcatataggtttacagtaacttgaatgttttacacagcccttagaaggatctagtctgttatccttgttcttaagattaaaaaataattggttgcttttaaatattttacttaagtgttatatataattctaagcaaaatttatatttcaatctgcttttgttttaaggtatctaagaacttcagtgaagtattccagaagttagtacctggtggcaaagctact

SEQ ID NO: 678481 - DNA, 603 bp, Homo sapiens
aattctgtatccatggcacattgctgattgctgatgatgctctaaatgctgactctaaatggtggactgcaatttgtctggaagaagaacaatggatcatctgtgtttgggggagacttcatgcaggtgggatttgggggagccttgaagaagtgagcaagttttggataggtggaagtgaacttactggctatacccggaaaagagcaggatgggaataaaggaaaagagagcctgttttggtgaataagtttaatattgaattgtgatagycaaaaaaataggtaggatgatgggctaggtttgggaggaggctccaaagttaagaagcgaggcttatccttgagatcatggcctttaccacaaccagcaccatcatcattatgagcagctgtgtcttgcattcttataatgtggttctgaggactttacatgtagtatcttatttaatccccaaacaaccttatggaacagataacaattgttatgtccactttatagcagaggaactgggatataaagaagtcaaccaacttccagcgggtaaggtatgtgggcaagcaggggttcagatgaactgaatcaggcagcttgctttcagag

SEQ ID NO: 678482 - DNA, 603 bp, Homo sapiens
aattctgtatccatggcacattgctgattgctgatgatgctctaaatgctgactctaaatggtggactgcaatttgtctggaagaagaacaatggatcatctgtgtttgggggagacttcatgcaggtgggatttgggggagccttgaagaagtgagcaagttttggataggtggaagtgaacttactggctatacccggaaaagagcaggatgggaataaaggaaaagagagcctgttttggtgaataagtttaatattgaattgtgatagtcaaaaaaataggtaggatgatgggctaggtttgggaggaggctccaaagttaagaagcgaggcttatccttgagatcatggcctttaccacaaccagcaccatcatcattatgagcagctgtgtcttgcattcttataatgtggttctgaggactttacatgtagtatcttatttaatccccaaacaaccttatggaacagataacaattgttatgtccactttatagcagaggaactgggatataaagaagtcaaccaacttccagcsggtaaggtatgtgggcaagcaggggttcagatgaactgaatcaggcagcttgctttcagag

SEQ ID NO: 678483 - DNA, 620 bp, Homo sapiens
ctgcctcagcctcccaagtagctgggattacaggcgcacgccaccacgtctggctaatttwtgtatgtttagtggatggggtttcaccatgttggccaggctgatctcaaactcccaacctcaggtgatccgcccgcctcggcctcccaaattgctgggattaaaggcgtgagccaccatgcccagcctcagtttacagttattaatgtacatgcagatgacagctatagccatagtagatgaggccaccaggggagagcatgtggatcagtcctcttatcttttttgggggacccagacacctttgagaagctgctaaaagctccacttcttcctttaaaagtatttgcatccaagtttaaggagcttatagatccttctgaagcccatccacaactcttgtaaggtcaagagatgtcaaattaaaaacaaacaaacaaacaaaaacacaacaaaccttgtgtagacacaggaatggatcctgggttgagccttggggaacagcaacatttagagaaggacagaggaagcacctgcggaggctgagatggagtagacaaagagaaacagggaggaggaattccaaaatagagtatgttatcaaaactaacagcaaagtg

SEQ ID NO: 678484 - DNA, 597 bp, Homo sapiens
ttgtggttatgtccatagtatcaatcgtaagctcactatattccattagaaaggtaagttcaaatttattatgggtttcacaactgtatttgtattttgtagtaacatctaatgtgtgtagaatagtactcagcacaaagtaaattctcaatgcagtcattattttagttgcatgaatatatgctccttctcccctccctttttgtttgttttgctgkttgggaggttggggatagcaggtgctttgtagagtcaagactctaccacttgactgtctagagaccatagggatctgtagttgctgatcacagactggaatactggaaggtactgttttcagggctatcctgttaaagtgcttcttgttttgtcttgaactaaaacaatgaatactctgaatttctgactcgacattttataaagatggagtgatatgcatttattgaattaacttatttttttagcactctggcttttttcctgaggagtgggttcatattggctagtttctaacttctttttcctctttcagcaatatgttatgttgcatgacatggtggcaactcatagtaccgtaagagtttcagtttgtagagt

SEQ ID NO: 678485 - DNA, 1109 bp, Homo sapiens
attcctggctaattttttctctttttttgaagaggcgaggtctcactgtgttgcccatgctggtcttgaattcctgggctcaagagatcctcctgcctcagtctcccacagtcttgagattacaggcttgagccactctgcctcgcacatacattcatttttttaagaactaaaagtatacatttcagttcctgagtttgtatcaaattcatttatttatataaaattgtatttttcttctatgtagcaggcactatgctaggctctggggattcggtgtagagataacagtagtaacagtaacaatacagtgtgacaaatgctatgataaggagaagtcagccaacttatgtattaggggagctcatttactgtaggtatcagggatgacttctttgattaagtgcttgtaagtgatgactatttgaattagccaaataagaggtaggtgagaagttgataaggggaggctgagagaaggagagaagagggttctaaatacccaaaggcctagaaattagagattgtgtggacattataagaactgaaagaagaaatttagtatgacaaatacagcaactatraatgatggatagctctctgaagcatgttagggatttgggctcagtccaaaagacagtggaaagccattgaaggctattattattaatttattttattttattttattttttcgatagagtctccttcccaggctggagtgcagtggcaatcttggctcactgcaacctccgcctcccaggttcaaggaattcttgtgcctcagcctcctgagtagccgggattagaggcatgtgccaccacgcccagccagttttttgtatttttagtagaaacagggtgttaccatgttggccaggctggtctctaactctgggtctgaagtgatccacccgccttggccttccagagtgctgggattacaggcgtacacaccatcacacccagctaatttttgtgtttttagtagaaacagtgtcaaccttgttggccaggctggtttggtactcctggcctcaagtgatctgcccgccttggcctcccagagtgctgggattactggcatgagccaccatgcatagccacca

SEQ ID NO: 678486 - DNA, 1129 bp, Homo sapiens
ttgaaatcagcctgtgaatatctgagttggtagagctggacgaggttacagctgagcataatttttgtttctaaaggagagataaaaccaagtatctcaggaatcaaaaacagctattaggtacccgtcgaagggatatttgagatccttagggtcctcagtcttytttaaatgtatgtatatttttaaaatgaaaccaaggtcataagtgtaattaaaggtaccctaaagaaatcacattagttttgaaatgatcatgaggaatctacagcattaactttaggaaacttcttataaagccccaagaggtttcacattggttgtgtctgttgttaatatgagctatttaagtgtatttaaggagtgtagtgacaaagagacacgtggaaatagcaagatgtttctagtgtgctccaccttaaagccttgttcactttcttttttttttttcagatggagttttgttcttgttgcccaggctggaatgcaatggcgcgatctcagctcactgcaacctctgcctcctgggttcaagcgattctcctggttcagcctcctgagtagctgggattacaggaatgcgccaccacacctggctacttttgtatttttagtagagatggggtttctccacgtgcatcaggctagtctcacactcctgacttcagatgatccacccgcctcggcctcccaaagtgctgggattacaggcgtgagccaccgtgcctggccaaagccttcttcactttcattttgtggctgctgttgtgaaatctgcagaacctcaagctgtttggactccatcttctaggttgaattagattacaggtaatctcatggtggaggtgtattctggatcgactcacttttgaaatgtttatgaaagaaattccttcacctcgggacttccacactggagctggcaatcagtatcaccttaatttacctatcacagtgaggcatctctgctctgaggaaaacaaaacaaaacaaaacaaaacaaaacaaaaaagaagagctaatggttctgttttgttttgttgttttagagacagggtcttgctctgtcgcccgggctggaatgcagtgtcatcatcacagctcactgtagccttgatctcctgggctc

SEQ ID NO: 678487 - DNA, 743 bp, Homo sapiens
ctgcctggcaattacattgatgtagaacagtggttctcaaacttcagcgtggcctcagaatcacatgggagcttgctgaaaatacagattccttcctcctacctctagagatgctggcccaccagatctggggcagggcccgggaatctgcaattacaataattacccctggatgattccaagatggaccacactctgaagggcatgaaaaaaattgctcataagtcttcgagtgaataatgaattgaggaacagtgaataaagacttcttggctttcctagtgtgccatatactggcactgtgccatccccacctggctgagattctgtcagcatttggattccagagtgaaaagtacctgaaacagccattgagtcaccaacgcaccacctccagctaatttctgcccctcagtcctaaggcctggtgttgcctgagaacaggaagatcatagcccaaagctgcrtgacacatcaggcacctgaggcctttggccatggattagaaattaaaccgcatattagagtaaatgaaacaaaaaggaaaggagccctgagccagcctaatggctatgcacagacaaaagactaggagactggcctggttcgtggtgtgaaattcaggcaccagatcaggaggcacacttagcacatttggaataaatcccaaacatgatggcatcctggtttgacaaaccaagacagaaatgcaatgagtaggaataacttcagggtggagactg

SEQ ID NO: 678488 - DNA, 571 bp, Homo sapiens
  misc_feature 155, 156, 157, 158, 159, 160, 161, 162, 163, 164, 165, 166,167, 168, 169, 170, 171, 172, 173, 174, 175, 176, 177, 178,179, 180, 181, 182, 183, 184, 185, 186, 187, 188, 189, 190,191, 192, 193, 194, 195, 196, 197, 198, 199, 200, 201: n = A,T,C or G
  misc_feature 202, 203, 204, 205, 206, 207, 208, 209, 210, 211, 212, 213,214, 215, 216, 217, 218, 219, 220, 221, 222, 223, 224, 225,226, 227, 228, 229, 230, 231, 232, 233, 234, 235, 236, 237,238, 239, 240, 241, 242, 243, 244, 245, 246, 247, 248: n = A,T,C or G
  misc_feature 249, 250, 251, 252, 253, 254: n = A,T,C or G
cctgggagtggtgccacagagggcccagcggtgcgccggcgcccagagtcacagcttactctgcacatgtgcggsacatgcacacactcactctccttccactgggggcagtgcgagcatcaaattagaaatcagaacatttggttaaaaaaccnnnnnnnnnnnnnnnnnnnnnnnnnnnnnnnnnnnnnnnnnnnnnnnnnnnnnnnnnnnnnnnnnnnnnnnnnnnnnnnnnnnnnnnnnnnnnnnnnnnnttttttcttgaacggagtctcgctctttcacccaggccggactgcagtggcgctatctcggctcactgcaagctccacctcccgggttcacaccattctcctgcctcagcctcctgagtagctgggactacaggcgcccgccactgcgcccggctatttttttatatttttagtagagacggggtttcaccgtgttagccaggatggtctcgatctcctgacctagtgatccgcccgcctcggcctcccaaagtgctgggattacaggagtgagccaccgcgcccggccctaagagtcacattttaaaaacggtcta

SEQ ID NO: 678489 - DNA, 571 bp, Homo sapiens
  misc_feature 155, 156, 157, 158, 159, 160, 161, 162, 163, 164, 165, 166,167, 168, 169, 170, 171, 172, 173, 174, 175, 176, 177, 178,179, 180, 181, 182, 183, 184, 185, 186, 187, 188, 189, 190,191, 192, 193, 194, 195, 196, 197, 198, 199, 200, 201: n = A,T,C or G
  misc_feature 202, 203, 204, 205, 206, 207, 208, 209, 210, 211, 212, 213,214, 215, 216, 217, 218, 219, 220, 221, 222, 223, 224, 225,226, 227, 228, 229, 230, 231, 232, 233, 234, 235, 236, 237,238, 239, 240, 241, 242, 243, 244, 245, 246, 247, 248: n = A,T,C or G
  misc_feature 249, 250, 251, 252, 253, 254: n = A,T,C or G
cctgggagtggtgccacagagggcccagcggtgcgccggcgcccagagtcacagcttactctgcacatgtgcgggacatgcacacactcactctccttccactgggggcagtgcgagcatcaaattagaaatcagaacatttggttaaaaaaccnnnnnnnnnnnnnnnnnnnnnnnnnnnnnnnnnnnnnnnnnnnnnnnnnnnnnnnnnnnnnnnnnnnnnnnnnnnnnnnnnnnnnnnnnnnnnnnnnnnnttttttcttgaacggagtctcgctctttcacccaggccggactgcagtggcgctatctcggctcactgcaagctccacctcccgggttcacaccattctcctgcctcagcctcctgagtagctgggactacaggcgcccgccactgcgcccggctatttttttatatttttagtagagacggggtttcaccgtgttagccaggatggtctcgatctcctgacctagtgatccgcccgcctcggcctcccaaagtgctgggattacaggagtgagccaccgcgcccggccctaagagtcacatttyaaaaacggtcta

SEQ ID NO: 678490 - DNA, 1387 bp, Homo sapiens
ctttttccccacattttttttctccacagcatctatcactatctgatataccatatgttttccttatgttctatatgcattttcccactagaatataagttccatgagggccgggactttcctatgttttactctctactgtatcaccaacatctagaacagtatttggcacatagtagccacttaaaaattatttggtgaatgaatgagttagtgaatgaatctatacttatgtatgaatgtaaacagaggggaaaagcctttactrtgagttcaggaaatagtttccctctccctctactctctcctctccatgaaaagcctgacaagcaaggtgttctgccaattaaaaagaagttatcatagctcctcactaagcacatacacctcacctcccagccgtcatgggaaaaagaaagtaacttccaagatccacttaccaatccctctatggataagtaacagatgaacagatactagtatccaattccaagcatcacctatattacaggatcccagactcatgcaaggacataagaacagggcagtccagatggggttgtttgaggcagggggggggaccagtttattccagagcatgagtgatcctggataccaattacaattacagtaacacttacagtatctacaataccagtcacaattacagtgtctacaaattttaggaactatacacctgatcctaggtcagttggttcatcttatcactctagcaccataagataatcatagactcctgccacctatttgtcaaattagttttgagtagttctactataatgtggaggaggtggtaggaaaagactgaagcaaagatggaagccacattccctagtctcatggatctcagaacccaaagcattctctgtagataccacaaaatgagaggaacttcataaagagaatggtagtttttcatcaactgcgagatggatgttatgcctcaccatgctcatagaggaacataaagcaaaatctcaatgagacagaaagtgaatagctgttaaccatttaataaatcctgactatatgcagctgtgaaaaggcaacttaaaagacagccacagtcattgtttatagaccaaaagatttctgaggagttgggaagactctcagaaagcatccagactttcagttgcctcttcttgccaaaagccaatgaagtccataaaaccccttccaccatagcagcttggagcatcttaagtagtcacaacagatgcggaaagcatacctgcaaagctgcagaaacagtacacctccaagaaatttctgcctctacatgagtttatcaacagtaagtaagaagagaaataactccaactacagaaatacaaatgaaacatactagacttcaggagcaaag

SEQ ID NO: 678491 - DNA, 629 bp, Homo sapiens
gccaggctggtcttgaactcctgacctcaggtgatccgcctgcgttggcctcccaaagtgctgggattacaggcgtgagccactgcgcycagcccatagttaacacttctataaatatttgtgcctattgaaaggaacatcactccccacactgcaactgaacaaaagagtgataatgttaattgctttattcttgagcttttcttgaataaaagagggtcgtaggatatggaacaaaatagactagaaaatagggttgataaggtactgattctgccaatactgcttaatgctctccccaagcaattgtcttttagatatgttatttcccagtgtgaatggtgttttttaaatatgtcaagcaattaagaatataagtatattctcatctcagctaaacgtagaatctttacaaagaatttttggtatccttaaccctaatatgtggagggataagattaaaaatgttcaccaccttatttttatttatttatttatctattattttgagacagagcctcactccaccctgactggagtgctgtggtgtgaccttggctcattgcaacctctgcctcccaagttcaagtgattctcctgcctcagcctctcaagtagctagaattata

SEQ ID NO: 678492 - DNA, 629 bp, Homo sapiens
gccaggctggtcttgaactcctgacctcaggtgatccgcctgcgttggcctcccaaagtgctgggattacaggcgtgagccactgcgctcagcccatagttaacacttctataaatatttgtgcctattgaaaggaacatcactccccacactgcaactgaacaaaagagtgataatgttaattgctttattcttgagcttttcttgaataaaagagggtcgtaggatatggaacaaaatagactagaaaatmgggttgataaggtactgattctgccaatactgcttaatgctctccccaagcaattgtcttttagatatgttatttcccagtgtgaatggtgttttttaaatatgtcaagcaattaagaatataagtatattctcatctcagctaaacgtagaatctttacaaagaatttttggtatccttaaccctaatatgtggagggataagattaaaaatgttcaccaccttatttttatttatttatttatctattattttgagacagagcctcactccaccctgactggagtgctgtggtgtgaccttggctcattgcaacctctgcctcccaagttcaagtgattctcctgcctcagcctctcaagtagctagaattata

SEQ ID NO: 678493 - DNA, 685 bp, Homo sapiens
aatagcatttcttcctaaagttttgcagtagaatttatgcagattgatagctggtaacagtgacattctgggagattaatactgattaaacactttgcttgcattggctattccagccccccaaaaatgctgcaaatactgcagtttaagtatcacgggggggcagggcaygggcagggtgggtggggaacagcatcaagcatcaaggcacccccctgtccctggtgatggaggctttctcacacttggcgtgaaacatccattttgcttccatgacaaaggtttgcagacttgaagcaggtcctctgtttcccactttttaataacctgccttttcctcatcctagtaccttttccagactcagggaatcctcctgggaggccacagtgccttcaggacacaatctggctgaaaatgttagatgtctaatgagattttgaaaaacacatgtgttggcaaagagaatgcagctgttctgatggaggaagcattcaaatgttaggatggaaagccagcgcctggttcctagttgcgacagccatgcaactctggaaagaatggggaagcagcgccatctggccagtgagccatacaggcagctcccaggggtttaccaattcaaagaggagagctgccagggactggtttaggccagcttcacagttcctgggtgccgtaagtgat

SEQ ID NO: 678494 - DNA, 685 bp, Homo sapiens
aatagcatttcttcctaaagttttgcagtagaatttatgcagattgatagctggtaacagtgacattctgggagattaatactgattaaacactttgcttgcattggctattccagccccccaaaaatgctgcaaatactgcagtttaagtatcacgggggggcagggcacgggcagggtgggtggggaacagcatcaagcatcaaggcacccccctgtccctggtgatggaggctttctcacacttggcgtgaaacatccattttgcttccatgacaaakgtttgcagacttgaagcaggtcctctgtttcccactttttaataacctgccttttcctcatcctagtaccttttccagactcagggaatcctcctgggaggccacagtgccttcaggacacaatctggctgaaaatgttagatgtctaatgagattttgaaaaacacatgtgttggcaaagagaatgcagctgttctgatggaggaagcattcaaatgttaggatggaaagccagcgcctggttcctagttgcgacagccatgcaactctggaaagaatggggaagcagcgccatctggccagtgagccatacaggcagctcccaggggtttaccaattcaaagaggagagctgccagggactggtttaggccagcttcacagttcctgggtgccgtaagtgat

SEQ ID NO: 678495 - DNA, 1191 bp, Homo sapiens
taaattaacctccacatataattagaaatgatccctgctctttttcactgagcactggatatttgatagttaactttgtttttttttttgaaacagagtatcatactgtcgcccaggtcagctcgctgcaacctccacctcccaggttcacccaattctcctgcctcaccctcccgagtagctgggattacaggtgtacaccaccacatccggctaattttttgtatttttattagagacggggtttcactatgttggccagactggtctcaaactcctgacctcgtgatctgcctgccttggcctcccaaagagctgggattacaggcatgagccaccgcgcctggtggatagttaacattttattgagaattaatccaggtctgtagtcccccatctacaattttgaaatctaaagagttccgaaaactctagggcttttgaaactctgacagcaaactctgatgtgatatttatggcctttatccctctttatatattttgatgcatatatatttgtgtgctttaggggagctgccctaggcttcacttgggttgattcatagtatacattataagcaccattttacctttctcaaattaaaaaaaaaaaaattcagtaacaaactatatccctggttccagggatttctggtaagcgattatatagacttatatttgggaaaggctcagtggtgcttgccaaccccattctttttgttatcatcattcatgatagcattaaagactattaatagtgtcatttattgagtacttcctgtgtttataggcatggctctaaaccgagagcttgaggctgtcacttttcacatcgagccacatcactacttaatgacagagctgcatgggctacagctggtatccaaaccaggaattctactcctgcactctagcatttatttttacatctactatatatttgtccatgagatttttctcttcctccttagtatcctgttttacttctgcagtttggtgttctttgtggaaaatgggataagaatagtggaatatacgaggtaatccatgcgtaatgtagtttggttgaggcccttaagctcttagctccctccccgtgtcagttttyttataaaattggattccaacaccagctctgcccacttcacagggtgattatgaggctgtgataagataataatatatttcaaa

SEQ ID NO: 678496 - DNA, 640 bp, Homo sapiens
tcccacattataaacctataccatggcccttcacaatttcttctttgttgttgctatttttgttatttatatttaaattgtacaacatgatattttgatagacataataaaatgattactatagtaaagcaattaacatttccatctttctacatatttacctcccaatgttttgtactaagagcacctaaaatctattccctttcctgtatacaatattttatttcttgtatgcaatgtattattaactattctccttatgctagatgttatttctctagatttattcatcctacataactggaactatgttcactttaacctatttattccctgacttctcgctattggtaaccaccactctataccctgtttctatgtatttaactttttttttagatttcatatttgagagagattgtacagtattttttttctttctgtrtctggctcatttcacttaacataatgtcctctggtttcatccatattgtcacaaatagtagaatttctctttttaaggctgaataatatttcattatatgtctatgtatatgcgtgtacatatgtaatcaccataattcatttgtccattcatcacacagtagacacatagattgtttctatgtcttgactatta

SEQ ID NO: 678497 - DNA, 640 bp, Homo sapiens
tcccacattataaacctataccatggcccttcacaatttcttctttgttgttgctatttttgttatttatatttaaattgtacaacatgatattttgatagacataataaaatgattactatagtaaagcaattaacatttccatctttctacatatttacctcccaatgttttgtactaagagcacctaaaatctattccctttcctgtatacaatattttatttcttgtatgcaatgtattattaactattctccttatgctagatgttatttctctagatttattcatcctacataactggaactatgttcactttaacctatttattccctgacttctcgctattggtaaccaccactctataccctgtttctatgtatttaactttttttttagatttcatatttgagagagattgtacagtattttttttctttctgtatctggctcatttcacttaacataaygtcctctggtttcatccatattgtcacaaatagtagaatttctctttttaaggctgaataatatttcattatatgtctatgtatatgcgtgtacatatgtaatcaccataattcatttgtccattcatcacacagtagacacatagattgtttctatgtcttgactatta

SEQ ID NO: 678498 - DNA, 3285 bp, Homo sapiens
tcctcatgtaatctcacctttcgcaggaaaacacatgttcatggtgaacgactcagcccagctttgctggcctatttccatctagaattttcacccccgtatgtctctatagctttccatacttattcccccttctgtttttctacccctttatggattgatgggaagctctttgtggtaaaaacttcccaaacgagtggggaccatgctatgagaacatgtatttgctrtaaaggagactagacaaaaagctggacttttctcatttttaaatagaaataaacagctttccttttttatccatttattcagtcagcaaatatccattaagtgctactctatgacaggaattgtgctagaaaatttcagagacaaattttttaccaataaaaatgaccacaatgcacatcgtgtctttttttctagaaaaaaatctgctatttcatatttatcctttatatgataaataatttactattatcagcaagtaataataagcataaaaaatcctgactattttctaaggctaaaactttatactacatttttgtatagatgattccaatatggtttgtttggtcacacatgttttaagactttaagatataatcactatttttgccttaattcctttcctttaaaaaaaagcaattaaaaggaggaaatcacatgttcaagttgctttggggacagtttcatcaatcataccttcagtgtatctgagaaaggttagcaactcttgttcagaaaattacagcactaatatcttaagagacttgggtacattgaccacaaccatatatatatagtcacataatcaattgaccaactagaattctactctgaacattgtgggaggcaagtcactccaaagccattttcctctacattccctcacatgccacacttcatacacctgcattccagctttctcactctctcccaaatactttcccatgtgtttagttctgcttacttacaacttcctcttcagttttttcaattccaaccatggccatgttttcctaccaatgtcttatcatggtagtatatccatggtcctattgtgggtaaaagcaaatgctgaaaagctgacacaaatagtcatgttacactattacagatcatacatgttttcagactcactatttatttctagtgcatatgggtagcctcattttaaaggggtaaggtaaaaaggatcttgaagatagtagattataagaaaataaagagcttcctcagagaatgatgattttccatgtctgtcatataaagtagtattcatttcttaaccttaagtgagtgattatttctctgtctttacaatatatttacaagctcaacccataatctttcaccaaattgttttccaattttatttctggaaatctaggaagatttctgagatccaaggtagattctgtgcattcagttaatttttctataagaatagcatcctctggttaaaattctctgatatctcttagctctagagctgtcactgttagattgcattgttcagtcaatttttgataaccatttgtcaatcttgtaattattaagtgttacaatgcttatgattagcccagtacatttgctgaaattaatcacgtccaaatcaatatcaatggcatagttagacatacaccttactgcattaacagtcccttaggcagctcacttagctaagttggaaggaccaatagaaaggaaaattaatctcaactttaacttgtcctgtattacagcacttggataaagtttaatagatatcaatgatgatacatttgagcagtgagactatcagaaacccttttctaaaaaataagctcaccaaaatgaaggaaagaaaacttcaagagagatttaaaatttcaaaagaaatccttttttctcaaaattcttgcttatttcctgttcttgaccacacctattaaagttgtaaatgctccatgttagaaatgtatgaaggtgtcctatgtttatgtttttaagtagatttttattataatcaagatcaacagtgatatgtccagatttattatagtgaaaatgaaatgtcttccagctcttgatcttttttcttcctgttttctttccttcctttcttctgtttttctttgttttcctttctttcttctgtgtttctggctctctcagaatattagatacgtttattttatacgaatttaagaacaattgtaatgatgagccttgctttctttctaaagaatagggtttgggctgtgcgtggtagctcacatttgttaccctagcacattgggagcccaaggcgggaggatcaagagttcaagacaagcctgggcaacatagcaagactctgtctgtacaaaaattacaaaatttagccaggcatggtggcatgaacctgtaagtcctagctacttgggaggatgaggcaggaggatttcttgacaccaagaattcaagattgcagtatgctctaattgcatcactgtactccagcctaggtgacagagcgagaccctgcctccaaaaaaacaaagaaaacaaactagaatagggtttcaatttatttttccagattattactcctttgcattggctcggaaacttttgttgctctcttataaaagggataagaagttaatatactgtttcagtagacatttattgaatgatttttatgtgcctcaaactttctttagtactcgacattcattcagcaaagtgtgcaataagcactataatgatctttgctttacagataaggaaattgagacataaaagagataacttgtccaaattatacatagctatcaagtagcaaagctgaaataatacctcatttctatgtaactttgaagtttgttttcttaactgctatactttgaggcctgaagaatttgtcttttgcaagatcatgcagattatgaacaatgaaacaacaatttgaatacagatatttggactccaaagccaatgcttttcaccaccataataccttgctccaggaaaattatgtttgctgatataaaataatacatgtggaagctgtatgtgatgcctacaattgcgcttttgggttatcacacctgcatttttcaatgtagaaaccacagagtctatttatttgtaatttgtagccaagacttatattctactttcatgtaaaatcatcattttaataacataacttgtttatttttccaatattaggagggtgaggggaagcttaagagactgaaacatacctgcaatatttttctataaaatgtgtaattccataacaattagaaa

SEQ ID NO: 678499 - DNA, 3285 bp, Homo sapiens
tcctcatgtaatctcacctttcgcaggaaaacacatgttcatggtgaacgactcagcccagctttgctggcctatttccatctagaattttcacccccgtatgtctctatagctttccatacttattcccccttctgtttttctacccctttatggattgatgggaagctctttgtggtaaaaacttcccaaacgagtggggaccatgctatgagaacatgtatttgctataaaggagactagacaaaaagctggacttttctcatttttaaatagaaataaacagctttccttttttatccatttattcagtcagcaaatatccattaagtgctactctatgacaggaattgtgctagaaaatttcagagacaaattttttaccaataaaaatgaccacaatgcacatcgtgtctttttttctagaaaaaaatctgctatttcatatttatcctttatatgataaataatttactattatcagcaagtaataataagcataaaaaatcctgactattttctaaggctaaaactttatactacatttttgtatagatgattccaatatggtttgtttggtcacacatgttttaagactttaagatataatcactatttttgccttaattcctttcctttaaaaaaaagcaattaaaaggaggaaatcacatgttcaagttgctttggggacagtttcatcaatcataccttcagtgtatctgagaaaggttagcaactcttgttcagaaaattacagcactaatatcttaagagacttgggtacattgaccacaaccatatatatatagtcacataatcaattgaccaactagaattctactctgaacattgtgggaggcaagtcactccaaagccattttcctctacattccctcacatgccacacttcatacacctgcattccagctttctcactctctcccaaatactttcccatgtgtttagttctgcttacttacaacttcctcttcagttttttcaattccaaccatggccatgttttcctaccaatgtcttatcatggtagtatatccatggtcctattgtgggtaaaagcaaatgctgaaaagctgacacaaatagtcatgttacactattacagatcatacatgttttcagactcactatttatttctagtgcatatgggtagcctcattttaaaggggtaaggtaaaaaggatcttgaagatagtagattataagaaaataaagagcttcctcagagaatgatgattttccatgtctgtcatataaagtagtattcatttcttaaccttaagtgagtgattatttctctgtctttacaatatatttacaagctcaacccataatctttcaccaaattgttttccaattttatttctggaaatctaggaagatttctgagatccaaggtagattctgtgcattcagttaatttttctataagaatagcatcctctggttaaaattctctgatatctcttagctctagagctgtcactgttagattgcattgttcagtcaatttttgataaccatttgtcaatcttgtaattattaagtgttacaatgcttatgattagcccagtacatttgctgaaattaatcacgtccaaatcaatatcaatggcatagttagacatacaccttactgcattaacagtcccttaggcagctcacttagctaagttggaaggaccaatagaaaggaaaattaatctcaactttaacttgtcctgtattacagcacttggataaagtttaatagatatcaatgatgatacatttgagcagtgagactatcagaaacccttttctaaaaaataagctcaccaaaatgaaggaaagaaaacttcaagagagatttaaaatttcaaaagaaatccttttttctcaaaattcttgcttatttcctgttcttgaccacacctattaaagttgtaaatgctccatgttagaaatgtatgaaggtgtcctatgtttatgtttttaagtagatttttattwtaatcaagatcaacagtgatatgtccagatttattatagtgaaaatgaaatgtcttccagctcttgatcttttttcttcctgttttctttccttcctttcttctgtttttctttgttttcctttctttcttctgtgtttctggctctctcagaatattagatacgtttattttatacgaatttaagaacaattgtaatgatgagccttgctttctttctaaagaatagggtttgggctgtgcgtggtagctcacatttgttaccctagcacattgggagcccaaggcgggaggatcaagagttcaagacaagcctgggcaacatagcaagactctgtctgtacaaaaattacaaaatttagccaggcatggtggcatgaacctgtaagtcctagctacttgggaggatgaggcaggaggatttcttgacaccaagaattcaagattgcagtatgctctaattgcatcactgtactccagcctaggtgacagagcgagaccctgcctccaaaaaaacaaagaaaacaaactagaatagggtttcaatttatttttccagattattactcctttgcattggctcggaaacttttgttgctctcttataaaagggataagaagttaatatactgtttcagtagacatttattgaatgatttttatgtgcctcaaactttctttagtactcgacattcattcagcaaagtgtgcaataagcactataatgatctttgctttacagataaggaaattgagacataaaagagataacttgtccaaattatacatagctatcaagtagcaaagctgaaataatacctcatttctatgtaactttgaagtttgttttcttaactgctatactttgaggcctgaagaatttgtcttttgcaagatcatgcagattatgaacaatgaaacaacaatttgaatacagatatttggactccaaagccaatgcttttcaccaccataataccttgctccaggaaaattatgtttgctgatataaaataatacatgtggaagctgtatgtgatgcctacaattgcgcttttgggttatcacacctgcatttttcaatgtagaaaccacagagtctatttatttgtaatttgtagccaagacttatattctactttcatgtaaaatcatcattttaataacataacttgtttatttttccaatattaggagggtgaggggaagcttaagagactgaaacatacctgcaatatttttctataaaatgtgtaattccataacaattagaaa

SEQ ID NO: 678500 - DNA, 3285 bp, Homo sapiens
tcctcatgtaatctcacctttcgcaggaaaacacatgttcatggtgaacgactcagcccagctttgctggcctatttccatctagaattttcacccccgtatgtctctatagctttccatacttattcccccttctgtttttctacccctttatggattgatgggaagctctttgtggtaaaaacttcccaaacgagtggggaccatgctatgagaacatgtatttgctataaaggagactagacaaaaagctggacttttctcatttttaaatagaaataaacagctttccttttttatccatttattcagtcagcaaatatccattaagtgctactctatgacaggaattgtgctagaaaatttcagagacaaattttttaccaataaaaatgaccacaatgcacatcgtgtctttttttctagaaaaaaatctgctatttcatatttatcctttatatgataaataatttactattatcagcaagtaataataagcataaaaaatcctgactattttctaaggctaaaactttatactacatttttgtatagatgattccaatatggtttgtttggtcacacatgttttaagactttaagatataatcactatttttgccttaattcctttcctttaaaaaaaagcaattaaaaggaggaaatcacatgttcaagttgctttggggacagtttcatcaatcataccttcagtgtatctgagaaaggttagcaactcttgttcagaaaattacagcactaatatcttaagagacttgggtacattgaccacaaccatatatatatagtcacataatcaattgaccaactagaattctactctgaacattgtgggaggcaagtcactccaaagccattttcctctacattccctcacatgccacacttcatacacctgcattccagctttctcactctctcccaaatactttcccatgtgtttagttctgcttacttacaacttcctcttcagttttttcaattccaaccatggccatgttttcctaccaatgtcttatcatggtagtatatccatggtcctattgtgggtaaaagcaaatgctgaaaagctgacacaaatagtcatgttacactattacagatcatacatgttttcagactcactatttatttctagtgcatatgggtagcctcattttaaaggggtaaggtaaaaaggatcttgaagatagtagattataagaaaataaagagcttcctcagagaatgatgattttccatgtctgtcatataaagtagtattcatttcttaaccttaagtgagtgattatttctctgtctttacaatatatttacaagctcaacccataatctttcaccaaattgttttccaattttatttctggaaatctaggaagatttctgagatccaaggtagattctgtgcattcagttaatttttctataagaatagcatcctctggttaaaattctctgatatctcttagctctagagctgtcactgttagattgcattgttcagtcaatttttgataaccatttgtcaatcttgtaattattaagtgttacaatgcttatgattagcccagtacatttgctgaaattaatcacgtccaaatcaatatcaatggcatagttagacatacaccttactgcattaacagtcccttaggcagctcacttagctaagttggaaggaccaatagaaaggaaaattaatctcaactttaacttgtcctgtattacagcacttggataaagtttaatagatatcaatgatgatacatttgagcagtgagactatcagaaacccttttctaaaaaataagctcaccaaaatgaaggaaagaaaacttcaagagagatttaaaatttcaaaagaaatccttttttctcaaaattcttgcttatttcctgttcttgaccacacctattaaagttgtaaatgctccatgttagaaatgtatgaaggtgtcctatgtttatgtttttaagtagatttttattataatcaagatcaacagtgatatgtccagatttattatagtgaaaatgaaatgtcttccagctcttgatcttttttcttcctgttttctttccttcctttcttctgtttttctttgttttcctttctttcttctgtgtttctggctctctcagaatattagatacgtttattttatacgaatttaagaacaattgtaatgatgagccttgctttctttctaaagaatagggtttgggctgtgcgtggtagctcacatttgttaccctagcacattgggagcccaaggcgggaggatcaagagttcaagacaagcctgggcaacatagcaagactctgtctgtacaaaaattacaaaatttagccaggcatggtggcatgaacctgtaagtcctagctacttgggaggatgaggcaggaggatttcttgacascaagaattcaagattgcagtatgctctaattgcatcactgtactccagcctaggtgacagagcgagaccctgcctccaaaaaaacaaagaaaacaaactagaatagggtttcaatttatttttccagattattactcctttgcattggctcggaaacttttgttgctctcttataaaagggataagaagttaatatactgtttcagtagacatttattgaatgatttttatgtgcctcaaactttctttagtactcgacattcattcagcaaagtgtgcaataagcactataatgatctttgctttacagataaggaaattgagacataaaagagataacttgtccaaattatacatagctatcaagtagcaaagctgaaataatacctcatttctatgtaactttgaagtttgttttcttaactgctatactttgaggcctgaagaatttgtcttttgcaagatcatgcagattatgaacaatgaaacaacaatttgaatacagatatttggactccaaagccaatgcttttcaccaccataataccttgctccaggaaaattatgtttgctgatataaaataatacatgtggaagctgtatgtgatgcctacaattgcgcttttgggttatcacacctgcatttttcaatgtagaaaccacagagtctatttatttgtaatttgtagccaagacttatattctactttcatgtaaaatcatcattttaataacataacttgtttatttttccaatattaggagggtgaggggaagcttaagagactgaaacatacctgcaatatttttctataaaatgtgtaattccataacaattagaaa

SEQ ID NO: 678501 - DNA, 2053 bp, Homo sapiens
tcctgacctcttggtctgaagatcaaattcttaataaaatgttcacttttatgaccccttccaaatggagcttatcatcrttctcctaatatccacacagttcagtgtgcaaagaaaagaaagtctaccttccattgaaactcagagggctcatggtataaatgggatatgggtgcaggagagcggggaggatgggagatagaccctgggtgtggaaggtctctgagaaagcttacagcaggatgccaggaggtggtggatactgggtttaatgtttctgtattatgtctatgctctgactatctgaaacattaatatggtttattatgcctgctaactgggcacctttgtctatcctaaacactgagtctcatctgtagggtcttcaatgtatcctttatcagcgtcatcggcctgccacatacatgatgcctgagctcaggccacagaatgagcatcctaaagaagaagttcactcttcttgtgctggaaaactaaatggatctcttggcctgtatgcaattcttactttcttctttttatggctgtttacagaaacaaatacataataaatacagccatattttaatgaatatcagccacatgatttatgatttttttggataatattttttatgagtacccaatttatccttatctggacaccatgtaccattctcagcgggagaaccaaattgtatgttagctgggtcctcagagtgccagctgtcccttctctccacactacttatctgaatccttaaatccaagggaggaagggagaacatgaatcagatcggaaggaaagggttgatctcagaagaaaggtaaggatcattaagggtattctggaagtacaatgtggacatctacctgaaataattctaatttggagatagagttgttaaataaagtcatcatgagaggagaagcaattaagggcactatctcagaagaaacagattctttccttttagatttactgtttcctctaaagctctcccacaccatgcctatcaccaccactcatggccaggatgtttttcctaagatagaaatctgatcatatcatccccatttaaaatgcttttctggttctccaccctctttaggataaatgctatgatgtcccttggcatgtaaacattctgtgatttgtctactacctctaccataccctaacctgaaccagcgttctcactcaccatctcccaattcacacactcctttcttctttttaatgcaaaccacatgcagtagcttgaaagtgtcataatatacaatccatacctgtaccttttcatacaaggcaatctctctcccacaggtgattcctctgattttctcatggcagcctccccttcccaaagcaccatctcctccaagaagccttgattgacttgttaaaggctaaggaaggggttcagtcaatatttttcatagcatttttcgattccctctattacagtacttattatcttttactgtatactttttgcatacttgcaccccattagaatatgagcaccttgtaagcaaataatatgttttctatatttttctgtcttaatgcatggcactattgggacttaataaactgatttgaaagagtaaatacctattaaagtccagatgttcacaccaatcctgttgtttctaatactgtacataggaaaggggcccaaagcctctccaataagagcctaggctattggcctgattgagatgccatcttattcataattcaatccttcatgcttttttttcacttatatcattttggtgggtaggggctatgtttacacatcatggtataattttttattactttaccacttagcacagaatctagaactttatagtaataaagcaaatcatttgaggcactataaagcatgttaagatattaattttacataatccttctgccttttctcttgcaatggtctttttggtctctccctatcaaacatcaatatattttttgccagatattttttcttcatcatcaaccctcctaactagtagtcaaaattggaactgtcatgcccaa

SEQ ID NO: 678502 - DNA, 2053 bp, Homo sapiens
tcctgacctcttggtctgaagatcaaattcttaataaaatgttcacttttatgaccccttccaaatggagcttatcatcgttctcctaatatccacacagttcagygtgcaaagaaaagaaagtctaccttccattgaaactcagagggctcatggtataaatgggatatgggtgcaggagagcggggaggatgggagatagaccctgggtgtggaaggtctctgagaaagcttacagcaggatgccaggaggtggtggatactgggtttaatgtttctgtattatgtctatgctctgactatctgaaacattaatatggtttattatgcctgctaactgggcacctttgtctatcctaaacactgagtctcatctgtagggtcttcaatgtatcctttatcagcgtcatcggcctgccacatacatgatgcctgagctcaggccacagaatgagcatcctaaagaagaagttcactcttcttgtgctggaaaactaaatggatctcttggcctgtatgcaattcttactttcttctttttatggctgtttacagaaacaaatacataataaatacagccatattttaatgaatatcagccacatgatttatgatttttttggataatattttttatgagtacccaatttatccttatctggacaccatgtaccattctcagcgggagaaccaaattgtatgttagctgggtcctcagagtgccagctgtcccttctctccacactacttatctgaatccttaaatccaagggaggaagggagaacatgaatcagatcggaaggaaagggttgatctcagaagaaaggtaaggatcattaagggtattctggaagtacaatgtggacatctacctgaaataattctaatttggagatagagttgttaaataaagtcatcatgagaggagaagcaattaagggcactatctcagaagaaacagattctttccttttagatttactgtttcctctaaagctctcccacaccatgcctatcaccaccactcatggccaggatgtttttcctaagatagaaatctgatcatatcatccccatttaaaatgcttttctggttctccaccctctttaggataaatgctatgatgtcccttggcatgtaaacattctgtgatttgtctactacctctaccataccctaacctgaaccagcgttctcactcaccatctcccaattcacacactcctttcttctttttaatgcaaaccacatgcagtagcttgaaagtgtcataatatacaatccatacctgtaccttttcatacaaggcaatctctctcccacaggtgattcctctgattttctcatggcagcctccccttcccaaagcaccatctcctccaagaagccttgattgacttgttaaaggctaaggaaggggttcagtcaatatttttcatagcatttttcgattccctctattacagtacttattatcttttactgtatactttttgcatacttgcaccccattagaatatgagcaccttgtaagcaaataatatgttttctatatttttctgtcttaatgcatggcactattgggacttaataaactgatttgaaagagtaaatacctattaaagtccagatgttcacaccaatcctgttgtttctaatactgtacataggaaaggggcccaaagcctctccaataagagcctaggctattggcctgattgagatgccatcttattcataattcaatccttcatgcttttttttcacttatatcattttggtgggtaggggctatgtttacacatcatggtataattttttattactttaccacttagcacagaatctagaactttatagtaataaagcaaatcatttgaggcactataaagcatgttaagatattaattttacataatccttctgccttttctcttgcaatggtctttttggtctctccctatcaaacatcaatatattttttgccagatattttttcttcatcatcaaccctcctaactagtagtcaaaattggaactgtcatgcccaa

SEQ ID NO: 678503 - DNA, 2053 bp, Homo sapiens
tcctgacctcttggtctgaagatcaaattcttaataaaatgttcacttttatgaccccttccaaatggagcttatcatcgttctcctaatatccacacagttcagtgtgcaaagaaaagaaagtctaccttccattgaaactcagagggctcatggtataaatgggatatkggtgcaggagagcggggaggatgggagatagaccctgggtgtggaaggtctctgagaaagcttacagcaggatgccaggaggtggtggatactgggtttaatgtttctgtattatgtctatgctctgactatctgaaacattaatatggtttattatgcctgctaactgggcacctttgtctatcctaaacactgagtctcatctgtagggtcttcaatgtatcctttatcagcgtcatcggcctgccacatacatgatgcctgagctcaggccacagaatgagcatcctaaagaagaagttcactcttcttgtgctggaaaactaaatggatctcttggcctgtatgcaattcttactttcttctttttatggctgtttacagaaacaaatacataataaatacagccatattttaatgaatatcagccacatgatttatgatttttttggataatattttttatgagtacccaatttatccttatctggacaccatgtaccattctcagcgggagaaccaaattgtatgttagctgggtcctcagagtgccagctgtcccttctctccacactacttatctgaatccttaaatccaagggaggaagggagaacatgaatcagatcggaaggaaagggttgatctcagaagaaaggtaaggatcattaagggtattctggaagtacaatgtggacatctacctgaaataattctaatttggagatagagttgttaaataaagtcatcatgagaggagaagcaattaagggcactatctcagaagaaacagattctttccttttagatttactgtttcctctaaagctctcccacaccatgcctatcaccaccactcatggccaggatgtttttcctaagatagaaatctgatcatatcatccccatttaaaatgcttttctggttctccaccctctttaggataaatgctatgatgtcccttggcatgtaaacattctgtgatttgtctactacctctaccataccctaacctgaaccagcgttctcactcaccatctcccaattcacacactcctttcttctttttaatgcaaaccacatgcagtagcttgaaagtgtcataatatacaatccatacctgtaccttttcatacaaggcaatctctctcccacaggtgattcctctgattttctcatggcagcctccccttcccaaagcaccatctcctccaagaagccttgattgacttgttaaaggctaaggaaggggttcagtcaatatttttcatagcatttttcgattccctctattacagtacttattatcttttactgtatactttttgcatacttgcaccccattagaatatgagcaccttgtaagcaaataatatgttttctatatttttctgtcttaatgcatggcactattgggacttaataaactgatttgaaagagtaaatacctattaaagtccagatgttcacaccaatcctgttgtttctaatactgtacataggaaaggggcccaaagcctctccaataagagcctaggctattggcctgattgagatgccatcttattcataattcaatccttcatgcttttttttcacttatatcattttggtgggtaggggctatgtttacacatcatggtataattttttattactttaccacttagcacagaatctagaactttatagtaataaagcaaatcatttgaggcactataaagcatgttaagatattaattttacataatccttctgccttttctcttgcaatggtctttttggtctctccctatcaaacatcaatatattttttgccagatattttttcttcatcatcaaccctcctaactagtagtcaaaattggaactgtcatgcccaa

SEQ ID NO: 678504 - DNA, 2053 bp, Homo sapiens
tcctgacctcttggtctgaagatcaaattcttaataaaatgttcacttttatgaccccttccaaatggagcttatcatcgttctcctaatatccacacagttcagtgtgcaaagaaaagaaagtctaccttccattgaaactcagagggctcatggtataaatgggatatgggtgcaggagagcggggaggatgggagatagaccctgggtgtggaaggtctctgagaaagcttacagcaggatgccaggaggtggtggatactgggtttaatgtttctgtattatgtctatgctctgactatctgaaacattaatatggtttattatgcctgctaactgggcacctttgtctatcctaaacactgagtctcatctgtagggtcttcaatgtatcctttatcagcgtcatcggcctgccacatacatgatgcctgagctcaggccacagaatgagcatcctaaagaagaagttcactcttcttgtgctggaaaactaaatggatctcttggcctgtatgcaattcttactttcttctttttatggctgtttacagaaacaaatacataataaatacagccatattttaatgaatatcagccacatgatttatgatttttttggataatattttttatgagtacccaatttatccttatctggacaccatgtaccattctcagcgggagaaccaaattgtatgttagctgggtcctcagagtgccagctgtcccttctctccacactacttatctgaatccttaaatccaagggaggaagggagaacatgaatcagatcrgaaggaaagggttgatctcagaagaaaggtaaggatcattaagggtattctggaagtacaatgtggacatctacctgaaataattctaatttggagatagagttgttaaataaagtcatcatgagaggagaagcaattaagggcactatctcagaagaaacagattctttccttttagatttactgtttcctctaaagctctcccacaccatgcctatcaccaccactcatggccaggatgtttttcctaagatagaaatctgatcatatcatccccatttaaaatgcttttctggttctccaccctctttaggataaatgctatgatgtcccttggcatgtaaacattctgtgatttgtctactacctctaccataccctaacctgaaccagcgttctcactcaccatctcccaattcacacactcctttcttctttttaatgcaaaccacatgcagtagcttgaaagtgtcataatatacaatccatacctgtaccttttcatacaaggcaatctctctcccacaggtgattcctctgattttctcatggcagcctccccttcccaaagcaccatctcctccaagaagccttgattgacttgttaaaggctaaggaaggggttcagtcaatatttttcatagcatttttcgattccctctattacagtacttattatcttttactgtatactttttgcatacttgcaccccattagaatatgagcaccttgtaagcaaataatatgttttctatatttttctgtcttaatgcatggcactattgggacttaataaactgatttgaaagagtaaatacctattaaagtccagatgttcacaccaatcctgttgtttctaatactgtacataggaaaggggcccaaagcctctccaataagagcctaggctattggcctgattgagatgccatcttattcataattcaatccttcatgcttttttttcacttatatcattttggtgggtaggggctatgtttacacatcatggtataattttttattactttaccacttagcacagaatctagaactttatagtaataaagcaaatcatttgaggcactataaagcatgttaagatattaattttacataatccttctgccttttctcttgcaatggtctttttggtctctccctatcaaacatcaatatattttttgccagatattttttcttcatcatcaaccctcctaactagtagtcaaaattggaactgtcatgcccaa

SEQ ID NO: 678505 - DNA, 2053 bp, Homo sapiens
tcctgacctcttggtctgaagatcaaattcttaataaaatgttcacttttatgaccccttccaaatggagcttatcatcgttctcctaatatccacacagttcagtgtgcaaagaaaagaaagtctaccttccattgaaactcagagggctcatggtataaatgggatatgggtgcaggagagcggggaggatgggagatagaccctgggtgtggaaggtctctgagaaagcttacagcaggatgccaggaggtggtggatactgggtttaatgtttctgtattatgtctatgctctgactatctgaaacattaatatggtttattatgcctgctaactgggcacctttgtctatcctaaacactgagtctcatctgtagggtcttcaatgtatcctttatcagcgtcatcggcctgccacatacatgatgcctgagctcaggccacagaatgagcatcctaaagaagaagttcactcttcttgtgctggaaaactaaatggatctcttggcctgtatgcaattcttactttcttctttttatggctgtttacagaaacaaatacataataaatacagccatattttaatgaatatcagccacatgatttatgatttttttggataatattttttatgagtacccaatttatccttatctggacaccatgtaccattctcagcgggagaaccaaattgtatgttagctgggtcctcagagtgccagctgtcccttctctccacactacttatctgaatccttaaatccaagggaggaagggagaacatgaatcagatcggaaggaaagggttgatctcagaagaaaggtaaggatcattaagggtattctggaartacaatgtggacatctacctgaaataattctaatttggagatagagttgttaaataaagtcatcatgagaggagaagcaattaagggcactatctcagaagaaacagattctttccttttagatttactgtttcctctaaagctctcccacaccatgcctatcaccaccactcatggccaggatgtttttcctaagatagaaatctgatcatatcatccccatttaaaatgcttttctggttctccaccctctttaggataaatgctatgatgtcccttggcatgtaaacattctgtgatttgtctactacctctaccataccctaacctgaaccagcgttctcactcaccatctcccaattcacacactcctttcttctttttaatgcaaaccacatgcagtagcttgaaagtgtcataatatacaatccatacctgtaccttttcatacaaggcaatctctctcccacaggtgattcctctgattttctcatggcagcctccccttcccaaagcaccatctcctccaagaagccttgattgacttgttaaaggctaaggaaggggttcagtcaatatttttcatagcatttttcgattccctctattacagtacttattatcttttactgtatactttttgcatacttgcaccccattagaatatgagcaccttgtaagcaaataatatgttttctatatttttctgtcttaatgcatggcactattgggacttaataaactgatttgaaagagtaaatacctattaaagtccagatgttcacaccaatcctgttgtttctaatactgtacataggaaaggggcccaaagcctctccaataagagcctaggctattggcctgattgagatgccatcttattcataattcaatccttcatgcttttttttcacttatatcattttggtgggtaggggctatgtttacacatcatggtataattttttattactttaccacttagcacagaatctagaactttatagtaataaagcaaatcatttgaggcactataaagcatgttaagatattaattttacataatccttctgccttttctcttgcaatggtctttttggtctctccctatcaaacatcaatatattttttgccagatattttttcttcatcatcaaccctcctaactagtagtcaaaattggaactgtcatgcccaa

SEQ ID NO: 678506 - DNA, 2053 bp, Homo sapiens
tcctgacctcttggtctgaagatcaaattcttaataaaatgttcacttttatgaccccttccaaatggagcttatcatcgttctcctaatatccacacagttcagtgtgcaaagaaaagaaagtctaccttccattgaaactcagagggctcatggtataaatgggatatgggtgcaggagagcggggaggatgggagatagaccctgggtgtggaaggtctctgagaaagcttacagcaggatgccaggaggtggtggatactgggtttaatgtttctgtattatgtctatgctctgactatctgaaacattaatatggtttattatgcctgctaactgggcacctttgtctatcctaaacactgagtctcatctgtagggtcttcaatgtatcctttatcagcgtcatcggcctgccacatacatgatgcctgagctcaggccacagaatgagcatcctaaagaagaagttcactcttcttgtgctggaaaactaaatggatctcttggcctgtatgcaattcttactttcttctttttatggctgtttacagaaacaaatacataataaatacagccatattttaatgaatatcagccacatgatttatgatttttttggataatattttttatgagtacccaatttatccttatctggacaccatgtaccattctcagcgggagaaccaaattgtatgttagctgggtcctcagagtgccagctgtcccttctctccacactacttatctgaatccttaaatccaagggaggaagggagaacatgaatcagatcggaaggaaagggttgatctcagaagaaaggtaaggatcattaagggtattctggaagtacaatgtggacatctacctgaaataattctaatttggagatagagttgttaaataaagtcatcatgagaggagaagcaattaagggcactatctcagaagaaacagattctttccttttagatttactgtttcctctaaagctctcccacaccatgcctatcaccaccactcatggccaggatgtttttcctaagatagaaatctgatcatatcatccccatttaaaatgcttttctggttctccaccctctttaggataaatgctatgatgtcccttggcatgtaaacattctgtgatttgtctactacctctaccataccctaacctgaaccagcsttctcactcaccatctcccaattcacacactcctttcttctttttaatgcaaaccacatgcagtagcttgaaagtgtcataatatacaatccatacctgtaccttttcatacaaggcaatctctctcccacaggtgattcctctgattttctcatggcagcctccccttcccaaagcaccatctcctccaagaagccttgattgacttgttaaaggctaaggaaggggttcagtcaatatttttcatagcatttttcgattccctctattacagtacttattatcttttactgtatactttttgcatacttgcaccccattagaatatgagcaccttgtaagcaaataatatgttttctatatttttctgtcttaatgcatggcactattgggacttaataaactgatttgaaagagtaaatacctattaaagtccagatgttcacaccaatcctgttgtttctaatactgtacataggaaaggggcccaaagcctctccaataagagcctaggctattggcctgattgagatgccatcttattcataattcaatccttcatgcttttttttcacttatatcattttggtgggtaggggctatgtttacacatcatggtataattttttattactttaccacttagcacagaatctagaactttatagtaataaagcaaatcatttgaggcactataaagcatgttaagatattaattttacataatccttctgccttttctcttgcaatggtctttttggtctctccctatcaaacatcaatatattttttgccagatattttttcttcatcatcaaccctcctaactagtagtcaaaattggaactgtcatgcccaa

SEQ ID NO: 678507 - DNA, 436 bp, Homo sapiens
ttgactcacagttcttcatggctggggaggcctcaggaaacttacaatcatgctgcaagtggaagcaaacacacccttcttcacatgatggcaggagagagaactgtagagtgaagggagaaacacatttttaaaccatcagatctcctgagaactcactcactatcacaagaacagcatggaggtaaccacatccatgattcagttatctccacctggtccttaccttgacatgtggggattattacaattcaaggtgagatttgggtggagacacaaagccaaaccatgtcaccagacatcttttttaaaagcccataaactggtaataaaacaagtcacacatatacacacatataatcatacacattcaagtatgttatatgaagtaytgtcattgaaaagctcatactcaagagtttaagttagctgactg

SEQ ID NO: 678508 - DNA, 621 bp, Homo sapiens
tatacatgcagagacacacacacagagacacacacacatagaaacacacacatgcatacagaaacacagagacacacagacacacatacacatacagacacacacagaggcacacccagagacacgtgcacgcatacagaaacacacacagagacgcacacatagagacacatatgcatacagaaacacggagagacatagagacacacacagagacagacacataaagacacagagacacatatacagagagacacaggcacacagacactcagagacacacacacatactcagacactcacacagagacaaggatayacagagaaagagaaatgcagacacacacacagagatgcacacacagacacgcgcacacacacagacacgcgcacacacacagacacgcacacacactcacacacatacacacacagagcacacacatacacacgcagacaggcacacacacagagtacaggcccgccgcgcctctgagccctggctgtgctaaccctgctgctggggatgtgttcccaggtcccatcactgggccacacctactcattccctggggtggcttctctgttgcgcacccaccccacctctgcagggccccacac

SEQ ID NO: 678509 - DNA, 621 bp, Homo sapiens
tatacatgcagagacacacacacagagacacacacacatagaaacacacacatgcatacagaaacacagagacacacagacacacatacacatacagacacacacagaggcacacccagagacacgtgcacgcatacagaaacacacacagagacgcacacatagagacacatatgcatacagaaacacggagagacatagagacacacacagagacagacacataaagacacagagacacatatacagagagacacaggcacacagacactcagagacacacacacatactcagacactcacacagagacaaggatacacagagaaagagaaatgcagacacacacacagagatgcacacacagacacgcgcacacacacagacacgcrcacacacacagacacgcacacacactcacacacatacacacacagagcacacacatacacacgcagacaggcacacacacagagtacaggcccgccgcgcctctgagccctggctgtgctaaccctgctgctggggatgtgttcccaggtcccatcactgggccacacctactcattccctggggtggcttctctgttgcgcacccaccccacctctgcagggccccacac

SEQ ID NO: 678510 - DNA, 621 bp, Homo sapiens
tatacatgcagagacacacacacagagacacacacacatagaaacacacacatgcatacagaaacacagagacacacagacacacatacacatacagacacacacagaggcacacccagagacacgtgcacgcatacagaaacacacacagagacgcacacatagagacacatatgcatacagaaacacggagagacatagagacacacacagagacagacacataaagacacagagacacatatacagagagacacaggcacacagacactcagagacacacacacatactcagacactcacacagagacaaggatacacagagaaagagaaatgcagacacacacacagagatgcacacacagacacgcgcacacacacagacacgcgcacasacacagacacgcacacacactcacacacatacacacacagagcacacacatacacacgcagacaggcacacacacagagtacaggcccgccgcgcctctgagccctggctgtgctaaccctgctgctggggatgtgttcccaggtcccatcactgggccacacctactcattccctggggtggcttctctgttgcgcacccaccccacctctgcagggccccacac

SEQ ID NO: 678511 - DNA, 630 bp, Homo sapiens
ccaccctccctacccccacctcaccccaggggcacctgccacctgccggacctgccccaccaaggaaccagggcaggcatcgggggaccccagctgggtcctgcagacctgcgaaggggaccctggaccccagctggaggcagctggagactgaggcatcagcccctccaactcccagccctgctgtggtccacacttcctgtgtcctggattttcacccacaggccagaagacaggtggggacacctctccagacagtgccttccatgygggtccccagctaagcctcgggcagcgcactctccccgcaggcgctgcacttctgctgggtgccagcctgaccgtccatgggcctgggcatccaggctgacacgggggctctgctgaggccacagtggggtggggagtggggggcctgggtacctgcaagtgccatgaggtgctccccacccaatggaagcaacctcccttagcagttttctcaaagacatttgatttggggtcttggaggggacccccataccagcatggcagcgagcaggtgagagtatgatgacggaagtacctcagaggaggcactgcagaggctcccagcgccggcacaaaccagcggggcctcagacagcgtca

SEQ ID NO: 678512 - DNA, 630 bp, Homo sapiens
ccaccctccctacccccacctcaccccaggggcacctgccacctgccggacctgccccaccaaggaaccagggcaggcatcgggggaccccagctgggtcctgcagacctgcgaaggggaccctggaccccagctggaggcagctggagactgaggcatcagcccctccaactcccagccctgctgtggtccacacttcctgtgtcctggattttcacccacaggccagaagacaggtggggacacctctccagacagtgccttccatgtgggtccccagctaagcctcgggcagcgcactcyccccgcaggcgctgcacttctgctgggtgccagcctgaccgtccatgggcctgggcatccaggctgacacgggggctctgctgaggccacagtggggtggggagtggggggcctgggtacctgcaagtgccatgaggtgctccccacccaatggaagcaacctcccttagcagttttctcaaagacatttgatttggggtcttggaggggacccccataccagcatggcagcgagcaggtgagagtatgatgacggaagtacctcagaggaggcactgcagaggctcccagcgccggcacaaaccagcggggcctcagacagcgtca

SEQ ID NO: 678513 - DNA, 630 bp, Homo sapiens
ccaccctccctacccccacctcaccccaggggcacctgccacctgccggacctgccccaccaaggaaccagggcaggcatcgggggaccccagctgggtcctgcagacctgcgaaggggaccctggaccccagctggaggcagctggagactgaggcatcagcccctccaactcccagccctgctgtggtccacacttcctgtgtcctggattttcacccacaggccagaagacaggtggggacacctctccagacagtgccttccatgtgggtccccagctaagcctcgggcagcgcactctccccgcaggcgctgcacttctgctgggtgccagcctgaccgtccatgggcctgggcatccaggctgacacgggggctctgctgaggccacagtggggtggggagtggggggcctgggtacctgcaagtgccatgaggtgctccccacccaatggaagcaayctcccttagcagttttctcaaagacatttgatttggggtcttggaggggacccccataccagcatggcagcgagcaggtgagagtatgatgacggaagtacctcagaggaggcactgcagaggctcccagcgccggcacaaaccagcggggcctcagacagcgtca

SEQ ID NO: 678514 - DNA, 630 bp, Homo sapiens
ccaccctccctacccccacctcaccccaggggcacctgccacctgccggacctgccccaccaaggaaccagggcaggcatcgggggaccccagctgggtcctgcagacctgcgaaggggaccctggaccccagctggaggcagctggagactgaggcatcagcccctccaactcccagccctgctgtggtccacacttcctgtgtcctggattttcacccacaggccagaagacaggtggggacacctctccagacagtgccttccatgtgggtccccagctaagcctcgggcagcgcactctccccgcaggcgctgcacttctgctgggtgccagcctgaccgtccatgggcctgggcatccaggctgacacgggggctctgctgaggccacagtggggtggggagtggggggcctgggtacctgcaagtgccatgaggtgctccccacccaatggaagcaacctcccttagcagttttctcaaagacatttgatttggggtcttggaggggacccccataccagcatggcagcgagcaggtgagagtatgatgacggaagtacctcagaggaggcactgcagaggctcccagcrccggcacaaaccagcggggcctcagacagcgtca

SEQ ID NO: 678515 - DNA, 3891 bp, Homo sapiens
tcggccatgtcctccacctgcccttccttggtccagcacctcacctgcacacacctgtctggagagtccccaaggttggagagctgctgagtcagctgggccgagcacacagcgcaatacttccttgtgcctcctaaccaggatgggcgacaccagcccattttatggatgggacaagaagaagctgggctgacaagcccaacatagtggagccagcaacaggcttttactctcctctctgtctctttgtctctctcccccaccgcacctccatccgctccattctcctctctgcacatcagcttcccagacaatattcttggtttctgtggctcccaaactgaagcttccccacagtggctgcaactatccagacctggggccacacttgggcctccaggcaggggatctagtgatcacattctggtcatgtcatcaggccaacttggctgagctctgccctccttatctctcttctcccctcgagccctcaccctggttacctgcacaagtaaacttgcccctaactgacccccttttctccctccatgtccctcaatacaacactaactctggcaaaaaagaccagcctggccaggtgcggtggctcacgcctgtaatcccagcactttgggaggccgaggcgggcagatcacaaggtcaggacatcaagaccatcctggctaacacggtgaaaccccgtctctactaaaaatacaaaaaattagccaggcatggtggcaggcacctgtagtcccagctacgcgcgaggctgaggcaggagaatggcgtgaacccgggaggcggtgcttgcagtgagccgagatcgcgccactgcactccagcctgggcgacagcgagactccgtctcaaaaaaaaaaaaaaaaaagaccagcctgaagcagagattgggtcccagcctggctctgcctggccctctgctcccgcttcacctcacagacagaacgctgccctgtggaggggtccccggaccctttggtgggtgccaagcgggtatggaggccaaggcctgagtggtgagaatagtccaggggctagcgctgcgtggggagggcgagctcagagagcaggggagcctgaccctgcaggtcaagacttctgtctgagagaaatgaaaagctggggattttaagcaaaggaatgccttgacccaaccctcacaacttacataataattaacttaaaaggaatcataagtttaaacagaaaatctatataagaggtttacagtttaatttaaaaactataataggtttatagtttttaaattaaaattttaaatatagtggtttataaaactttgagaagaaaacataaaatccctatgaatgctgcaaaagtcactgttgagagaatgaaaacacaagacatagagttggagaaaatatttgtgaatctcatatctggcaaaggaattgtatctagaatacataaagaactctcaaaatccaacagtaaaaacaccaaataatccagttacaaaccggggaaggatttgaacagatgcgtcaccaagcaagggatatggatgggaaataagcttccatcagccaccagggagatgcaaattacagccactaggaaacgcttttcattcattccgggatggctgaaatgtaagcacggaaaatgctgggtgcccgcaagaacgcggagcagcaggcactcattcccgattagcgggagcgcaaagcgaaggggcggcctgtggcgttttcctgtaaagttgggcacacgcttcccacatgactcagcaattgcacttctgggtatgtacccgagagaaacaaaagcttatgttcacacaaaaacctacaacgcaaatgcacaaacagctctatccaacaaccctggaagcaacccaaacacgcttcagcggcacaggcgcctccacgcggaaccccacgcggcgctcagcacggacgaggagggagccgcgcacgcgcggtcggctcggcgaggagccggtctccaagtgccgccagctgcgggatttcctctgcaaaagacaaaccacagggagagctgccggggctgggtgggggagygtgactgtgaacggagttctgggggtgatgtaactgttctgtatccacagtgttgctacatgaatctataaatgtgttaaactcatagaactgtacaccaaaaaatagcagttttgctgaatgttaattcagaaatgaaattaaaattttaaattaacaacaagcaactttacaagagaaaaaaaaaaacctcatttcctccccacaaagccacctcatgagcctgggtggtgcctagccagtcctgctgctgaacctgctctgacctggcctaagggtaggactcgaggctgggagccaagggccaaccacaggacaggcagcaagacccgcttcgctggtctgtcacacacaccgcaccaagtcggtgttcaggataaaccggggcacactctgagctgggcctgtctccggcttcaaccaaaaagcctgagctctggcaggtgaaggaccagacgtttctgtggggctatggacttgtctgggaggcagccacctctaagccacccaggatggtttcggttgtgtttggatggagttctgagttttgccagttaaaattcccccttcaggagctctctatgggggtaaagtgcaagatttggggtagaaaaatgacaagtcagaggactggaaggaacattatggactgtcctcccttctgcctgaagagatggggagactctcccaggccatgtggaagacctcacagggggaccaactgctgcctttcagcctggccgagggaagagcccctgactcagcctccgcaggaggaggtgggctggaaccaagtttccctgcatcaatccaggcaggcagccccgaacagtgcactccaacatgggatagtgagccagcttgggggacagcagctgtctaaacaggagcatgcaacccccgtgctgagagttccccagggtcacgactacccagagtcagagctgcccagggtcacagctactcgaggtcagagctgccccagatcagggctgcccaaggtcagagctgtcctgggtcagagctgcccatggtcagagctgtcctgggcatcagaggcgcagaggtgggaagggctggcttcaggtgggagttataggtgggagttatgctacaaagggtcttgaaggccagtgttgttgacagggtagggtgcctgggtaatagcagaggaagaaaaaggcttagagttggagggaaaaacatgaactggagttgggggagtgcacctgccccctcagagaccacaaagcctccccagggctgggctgtggctgctggagctcccagaccatgccaagtgtcagagcctgggcaagaccctctggggcagcccggaaccaccagaggtcagagctggaggaggctcagctggggcccttgcaccaggcaggaggcccagaaaagagacagtgctcttgaactgcaggaaggcagctccgtagagaggcaaatctcactccagctcgggcaatactcaactacacggacgtggatgctctcaagggggctttggggcatgtggtgtcggcattggacccaaatatgggctcaaagctttcctttaccatattccttctacatttttcttgcagattgagaagggatagggaggagtttagggaagtgagtgaagcaggaagatgttgaccaagggaagttaattccataaagaggaggatgaggggacagaaaggcaggaggaagaggaggaggagaatcttcgcacagggggtgtcagctgatgggggcagcatgggtgcccatggagccctttaggggtcgttggttgtgtgcagagaggccacagcaggcgaggcag

SEQ ID NO: 678516 - DNA, 3891 bp, Homo sapiens
tcggccatgtcctccacctgcccttccttggtccagcacctcacctgcacacacctgtctggagagtccccaaggttggagagctgctgagtcagctgggccgagcacacagcgcaatacttccttgtgcctcctaaccaggatgggcgacaccagcccattttatggatgggacaagaagaagctgggctgacaagcccaacatagtggagccagcaacaggcttttactctcctctctgtctctttgtctctctcccccaccgcacctccatccgctccattctcctctctgcacatcagcttcccagacaatattcttggtttctgtggctcccaaactgaagcttccccacagtggctgcaactatccagacctggggccacacttgggcctccaggcaggggatctagtgatcacattctggtcatgtcatcaggccaacttggctgagctctgccctccttatctctcttctcccctcgagccctcaccctggttacctgcacaagtaaacttgcccctaactgacccccttttctccctccatgtccctcaatacaacactaactctggcaaaaaagaccagcctggccaggtgcggtggctcacgcctgtaatcccagcactttgggaggccgaggcgggcagatcacaaggtcaggacatcaagaccatcctggctaacacggtgaaaccccgtctctactaaaaatacaaaaaattagccaggcatggtggcaggcacctgtagtcccagctacgcgcgaggctgaggcaggagaatggcgtgaacccgggaggcggtgcttgcagtgagccgagatcgcgccactgcactccagcctgggcgacagcgagactccgtctcaaaaaaaaaaaaaaaaaasaccagcctgaagcagagattgggtcccagcctggctctgcctggccctctgctcccgcttcacctcacagacagaacgctgccctgtggaggggtccccggaccctttggtgggtgccaagcgggtatggaggccaaggcctgagtggtgagaatagtccaggggctagcgctgcgtggggagggcgagctcagagagcaggggagcctgaccctgcaggtcaagacttctgtctgagagaaatgaaaagctggggattttaagcaaaggaatgccttgacccaaccctcacaacttacataataattaacttaaaaggaatcataagtttaaacagaaaatctatataagaggtttacagtttaatttaaaaactataataggtttatagtttttaaattaaaattttaaatatagtggtttataaaactttgagaagaaaacataaaatccctatgaatgctgcaaaagtcactgttgagagaatgaaaacacaagacatagagttggagaaaatatttgtgaatctcatatctggcaaaggaattgtatctagaatacataaagaactctcaaaatccaacagtaaaaacaccaaataatccagttacaaaccggggaaggatttgaacagatgcgtcaccaagcaagggatatggatgggaaataagcttccatcagccaccagggagatgcaaattacagccactaggaaacgcttttcattcattccgggatggctgaaatgtaagcacggaaaatgctgggtgcccgcaagaacgcggagcagcaggcactcattcccgattagcgggagcgcaaagcgaaggggcggcctgtggcgttttcctgtaaagttgggcacacgcttcccacatgactcagcaattgcacttctgggtatgtacccgagagaaacaaaagcttatgttcacacaaaaacctacaacgcaaatgcacaaacagctctatccaacaaccctggaagcaacccaaacacgcttcagcggcacaggcgcctccacgcggaaccccacgcggcgctcagcacggacgaggagggagccgcgcacgcgcggtcggctcggcgaggagccggtctccaagtgccgccagctgcgggatttcctctgcaaaagacaaaccacagggagagctgccggggctgggtgggggagcgtgactgtgaacggagttctgggggtgatgtaactgttctgtatccacagtgttgctacatgaatctataaatgtgttaaactcatagaactgtacaccaaaaaatagcagttttgctgaatgttaattcagaaatgaaattaaaattttaaattaacaacaagcaactttacaagagaaaaaaaaaaacctcatttcctccccacaaagccacctcatgagcctgggtggtgcctagccagtcctgctgctgaacctgctctgacctggcctaagggtaggactcgaggctgggagccaagggccaaccacaggacaggcagcaagacccgcttcgctggtctgtcacacacaccgcaccaagtcggtgttcaggataaaccggggcacactctgagctgggcctgtctccggcttcaaccaaaaagcctgagctctggcaggtgaaggaccagacgtttctgtggggctatggacttgtctgggaggcagccacctctaagccacccaggatggtttcggttgtgtttggatggagttctgagttttgccagttaaaattcccccttcaggagctctctatgggggtaaagtgcaagatttggggtagaaaaatgacaagtcagaggactggaaggaacattatggactgtcctcccttctgcctgaagagatggggagactctcccaggccatgtggaagacctcacagggggaccaactgctgcctttcagcctggccgagggaagagcccctgactcagcctccgcaggaggaggtgggctggaaccaagtttccctgcatcaatccaggcaggcagccccgaacagtgcactccaacatgggatagtgagccagcttgggggacagcagctgtctaaacaggagcatgcaacccccgtgctgagagttccccagggtcacgactacccagagtcagagctgcccagggtcacagctactcgaggtcagagctgccccagatcagggctgcccaaggtcagagctgtcctgggtcagagctgcccatggtcagagctgtcctgggcatcagaggcgcagaggtgggaagggctggcttcaggtgggagttataggtgggagttatgctacaaagggtcttgaaggccagtgttgttgacagggtagggtgcctgggtaatagcagaggaagaaaaaggcttagagttggagggaaaaacatgaactggagttgggggagtgcacctgccccctcagagaccacaaagcctccccagggctgggctgtggctgctggagctcccagaccatgccaagtgtcagagcctgggcaagaccctctggggcagcccggaaccaccagaggtcagagctggaggaggctcagctggggcccttgcaccaggcaggaggcccagaaaagagacagtgctcttgaactgcaggaaggcagctccgtagagaggcaaatctcactccagctcgggcaatactcaactacacggacgtggatgctctcaagggggctttggggcatgtggtgtcggcattggacccaaatatgggctcaaagctttcctttaccatattccttctacatttttcttgcagattgagaagggatagggaggagtttagggaagtgagtgaagcaggaagatgttgaccaagggaagttaattccataaagaggaggatgaggggacagaaaggcaggaggaagaggaggaggagaatcttcgcacagggggtgtcagctgatgggggcagcatgggtgcccatggagccctttaggggtcgttggttgtgtgcagagaggccacagcaggcgaggcag

SEQ ID NO: 678517 - DNA, 3891 bp, Homo sapiens
tcggccatgtcctccacctgcccttccttggtccagcacctcacctgcacacacctgtctggagagtccccaaggttggagagctgctgagtcagctgggccgagcacacagcgcaatacttccttgtgcctcctaaccaggatgggcgacaccagcccattttatggatgggacaagaagaagctgggctgacaagcccaacatagtggagccagcaacaggcttttactctcctctctgtctctttgtctctctcccccaccgcacctccatccgctccattctcctctctgcacatcagcttcccagacaatattcttggtttctgtggctcccaaactgaagcttccccacagtggctgcaactatccagacctggggccacacttgggcctccaggcaggggatctagtgatcacattctggtcatgtcatcaggccaacttggctgagctctgccctccttatctctcttctcccctcgagccctcaccctggttacctgcacaagtaaacttgcccctaactgacccccttttctccctccatgtccctcaatacaacactaactctggcaaaaaagaccagcctggccaggtgcggtggctcacgcctgtaatcccagcactttgggaggccgaggcgggcagatcacaaggtcaggacatcaagaccatcctggctaacacggtgaaaccccgtctctactaaaaatacaaaaaattagccaggcatggtggcaggcacctgtagtcccagctacgcgcgaggctgaggcaggagaatggcgtgaacccgggaggcggtgcttgcagtgagccgagatcgcgccactgcactccagcctgggcgacagcgagactccgtctcaaaaaaaaaaaaaaaaaagaccagcctgaagcagagattgggtcccagcctggctctgcctggccctctgctcccgcttcacctcacagacagaacgctgccctgtggaggggtccccggaccctttggygggtgccaagcgggtatggaggccaaggcctgagtggtgagaatagtccaggggctagcgctgcgtggggagggcgagctcagagagcaggggagcctgaccctgcaggtcaagacttctgtctgagagaaatgaaaagctggggattttaagcaaaggaatgccttgacccaaccctcacaacttacataataattaacttaaaaggaatcataagtttaaacagaaaatctatataagaggtttacagtttaatttaaaaactataataggtttatagtttttaaattaaaattttaaatatagtggtttataaaactttgagaagaaaacataaaatccctatgaatgctgcaaaagtcactgttgagagaatgaaaacacaagacatagagttggagaaaatatttgtgaatctcatatctggcaaaggaattgtatctagaatacataaagaactctcaaaatccaacagtaaaaacaccaaataatccagttacaaaccggggaaggatttgaacagatgcgtcaccaagcaagggatatggatgggaaataagcttccatcagccaccagggagatgcaaattacagccactaggaaacgcttttcattcattccgggatggctgaaatgtaagcacggaaaatgctgggtgcccgcaagaacgcggagcagcaggcactcattcccgattagcgggagcgcaaagcgaaggggcggcctgtggcgttttcctgtaaagttgggcacacgcttcccacatgactcagcaattgcacttctgggtatgtacccgagagaaacaaaagcttatgttcacacaaaaacctacaacgcaaatgcacaaacagctctatccaacaaccctggaagcaacccaaacacgcttcagcggcacaggcgcctccacgcggaaccccacgcggcgctcagcacggacgaggagggagccgcgcacgcgcggtcggctcggcgaggagccggtctccaagtgccgccagctgcgggatttcctctgcaaaagacaaaccacagggagagctgccggggctgggtgggggagcgtgactgtgaacggagttctgggggtgatgtaactgttctgtatccacagtgttgctacatgaatctataaatgtgttaaactcatagaactgtacaccaaaaaatagcagttttgctgaatgttaattcagaaatgaaattaaaattttaaattaacaacaagcaactttacaagagaaaaaaaaaaacctcatttcctccccacaaagccacctcatgagcctgggtggtgcctagccagtcctgctgctgaacctgctctgacctggcctaagggtaggactcgaggctgggagccaagggccaaccacaggacaggcagcaagacccgcttcgctggtctgtcacacacaccgcaccaagtcggtgttcaggataaaccggggcacactctgagctgggcctgtctccggcttcaaccaaaaagcctgagctctggcaggtgaaggaccagacgtttctgtggggctatggacttgtctgggaggcagccacctctaagccacccaggatggtttcggttgtgtttggatggagttctgagttttgccagttaaaattcccccttcaggagctctctatgggggtaaagtgcaagatttggggtagaaaaatgacaagtcagaggactggaaggaacattatggactgtcctcccttctgcctgaagagatggggagactctcccaggccatgtggaagacctcacagggggaccaactgctgcctttcagcctggccgagggaagagcccctgactcagcctccgcaggaggaggtgggctggaaccaagtttccctgcatcaatccaggcaggcagccccgaacagtgcactccaacatgggatagtgagccagcttgggggacagcagctgtctaaacaggagcatgcaacccccgtgctgagagttccccagggtcacgactacccagagtcagagctgcccagggtcacagctactcgaggtcagagctgccccagatcagggctgcccaaggtcagagctgtcctgggtcagagctgcccatggtcagagctgtcctgggcatcagaggcgcagaggtgggaagggctggcttcaggtgggagttataggtgggagttatgctacaaagggtcttgaaggccagtgttgttgacagggtagggtgcctgggtaatagcagaggaagaaaaaggcttagagttggagggaaaaacatgaactggagttgggggagtgcacctgccccctcagagaccacaaagcctccccagggctgggctgtggctgctggagctcccagaccatgccaagtgtcagagcctgggcaagaccctctggggcagcccggaaccaccagaggtcagagctggaggaggctcagctggggcccttgcaccaggcaggaggcccagaaaagagacagtgctcttgaactgcaggaaggcagctccgtagagaggcaaatctcactccagctcgggcaatactcaactacacggacgtggatgctctcaagggggctttggggcatgtggtgtcggcattggacccaaatatgggctcaaagctttcctttaccatattccttctacatttttcttgcagattgagaagggatagggaggagtttagggaagtgagtgaagcaggaagatgttgaccaagggaagttaattccataaagaggaggatgaggggacagaaaggcaggaggaagaggaggaggagaatcttcgcacagggggtgtcagctgatgggggcagcatgggtgcccatggagccctttaggggtcgttggttgtgtgcagagaggccacagcaggcgaggcag

SEQ ID NO: 678518 - DNA, 1164 bp, Homo sapiens
tctcacctttctggctcaggccaggctcagcccccagtggtctattgtctttctatctgtcatctatctacctacccacctatctaaccatgccatctatttcatctatttttatctatcaaccatctatcatatatctacctacctacctttccatctatcatctagttcatctattgctatctattatctaatttgcctatcaagtatctatccatcatctatttctatcatctatccatcacctgttacctatcacccatataccacctatccctatctatcatctatctagccagcaatccacccatcatctacttcatctatttctacccgtctcccaccccctctccccacccctcaccagagagtatgcaagcacgaccacgtcaacaggccctgaagtcacaggttcacacagcacgttttctgctccatcacgtgtatggggcagggggcagcagagctgggggagaagagataaaggaattatgtcaaacagggactgtcttgtctgccccaagggyctttcctcatctataaagcagatttttcttgtagagcaccacgagagctgtgaaatgggagtgaggggtgaggcaggccatggggccttccacaaggtgggcaagatggttgtctctggggaaccagctggccagagggggccaagtgccaaccggtctggatgagagcaaagcagcaggcagaaggttacagaggcaagtgtcggcaccaggggtgaacgctgggatttttcaaatccaagaggcatttcaagtaaggggaaaacctcccccggggctgggctgagaagctagtcgggtgatgggatgagtgagaatgacaagttgcgtctgattgtcctggagacctggctgagaactctgtgtgagtgtcttaggtagacggttacacttgttttcagtgagagtcagtttccatagagaactgcatggtagtcaccaagaaccgagggggcccaggaatgccccagcagtggtctggaagggcttgtggggctgagcaggaggtgggtggggaccgggtgcaggcagagggaattcaagggtacagaggcagagagatggtgccgcctggggaacgcagcgcacccaggacagaacaggcctgagagccacacacactcacagcggcttccca

SEQ ID NO: 678519 - DNA, 642 bp, Homo sapiens
acacacacacacacacacacacacacgattccagaagatagtgggacagtagcaatttgaaggctctgccagaaaagcatttgcttaaagtgttgggaattttttgttggattgttgtttcattcatagggcttctaaatttcacttttgcattttaaccatttcaaggaattccccctgattttgagtgtgaatgggtacaaaagaccaggggttgttaaccaaaagcctggaacattcaggtgaatggctgttctgcagggaaggagggaaacagcagggkgagatggatggtcaaccttcaaaggccttacacagtcccggccaggataatcttcgcctctcccttctgctggggaaaagtctggattgctaagaccagggtctctatagtggcatctccaacactcaggccgagcttcatggctgggttcctgttttttcatttgctcatgcccctcagtggtatcatctgactcagctcctttccctcctgttgggccagtacttacagtgggtctcctgatgaagctgaggtcatgggttcatgagcccaattatcaccatgctgaccgcaccactaacctggctccgtgtagttgcaaacttggctgcacattggaattcctagggagagtttta

SEQ ID NO: 678520 - DNA, 1048 bp, Homo sapiens
cactcatgctaaagtttctttcctccagcctcataaccccagaggaggctgagccatgatacccattgtctagcaataaatatttaaggagcccctgagatatgtcaggcaccatcgcaggtgctgggacaagtgaatgtgaccaggaaagtccctcccctctcagaggttcttttcaagttggaggacagcaaatacagaaatatagagtctaacataacaacagggagtaataaacactttgaagaaaaataaagtggaataagagggtagggttgccatagggttctctgggcagtcttctatggaaaggccacttgttggggcagagaaaaaaaagatgtctgaaaggaggactaccggccccccataagtgcgctccggtccatgcacagggcaatgggcatgtaatttcctatgattaagacctacagtatgtacaatattactgcaacagacactgagactgacttagcattgtttcatagcatccgagttgctctgttggaggaaagtgcatgtgatgggcattcatttgcttccgccatcagacagattctctacctttgtctttcctacaagattccctaggaaggcagggctcagtggctcatgcctgtaagcccagcaatttgggagtctgaggcagtcagatcacaaggtcaggagttcaagaccagcttggccaacatggcgaaaccccgtctytactaaaaatacaaaaattagctgggcatgggggcacgtgcctgtaatcccagctactcaggaggctgaggcaggagaattgcttgaacagagacccgggaggcagaggttgcagtgagccaagatcgcaccactgcactccagcctgggctacagagtgagactctgataaataaataataaataaataaatgattccctaggaagctgactcccactgaatgtgccactcaggagtccctgctctctagattacagttgagtttgctcaatgcaaggccccagcagaaatgttgaaagtaagagcaaatagatagttaaccactctttaagacaacaa

SEQ ID NO: 678521 - DNA, 3030 bp, Homo sapiens
caacaatatcaataacaacaacagcaacatgatgatggggcaatttctgaaaagcaccatgtattttatcgatacatgtccgttgcagaaaatccaggtgaatccaaagaagaaataaatgtcttccacaatcccatagcccagagctaactaaccactataaagaacccagcgtggttttaactaatggatcaaaagatgctcatcaaargctctgagctttcctgagtgctaacaggaaacatccagcatcactggtctctccaaggctgcaggtgtctttgcccatagtgcctgttttgtgtcagggaaagaatcaacctgggagccaagcccaggaatcaggatgaccaagacatactggacaaggagggaacaaacccatccaaggacactcaaggacaaatcaagcaaatgaatttaagggagacctgctcatggtctgctttgctgctcagcatggctgggaggcacagtggaagatcatgcatccttcccctgggactcctctgccagagcctgagagctttctcctgcacacaggctaggggtagggcagttggaattgatccatgccttctagctagactgtgggtcccctcagtcttgggcatggtgacagcccagcatcagacagaggtcagtatcaaactagaaaatttaataaatgctgtcagatttgtagacccaagaaaatataaactgccaatcacggaggaaaaaaatctctcaatgatcttatctttatatgattcccttgctgcctggagattgacatttccttggggataatctggtcataggattggtgaaggtggaagggaggcaacctccgaaggtggggccctctgctcacctgggacagggagggcctgaggtaggtgtctgtgtgggctggggaggaggatgggagcagtgcttctagatgtttccactttctcctcattagataataatgaatgggtgatttccctagtcactgcagtgtgaggaaatctacaaaattaatttcacaatacactttacaggataggtggagaaacacatgaagcacaactgcagtgggttataaaaaatggcctttcgagttgagcagtaaattcgttcaagcagccattctgaaggacaaactggctctgtatttaacaggggcattccagcacttctctagctactgggttgacaatgactcaccaaagcctctggtagccaccacaggacgcccagagcacgttttaaagctgaacaccaaactgcggacttcgggagtaagtgaactgactggtttttattttgttttactgcttttaacattacagtaactgttacaggttccagcaggataactgggtggaaatgagtttggtttcacttagtctctctaaagagaaagcaagttggtagactaatacctaataaaagcaaagctgccaacaattgaaattgcctggactgctctgtgtgtcccacatgcatgggtgtgggtgccagtgtgtgtgcgtgtgtgcatgcatgtgcatgtgtgttgggatagagtggtaagaaaatgggaaataataagaatgttcagtccatagcccttcattataaaaaggtgagctgtaataaatactagtgccacatttagccaaaactttactccagccaaaggtgatattttcatgataacatcctgtgattgctttgttcttcgtcttttatgttcttcctagatgggctcagaacatacaagaattaagtacacatcttattttccagtgataatgctaccggcaaattctgttgtttgtataaacatcagccatgtttatataactaaactagtgttttgttttgtcaattcagcaagaaattagaccacatggtggcttaatgctgcattgatttggctatcaatttgttttcacttttctgcaaaatatttaatacattattaaattgaattatgctgatgccacagttgttcttatctcaattgtcttaaaattcatttaatttttttttcctttggtttcattattcaaattttaacttcagttctcaacattttatctgatggaagagatggagtccattactaaggactccattgtgctccatcatgccagagttgtaaaatagatcttttaaaggaaatttactgtgatttttttctatttaagagcttcctctccagttgagcatgtaagaaaattataccaggagaatacagtaaactctatgaggcaagctataaacatgtagcattgtgattagggctggttctccttctagagacatggtaggattgcaatttcataccatccttgaagttagagagagccacatgactcatttagccaatgaactgtgagcagaatgacatgtcacttccagcagaagctttaagaatctgagagacattcatacgttttccatgtgctgtagccttatacccaaagcctgggtcccaagtgaccatgacaggcagagctccctgttgagccacagagatttagagaatggctgttaacacagcataatccagcccatcctgactaatctgatattaacatgtataataaagaattctatcaatgctgagggaagatgattagttaaggtcctaggttgcaagtctcaaaacctcttctaaggattgtagacaggaaattaaatgacttctagtccctagagttcccaatctcctaccatcccatcctaatatgacagaagtaattcttgagttgcttctgaaaccagagcttccctcagaacccttagcctgccagatggcttcttggagagccctcactcacttttctccttctgctattgctgctcattcattccagcttttaaaaattcatctttatccaggaacctcgcttctagaaaagtcatacaggtgcttccaggaggctacatgggcacccatatttttctagccactttcattagaccaatgcagcagagaagaaaagcctcaataattattatgacatggcatgttaggataccaagtaaattgcatttgtaaaatgtgatttt

SEQ ID NO: 678522 - DNA, 642 bp, Homo sapiens
caaaacatgtacaactatgatacatcaataaaaaacaacaaaaaaaccaaaagaatagaaatcaaaaataaatacataaatacataaaatagggataataatacctcccttgtttgcttgctcccttgctccatttgtaagaaataagtgatataatataggtaaaaatacttaacctcatrcctaccacatagtatagcacaataaatgttatttattataatctgaggcctacctacataagtgactttcaagtatagaaaattatttctcaaattttaaatactccctgattctcaggtatggtaattagacctggctttaggtaaagctctcatgtctacacttggatttaatcacttaagtatatttcccagtgccccccccaaaaaaaattgctcctaggtggacacactaatcaaagacttcctgagaaatgcaggaagaagttttgtcctctgaccacgctacgccctttccttgatggtaagccccataatctaaagccataagtttcaattcctcacataaaaagaaaaaaaatgtcttttatgaccacttcagataacactggatatttcccttgtcattaggaatgagaaatgggaggaaggtaaacttgtagacaggagaattggtaga

SEQ ID NO: 678523 - DNA, 710 bp, Homo sapiens
tcaaacaggtttcagcctgaactcacacaatctgtgtggcttccaaatttgcaagctgagaatttaattcaaagtggtctcaggttgacagcagtccaaaatgctaggtaggaaaaaaaatcctctctggacaaataaatcatcaaagcaagctcataagagcaggtttcaaaggtcatgagcttctaacacacacacaaaaatcacacacacaaaatgggggtagcagcaacatgggtagcgtattcaaacttgaaaagactttaaatatttgtattattagatgtagattatgaaacacatattttaatgtggttaatttttttaaggaatcaaaactatgagtaaagaccaagaaaaytgtgctggatggccacttccaccatggctcccctcctatttaagtctgggtactgtgtcacccgaagtcttcaggcacattgttccaggtttgggtttgcctatgaaagaaactcatgagagctggaaatgaggagtgaagaggaggtcttcacataaagcaggcttaaggattagacatagcaggtttgacagatgtgatggcttgcagaatcctttatgagctcccactgtccatctggataagatttacagacctttcagaaattcctataagcttgggttctgtgcccacactctagactgtcaggctaagatctctgatataaaacagacctcttctgattttt

SEQ ID NO: 678524 - DNA, 710 bp, Homo sapiens
tcaaacaggtttcagcctgaactcacacaatctgtgtggcttccaaatttgcaagctgagaatttaattcaaagtggtctcaggttgacagcagtccaaaatgctaggtaggaaaaaaaatcctctctggacaaataaatcatcaaagcaagctcataagagcaggtttcaaaggtcatgagcttctaacacacacacaaaaatcacacacacaaaatgggggtagcagcaacatgggtagcgtattcaaacttgaaaagactttaaatatttgtattattagatgtagattatgaaacacatattttaatgtggttaatttttttaaggaatcaaaactatgagtaaagaccaagaaaattgtgctggatggccacttccaccatggctcccctcctatttaagtctgggtactgtgtcacscgaagtcttcaggcacattgttccaggtttgggtttgcctatgaaagaaactcatgagagctggaaatgaggagtgaagaggaggtcttcacataaagcaggcttaaggattagacatagcaggtttgacagatgtgatggcttgcagaatcctttatgagctcccactgtccatctggataagatttacagacctttcagaaattcctataagcttgggttctgtgcccacactctagactgtcaggctaagatctctgatataaaacagacctcttctgattttt

SEQ ID NO: 678525 - DNA, 639 bp, Homo sapiens
tccactgacttcactccttgaatttaaaacaggttcaaaatagaaggtagaagctttttgggccctgaactcctctctggctgccgccctgttctttgccatttaaagctaagttcctcaaatagtccatactcagtctctggttcttccacttagctcccatggggacctggggggtcggatgccgctgacggagcctttgttgtgaagctgtgcgtggcttcttggtgtctcactctgggtcatgccctcgttgccttccgctatcccyatctggtctctctgttcctgtctgcctctttcctgtgtctctgtcacttttccgtctctctgtttctttttctgtcctcttgcatctccctggcttgcggtctcactctctatctgccgttgtgtctctttttctatctgcccatctctcttactgcctgttcttttctttgagtccctgattttctctgctctgtctttctttctacctggctgtctctgtgggtcctgtctctgtgtccctattccctcccctgcccgtctctctccccatctatgtctctctctctccccatctatgtctctctctctccccgagtctctccttgcctccgtttccttcctcctggccacaaggacagcctgcct

SEQ ID NO: 678526 - DNA, 639 bp, Homo sapiens
tccactgacttcactccttgaatttaaaacaggttcaaaatagaaggtagaagctttttgggccctgaactcctctctggctgccgccctgttctttgccatttaaagctaagttcctcaaatagtccatactcagtctctggttcttccacttagctcccatggggacctggggggtcggatgccgctgacggagcctttgttgtgaagctgtgcgtggcttcttggtgtctcactctgggtcatgccctcgttgccttccgctatccccatctggtctctctgttcctgtctgcctcttkcctgtgtctctgtcacttttccgtctctctgtttctttttctgtcctcttgcatctccctggcttgcggtctcactctctatctgccgttgtgtctctttttctatctgcccatctctcttactgcctgttcttttctttgagtccctgattttctctgctctgtctttctttctacctggctgtctctgtgggtcctgtctctgtgtccctattccctcccctgcccgtctctctccccatctatgtctctctctctccccatctatgtctctctctctccccgagtctctccttgcctccgtttccttcctcctggccacaaggacagcctgcct

SEQ ID NO: 678527 - DNA, 883 bp, Homo sapiens
ccacctgggtcaccccttgctagagcctggaaactctggcagaagtaagctaggcgaccacagggctcattttattgactgcccaactcccagggatcaccttccttcattgcctgatgtccagtgtcttcaaagctattgttttacatattttgttgctttgtttttcttgtttttgttcaggtgagagggtgactttgttttctatttattactccactatgggcagaagtgaaagtcttatttttgctctttaaaagatgagtcagcaatgttcctgcttcctgtagtctctgaaaaagtgtacatagtattggaattcaaatctggaagattgtgagaattcacattggaaaatttcaggactgacgcatttttgtcaggaagagatcatttgacaaaagattttaatttcttttaaggatacagatctgtgaggacaagatttctgttatgatatcaagtttggtaattttaattttctaagaagagaggtactcattttactcatattttcaaatgtatttacagagctatagacagagttaagacccttaagtctttaatttattctgtatctgtggtactcttctctttgccattactattttttctttcttctttctcattgaaaaaaaggctaaatatagcttcattttttcttaagaaaataatagctcatgtatacttatcaattatatgagatctcttttttaatgtattaatgttttcattttttctactttcccttggcttactttgttactttttttaacttcttgagtcaactccttaattaatccatttatattttttcttgtttcatagggatgtatttcagatatccatatgtrcatagtataagcaaatgctgaaacaaata

SEQ ID NO: 678528 - DNA, 598 bp, Homo sapiens
gcaagcatccctctttcccaattcattgagtgtttttcaattcccccaacattgttgtactctttcctatccacttctccagatacaaaaatgaacaattaaattataaattgagaacttccaactctcagtgcctatacttgcattggtatggtgccatattcagttaaaaatgcttaagatcatggcttgggtaaattacaagccaatgacactactgaatttgtgagatmagtctgcaaactgaattatataccattgtcataaatgttatacctctctgaaaaatctaaattaccatgcagtttactatctgaaatctcccaaaccttattcatttatcagaataaaattatgttacagtttttcatttgttcattatgtaaccttaaatgatctcagctaatctagaagtagcagaagatggccaagtccagttactcctcgatgatgtaactagaaatgaatgatttctttatttctaaatgtagaaatgtagccattttcttcataatgatataaggccagctttgcatacagacgtttctctgaatagacaaatatccaatgtgaagaattggtactgaagtaaaagtag

SEQ ID NO: 678529 - DNA, 1531 bp, Homo sapiens
tagcattcaatgaagagcttactgaaaaaaaggaaagaaggcaattcctccattaggtggtggtggatctcaataggcccacagggtgtttggcagagccagagcacagcctccactgctccaggcatgtttctgcattcccagcacacacggacacctgcaaccaccatgtccctctcagtttctgtcatctggattggtttctttctttctttttttttaagatgaaggtaaatatttaaattttctctcccaagaaaattcagatgaaaacaggataagtattcaatgacctaatccaaaaagtgtataaaatttaaagcaaagacaaaacaaaataaaatacctagttctatacagcagttttatacaacagtgtcttgacacgcacagatagtgtgtgactaagaagggaaaaagaagcaaggaatggaattcagtgcaaactgggtatattgtgtgcaaatggcatttgtagagaagtaaatgtgtggaatgtaatttgggaagatggactttatatctttaatttttgtaaaaactgcattgcaattttcttgctttaagcaactccttcccaagccctctggttgcaaaactgtgactttgtaatcctaaatacatgttatttgagatttgctgccaaaaaattgtgtttcatctccaggtctgaaagtgtgaatgttctgggcaaatgcacttgtgctctctaaggaagacaggctggcgtgtggaagggttggttctgcccaccgcctagttaatctgccatcagagggagatgggtgggagataccatatcttcaaagcctaagcttgtggttaaattccagagcctttcactcttggggtgaatgttcactaatctagccatgagatcagcaatcctgaacaaataccccaaactcctactaagatacatgttaattagtaactttgacttatgtacctttcgtgcatgggtcagtgtcctgagctctacatrtagtagccgatgcttaactagaaggcataaaaccttgagatggggcaaacagacatgctcatgcgctagatgactgttttcatcaaaacaaaagcaaatatacctttcacccagcaatcctatttacagaaatgtatccttccgatggactcatacatacatgccaagatgggtgtgcaaggatcctcactgcagcactgtcagtaatagtaacctatcagagacaatctagattaacaggaggctcggaaaacacattataataatttatacaatggaacactattcaatcaggacaaaagcgcaaggtacaggcttgtgtgcagacaggctacaatctcttcagagacacattgtcaaaacgaagttaagtatggtggctagacagtatgcatgatatgttcctttccacataaaaaaaatacatgcagatacatgtttatggtagttctcccttatctgcaatggggggatatgttccaagacccctactggttgccagaaaccttggatagtaccaaattctatatatactatttatttttt

SEQ ID NO: 678530 - DNA, 628 bp, Homo sapiens
ttgctgaaaggctacttcagttctgcagctcccagcttggagcaatttcaacctgagcagcctgcaacctgttggagcagatgttttacaggtagtctggtgtggtgtattctgaagcatcactagcttgaaggtccagcatcacagcatcagttttgttttgtttggtcatttgttttaccactgccacagagacaaacgggttctgcacacacactggcagacgggatttgtttgtctcttttgatggctaagtattgacttcagaatacaagccctgaagtcaatagacctgacttggaccctggcttggtctcttacccggtaacttttggctagtaatgtaacctttctgagcctcagtttctgcagagttgtttagaatagtagagtgtttasaatacagtgtctgtcatctactaacaaatgaatactattattatttagacatggaagaaaagataagcctataattgaagtaaaactcaagcccaacacttaaggaatttcatatgaactgaaaatcacaataattctgccttccctgtgcactgccacagaggaagggccgtgctcatctgtacaacagggttaaaaaacctcaacaataaagacccataacccaatt

SEQ ID NO: 678531 - DNA, 642 bp, Homo sapiens
gcacaatcttactttactaatggttgacggtttatgtcaaagggcattttaagatgttgtgagatagcttagttcaaggggaagaattgcaaaaacatactaaacaacagcatttctagattctgggaactatttagaaaataaacacacattaaaaagaaaacatccataatcctgaactaaaattaggaataaacaacttaaaaaaaatggaataaacaaacagaaaacatcaaattgtactaagaaacataaaaagacagcccccctcacacacacacacatacacacacaaaaggtgtggtgggatgccaccattctggagaacaccaagcactgtaaagtgatttctctttcccaatttgaattctagtagacttccaattaaaacctyggtggtgaagatttagcaggaagacaagctaaaatttttttgaaaagaataatgagtgaaatatgcctaactagttgtatattacaaatctacacgaaaagcacagttctagcacaggggaaaatgatgagctagaggaaaatgatgagctagaatcagtttaagaacagcttctatgatgaggatacatgcatcatgaatcaataagctggtataaaacattcaataaatagcaaaagtcttgttta

SEQ ID NO: 678532 - DNA, 575 bp, Homo sapiens
aaaaaccaaaaaacaaaactctccatgtggtgttacggagctatctcatcataaagcctagacaatttacttcagagtcgagcaaatggtaacttactatttggaagagatctttatctaggggttgaggacagaacayactcacggcacaaataataggaactctggctacccatgatcatctactctaatcatcagaacattctccgaacacttgcagggtttaaaccaaccttgaaatcagttatctgcccaaggcaagtagtaattcatggcaggcccatagaaaagattttgcccaaggcaagtagtaatttatggcaggcccatagaagagacagatgatttaattaattttgctgctcgtgtctctccatgggagaagatgtgtatcttattctcaaggcttggtcaggcccattctatcaggattggtttaccaaaaacaaaacacccaaccaatgtttaaaaaacatcatttttacatacctgatagcttctgccattttagtgctttctcttttcctgtcatctgtcagacgtcgtataaaataaataaagtcaagtccacaaca

SEQ ID NO: 678533 - DNA, 608 bp, Homo sapiens
atgagttctgagtgtcgggctgcccactggtgacaccgggatcgggctgagcaggagaacatcaccggctccagttcccctgatccattctcacagcctgaaacaagctcacccgtagcttacgcttggaagcaggactgggaacatccacgctatttattatcgaggagttttaaagtactgtaactttaaaataaataactacaaagcttctttgtccaaacgtcattattttatacttatatacacgcaggtgtaaaagtataaaggtgagcactagactgctcttagaagctctaatttttgttttctttggctagtactgtataaaaaacagaattgtgttttattggttttggatgacagaaaagtctggaataatgtttgttttcctcatttcttccttctagaacacagaatctaaaggggtrttagccagcctcgcctccctgccccacgtagagacacagagtgatgtgaggcgttggctttttctccaagaaggtacagatacctcagattcgggaaactcaaaatcaaaagacttagcttctaggataaatacttctgatgaaaaatccgctgaggagcataccccaaaccagaca

SEQ ID NO: 678534 - DNA, 477 bp, Homo sapiens
tataaatatttataaatattctaaaagaagaaaatatattttctgtgtgttgcaagagaattggcacctgccaaatagtgacacacagcttaagagggaaaaaccctggggacacaggattctgtcattgccctagggaaactcagtctctgcttttcccaggtccgctcactgagccatctggtggcctctctgtgctgacctctcctgtaaccaactttccccagtgcatggccttcctgtcctagcatgcagacaggagctttctgaggcttttccgacaacagccccaggttcrtgccccaccaagtgtgagaagctgtttctaagccgaaacttttcaaatggactccaggacatgccagggagtcccgccctctagaggaagggagagactcgggcaggtgaaagcacagataactgggaatatgagaccctggagtacagcccagaactaaggaggagaggagatctccg

SEQ ID NO: 678535 - DNA, 683 bp, Homo sapiens
tattaacataacattcgactaggaaagaaacctattttagtatctcttgcagtaattgattttcttttaatatgttcaagagcaaaaaggatatcctcaaatacatatggcaaatctgttaaatatcactgcttcaaaaactgcaagtctctaacaatgacttgtgacaccctcttcccacctaaagagaacagcgtctgtacttcttcacctgccactgatagctaggaaactgaataaaatasacataacaactgtttgcaggcactggaccacaggctgtgcagggcaatgttcccagagtgaaaggagacaaacatggtgagcctaacagtccacccgcctttccaccgaaagcagctgccacagtgcaggtgcagggatgggaaacccagacatagctggcaaaaatgctgtcttagaacagatgacttgggggaggcccaggaggctgtaatttgtgagacatgatatggaaaaggaggaagctacatagataaaaagttccagagagcctaggggatccctttgagtctttgctgaaccaatctgagcatgcacagggagaaattccacaaggctgggcagtgaacaacttttgaggaaagaacaattaccagagacctataaactgaataatctcaagtctgcctagggccggaagtcctaatcagccagagcag

SEQ ID NO: 678536 - DNA, 683 bp, Homo sapiens
tattaacataacattcgactaggaaagaaacctattttagtatctcttgcagtaattgattttcttttaatatgttcaagagcaaaaaggatatcctcaaatacatatggcaaatctgttaaatatcactgcttcaaaaactgcaagtctctaacaatgacttgtgacaccctcttcccacctaaagagaacagcgtctgtacttcttcacctgccactgatagctaggaaactgaataaaatagacataacaactgtttgcaggcactggaccacaggctgtgyagggcaatgttcccagagtgaaaggagacaaacatggtgagcctaacagtccacccgcctttccaccgaaagcagctgccacagtgcaggtgcagggatgggaaacccagacatagctggcaaaaatgctgtcttagaacagatgacttgggggaggcccaggaggctgtaatttgtgagacatgatatggaaaaggaggaagctacatagataaaaagttccagagagcctaggggatccctttgagtctttgctgaaccaatctgagcatgcacagggagaaattccacaaggctgggcagtgaacaacttttgaggaaagaacaattaccagagacctataaactgaataatctcaagtctgcctagggccggaagtcctaatcagccagagcag

SEQ ID NO: 678537 - DNA, 605 bp, Homo sapiens
aacctttgaagacttctttgaaacacggtgttgtatgtcaggtgcaaaattaccaagtggcagctgaaaaatcagcaattctcaactccagttcactttgctactggcttctaaatgacattgaacaagtcaatcttcattgctgaatctctggtggtctttaagtttctctagatgagaagggcaagagctcagtagcatttgttggagtctgatgactgcattctgggcactttgatgtacaatccaggactctgctttgcttttggactcagctktgttcctgcagatttagggactccttgtgcctccactgagagacagccagtttctggctttctccctggcttcaccagactggacttcttcccattcgccttcataactcagctctacagacgcctgactcctgtcttggcaatacaactgcccacagctcacagaatctcctccaggaactgcccatcactgcccaggtcccatcctgccaatcctcttcccacagcacccaaatattttaaagacgaactaaggccatcaagtatagttgtttagataaaccaacccaaggttggctcactttcatacaatgatgatattaagag

SEQ ID NO: 678538 - DNA, 664 bp, Homo sapiens
attttaagtctgaaagaattttgtaagaatgaatatcaactttataaaatctagttaagcaataaaatattagggccataatcccatgttatgaatgaaaaatatagatgactaaatgccatactgttagtgacagatcaaatttgtgaaattaagatcccttcatttctagtacctctcatattggacatgtccaaaattactctccccaacsaactccaatccaacaccccaaccttacttgctttttcctcttttaacataccaaaaccccaaataacaaaacaaacgaatccctatctcctgtatatcccttctgtcctgtcttctctgctttgctgtggctgttgtctaccagggctgatggacatgaaataatgaacacagaatacctaattaaattatgataagtgctaggataaaattctaaacatagagtaagaaaagctgtggtgttaagaaaacggagcctgggatgatgacggtggggggtcagacagacaaaggggcaggggccaacttctatattctaaggtgtgtagaaaatgcgggtgttgaaggacctcagcttgactgccagactttgatagtgaaacgagattggcttcgagcaaagtctgggctcagctcatgtccggttttacgggtcatggaaacaattctg

SEQ ID NO: 678539 - DNA, 664 bp, Homo sapiens
attttaagtctgaaagaattttgtaagaatgaatatcaactttataaaatctagttaagcaataaaatattagggccataatcccatgttatgaatgaaaaatatagatgactaaatgccatactgttagtgacagatcaaatttgtgaaattaagatcccttcatttctagtacctctcatattggacatgtccaaaattactctccccaacgaactccaatccaayaccccaaccttacttgctttttcctcttttaacataccaaaaccccaaataacaaaacaaacgaatccctatctcctgtatatcccttctgtcctgtcttctctgctttgctgtggctgttgtctaccagggctgatggacatgaaataatgaacacagaatacctaattaaattatgataagtgctaggataaaattctaaacatagagtaagaaaagctgtggtgttaagaaaacggagcctgggatgatgacggtggggggtcagacagacaaaggggcaggggccaacttctatattctaaggtgtgtagaaaatgcgggtgttgaaggacctcagcttgactgccagactttgatagtgaaacgagattggcttcgagcaaagtctgggctcagctcatgtccggttttacgggtcatggaaacaattctg

SEQ ID NO: 678540 - DNA, 664 bp, Homo sapiens
attttaagtctgaaagaattttgtaagaatgaatatcaactttataaaatctagttaagcaataaaatattagggccataatcccatgttatgaatgaaaaatatagatgactaaatgccatactgttagtgacagatcaaatttgtgaaattaagatcccttcatttctagtacctctcatattggacatgtccaaaattactctccccaacgaactccaatccaacaccccaaccttacttsctttttcctcttttaacataccaaaaccccaaataacaaaacaaacgaatccctatctcctgtatatcccttctgtcctgtcttctctgctttgctgtggctgttgtctaccagggctgatggacatgaaataatgaacacagaatacctaattaaattatgataagtgctaggataaaattctaaacatagagtaagaaaagctgtggtgttaagaaaacggagcctgggatgatgacggtggggggtcagacagacaaaggggcaggggccaacttctatattctaaggtgtgtagaaaatgcgggtgttgaaggacctcagcttgactgccagactttgatagtgaaacgagattggcttcgagcaaagtctgggctcagctcatgtccggttttacgggtcatggaaacaattctg

SEQ ID NO: 678541 - DNA, 664 bp, Homo sapiens
attttaagtctgaaagaattttgtaagaatgaatatcaactttataaaatctagttaagcaataaaatattagggccataatcccatgttatgaatgaaaaatatagatgactaaatgccatactgttagtgacagatcaaatttgtgaaattaagatcccttcatttctagtacctctcatattggacatgtccaaaattactctccccaacgaactccaatccaacaccccaaccttacttgctttttcctcttttaacataccaaaaccccaaataacaaaacaaacgaatccctatctcctgtatatcccttctgtcctgtcttctctgctttgctgtggctgttgtctaccagggctgatggacatgaaataatgaacacagaatacctaattaaattatgataagtgctaggataaaattctaaacatagagtaagaaaagctgtggtgttaagaaaacggagcctgggatgatgacggtggggggtcagacagacaaaggggcaggggccaacttctatattctaaggtgtgtagaaaatgcgggtgttgaaggacctcagcttgactgccagactttgatagtgaaacgagattggcttcgagmaaagtctgggctcagctcatgtccggttttacgggtcatggaaacaattctg

SEQ ID NO: 678542 - DNA, 814 bp, Homo sapiens
attgaaaaatattaacatttaatcaggcatatacattataaacatttcaccctgttgcttttgtttctctttcagccttgctcatgtggttttttttttkttttgttttgttttgttttgttttgtttgctataaaagtcgtctagattttgaaattcctttgtgatttctacatttttggtcatgtttaaggaggtcttcccttttgattaatcataatgtttttatacaactataagatagacactaccatgtttcacatttgtttggaaattcctggtggccattctcattgtctggaattattctaaaatagtaaatgttttttaattccaaaaaaaagaagatgtccaatggcatttttgggaacagatataaacatcagtgtatctgtcaaggagatgagagtgagaagtgggaagaaggaagcaggaggaaggtgacttagcttaggaagtataggtgcttgggtggccacagagactgctcccctgaaatgattctgggtgattcttttttgttttttgttttgttttgttttgtttgagatggagtcttgctctgtcgcccaggctgcaatacagtggcatgatctcgctgactgcaacctccacctcccgggttcaagtgattctcctgcctccacctcccaagtacctgggattacaggcatgcaccatcatgcctggctaatttctgtattttcagtagagacgggttttcaccacattggccaggctggtctcgaactcctgacctcaggggatctgtctgccttggcctcccaaattgctgggattacaggcatgagcca

SEQ ID NO: 678543 - DNA, 814 bp, Homo sapiens
attgaaaaatattaacatttaatcaggcatatacattataaacatttcaccctgttgcttttgtttctctttcagccttgctcatgtggttttttttttgwtttgttttgttttgttttgttttgtttgctataaaagtcgtctagattttgaaattcctttgtgatttctacatttttggtcatgtttaaggaggtcttcccttttgattaatcataatgtttttatacaactataagatagacactaccatgtttcacatttgtttggaaattcctggtggccattctcattgtctggaattattctaaaatagtaaatgttttttaattccaaaaaaaagaagatgtccaatggcatttttgggaacagatataaacatcagtgtatctgtcaaggagatgagagtgagaagtgggaagaaggaagcaggaggaaggtgacttagcttaggaagtataggtgcttgggtggccacagagactgctcccctgaaatgattctgggtgattcttttttgttttttgttttgttttgttttgtttgagatggagtcttgctctgtcgcccaggctgcaatacagtggcatgatctcgctgactgcaacctccacctcccgggttcaagtgattctcctgcctccacctcccaagtacctgggattacaggcatgcaccatcatgcctggctaatttctgtattttcagtagagacgggttttcaccacattggccaggctggtctcgaactcctgacctcaggggatctgtctgccttggcctcccaaattgctgggattacaggcatgagcca

SEQ ID NO: 678544 - DNA, 574 bp, Homo sapiens
atgctaccaatttttttttgtctccctttgcagaaattgtagcaacctgagcaatttcttcaggggttgtcacaggtttagactgcttcctaagttcagcaattacagtatcaacatctaacctcacacacttccgatttccactggattagcacctttgctaaccttctcaaggccttctttgcagtagagcatgccagtrtggtagcagtggtgataccatccccagcttctttatttgtgttattagcaacattttgaacaagtttagctccaatatttttatatttatcctttaagtcaattgactttgcaacagtcacaccatctttttttactttggaacttcctcagctctcttcaataataactgttcttccctttggccctattgtaatggctagagaattggctaaaaggcctacaccttgaagcattaagttttgggcatctgcaccaaagtttacatctttggcatcagcctgaggaagatgaggcttcagtaccctggacaccagtcttatttggcaaaaaaaaaaaaaaaaaaaaaaaatactgtgggtaattgaagcat

SEQ ID NO: 678545 - DNA, 591 bp, Homo sapiens
tgaggggcgccagtgacctaaaataaatactaccggggcatgcgaattccatctccttctcatgtcttccctctgcgtttctcactattaggaagaagtacatccagcagaaaagccagaattgaaagcacctgaaatgtccattgcccatgagagtttcacttctagctcacactttcaattaatgtgaattaatttcaaggaaaagaagcttaggttctaattctgatgtttattgataacactaccaatractggcagaaacatgctaggtatgtgacattcaaagtcagcagagactggctcacagatggtggttggggctgctgtttgttaggcatttgctgagggctggaatctgtgctgagtgggcgtttgcatccgcctcttcgctcattccctaacgatctgagggaagtgtcctgagcatctccgctgaaccgatgaaggagctgagcctcagagagggtcactgtcttgctaaacattacacagattggaaagcaggtggaaatcaggcctgtctgatggtgtcatctgtatgcgtaactatcacactcaatggcaacggggatttccacctgctgcaag

SEQ ID NO: 678546 - DNA, 656 bp, Homo sapiens
tctccctctgcgctcgccttgcgctccgccgaaaccattcgggtcccgtcctctccctccgygctcgcgtccctccttgaagtcggagtttctctcgtgcacgtttgcactttgcaggctccagccgggtcccttgcacacgccgatgccctggggatgccggttgtagtgacctggtccctgtgactaaggggccttggggaggcctgtctgtccctccttctgcctctgatctccatatgaccccgccatgccgctgtagaacttggcccaggaagctccagcaaatggggacgagaaccagactttgcccccaaacagaagccctggctgggcacccgctcaccaagcctaggtttgccattctcaccccagcacctgaatcaaattcctttcaagtttcaaagaagtaaaaactcggtctgtgacaaatgtctctaacatgaaacatgttcccagacttccaggacacaacacagagccgcggtcctctttccctgtatgaacagtgtctttgtgagagagcgtctttgttcagaaggggaagaaagaatgaatcatgctacggaacactcaggcaggtgccggccattctggaaacacgtgtatttcggcgtatcgtgtactggcatgctgcggggaatagcaatgaatag

SEQ ID NO: 678547 - DNA, 656 bp, Homo sapiens
tctccctctgcgctcgccttgcgctccgccgaaaccattcgggtcccgtcctctccctccgtgctcgcgtccctccttgaagtcggagtttctctcgtgcacgtttgcactttgcaggctccagccgggtcmcttgcacacgccgatgccctggggatgccggttgtagtgacctggtccctgtgactaaggggccttggggaggcctgtctgtccctccttctgcctctgatctccatatgaccccgccatgccgctgtagaacttggcccaggaagctccagcaaatggggacgagaaccagactttgcccccaaacagaagccctggctgggcacccgctcaccaagcctaggtttgccattctcaccccagcacctgaatcaaattcctttcaagtttcaaagaagtaaaaactcggtctgtgacaaatgtctctaacatgaaacatgttcccagacttccaggacacaacacagagccgcggtcctctttccctgtatgaacagtgtctttgtgagagagcgtctttgttcagaaggggaagaaagaatgaatcatgctacggaacactcaggcaggtgccggccattctggaaacacgtgtatttcggcgtatcgtgtactggcatgctgcggggaatagcaatgaatag

SEQ ID NO: 678548 - DNA, 2458 bp, Homo sapiens
ataagaaaaaggctggtggagattgggtgatactctggaatccagaggatttttactgtttgagaaaatacaatcatcagacccttggctgaatgatatcaaatcaggaactgggttgtgaattgaaaattaatttgggagcatttctaagtaaataatcgggaacttggagaaattagagcagatgcatcccacagaagtacagacctcagctcttcactgatcagtgagtccagccgcagttactgtggcttcttccggcccagcgtccggcacataatcaccgggatctgtgcgttcatgggtgcgagggccctccagccgaatttctggtgataagtgatgaatcatgagaaacagcaacggaagtttaggcttcaaatcagtcttatttcatttttcttcttgaatttactagttcattattgccttatagtgatttttcccatacctttgtatatttaatttcctttttaatagacaaactgtcatgggaggttacacaaagcattattgttcaaaggaatgtttatatcactcagataaatatcatagtgcattatggattgggagtgtatttatttcatatacaacagaaaaatgactgtgtattatcaagtaaatacatgctatatttaaataatgtgatagcaatcaccaatcgccgagtttttccttggtgttctgaaattagaatatacagaaaggcaaattaatatttaaactctctgtatagttttgaggatccataatatgcataacaaagagagatgactttgggccatgcggggtacgatggtatcgtgaatggattgactacagggggcctgcagaagtcacacgcactcaggggcctgaagaactggggtaataccttgagcactaagataattccattattattgaaagcgtttattgcctgtggttcctctgtgggcaccgtataaagtacttgaaacaaaacaatttgtgatctttatgtgctttgaaacccaggctacagatagaacaaacaggctgaggtgaactgtgtaattgttaggcacacataaaacatgtgtgttattttatgcaagtcaagggtggtcactgaaaagggaggtaagacacaggagtgaaaagtttctacgaggcgacgtctctcagtgtgggaggtgtgcggcactgacttggggatcggtcagagctgctttcagacaaatggcccgtccaggacaaacctcccgcatctctagctgtttaactcatttcatttggttttctamcctctgtttaatccagcacaatttcctatctacccctggatgagttaaaagtaaaacactcaagttcaaatctgccctaaaatcctcggaaggatgatgaatttagtcaaagatgccccgctatgagaaattcagccatgagacattcaccgcgacgcctttcagctactgaaagaacctacagatttgtccttctcttttccattccttagcgaattaaaaagaaaaaacaaaaacaaaaaacaaatgaagaagcaactggtacgagcagatttggtgcaagagaaccaatcgcaggagccgcccaagctcacttaggaaaagagctgagcgacagcagctgcacccagaaggtggagaccgcatgcgaacccaggatcccaggcagcacaaggctagagaccctgcaagcagccatggctgtgcgttcatgcagagcgtcatcacagccaacacggtcttcctcctggttaaccaagatcccgtttcagccattctggaattgcagggctggccagaactttaggaacaatacatgcaatgccttcattttgtgagtaactggtgtcctgaagaggtgacaccccttgctcaggacgactgtaagagaggtcatggccgaatggggacccctctaatttgagatttgtgtagacaaataaaccttctccataagaaaccattcacataaataagccactctgcctgatcagcaccctaatcccttcaaaatgtcctagcatagcatattttctttctctgttttgagaagaattttgaatacatgtgatatgtaacatataaaatatactgtgatataaagtatatgataagtaaagatattatacatatttttaataggcacctgggagattccggaaactgtgtcagtttctctaagtcagtatcttataaaatcctcagaaaaaccctcccaggcaaataatattcatatttttaaaaatgggggaagtgagatgcacagaggttaaattttttaccccactgagtgaatgagcagtggcaggcgtggggcccacactcttgtctgccagagtctgtttgggcagcagagtgtcacagcatgtccatcttccctaacctgcttcattctctaaacatcgatttaaactcagacaccccattgagagtccagcacagccaggtcccagaggagcggcttcttcccagca

SEQ ID NO: 678549 - DNA, 632 bp, Homo sapiens
tgcctctgtccttctcccttttgacattgccaccaggacttaagaaggtcagggaggttgcccgcaatgtgcctgctgtaagtaagagtgtcccggctgtgaggaccaccatgtcgcatagatggggcctgctggaggtgctgctggcagatttgygggcctaattctggctttggggaagggcaaagccctgttctcatgagtagaggggtcgcacagaatcctcagcgcgtatcctgctaattgctgtagcccctcctagtaactcttaataaacacgactggtcatgcacagaatgcaaaacccttttctctctgttggcagtttctcaggctgagaaaaaaacatcagtgtgggggaagatttgggacccctgtctgcatctacctggactctcattaaacagatgatgtgatgaagcaatcagaaagcctggccagctgctcacctccagggcagcttcttgggaagacagtgaacaattctgggggttaagaactgtttttaaaagaaaacactagggaggctggggcaggaggatcgtttgaggcccaggagttggacgctgcagctagctatgattgtaccactgcactccagactgggtgacagagcaagaccttgtctctaa

SEQ ID NO: 678550 - DNA, 632 bp, Homo sapiens
tgcctctgtccttctcccttttgacattgccaccaggacttaagaaggtcagggaggttgcccgcaatgtgcctgctgtaagtaagagtgtcccggctgtgaggaccaccatgtcgcatagatggggcctgctggaggtgctgctggcagatttgtgggcctaattctggctttggggaagggcaaagccctgttctcatgagtagaggggtcgcacagaatcctcagcgcgtatcctgctaattgctgtagcccctcctagtaactcttaataaacacgactggtcatgcacagaatgcaaaacccttttctctctgttggcagtttctcaggctgagaaaaaaacatcagtgtgggggaagatttgggacccstgtctgcatctacctggactctcattaaacagatgatgtgatgaagcaatcagaaagcctggccagctgctcacctccagggcagcttcttgggaagacagtgaacaattctgggggttaagaactgtttttaaaagaaaacactagggaggctggggcaggaggatcgtttgaggcccaggagttggacgctgcagctagctatgattgtaccactgcactccagactgggtgacagagcaagaccttgtctctaa

SEQ ID NO: 678551 - DNA, 632 bp, Homo sapiens
tgcctctgtccttctcccttttgacattgccaccaggacttaagaaggtcagggaggttgcccgcaatgtgcctgctgtaagtaagagtgtcccggctgtgaggaccaccatgtcgcatagatggggcctgctggaggtgctgctggcagatttgtgggcctaattctggctttggggaagggcaaagccctgttctcatgagtagaggggtcgcacagaatcctcagcgcgtatcctgctaattgctgtagcccctcctagtaactcttaataaacacgactggtcatgcacagaatgcaaaacccttttctctctgttggcagtttctcaggctgagaaaaaaacatcagtgtgggggaagatttgggacccctgtctgcatctacctggactctcattaaacagatgatgtgatgaagcaatcagaaagcctggccagctgctcacctccagggcagcttcttgggaagayagtgaacaattctgggggttaagaactgtttttaaaagaaaacactagggaggctggggcaggaggatcgtttgaggcccaggagttggacgctgcagctagctatgattgtaccactgcactccagactgggtgacagagcaagaccttgtctctaa

SEQ ID NO: 678552 - DNA, 1663 bp, Homo sapiens
gtgggaaatcgctcacaacctgctcccatccaagaatgaccattaatgtctattttggccacttctcaagtaattgtcaaagcccagctgggagatgcccgcacacagagccctgggcccaggccacaggggcacaccgttcctaccttcctttgaatcaattgtttcatttaaactcaaagcaaaatatttaaacagaccaagtaatatttctttttctaatccaggtgtgcacacgtgcgtgagccctgtgttttccctttctgcctccacttttacagatctgtgaagtggggcattcggcacggtggtggtgagacacatggggtctgggggccaggctcctacatcctcactgtgctgactgcatagaccaggggcagcctgggaagaagaggcaccaggcggcagaacaggccagattgtgtccaggaattgaaaaagcatgtgtatttttctcatcccttatgtttagagaaaaaatatttattgctacttctttcttaaagcttcatttttagttagcttcttatgagttccacatatggaaacgtttccatattttcacaaatctaagttaatgatacctttacaaccagccccccaatgcccaagtggcctccagaagatgacgaataacataaatgaaataaaatcatcagctgaagaaaacgtctaatgtatttgtttctaaaaattcttgtggttgactctattttatttaatttttggatggggagagagttgtcttgtttgttgcaaatttatctttaggtctgagagaacaaaacacccggttttctccctcgtctgatattagcattatagacacggtactactcataggaacgttttttactcagagagcggccatctctttacatctctactgtagaataagaacttctagcgcttgcaataggttcctaagctgttagatgagccccgtttgataggaagaggaagcgaggtgctgaggtgaaagagttggttccaggccccacggctctcaggaggatgagctgggacttgagaccccttgggctctgaagcttgtggggtaccccccagyaagttcctcaacttccaacaccgtggttgtctccatcctggaatgccaagtgtccagtgggtgatttccaaggagctcaccctctctgagtgctaagtcctgtgcaggcagagacaatctgcataaaaacacctcagagccagaaagacctgcaataagtggctgacggaaattcacattttaaactcaacagggagaaacaataaaatgatccctttttatttgttaatatgattttattatttccaaatgtttgattataactacattcaaaaggaaacattgatgccatattaaagaatattaaaatatatgagaataaaaactacagtgccaaataaaccttgtttaattctcctgaatggaactcaggccaaggaaccccggaaaggggaggaggcaggtgtcttcagtttgcttctttttaatgaaatataactaaaaaatattagcttctttcaaatttatgaaagaaactgaattcaatttcaattgaattgcctgatagagcagtcgttattccttagcaatatctagtgtcaacagactacaagaaaacaaggacccttcttgttaagcaggcatttcccc

SEQ ID NO: 678553 - DNA, 1954 bp, Homo sapiens
ttaaaatgtgacagtcatctatgaatactgaaatgtgatggtcaagtggtccatcatcaacacaaatacaaatggaaatcattaaactttctggaggggccatttgaataacaatgtcaaggcctgggtttttcccagcgggattttggtcttcttatctggataagcacaggcagagatgggctgggtagtggccggtttctggatgcagctgcacgctggctggacttagcactgcagctcctcctccttggtccgccgggagcctcctgccaagctctgggcactggcatgggccgtggagctgaggacctcctcaaaactgcctccattagggttcgtaccgcctactttcgtctgaaatgagcagatccacaaaaatgcagttagttgttactatcatttttgtaatgtttttataagaataccaaaagctggattactttcaaattcagaaatactttctatctttagagacaaaagaatgcacagaagtttgtttcctttagtagagtgctagaatattattcatacttgggttctcggataggattccaaactttaattttgcacacttttagcaaccctctctttatctctcctgtatctaagattttaatcccttcaggagcataatcggatccatggacttggaacagctatctccactcacccagagaactgatctaatcaaaatggaattagattttttattaattcctccaattgtacaaatgtataaacatccttacatgacctaaacttagatttttctacttgggagttagcagggcaaactggatttctgacaaatgtcttttgaaaagtcagagtggctcaatggaaaatgatttctggtttctgctttgaaaattgaagatggatcaagtcttaatcactggtgatttcacatcatcttaggcaactgccttttgatatggtttggctgtgtcctcacccaaatctcatcttgaatggtagttcccatagtcctcataatcctagcaaggaggaacctggtaggaggtaattgaatcatgggggcggtgacctccatactgttctcgtgatagtgagtgagttctcacaagatctgatgcttctacaaggggctttcctccttttgttcagcacttctccttcctgccaccatgtgaagaaggacatatttacttccccttctgccatgattgtaagtttcctgaggccccctcagccctgtggaactgtgagtcaattaaatctctttcctttataaattacccagtctcaggtatttcttcacagcagcgtgaaatggaattaatacacccttacagtatgaatattccttacaatgcagttatgatggtttatgaggcttttttcttgtgtatttgttattgactaagcatagaaacatgaaggaattaacttacaatttaaaaataaggctaagtattttgaaaaattccttattaaaactgctaaaaatcccttattaaaactggcttcctaatctctcataatacaaaaaggaaaaaaaacatgtaatgcaacttgccctttttttttttttttaaggttttggtccaggccatgtaatgtatttatcaaaaagtagatgcactaaaaatatggtctgcttgacaagatgcaaaatgcttagtgcaagtcttattaatagtcacactggccttccctcccattgtttttcataatgtagaaaaaacactttgaaggaaaaagaagatatrgaataaataatgttgctattgccaaactgattgttgatgcctcactgtcaccaaagtgatcactcacagacatcagcaacactggggattgtgtctgtgctgcctggcctgaccttttaaaaatgtaaccagggttcaaaagcagttccatcattacaaaacacacttcgctctaattgtcactaaaatctctctctgcctcttaaatttatttatta

SEQ ID NO: 678554 - DNA, 1954 bp, Homo sapiens
ttaaaatgtgacagtcatctatgaatactgaaatgtgatggtcaagtggtccatcatcaacacaaatacaaatggaaatcattaaactttctggaggggccatttgaataacaatgtcaaggcctgggtttttcccagcgggattttggtcttcttatctggataagcacaggcagagatgggctgggtagtggccggtttctggatgcagctgcacgctggctggacttagcactgcagctcctcctccttggtccgccgggagcctcctgccaagctctgggcactggcatgggccgtggagctgaggacctcctcaaaactgcctccattagggttcgtaccgcctactttcgtctgaaatgagcagatccacaaaaatgcagttagttgttactatcatttttgtaatgtttttataagaataccaaaagctggattactttcaaattcagaaatactttctatctttagagacaaaagaatgcacagaagtttgtttcctttagtagagtgctagaatattattcatacttgggttctcggataggattccaaactttaattttgcacacttttagcaaccctctctttatctctcctgtatctaagattttaatcccttcaggagcataatcggatccatggacttggaacagctatctccactcacccagagaactgatctaatcaaaatggaattagattttttattaattcctccaattgtacaaatgtataaacatccttacatgacctaaacttagatttttctacttgggagttagcagggcaaactggatttctgacaaatgtcttttgaaaagtcagagtggctcaatggaaaatgatttctggtttctgctttgaaaattgaagatggatcaagtcttaatcactggtgatttcacatcatcttaggcaactgccttttgatatggtttggctgtgtcctcacccaaatctcatcttgaatggtagttcccatagtcctcataatcctagcaaggaggaacctggtaggaggtaattgaatcatgggggcggtgacctccatactgttctcgtgatagtgagtgagttctcacaagatctgatgcttctacaaggggctttcctccttttgttcagcacttctccttcctgccaccatgtgaagaaggacatatttacttccccttctgccatgattgtaagtttcctgaggccccctcagccctgtggaactgtgagtcaattaaatctctttcctttataaattacccagtctcaggtatttcttcacagcagcgtgaaatggaattaatacacccttacagtatgaatattccttacaatgcagttatgatggtttatgaggcttttttcttgtgtatttgttattgactaagcatagaaacatgaaggaattaacttacaatttaaaaataaggctaagtattttgaaaaattccttattaaaactgctaaaaatcccttattaaaactggcttcctaatctctcataatacaaaaaggaaaaaaaacatgtaatgcaacttgccctttttttttttttttaaggttttggtccaggccatgtaatgtatttatcaaaaagtagatgcactaaaaatatggtctgcttgacaagatgcaaaatgcttagtgcaagtcttattaatagtcacactggccttccctcccattgtttttcataatgtagaaaaaacactttgaaggaaaaagaagatatagaataaataatgttgctattgccaaactgattgttgatgcctcactgtcaccaaagtgatcactcacagacatcagcaacactggggattgtgtctgtgctgcctggcctgaccttttaaaaatgtaaccagggttcaaaagcagttccatcattacaaaacacacttcrctctaattgtcactaaaatctctctctgcctcttaaatttatttatta

SEQ ID NO: 678555 - DNA, 1275 bp, Homo sapiens
ggcaaccagcccccatcctgaagctacctaggggaccccaccagcagtctttcattagcatacaaaagaaactctcatcaccccaaagattctaagggtttaggagctgtacaccaggagccagggacaaaggccagaggtttatttattttttattatatcacagtggacaagcagaaattggaacatgataagagtttcagaaataatctgtagaagcgcaaagattagtaataaacccaatttagtcaacattttttaattgagaaaacagaagcccatggttgggaagtggcttgaccaaggacacatagctgacaaatggaggagctgagaccactgtaacattttccaatttctggtcttgcactctgtccacattattgaagcctctagttcagctacgtgcaactcagcacatccaaagcctttgcactgcgtgctctttaatcctttaagaatctcttaaagaggaacagacttgtctgcgggtaccagtgacctggcatgagctttccttttgcaggaacagtgttatgctctctacaaagagcaggtgtgagtcacctccagtcacagccaagccagcatctcttacaatattgtggaaaaaggctccacgtatcaaaactgtctttttagaaaacagccagatttgtgctctgagaagagctctggccctggtccgagctcccagggatccctctttgggccccagcttttcctttcttttttaaccagtcgtcttttatgtggaggttaattcccattaggatataaaargattcagcaaggatcgcgttcctcaaggacaggtgtgggcaaaggaggtcgtggtcagggcgacagagcgtgctgtccgtgcaggcccctcttcagtggtacttgcatagctgctcatgcttgagctccttgtaggaaaggcagtagctgaagagcatgtaagctgccagtaccgtggaaccccctgagacaccctttcttcacgtcgatgtacttgttgtagtaccagtagaaacctctttgaaatgctccagcaatgccactaggggtgaaatcttgcatcagtatccagcttggcagctcccctagtttgacatccaggagtttcttctccttcactggtataactgataccatcttggaggaccagctgtggggcccagcttttctttcagtgtcaagaagcttgaatggctaattgcacctcaccaggaggtctgatgacactgaggaggcttcccccagctaaggcccaaattagtgaatggcaaa

SEQ ID NO: 678556 - DNA, 837 bp, Homo sapiens
agacccgcctggccaacatagtgaaaccctgtctctactaaaaatacaaaaaaattaggtaggcatgatggtgcgcacctgtaaacccagctacttgggaggctgaggcagggagaattgcttgaagctgggaggcggaggttgcagtgagctgagagcacaccactgcactccagcctgggcgacagagcgagactccatctcaaaaataaagaaagaacaacactgtgattctctgacctcgtccaggaaaatatatgggattaagctttctgggtagaggcagctcgtctttttaggtaaggaacagcagctccccatcagtgttcggccagtgctttccacttgataaagaataccctcccctccactatctcrtgtaattctcacaactgatctaagaagcggacattatggttattatccacattttcatcaacgctctaaggaaagatgtctaattactggctggcgaatggcagagctggaggcacccatgtatttctccctccaaatctggtgttccttcggccaccctgcagcttagctttttttttaggaaatcattctggaagatacctccagcttttggcattcttgagcagaacgtgtggagcataactccttagtgagtcagcgtctttactgagatggccagtgatgtgtatcgttgggcgctaaggagatgggcaaaatcacctgctcccgtggccaggggatggaggagccacatctgttcctgactttttaattgttaacgatctcaagatcatgctatgttctcttcaattgctgtaaagtgtaaagttagatgcaaaacttactcgaattgtgaat

SEQ ID NO: 678557 - DNA, 643 bp, Homo sapiens
gagtatgaagcaggatccattgcactgtgcccatctgcttgaggggtctgcctatagtgtaagcaagggccatggaagggcaggtgtccttggtccagggaacagtgtstctccataggatcacttctttctgggcatccttaaaggggaaataaattaacagccctaccctgtaaccgcaaactatggtttcccaagggtctgtgcccagtgggtgctggtgcccattaacaggcagcttctttggggccactcatcaacaggaccttgttaaaagtaaggattgagcctctgggagattacagagctagccattcaacaagtccagcttagagttttctcagaaattaagggaagaagaaagcttttgactaggtccctgacagataatctaggtcctcattccagagtcacacaaggcatgctagttaaattgcccaggttgtgaaatcccaggaggacctgcctcttgctagctctgtgtctataagcaaagttcttcatctctctaggcccatctgctcacctgtaaaatggagataatagtagtatgtacctaggaggccaatgtgaagattaagaaagataatgcatgttaagactctagtgaggcccacagaggaagctccataaatatttgata

SEQ ID NO: 678558 - DNA, 616 bp, Homo sapiens
caagcgtgagctaccgcacccagccctgtctttctttgagactagaattttaaccttttagttatattacacgtagagctgctgcaaacttcttgtacatcccacgcacctgtacagttatttctttaattctaagatgtgcagttactgttcaaagagatgaacaattttaaggctttctatgtatgtgccaaattgccttccagaaaaggttgcttcaattgcacatactataccagcagtatataatatacccatttctctactaacataccattcctaagtgtttcctttttttggagtcagggtctcactctgtcacccaaggctagagtggagttgcacgatcctagctcactgtagccttgaactcctagacttaagcaatcttcttaccttagcttcctaagtagctaggagtacaggcgtgcgccaccatgctggggtttggttgttttgtttgtttcttccttaaatggaggaggtctctatgttgcccaggctggtcttgaactcctgggctcaagtgatcctccygcctcatcctcgcagagtgctgggattacaggtgtgaggtgggattaccatgcctggccttgtgtttttcttaaggaaa

SEQ ID NO: 678559 - DNA, 616 bp, Homo sapiens
caagcgtgagctaccgcacccagccctgtctttctttgagactagaattttaaccttttagttatattacacgtagagctgctgcaaacttcttgtacatcccacgcacctgtacagttatttctttaattctaagatgtgcagttactgttcaaagagatgaacaattttaaggctttctatgtatgtgccaaattgccttccagaaaaggttgcttcaattgcacatactataccagcagtatataatatacccatttctctactaacataccattcctaagtgtttcctttttttggagtcagggtctcactctgtcacccaaggctagagtggagttgcacgatcctagctcactgtagccttgaactcctagacttaagcaatcttcttaccttagcttcctaagtagctaggagtacaggcgtgcgccaccatgctggggtttggttgttttgtttgtttcttccttaaatggaggaggtctctatgttgcccaggctggtcttgaactcctgggctcaagtgatcctcctrcctcatcctcgcagagtgctgggattacaggtgtgaggtgggattaccatgcctggccttgtgtttttcttaaggaaa

SEQ ID NO: 678560 - DNA, 616 bp, Homo sapiens
caagcgtgagctaccgcacccagccctgtctttctttgagactagaattttaaccttttagttatattacacgtagagctgctgcaaacttcttgtacatcccacgcacctgtacagttatttctttaattctaagatgtgcagttactgttcaaagagatgaacaattttaaggctttctatgtatgtgccaaattgccttccagaaaaggttgcttcaattgcacatactataccagcagtatataatatacccatttctctactaacataccattcctaagtgtttcctttttttggagtcagggtctcactctgtcacccaaggctagagtggagttgcacgatcctagctcactgtagccttgaactcctagacttaagcaatcttcttaccttagcttcctaagtagctaggagtacaggcgtgcgccaccatgctggggtttggttgttttgtttgtttcttccttaaatggaggaggtctctatgttgcccaggctggtcttgaactcctgggctcaagtgatcctcctgmctcatcctcgcagagtgctgggattacaggtgtgaggtgggattaccatgcctggccttgtgtttttcttaaggaaa

SEQ ID NO: 678561 - DNA, 616 bp, Homo sapiens
caagcgtgagctaccgcacccagccctgtctttctttgagactagaattttaaccttttagttatattacacgtagagctgctgcaaacttcttgtacatcccacgcacctgtacagttatttctttaattctaagatgtgcagttactgttcaaagagatgaacaattttaaggctttctatgtatgtgccaaattgccttccagaaaaggttgcttcaattgcacatactataccagcagtatataatatacccatttctctactaacataccattcctaagtgtttcctttttttggagtcagggtctcactctgtcacccaaggctagagtggagttgcacgatcctagctcactgtagccttgaactcctagacttaagcaatcttcttaccttagcttcctaagtagctaggagtacaggcgtgcgccaccatgctggggtttggttgttttgtttgtttcttccttaaatggaggaggtctctatgttgcccaggctggtcttgaactcctgggctcaagtgatcctcctgcstcatcctcgcagagtgctgggattacaggtgtgaggtgggattaccatgcctggccttgtgtttttcttaaggaaa

SEQ ID NO: 678562 - DNA, 616 bp, Homo sapiens
caagcgtgagctaccgcacccagccctgtctttctttgagactagaattttaaccttttagttatattacacgtagagctgctgcaaacttcttgtacatcccacgcacctgtacagttatttctttaattctaagatgtgcagttactgttcaaagagatgaacaattttaaggctttctatgtatgtgccaaattgccttccagaaaaggttgcttcaattgcacatactataccagcagtatataatatacccatttctctactaacataccattcctaagtgtttcctttttttggagtcagggtctcactctgtcacccaaggctagagtggagttgcacgatcctagctcactgtagccttgaactcctagacttaagcaatcttcttaccttagcttcctaagtagctaggagtacaggcgtgcgccaccatgctggggtttggttgttttgtttgtttcttccttaaatggaggaggtctctatgttgcccaggctggtcttgaactcctgggctcaagtgatcctcctgcctsatcctcgcagagtgctgggattacaggtgtgaggtgggattaccatgcctggccttgtgtttttcttaaggaaa

SEQ ID NO: 678563 - DNA, 595 bp, Homo sapiens
tgtcttgccagcacccatgacgggcaactccacaatgacccactgtcaagtcctaagaaaaagcaggctgagaccaccggcagtgtgggtccctcacagaattctcattcccagaggaaaatgtccatcactttcagccctcaaaaaaccggctactgtcccaagtcttgaagtcctctagagcaacagcacctgttggctgttttcctgtgaaatacgaagacaggaatagggctggaatgggctgttaattcatttaacacttaggtgctgagccccagctcagcaaatatcctgagcagcacagtggtagaaggagcaaggacatcagaattaggctaaacctgsgttcaaatcccatctctgctatctagtgcctctatgaccttgagtgagtcatctaccctctttgaacctcatatctgtatcaaaaagtaaaaatagcaatgctgaaaggatggggctgatcaaggaatatctcctgttggagtaaggcaaaccgagggtcagtatgcagaggcagaaagaggcagtgcttacaatgaaactgactagggttcaagtctcagtttgactacctgtgagctgcaggcct

SEQ ID NO: 678564 - DNA, 626 bp, Homo sapiens
tgtatatttaaaccaatatgtataacctggtagaataagyggaggaggtgagttacaaaattctcttaaactaattgcacagtcagccctaccctttgtaataatgaatgtttgctccattatcgctccaggtttattattttctaaacagcctcattgatcttgcctcagtgggctttccatttttacacattacattctcttgggaattgaaaagcacggtgtctctgaagatgctcagtcaacttgaaaacactcatttttgaaaaggtcttaacctgccttcaacttgaagcaattcagactttgcccaaacaaacattagagcagagacacatcactcgtgtatatgtttctaccatcactgggaagctgtttgtctgaaaggtcatttacagaccgttttttagggtattgaaaattcagggatctatactcataactaaaatgaatgtacatgtaattgagagcatggcactttattataatggattctgcattattcaatatcataaatattttgtggaaggccctatttcgttatgactccaactactaaacttatagcaaaatcataatgtgtggtggaagggaaaggagaaagaagaaataaatagaaaaggcta

SEQ ID NO: 678565 - DNA, 657 bp, Homo sapiens
tagatgtcttcttttgagaagtgtctgttcatgtcctttgcccactttttgatggggttgtttgtttttttcttgtaaatttgtttgagttcattgtagattctggatattagccrtttgtcagatgagtaggttgcgaaaattttctcccattttgtaaaacctgtgttcatttctaaactctgaagaaattgctgtatctgccagtcaattgctgctgttcattattaatgttattggtagtattactttgtatgcccttacttgcgaaaaaggttttagtccattttcttccatttgcttatcagatgttaaagatgaagggaaagttattccgagaatgattccaattgttcatcctgttctttataaacgctttttggaaatctcacttagtagaaaaaaataagtctcaagatttagttcacattccaaattcttataaaagctactgtggattattaaccagtttattgtgtcccatcgtattagaatattttcaaatattatttctaatccttaaaatgagtctcacttctaggaaatatatttatttttattttgtgaaagaaaattgaaggattacagtattgaaataacttgccacaattatacagtatttagcatgtcagagccataatgttagaaacaaattac

SEQ ID NO: 678566 - DNA, 657 bp, Homo sapiens
tagatgtcttcttttgagaagtgtctgttcatgtcctttgcccactttttgatggggttgtttgtttttttcttgtaaatttgtttgagttcattgtagattctggatattagccgtttgtcagatgagtaggttgcgaaaattttctcccattttgtaaaacctgtgttcatttctaaactctgaagaaattgctgtatctgccagtcaattgctgctgttcattattaatgttattggtagtattactttgtatgcccttacttgcgaaaaaggttttagtccattttcttccatttgcttatcagatgttaaagatgaagggaaagttattccgagaatgattccaattgttcatcctgttctttataaacgctttttggaaatctcacttagtagaaaaaaataagtctcaagatttagttcacattccaaattcttataaaagctactgtggattattaaccartttattgtgtcccatcgtattagaatattttcaaatattatttctaatccttaaaatgagtctcacttctaggaaatatatttatttttattttgtgaaagaaaattgaaggattacagtattgaaataacttgccacaattatacagtatttagcatgtcagagccataatgttagaaacaaattac

SEQ ID NO: 678567 - DNA, 1166 bp, Homo sapiens
ctgttgttaagaggcaagttacttgctgtcttggtcaactctgcatctcttactgccttggccatcctcactgaatgctggcaaacgtcaaggaggatcagggaaaaccatggcttgacttctttccattctggaaacaccacttggtggctggtctccaggagaagttctctccacagactcaagtaggtgattaccttagaccagtggtccccaacctttttgacaccagggattgttttgtggaagacaaattttccacagatggcggggaggatggtggatggtttcaagatcaaactgttctacctcagatcatcaggcattagtcagattctcataaggtacactcaacctagatccctcacacgtgcagttcacaacagggttgtgctcctgtgagaatctaatgctgccactgatctggcaggaggcagagctcaggtggtaatgctcacttgctcatcattcacctcttgctgygtggcccagttcctaacaggctatagagccctactggtctgtgacctgggggttgaggatccctgccttagactaccagtcagtgaatgtcttcatggattcaacttggcctaatgggttgaacaaatttttcccttggcttatgcattgagctgagttgcccagaattcactgatcatcatcaggggatcagagatggcctttaagagtaaggttaatataaacatattttaaaactcaaaagatgactaaaaatgaaagaatttgaccaggacataaaaagttgtttaatcaattcactggaaaaccaaacaaaaaaaattatagcaagccagatggaacccaaaataacacttaaattaccttttgaggtggttagagcagtattcaaagacactggaaatgagaaaaggtaattggtcaaaacctaccaaatggcaaacaaattttgtttcatagttaatttgttttcttctctgtgtccctagaacacggaaatcatggtcttcattgatttaattaacaaatattgactgcccactcctctgtgccagggactgtgccagggctggagtaaaacagccaacaaaactacataggttctttctgtcctcaaagacaggactgtgtcatgggaaattcagatgaggtcaagtgattatacaaataaatgtaaaattgca

SEQ ID NO: 678568 - DNA, 625 bp, Homo sapiens
agacagccttgaattctaggcaaagacttcagatgttgttttctaagcactaggagcacctgtggatgtttcagaatgggagtatcatgatggatgtactattttttaaagagcaggaataagcagcaggccactgctaaggaatctgtgtcatgaggctgttagcctggggacaaggaggaccggccaaaaaaaaaaaagtcctgtatataagggggagcacccagcacacttaggttccagacctccattcctagcaactcacctgtaactcctggcaggggtctctgcctccctctactcatccaaagatcatggtgcttgttcaccagccttatgatgatccaaagaaatagtgatctttcatgtttaaataaacctacttaattacgtgcatctgtttggaaattcagacacaccacatgagaagctactgggacttttttctccttttcttggcttctcatttgttctctagctttttctttttttttcatcctggccagttattaaccttctcctccacttttgagtctcataattgtccagatctcccaggaygctgacagtgtggttttggttcacttgttccttctcctgctcaaatttcaattgattcaagggt

SEQ ID NO: 678569 - DNA, 611 bp, Homo sapiens
ttacaattttgacgtgacatatgatttgcgaaatactgggagcattagaaggctgccccatctaggctccatcatgctcagctccagacactacccccaccaaaaaaaatcacataataccmcataaaattattcacttccaacctcttccatcacttggttactccatacaacctcaatagattctccagaacctgatcaattttgagatactatttgtcaatctaaagtggtcaagaacattatggctacaatcccttgctgttcagttacttttttgtattcagacaatttttcaaaagaatgacctctcttaaaaggttatgttttataaaaagtcacttgaaagagggataaaattttctatctcaaaatgttcctctgcaattataagcagcaaaacatggagagacacaggtctttatactgactttagactcattctgtttagataactgtatcacagaagtattagatcaacaaaggttcaaatcatttcttcactaagtttcactctcccatcaaaatccaatgctcagctctcaaagtcagcaggagatttcagtgtaagcagagcaatgatttctgtgcctacaggttgtctttcctaa

SEQ ID NO: 678570 - DNA, 640 bp, Homo sapiens
cacctaagcctcttgaatcagttgggactataggcatgcagcaccacagctggctaattttttgtatttattgtaaagatgggattcaccatattgtccagactggtcttgaacacctgatctcaagtgatccacccacctgggcctcccaaagtgctgtgattatatggagcacckagctccatcctagtttctgactcaaaccaatatttgtgtatacagctcatcctcagaattgatcttccatagcctaaacagaggtatgagacacaaggaaaatagaggttacccagaagaatgtttagagcatcctgccattcatcttgagaagattcactgtctacaaccagaattgagttgactttgtcttcctcagatgtgattttgatgttcttgtgaggcgggttggagtcagaagggccatggctatttgaataagtgatggcacattcctccagtgagtcctcagggacttccttttcttcagccttctgctcctccctgatgagccaggtgggatagaaatgacagaagattaaacagagagggattggatcccagggagacctagctgattttgacaggcggcattaagagagtggtcccagaaagcaaacaggaggttccctttaagagggaa

SEQ ID NO: 678571 - DNA, 592 bp, Homo sapiens
cagtcttgctctgtcacccaggctagagtatagtggcacaatcttggctcactgcaaccactgcctcttgggttcaagtgattctcctgcctcagcctcccaagtagctgggactacaggtacacaccatcatgcccggataatttttgtatttttagtggagacagagtttcgctgtgttggccaggttggtctcgaactcctgacctcaggtgatcygtctgcctcggcctcccaaagtgctgggattccaggcgggagccattgcacctggcttattttttctttcttatctttctaagttaatatctataaagggacaacttgccacaatgagtattctgtttacaactttttcctaaaaccaagttccgtatttctcaaatatattttaccaattcttgaaactgaatagtagacaattagaaacgatggctaaactgcagcacaccttctaaaattacctccatgctactcatgccaatactggtagtatgtcatacacaatgactaaagtgtgtactcaaaaaagatactgtataattctgagaaaatatgcatatcctggaaaaggaaaccattttgaaaatat

SEQ ID NO: 678572 - DNA, 631 bp, Homo sapiens
gcgggcttacacacttcacatgtgttcacttaccttattcttacaatgactctgtgatgtcgctattattatttctattttaaaaatgagaaaactaagatccagaaaggttaggtaactggtccaaggctacctaggtggtaaattcagggccagcattcatatccaggagggctaagtaaagagattcatttttctcctyccagaaatgataatctgagtctgattttccccttgaatatttcccagtagataaaaggatcacgagaatataaaatatacttacatgattctctcaaagtggactaaaataatcactgccattaaatggagatttgttttttgaacctagttacttgtagccaaaaatagtaaatctttcattgtcacggctgtattccagagttgaattgacaagtgcaaaatatggaggctttggttttttcaacagtcagtcacagtcagcggccttattgcttctgtcctttaagagagcacaactatatgctcttaaaaagtgaattttagtgttgcgttgatgagtcacaaatgcttacacttctgagaagcagagcacagggaagaacatctttattggcaccagtaagggtggggaacagaacagccttcc

SEQ ID NO: 678573 - DNA, 615 bp, Homo sapiens
gtcattctacgaacttttctcgctaaattatattggttttacggtattaactgcattttaatattagtctgtttcattaaagataaatgctctcaaaagcttcccasgggaaaaatgccctggcccagatagcactgtgttaagcctcttaaataagccatttctataaaatcaccaattccctcattctgagcataatgatgtaggctttctgacagaaactaaaaatcaggcctgttgtcactgggtttttctaggtttcattaagaggccacccctcacatggactggtaaggggcattttccaaaactcctggttccgcggagaaggtaaagtctaacaccagtgcttagtacccaaggagcccttgccctgggccagcactgggagaagcagggcatgactgggtgaagctctggtgtgatccacgttctgttgtccaacgggtggcctcaggtggggacttcccttcctctgtaaagtgaggactatgatactacccatctcaggcagtgacaaggatcaagggtcaggatgcatgctgagtggcccatgaaaaagcctctgaaggccgggcgcggtgattcacacctgtaatcccagcactctgggag

SEQ ID NO: 678574 - DNA, 645 bp, Homo sapiens
tgggttttgtttccaatggaacttatcgcttattactgtcctaaattattttatttattaattttttagccacctttctcttatagaaataaggttcctgaggacagggagtttattctgtatactacggtatccctgacatcagggcttgtgcctgccgatagtagatgctttctaaatatgttctgaatattagatagctagttcccaaatgcactgcactgaaagtgtatgaaaattggaaattggcttctagatttttgtattatattgccaaatgatggagtgatgagattgaaatctactacttctttttgcytttttttttttggtggagtagaggagggcctgcacaaacagcagatacacacacagtaaataagatttatttcagccagcaagtatttattgacatgaaaattggggttaaatgtgactctttgtgagtgactagtttcttggagtctattaaagcatcagtttaaacatcaattctctatggtatgattaatgtttctttttttactttataagcatgaagctgccttcaattttattgttaaatttaagtgttttacattggaaaaaagtaaattgaattttgaaatgaggtctgtcccggtctcactttcatggcttcaggtt

SEQ ID NO: 678575 - DNA, 645 bp, Homo sapiens
tgggttttgtttccaatggaacttatcgcttattactgtcctaaattattttatttattaattttttagccacctttctcttatagaaataaggttcctgaggacagggagtttattctgtatactacggtatccctgacatcagggcttgtgcctgccgatagtagatgctttctaaatatgttctgaatattagatagctagttcccaaatgcactgcactgaaagtgtatgaaaattggaaattggcttctagatttttgtattatattgccaaatgatggagtgatgagattgaaatctactacttctttttgcctttttttttttggkggagtagaggagggcctgcacaaacagcagatacacacacagtaaataagatttatttcagccagcaagtatttattgacatgaaaattggggttaaatgtgactctttgtgagtgactagtttcttggagtctattaaagcatcagtttaaacatcaattctctatggtatgattaatgtttctttttttactttataagcatgaagctgccttcaattttattgttaaatttaagtgttttacattggaaaaaagtaaattgaattttgaaatgaggtctgtcccggtctcactttcatggcttcaggtt

SEQ ID NO: 678576 - DNA, 1459 bp, Homo sapiens
gttgatcaagaaaggattttttgaggtagctatatcttgcaaaagaaacagaggtgtgaactgtctgcagggctcttctcggcaatgaggtgttccttctggattcagatatagatcttaatggggtaaacattctaggtcttaccaccatctgttcttctttttctgcttagactgttagtacctgttataagaggaaaggaggcaaaagtgtgaaagaaaaatggttggatcagtggtctgagaaagaggataaagtagtcatgtgacattattcttaacagagattagaatgattaaaaacaaaaacaagttggtatccaggatattcaggtacaaccaccccttacctgctgattccaatttcacattccattccacattgatgaataataataatgatgtacttttagctttgtcagaaatcctatctgcatatttataaggtcattatgtttagttgttgctgatacctggtctgagtccagcaattaccacctctgtctctttgcacacactggtagacatacacaccactgatttgtactttcctataaaattactcttcccctttttaattagagtgttttcagaagcaaaccctatcgttaaggccatgtatgcttccattataaatacctgtttccagccattaattatctcccaatgaattacttacttagaaggagatttttaatgcatttttttttttttttttttggagacagggtctcactttgtcacccagactggagtggtggagtggtgtgatcacggcttactgcagtcttgacttctcaggcacaggtgattcttccacctcagactcctgagtggctgggaccataggcgtgcaccaccatgcccagctaatttttgtattttttgtagagttagggtttcaacatgttgcccaggctggtcttgaactcctagcctcaagtgatcctcccgtcttggcctcccaaagtgctgggattacaggtgtgagtcattgygcctggcctgtgcacactttttataatgggatttctcttccttacttttgatgtcccctctctcatacttagttaaccattttgaattccacttagtaagaaaagtttccattttctttttcttcgggggacttagatatgatctgcacctagatggtaagaagattttccatattttgaagtagaaactttctgtatgcctgaatcttgctgtcaagaatgtcttggctaattatgaaggaagaatataagaatgtgagtaaaaacaattcaacagtccctgagaacaacgtcaataaatattcaaaattgcataaccattttagtgactaaagcactgagactcatccaataatactgtggtttgataattacacagttgtgaatttatgatactgttaaattggggagacatcttggtgcatacaggtcaaccttttcatacatcattatatacaaaa

SEQ ID NO: 678577 - DNA, 1459 bp, Homo sapiens
gttgatcaagaaaggattttttgaggtagctatatcttgcaaaagaaacagaggtgtgaactgtctgcagggctcttctcggcaatgaggtgttccttctggattcagatatagatcttaatggggtaaacattctaggtcttaccaccatctgttcttctttttctgcttagactgttagtacctgttataagaggaaaggaggcaaaagtgtgaaagaaaaatggttggatcagtggtctgagaaagaggataaagtagtcatgtgacattattcttaacagagattagaatgattaaaaacaaaaacaagttggtatccaggatattcaggtacaaccaccccttacctgctgattccaatttcacattccattccacattgatgaataataataatgatgtacttttagctttgtcagaaatcctatctgcatatttataaggtcattatgtttagttgttgctgatacctggtctgagtccagcaattaccacctctgtctctttgcacacactggtagacatacacaccactgatttgtactttcctataaaattactcttcccctttttaattagagtgttttcagaagcaaaccctatcgttaaggccatgtatgcttccattataaatacctgtttccagccattaattatctcccaatgaattacttacttagaaggagatttttaatgcatttttttttttttttttttggagacagggtctcactttgtcacccagactggagtggtggagtggtgtgatcacggcttactgcagtcttgacttctcaggcacaggtgattcttccacctcagactcctgagtggctgggaccataggcgtgcaccaccatgcccagctaatttttgtattttttgtagagttagggtttcaacatgttgcccaggctggtcttgaactcctagcctcaagtgatcctcccgtcttggcctcccaaagtgctgggattacaggtgtgagtcattgtgcctggcctgtgcacactttttataatgggatttctcttccttacttttgatgtcccctctctcatacttagttaaccattttgaattccacttagtaagaaaagtttccattttctttttcttygggggacttagatatgatctgcacctagatggtaagaagattttccatattttgaagtagaaactttctgtatgcctgaatcttgctgtcaagaatgtcttggctaattatgaaggaagaatataagaatgtgagtaaaaacaattcaacagtccctgagaacaacgtcaataaatattcaaaattgcataaccattttagtgactaaagcactgagactcatccaataatactgtggtttgataattacacagttgtgaatttatgatactgttaaattggggagacatcttggtgcatacaggtcaaccttttcatacatcattatatacaaaa

SEQ ID NO: 678578 - DNA, 1299 bp, Homo sapiens
  misc_feature 1192, 1193, 1260, 1275, 1289, 1295, 1296: n = A,T,C or G
ctttcagagtacagaggaagacctaacccctacttcttcaagatgatcgcattagttatttgctaagaagcaaaagcatatacctcaaatacacttaagcactcttaactttcaatccagtcttctttccactattaggacagtactctcctcctaacccatttcatttgcagttattggcacagaactacacagcatgtgctatactcaggggaatatcctaggaacaagattggtgaatttcatttttatgttggaatatccagcagaaccttccacaagtgttacagtttttagcatttaaacaaaactaaatgtgtgtactagtgactgcaaattattatgaacactttgactgcaattacataaaaatgaccaagggtagagacaaagattagcatgtcagataccctttactgaagaaatctatttggttcccaagtttggacagcaaaagtttgaatatcgagggatatatgcagacaaaaatgaaaataatagcattcacatgttataattacaggtaatattttcctgaacaatttctaactgcttttacaattatttttgttaaaaagagggggcaaatctactggaaaaaccagcagtgtcatttcaaaagaagaaaaccatgcatctccaatctactagatccaacagggaaaggaagtgcctgaagaatgggaagcaaatagacattgtttttccatccacatgtggggtaggggagctttctgccagctacccagctatagtctgaatgtttgctggtatcccccacaaaattcatgttgaaatcctaaccccccaaagtgatggtattaagaagtgggacctttgggaggtgattaagtcatgagggtagagccctcatgaatgcgactagtacctttataaaagagaccccagagggctagcttgctccatccaccatgtgaggaaacagccagaaggtgacatctatgaaccaggaataggccctcaatagtcaccaaatctgctggtgcttgatcttcaccttgcagaactagaaaaatcaatttctgtcatttataagccacccaatttatggtattttgtatagtaacccagactaggacactgccatgtgatgcaaagaaataatcctattttggaattatttattttacatagaaagaatagcctcccttccggacaaaaaaagtgctgnnttttaaacaaaaaagtatttwtgtttgggtctcccaggatctgaggtctaactttgataaagtcccnagtggttcttcccgnttgtagatagtgcnctgctnngct

SEQ ID NO: 678579 - DNA, 680 bp, Homo sapiens
gggaggccagtgctgagcagcatccgcatgcctgcttagcagcaacactgaagcctgatgatgaatagaggtacagaggtctgtccaggtttacttctttggagctgctctccctattctaggaagacccactgacctattatttgtgtcaggcactttattcctcacaacaatgctggaagattggtataactattctcaaattacagatgaggaaactgaggtctggggatctgtctgtgtcrgagatccccaacccccggggcatggacaggtactagtccatggcctgttaagaaccaggccatataccccctgaactccacctcctggtcagatctgtggaagcattagattctcataggagcacaaaccctattgtgaagtgtgcatggaagggatctaggatgcatgctccttatgagaatctaatgcctgatgatctgcagtggaacagtttcatcctgaaaccatccccactgctgccccacctgtggaaaaaatagtcttccacaaaacaggtccctggtaccaaaaaggttggggaccgctggtctaggtaataatgcataatattgtagagaggtaagataactgagaaaatacccaaaggtgcagagaaaagtacaaagcaaaattactcagcatccattatccccaaagaagtattgataactttt

SEQ ID NO: 678580 - DNA, 680 bp, Homo sapiens
gggaggccagtgctgagcagcatccgcatgcctgcttagcagcaacactgaagcctgatgatgaatagaggtacagaggtctgtccaggtttacttctttggagctgctctccctattctaggaagacccactgacctattatttgtgtcaggcactttattcctcacaacaatgctggaagattggtataactattctcaaattacagatgaggaaactgaggtctggggatctgtctgtgtcagagatccccaacccccggggcatggacaggtactagtccatggcctgttaagaaccaggccatataccccctgaactccacctcctggtcagatctgtggaagcattagattctcataggagcacaaaccctattgtgaagtgtgcatggaagggatctaggatgcatgctccttatgagaatctaatgcctgatgatctgcagtggaacagtttcatcctgaaaccatccccactgctgccccacctgtggaaaaaatagtcttccacaaaacaggtccctggtaccaaaaaggttggggaccgctggtctakgtaataatgcataatattgtagagaggtaagataactgagaaaatacccaaaggtgcagagaaaagtacaaagcaaaattactcagcatccattatccccaaagaagtattgataactttt

SEQ ID NO: 678581 - DNA, 602 bp, Homo sapiens
  misc_feature 458: n = A,T,C or G
ttattgagtrtgtattttatgtcagacacagtgtggctaagtgctttacatacattatctcatctaatccttagaaaaaaccctggtgtattagtcttaatttaaaagatgtactttggaaaggttagtagtttacccaagattatgcagctagttaaaagtggtgctggggctgggcttggtggctcacacctgtaatcgcagtgctttgggagtctgaggcaggaggatcgcttgacaccaggagtttgagactaacctgggaaacatagggggaccccatctttacaaaaaataaaaaaattagccaggagtgggggtgcacacctgtggtcccagctacttgggaggctgaggcaggaggattgcttgagccccagaggttgaggctgccgtgagccatgattatgccactgcacatctgtctgggtgacagagcaagatcctgtctccaaaanaaaaaaaattatttttataaaaaagtggtattgggcctgtctaattgcaaagccacattctttactgcatgctttagtccattgttttttaaactgcagatcatgaccacgaatgggtcatgaaaccaatttggtaggtctcca

SEQ ID NO: 678582 - DNA, 437 bp, Homo sapiens
tctgtcttatggaaaatgggaactagctctgtcaggcttggtaatgtccaaaatctttgaatgttattcctaacataaaaagtgcctttctgagtgggaacaagctcaggcccctttccccaaagcaaaggggcctggctgactcctctgacatgtctttaaggatcagaaattcatgtccaaacctataatggctttggaaattgtgaattcatttaagtcattctgaattgtatttttgtgttttgctggtgctactacacctgatcaagcagtgcttcttttcagttgaattaaggttgcctaccaagctttaaaaagtaggccttggtggctgggcgyggtggctcacgcctgtaatcccagccctttgggaggccgaggagggcagatcacgaggtcaggagatcgagaccatcctggcaaacacagtgaaa

SEQ ID NO: 678583 - DNA, 1226 bp, Homo sapiens
tttttgttgcttttgttgttgttgctgttttttgtgagacggagtctcgctctgtcacccaggctggagtgcagtggcatgatctcagctcaccacaacctccgcctcctgggttcaaaaaattctcctgtctcagtctcctgagtagctgggattacaggtgcacgccactacgcctggctaattttcgtatttttattagagtcggagtttcatcacattgatgactatcacctcaagtaatccacccaccttgacctcccaaagtgctgggattacaggtgtgagccactgcgtccagccawtctgtttattctaaatcaaatacaaatacatgcacacacatataatcagtaaaaagttattttcattgaaaacatgtgatttacaaagggatgacttgttcagacacaaatttttgtcatcagataaagtggcaatgctaaatggatcagccagctgtaaagttcccatagttgatacattccttagaactataatattggaaaaaggcaatgaatactgtcttggcctgcctcagttctttgcctttttttcacccttttctgttccctctgctgtcttgatccatcatcttgccctttttggatcctgtccttttaggacatattacagtctggcttatcttaaaactaattgtgttatgtgggtgtggagtaggggcagggaagtagccttccctttgtgagctccatgaggttagaagctgtgtcttactcatatcttccatttccaagaccttacacggaaccaggcacagagtaagtgttcagtgaatatttattgagtaaaattatcttgggtttgtaatagtaataataagtatttagaattttaaggagagtcttcctactcctgtctctggttaggcaacagcattataggaatgtaagtatttcttaatttactaaaagtttaatattccgaaagctttatttttaattttcaaaatatttaatctagcacaaaattactaagacaacattggaagcatggtaacgccattgtggataaatgcaatgctttcaacataactttctaacttcatttgtggttaaacatgtataaggaaaagccatttgcattaaaaaaaactgtctacgtatttaaatatggcatttgtctgtgaggacacctatcattagcatggctgatatcctggtaataattctatgtacctgggccaagtctatacaattagaaaa

SEQ ID NO: 678584 - DNA, 1226 bp, Homo sapiens
tttttgttgcttttgttgttgttgctgttttttgtgagacggagtctcgctctgtcacccaggctggagtgcagtggcatgatctcagctcaccacaacctccgcctcctgggttcaaaaaattctcctgtctcagtctcctgagtagctgggattacaggtgcacgccactacgcctggctaattttcgtatttttattagagtcggagtttcatcacattgatgactatcacctcaagtaatccacccaccttgacctcccaaagtgctgggattacaggtgtgagccactgcgtccagccaatctgtttattctaaatcaaatacaaatacatgcacacacatataatcagtaaaaagttattttcattgaaaacatgtgatttacaaagggatgacttgytcagacacaaatttttgtcatcagataaagtggcaatgctaaatggatcagccagctgtaaagttcccatagttgatacattccttagaactataatattggaaaaaggcaatgaatactgtcttggcctgcctcagttctttgcctttttttcacccttttctgttccctctgctgtcttgatccatcatcttgccctttttggatcctgtccttttaggacatattacagtctggcttatcttaaaactaattgtgttatgtgggtgtggagtaggggcagggaagtagccttccctttgtgagctccatgaggttagaagctgtgtcttactcatatcttccatttccaagaccttacacggaaccaggcacagagtaagtgttcagtgaatatttattgagtaaaattatcttgggtttgtaatagtaataataagtatttagaattttaaggagagtcttcctactcctgtctctggttaggcaacagcattataggaatgtaagtatttcttaatttactaaaagtttaatattccgaaagctttatttttaattttcaaaatatttaatctagcacaaaattactaagacaacattggaagcatggtaacgccattgtggataaatgcaatgctttcaacataactttctaacttcatttgtggttaaacatgtataaggaaaagccatttgcattaaaaaaaactgtctacgtatttaaatatggcatttgtctgtgaggacacctatcattagcatggctgatatcctggtaataattctatgtacctgggccaagtctatacaattagaaaa

SEQ ID NO: 678585 - DNA, 1226 bp, Homo sapiens
tttttgttgcttttgttgttgttgctgttttttgtgagacggagtctcgctctgtcacccaggctggagtgcagtggcatgatctcagctcaccacaacctccgcctcctgggttcaaaaaattctcctgtctcagtctcctgagtagctgggattacaggtgcacgccactacgcctggctaattttcgtatttttattagagtcggagtttcatcacattgatgactatcacctcaagtaatccacccaccttgacctcccaaagtgctgggattacaggtgtgagccactgcgtccagccaatctgtttattctaaatcaaatacaaatacatgcacacacatataatcagtaaaaagttattttcattgaaaacatgtgatttacaaagggatgacttgttcagacacaaatttttgtcatcagataaagtggcaatgctaaatggatcagccagctgtaaagttcccatagttgatacattccttagaactataatattggaaaaaggcartgaatactgtcttggcctgcctcagttctttgcctttttttcacccttttctgttccctctgctgtcttgatccatcatcttgccctttttggatcctgtccttttaggacatattacagtctggcttatcttaaaactaattgtgttatgtgggtgtggagtaggggcagggaagtagccttccctttgtgagctccatgaggttagaagctgtgtcttactcatatcttccatttccaagaccttacacggaaccaggcacagagtaagtgttcagtgaatatttattgagtaaaattatcttgggtttgtaatagtaataataagtatttagaattttaaggagagtcttcctactcctgtctctggttaggcaacagcattataggaatgtaagtatttcttaatttactaaaagtttaatattccgaaagctttatttttaattttcaaaatatttaatctagcacaaaattactaagacaacattggaagcatggtaacgccattgtggataaatgcaatgctttcaacataactttctaacttcatttgtggttaaacatgtataaggaaaagccatttgcattaaaaaaaactgtctacgtatttaaatatggcatttgtctgtgaggacacctatcattagcatggctgatatcctggtaataattctatgtacctgggccaagtctatacaattagaaaa

SEQ ID NO: 678586 - DNA, 2047 bp, Homo sapiens
cacacattcccagaagccagggttctttctgcagtggcctggcccaagatcccctgcacacggcaccagcagacacaagcaaggctgctcgtggtatggtgggaaagcagaactcatttgcaagttcctgagtggggaaggatcactaatctgtgcctcattggcatgacagaatattctactctacttaacagaaacacactgaattgatatccatcaatatggataaatttcaaaaacttgatgttgagtgaaaaaaagcaagttgcaagaatctttacaccattttgccatttatgtcatctttaaggcacaaaaaatatggatgcaagcatgtgatasaaaagtacaaacttgtaggtgggaaatacagacaccagccctcctccatagcgagctgacagccggctggggagctgctggggtcctccatccatccatctgtccatgcatccacaggagccaggccatctccaaggagggaacaccggctaagggaagcaagagccagccttgaggagctggaaactggaggaagattattctaggaattcaaggacttatgacatttgaaatctattaatgtcatttgttatgattcattatacattaaaaagtcaggaaacagcagatgatggagaagatgtggagaaataggaatgcttttatattgttggtgggagtctaaactagttcaaccattatggaagatagtgtggcgattccccaaggatctagaaccagaaataccatttgacccagcactcccattactggatatcccaaggaccctaaatcattctactataaagacacatgcacacgtatgtttattgcggcactgttcacaatagcaaagccttggaaccaacccaaatgcccattaatgatagactggataaagaaaatgtggcacatacacaccaaggaatactatgcagccataaaaaaggatgagttcatgtcctttgcagggacatggatgaagctggaaaccatcattctgagcaaactaacacaagaaaagaaaaccaaacaccacatgttctctctcataagtgggagttgaacaacgagaacacatggacactgggaggggaacattacataccggggcctgttggtgggtgggggggctaggggagggatagcattaggagaaatacgtaatgtagatgacgggttgatgggtgcagcaaaccaccatggcacgtgtatacccatgtaacaaacctgtatattttgcacatgtatcccagaacttaaagtgtattccagacagtctttttttttattaaaaagaaaccacaggctcaacttaacatgcatccaagataacacttgttaaaatcctacctccatgcaggatgagaattcctccagaggtgggaacagagaaaacttcatgcttggtaaagcacctgaggcacccattacaatctgggacaagatgaggacatcaacactcatgctgtattccacatgggaggccaagtcaacgcaagatgatttttaagagatataagagccaggcgcggtagctgacacctgtaatcccagcactttgggaagctgaggtgggaggctcacttgaggccaggagatcaagaccagcctaaccaacaaagcaagaccaagaccccttctctacaaaaaaataagaaaattagcctggcgtggcggtgcacacctgtggttccagctacactagaagctgaagggggaggttcacttgagccccgagtttgaggctgcagtgagccacattagcgccaccgcactacagcctgggtgacagagcaaaagcctgtctccaaaaaaataaaataaaagctataaatactgcaaagaggcaaaaactgctgtggtttactgacaatatgatcatatctagcaaatccaagaaaaaaaaaagtaaaaattactaataaaggaattcagtaatatagtcagagatgaggccaacatataaaaatccatatctttatacacaagaaataaccatttgaaagaagctgtcccatttacaatagctagaaaaactgta

SEQ ID NO: 678587 - DNA, 597 bp, Homo sapiens
agagtcatggttagcaggcgctgggtgtaggagggaatgtggagttactgcttaatgagtacgtagtttctgtttgggctgatgaaacagtttgaagatggtgatggttgcacagcattgtgaatgtagctaataccactaaattgtacacctaaaaatggttaaaatggccaggcgcggtggctcacgcctgtaatcccagcactttgggaggccaaggtgggcagatcatgaggtcaggagatcaagaccatcctggctaacacagtgaaaccccatctctactaaaaatacaaacaattagccaggcatggtggctggtgcctgtagtmccagctagttgggaggctgaggcagaagaatggcgtgaacccgggaggcagagcttgcagtgagccgagatggcgccactgcactccagcctgggcgacagagcaagactctgtctcaaaaaaaaaaaaaaaaaaaaaattaaaatgctaaattttatcataataaggaaacaatttcagcaaaacatatttaataattcactttaaaaaaaatcagtccatgatttttaaggcagaaatcaaaccataagctgggagaatgacc

SEQ ID NO: 678588 - DNA, 597 bp, Homo sapiens
agagtcatggttagcaggcgctgggtgtaggagggaatgtggagttactgcttaatgagtacgtagtttctgtttgggctgatgaaacagtttgaagatggtgatggttgcacagcattgtgaatgtagctaataccactaaattgtacacctaaaaatggttaaaatggccaggcgcggtggctcacgcctgtaatcccagcactttgggaggccaaggtgggcagatcatgaggtcaggagatcaagaccatcctggctaacacagtgaaaccccatctctactaaaaatacaaacaattagccaggcatggtggctggtgcctgtagtaccagctagttgggaggctgaggcagaagaatggcgtgaacccgggaggcagagcttgcagtgagccgagatggcgccackgcactccagcctgggcgacagagcaagactctgtctcaaaaaaaaaaaaaaaaaaaaaattaaaatgctaaattttatcataataaggaaacaatttcagcaaaacatatttaataattcactttaaaaaaaatcagtccatgatttttaaggcagaaatcaaaccataagctgggagaatgacc

SEQ ID NO: 678589 - DNA, 611 bp, Homo sapiens
tgggaggtggaggctgcagtgagtcaagatcatatcattgtactccagcctgggtaacagagccagaccctgtctcaaaaaaaaaaaaaaaaaagtattcaatacacatttgttggatgaacaaatgaactatcaccatgaagggttaaagtccttactcatctatcataagcctcagtttcctctgcaaaaaggtaataacaagcttataagtgattttacacacacacacacagatacaaaaacacatgtaaagtacccagctggagtctgatgtgctgcaggtacaccatggctagctgtggttgttgttatgagaagactacttcctaactggtctgcatgtcatttatagcaaaattcgcattagtgaatgtgcacgtaggcctttagaagaaaggggcttgattcttcttccagggtagagattcaggcaggaaggcaataggagcccctcccctgcccaaccttcaggggtagaggcagctaaaccgytgtggaagcgcgtgttgcctttttccatcagagagatggggggaaactggggccttgtctgtacctcctaaaagagcccctctgccctgcaggtccccttcacccttggctgtctg

SEQ ID NO: 678590 - DNA, 1907 bp, Homo sapiens
  misc_feature 751, 752, 753, 754, 755, 756, 757, 758, 759, 760, 761, 762,763, 764, 765, 766, 767, 768, 769, 770, 771, 772, 773, 774,775, 776, 777, 778, 779, 780, 781, 782, 783, 784, 785, 786,787, 788, 789, 790, 791, 792, 793, 794, 795, 796, 797: n = A,T,C or G
  misc_feature 798, 799, 800, 801, 802, 803, 804, 805, 806, 807, 808, 809,810, 811, 812, 813, 814, 815, 816, 817, 818, 819, 820, 821,822, 823, 824, 825, 826, 827, 828, 829, 830, 831, 832, 833,834, 835, 836, 837, 838, 839, 840, 841, 842, 843, 844: n = A,T,C or G
  misc_feature 845, 846, 847, 848, 849, 850: n = A,T,C or G
atcatcttattgttgtgaatttagattactatataattttagcattacattcatgattcaatcaattctcaaataattttattaacaacgttaggcctctgtttcatatccgagatcatgtggagtggattgggcttctccttgtctgctgaaaatgaaaaataaatgctaataaaatctttgatgtgatagaaaatcatggaaagttctaagttttcaaatccaagtaagcaggcacaaaatacattctaggtgaaayatccagggttgacaaaatgaaagaggctatatcagctccactatgcagaacttgaggcagagttttacaaaaggggtgaccctgtcctggagtggcagctgtggagaccttgtgcaagaagagaattctctaagacactgttgtttttcacataatattatttccagtcaccattattttgaatgccatatttcatctgtttctcatcaagtccatttggctgagtgatttatactaagaaatacatggaaaataaacatttaagatgcagtttgtttataataatcaattttttttaatgtgaattgttttactaaacttagcctcccaggtctcacggtcaaaatcagttccttttgttcccattcaaactctaatagaaactctttaactatagctctgctaaaccaaatacattaattctcgtccacttctaagttttaaaaacattgggtgcggtatgtcacatagaaaaaattaaataggtttgtnnnnnnnnnnnnnnnnnnnnnnnnnnnnnnnnnnnnnnnnnnnnnnnnnnnnnnnnnnnnnnnnnnnnnnnnnnnnnnnnnnnnnnnnnnnnnnnnnnnntagtcctctcacagcattgcaaaatgaacacctgaatattgtcctatttagtttaatctgcacctttaagaagtctccacaaagccctttggagaattcttgttaataattggcacttaactccctttagctcaggaatttctaaagctttttatttatcttttaaggtcttatgacctacaccatttgaccagagcgagtgaaaccctttgcacacgtgtagctactcatgaggcctctttgttctctcatgtgactttggctttgggattaccatggtatatgattccaaaaagaaaggaaatattggttattatatcttctatggaaaggtcaaaacttactttaaccaaaaagagtacaagagcatcttcaacatcctgaggaaaaataactgtcaaccttttcctgtaccagaaaatatatatgccatttaagaaagagggcagaaaattttggttgaatgaaacctaataggtttcctagcaccagactctctctaaagaaactttcaaaagaaaaataatcccagaaaaaaaggaagtgtcaataattatctcaaacaagttaaaaaaaagaacatacagaaaaatcatttttaaaagattataaaaaactaacagcatattatttgaaaatttaaatatagtaattggaactaataacccacaaacaggagagcctaaatcagaatttagagttctttgtatattttgaattccaatcctttaccaactatatgttttgcaaacatttctctcagccttttgcttgtcttttctttcatataacagtgtctttcacgaacagaaattttgaattttaatgaagtctagctactagcaaactgggaatagaagctatcctcaacttgaaacttgatatagaaactctacaaaaacctatggctaatatactaaatgttgacaaactatatgtacttttttaaggtcaggaaaaagtaagggtggtttcactaataactcctattcagcataatgctggaagttatgtttcgtacaagaagacagtaaacaaatataaatttgtgctgatt

SEQ ID NO: 678591 - DNA, 541 bp, Homo sapiens
cagcgatagaaacctggaagattactactagaacagagcaataaaataaatatttagttgtattctctataatctttcagaagttagatacatgtcactttttgttcattattttatctaaaatgaatatgtacataagccacattaacccactagaaatttattttattgcattagatacattttatatattttaattatttatttactaaaataatctatacttttatatattggtaatcttaatagaaaaaatacacattttggcatttgtttttaatatttttactttagatttacaaaattatagcaaagataatacagagagtttctgtgtaccccacatctggttgcacttattttaacatcttacattgttatrttacactcgtcacaattaatttaaatattgataaattcctattaacaaaagaacatacattatttagaatctttatttttccctaacatctttttctgttccaatattcactgaggattccactttacatgtattattgatgttttcatagagtccttt

SEQ ID NO: 678592 - DNA, 622 bp, Homo sapiens
tttatatgaaagcatgtatttcttgctcatggacttgtgcgtcatcttgtggctttgccatgtgtttgtgggttgggtcagatctacttygagtaattctgggactgggctacctgcggggcatgctattctcatggtagactggaggaaggaagatagataggaagacaatcatacaagggcatataaagcctctgggtgggcgtggcatacgttaggaccactggtgttccattggcaaatgcaagtcacctggtcacatccagaggcatggggagatgacgcttactctgcctgtactgaagagaaaggagagaaggaggacttatgaacaatgaatacaatctaccactgatggtcattaatggcctcaaaaatatcacaaagacatgaaagccctgcagtggcttccaaggatcttcttattagaaatgatatgagggatagagcagtttaccacataccacaaacgtgtataccagcatgtgtatactagtttgggaattcgtagttttgagtatggaagtatgggaagtgaaaagaagggagaagtagaagtgttgggtgtggtattgcatacactggctggagacaggaaggaacaacgatcttctaatataaa

SEQ ID NO: 678593 - DNA, 635 bp, Homo sapiens
tgggagcctctggaacctcctctaaaggggcgtgaagcagggttggaccactgcactcccagtggaccacagaagaaggaaagaaggctgaagccatctgggaagatattaagcctacagccctcatatttgatcatgccgtcttggagctactctacaccctcccacaaagcctaccttattgtcaggaaccacacccctggccctgtcagatcactggattaccccatgtatcatttttctttgttagctgaggttgctgttaattgttttttaatgtgaaagagggtgtgcagctatgttctatatgtattttggatttttgttgctcacrtatttatttagatattgcactttttctttgtctgtgatgacacatgatatttgatttttttcatgaaggggggaagtgaagaaaatgagaatatgggcttctgagctaggtgagacttccttatatttccataagcaaagcatatcaaattttccatgggagaacctcttgggattctgggggtgtggcctattgcagcgccctaaaaggatacatttctttgcagttttgtgttttatttttaaatgtcatgtaaatcctctaatcccataatatatccaacccttcctgttatgctgta

SEQ ID NO: 678594 - DNA, 635 bp, Homo sapiens
tgggagcctctggaacctcctctaaaggggcgtgaagcagggttggaccactgcactcccagtggaccacagaagaaggaaagaaggctgaagccatctgggaagatattaagcctacagccctcatatttgatcatgccgtcttggagctactctacaccctcccacaaagcctaccttattgtcaggaaccacacccctggccctgtcagatcactggattaccccatgtatcatttttctttgttagctgaggttgctgttaattgttttttaatgtgaaagagggtgtgcagctatgttctatatgtattttggatttttgttgctcacatatttatttagatattgcactttttctttgtctgtgatgacacatgatatttgatttttttcatgaaggggggaagtgaagaaaatgagaatatgggcttctgagctaggtgagacttccttatatttccataagcaaagcatatcaaattttccwtgggagaacctcttgggattctgggggtgtggcctattgcagcgccctaaaaggatacatttctttgcagttttgtgttttatttttaaatgtcatgtaaatcctctaatcccataatatatccaacccttcctgttatgctgta

SEQ ID NO: 678595 - DNA, 635 bp, Homo sapiens
tgggagcctctggaacctcctctaaaggggcgtgaagcagggttggaccactgcactcccagtggaccacagaagaaggaaagaaggctgaagccatctgggaagatattaagcctacagccctcatatttgatcatgccgtcttggagctactctacaccctcccacaaagcctaccttattgtcaggaaccacacccctggccctgtcagatcactggattaccccatgtatcatttttctttgttagctgaggttgctgttaattgttttttaatgtgaaagagggtgtgcagctatgttctatatgtattttggatttttgttgctcacatatttatttagatattgcactttttctttgtctgtgatgacacatgatatttgatttttttcatgaaggggggaagtgaagaaaatgagaatatgggcttctgagctaggtgagacttccttatatttccataagcaaagcatatcaaattttccatgggakaacctcttgggattctgggggtgtggcctattgcagcgccctaaaaggatacatttctttgcagttttgtgttttatttttaaatgtcatgtaaatcctctaatcccataatatatccaacccttcctgttatgctgta

SEQ ID NO: 678596 - DNA, 635 bp, Homo sapiens
tgggagcctctggaacctcctctaaaggggcgtgaagcagggttggaccactgcactcccagtggaccacagaagaaggaaagaaggctgaagccatctgggaagatattaagcctacagccctcatatttgatcatgccgtcttggagctactctacaccctcccacaaagcctaccttattgtcaggaaccacacccctggccctgtcagatcactggattaccccatgtatcatttttctttgttagctgaggttgctgttaattgttttttaatgtgaaagagggtgtgcagctatgttctatatgtattttggatttttgttgctcacatatttatttagatattgcactttttctttgtctgtgatgacacatgatatttgatttttttcatgaaggggggaagtgaagaaaatgagaatatgggcttctgagctaggtgagacttccttatatttccataagcaaagcatatcaaattttccatgggagaacctcttgggattctgggggtgtggcctattgcagcsccctaaaaggatacatttctttgcagttttgtgttttatttttaaatgtcatgtaaatcctctaatcccataatatatccaacccttcctgttatgctgta

SEQ ID NO: 678597 - DNA, 1007 bp, Homo sapiens
cccttgattttagctctcccagtcagaatggggtgctaagtatgacagcttttgcagaggcagcataatttttttgtcctggtaactttctcagtttgcaatgaaatattggagacttgtgagtatatggtgaattaataggactttagagcaaacacaacaatatttgaaaataatagtgattaatagcctcttctaaaggaaatttgctttcagatttaagctggaaaggcactgggataactggaaaaggattacaatcatgtggctttttggattttagtacttgcattatgaattacatgtatcttgttcatgatatctttttactaaaaaaaaagttttaaaaccagagaaatctcaatgatgaagaaagcatccagaaaaaaataattaaaaaaaagaataagttagtaatttcattagggaaagtaagaccattcttttaaaacagagaattcaagaaaataagtgactatgtgcaaaacatgtgctatgaaagtgagggaggatacaggatgctgtgaaagtgaagaagtcctgtggcctttggggagggagagacacactgtgggtagaggtcctgctcagggactcagagaggaggtagaacttgagtgagaaattgagaaaagsctttgagtgagcagaaatggaaagaaggcctcccaggaaggggtcacagcataggcaaaggtatggttagaaaagctacgttggccgggtaagtaaggagcttggggcagcaggtgcttgtggagcaatagaggcccaggccatggggccacccccaagggaaggaagactgccctgtgctctgaggtgggctccactctcatccaaatcagttcctccacccgtgtctcaccaggcctcaatgggcctctgtatcatcaacagcaatgcattactaacggcagaagatgttctattcttcccaggatcatcaataaaactgcaaacagtccttggaagaggagtcatgcaataatgcctcaccagggtta

SEQ ID NO: 678598 - DNA, 1007 bp, Homo sapiens
cccttgattttagctctcccagtcagaatggggtgctaagtatgacagcttttgcagaggcagcataatttttttgtcctggtaactttctcagtttgcaatgaaatattggagacttgtgagtatatggtgaattaataggactttagagcaaacacaacaatatttgaaaataatagtgattaatagcctcttctaaaggaaatttgctttcagatttaagctggaaaggcactgggataactggaaaaggattacaatcatgtggctttttggattttagtacttgcattatgaattacatgtatcttgttcatgatatctttttactaaaaaaaaagttttaaaaccagagaaatctcaatgatgaagaaagcatccagaaaaaaataattaaaaaaaagaataagttagtaatttcattagggaaagtaagaccattcttttaaaacagagaattcaagaaaataagtgactatgtgcaaaacatgtgctatgaaagtgagggaggatacaggatgctgtgaaagtgaagaagtcctgtggcctttggggagggagagacacactgtgggtagaggtcctgctcagggactcagagaggaggtagaacttgagtgagaaattgagaaaagcctttgagtgagcagaaatggaaagaaggcctcccaggaaggggtcacagcayaggcaaaggtatggttagaaaagctacgttggccgggtaagtaaggagcttggggcagcaggtgcttgtggagcaatagaggcccaggccatggggccacccccaagggaaggaagactgccctgtgctctgaggtgggctccactctcatccaaatcagttcctccacccgtgtctcaccaggcctcaatgggcctctgtatcatcaacagcaatgcattactaacggcagaagatgttctattcttcccaggatcatcaataaaactgcaaacagtccttggaagaggagtcatgcaataatgcctcaccagggtta

SEQ ID NO: 678599 - DNA, 1007 bp, Homo sapiens
cccttgattttagctctcccagtcagaatggggtgctaagtatgacagcttttgcagaggcagcataatttttttgtcctggtaactttctcagtttgcaatgaaatattggagacttgtgagtatatggtgaattaataggactttagagcaaacacaacaatatttgaaaataatagtgattaatagcctcttctaaaggaaatttgctttcagatttaagctggaaaggcactgggataactggaaaaggattacaatcatgtggctttttggattttagtacttgcattatgaattacatgtatcttgttcatgatatctttttactaaaaaaaaagttttaaaaccagagaaatctcaatgatgaagaaagcatccagaaaaaaataattaaaaaaaagaataagttagtaatttcattagggaaagtaagaccattcttttaaaacagagaattcaagaaaataagtgactatgtgcaaaacatgtgctatgaaagtgagggaggatacaggatgctgtgaaagtgaagaagtcctgtggcctttggggagggagagacacactgtgggtagaggtcctgctcagggactcagagaggaggtagaacttgagtgagaaattgagaaaagcctttgagtgagcagaaatggaaagaaggcctcccaggaaggggtcacagcataggcaaaggtatggttagaaaagctacgttggccgggtaagtaaggagcttggggcagcaggtgcttgtggagcaatagaggcccaggccatggggccacccccaagggaaggaagactgccctgtgctctgaggtgggctccactctcatccaaatcagttcctccacccgtgtctcaccaggcctcaatgggcctctgtatcatcaacagcaatgcattactaacggcagaagatgttctattcttcccaggatcatcaataaaactgcaaacagtccttggaagaggagtcatgcamtaatgcctcaccagggtta

SEQ ID NO: 678600 - DNA, 1031 bp, Homo sapiens
aatctgtatgaaatatctctatgtctatgtctatacctgcctatgtgttatatgtattatatatyagagtgctcggacggattctagtgttttcctaagatgtttgttaatggcatggtaatttgatttaaagtgcaacagtgacagttttgttttatgtcgagtgtgtataaattgccttataaaatatgtattatgaaacactggaaagcttgcagaatcctgtgactaatttaggttattgcagatgtcctcagttgatcaaaaaattgctagtatgacatctgggtgcagtggctcatgcctgtaatcgcggcaatttggttagctgaggtgggtggatcacctgaggtcaggagttcaagactaccctggccaacatggtgaaaccccctccgtctctatgaaaaatacaaaaagtagccgggcatggtggcaggtgcctgtaatcccagctactcgggaggctgaggcgggagaatcacttgaacctgggaggtggaggttgcagtgacccgagatcacaccattgcactccagcctgggtgacaagagcgaaactctgtctcaaaaaaaaaaaaaaagaaagaaggctgggcatggtggctcacgcctgtaatcctagcactttgggaggctgaagtggacgggttgcctgagatctggagtttgagaccagactgggcaacatgatgaaaccttgtctctactaaaatacaaaaaaaaaaaaattagctgggcatgggggcgggtgcctgtaatcccagctacttgggaggctgaggcgggggaatctcttgaacccgggagctggaagttgcagtgagccgaaattgtgccattgcactccagcctgggcaacagaatgagactctgtctcaaaaaaaaaagagaaaaaaagaaagaaaagtgctagtatgaggtggtcatcatgagagtccagtatatgttattgattatttggtttgatggggtgagaatagactgtggatccttatcacttttaccttcaacctctctggggttgggtg

SEQ ID NO: 678601 - DNA, 619 bp, Homo sapiens
tgttggcacacgggcttctacctgcagccacgggcccgaggagggggttggggagaggggaccccagtggctgcagggcgcctgcccccaggcttcttgtgagacccctcacccagtgctctccccactctgtgctccaggctgatgggctgggcagcgggtctccctcctcccaggtgcgggaagcccccaagacgccgagaagactctgcagtctcaggacgcrgccagccagcccaggtcaggcagcggcccaggccagctcctcccaccacccttcttagcccaggtgctggcgctgacaccaaggcggtggccccccagctctgtgactccagctccttcatgcccacactggggaggacccagaggcccaggtgggggcattctctcagcacctgccccacccacagcccccatttccatattctggaggaccactgagtctgccgcaccgtcaccatcagcaaagccccccctttccacgcaagcagccctgaggactcagagcaaagtgccaaaccggactggcctgcctcctcctcccaagggcagcaagcctcaggtgggcacctatggaagtgaggtggcccccatcctgagcttcctggccccaaat

SEQ ID NO: 678602 - DNA, 619 bp, Homo sapiens
tgttggcacacgggcttctacctgcagccacgggcccgaggagggggttggggagaggggaccccagtggctgcagggcgcctgcccccaggcttcttgtgagacccctcacccagtgctctccccactctgtgctccaggctgatgggctgggcagcgggtctccctcctcccaggtgcgggaagcccccaagacgccgagaagactctgcagtctcaggacgcagccagccagcccaggtcaggcagcggcccaggccagctcctcccaccacccttcttagcccaggtgctggcgctgacaccaaggcggyggccccccagctctgtgactccagctccttcatgcccacactggggaggacccagaggcccaggtgggggcattctctcagcacctgccccacccacagcccccatttccatattctggaggaccactgagtctgccgcaccgtcaccatcagcaaagccccccctttccacgcaagcagccctgaggactcagagcaaagtgccaaaccggactggcctgcctcctcctcccaagggcagcaagcctcaggtgggcacctatggaagtgaggtggcccccatcctgagcttcctggccccaaat

SEQ ID NO: 678603 - DNA, 619 bp, Homo sapiens
tgttggcacacgggcttctacctgcagccacgggcccgaggagggggttggggagaggggaccccagtggctgcagggcgcctgcccccaggcttcttgtgagacccctcacccagtgctctccccactctgtgctccaggctgatgggctgggcagcgggtctccctcctcccaggtgcgggaagcccccaagacgccgagaagactctgcagtctcaggacgcagccagccagcccaggtcaggcagcggcccaggccagctcctcccaccacccttcttagcccaggtgctggcgctgacaccaaggcggtggccccccagctctgtgactccagcyccttcatgcccacactggggaggacccagaggcccaggtgggggcattctctcagcacctgccccacccacagcccccatttccatattctggaggaccactgagtctgccgcaccgtcaccatcagcaaagccccccctttccacgcaagcagccctgaggactcagagcaaagtgccaaaccggactggcctgcctcctcctcccaagggcagcaagcctcaggtgggcacctatggaagtgaggtggcccccatcctgagcttcctggccccaaat

SEQ ID NO: 678604 - DNA, 527 bp, Homo sapiens
  misc_feature 2, 3, 4, 5, 6, 7, 8, 9, 10, 11, 12, 13, 14, 15, 16, 17, 18,19, 20, 21, 22, 23, 24, 25, 26, 27, 28, 29, 30, 31, 32,33, 34, 35, 36, 37, 38, 39, 40, 41, 42, 43, 44, 45, 46,47, 48, 49, 50, 51, 52, 53, 54, 55, 56, 57, 58, 59, 60,61: n = A,T,C or G
  misc_feature 62, 63, 64, 65, 66, 67, 68, 69, 70, 71, 72, 73, 74, 75, 76,77, 78, 79, 80, 81, 82, 83, 84, 85, 86, 87, 88, 89, 90,91, 92, 93, 94, 95, 96, 97, 98, 99, 100, 101: n = A,T,C or G
annnnnnnnnnnnnnnnnnnnnnnnnnnnnnnnnnnnnnnnnnnnnnnnnnnnnnnnnnnnnnnnnnnnnnnnnnnnnnnnnnnnnnnnnnnnnnnnnnnncaggcacagcacctggaccctcttgctggacccccagccaggcccacacgcaccccctagrcccccatgttaggtggtgcacagactgttcccctcaaggacacagagaagattcaggccttgattcaggtcagaagcagaggtcaccaagacctgccatcgctgccactccctcagtccccccacctgctcaaatctcaaaagggatactgttcccatttcacagacgcagaaagaggctgagcggccaagacaagcggccacggctccctggtaggtgggacgcacccctccccctccccatctcccttctcaggggagacaaagcaggtccctccctgccaccgcccaccaaggtcaagggtgggggaggggcgtatggtttgggtttgtcttgggtgtggggttcttccttctcggggcttt

SEQ ID NO: 678605 - DNA, 645 bp, Homo sapiens
tactacctcaatcactgccttgttccttgtttaaaggcatgggctatttcttgcatctcatcagaagcttgtatgagcaaggtttgtatgtgttaacacaagtctttagtccagagtcacatctgcatataatttttttttgtttttcaaagtatccttgagctaatatttacaatgaagaaaactgggagtcagtacacatgttaatttgtagcctttagtatgaacttataacaataatgcacccatgaatccatgggtgtatctaatgtcattacaacaaaatcatatccttaaacttttctatgtgagcaaacaatttttcaatgcaatatgtcttctgtgcttgtttattatgtgaaagggagagcgtaggtcctggttccgagggttaattgttgccttcattgagcacacaccctcttttttgcacctccgtaggaggatggcctccgacccatgacgtgcttaggaaagttgatattcatggtttgggggccataagcgatcatttaagtggtgacaaatccatggaggtatttagcatgcrtgtttaataaaggataaaaattttaaaatgacagtcgtaacaatacgaaagctgtgtcagtcctacccagactaatgtttattttatgttaaaat

SEQ ID NO: 678606 - DNA, 636 bp, Homo sapiens
gataaatgttgacaaattggatgttatttgatgtgaacaaaaactattgtgaatttattaccgggctcaagaagttagaagacccaaactacataaaacacatgaaatgaaatcctataattatggctttaaatttgaagagggaaatatatttaagggggattattaatctatacatcaccacacacaaagattaccttatattagcattaaacctgttggattgttaaaaaatgccttaaccatcaatatttgatttctttaaaaaatcgtggcttaggactacaataagacactcaccaatatcaacactgagatcccttaagcctagtagtattcaatctgctgtgataggtgatttttctccatattcaaacagagaataagaaaataaagaaaaaatgtatgtttaacaaggcaagagaatggtgtttggggattattcctcactgctattggcataacacaatgctactgagatgaaactagagaagaataatttcttttatgttcaagggacagtatagttagtgaaataatggaaacgtrtgttaaacttccattcatagctaacttgtgataactttgcttgcaaattgtaaaattcaaatgctatataaactatagtattattaa

SEQ ID NO: 678607 - DNA, 510 bp, Homo sapiens
aaagtgtagcttttaggttcaaaaagctaatggtacaaataaatctgtgatgcagcaggactgggagtttccatttggttgcagatgagaaaagagtgataacatggacaaacggcagagactgcactggagggtgctgtgctcaattcccatccacgtgctaaaaagaggtactgacaaaacagaggtcacatagaagaatgcttccaaatgttgggcagctgaaaataaagagattttctctaatccatggggaataaaagagaaaaacaaggactatattctgcttaggtttgctaggtgtgaacaaataagtcgtcagataggaactctttcttctgatatgactttcttcctacttttaagtaaartttatttttgtacttattcagtaaaggtgagattagttagatggtagtgatgtctttaatgcaaatccacaaacctttcatttgatttgatttagtggtccattaaattcaaaagccaaaaagggaataccaggttacc

SEQ ID NO: 678608 - DNA, 510 bp, Homo sapiens
aaagtgtagcttttaggttcaaaaagctaatggtacaaataaatctgtgatgcagcaggactgggagtttccatttggttgcagatgagaaaagagtgataacatggacaaacggcagagactgcactggagggtgctgtgctcaattcccatccacgtgctaaaaagaggtactgacaaaacagaggtcacatagaagaatgcttccaaatgttgggcagctgaaaataaagagattttctctaatccatggggaataaaagagaaaaacaaggactatattctgcttaggtttgctaggtgtgaacaaataagtcgtcagataggaactctttcttctgatatgactttcttcctacttttaagtaaagtttatttttgtacttattcagtaaaggtgagattagttagatggtagtgatgtctttaatgcaaatccacaaacctttyatttgatttgatttagtggtccattaaattcaaaagccaaaaagggaataccaggttacc

SEQ ID NO: 678609 - DNA, 1441 bp, Homo sapiens
tttttttttgtatttttagtggagacagggtttcaccgtgttagccaggatggtctggatctcctgacctggtgatccacccgtcttggcctcccaaagtgctggtattacaggcgtgtgccaccacacctggcctagatatacaaattcttaccattgggttaccgtggcttgcagtattccatacagtgacttgtagtacaggtttgtagcctgggagcaatatagtatagcctaggtgtgtaggagggtgtgccatgtaggtttgtgcaagtccactctgtgatgttcatacaatgacaaaatcacctaatgatgcatttcttataatgtatttccatcattaagtgacatttgactgacattacacaatcactgtgctgtggattcatcacacctgatgacctttttaggggaaagaatggctaaggttccagaatggtccctctgtttgtcaaggcttggattctaggcctggttaaacctcccttttgctgtgtaacctcaggcaagttgcccagcccaccttctcctatctaggctttggtcatcccatctgtaacaacagtagattggccaaggtcagacagggacactgcccctccctgtccctgccacatgggtgggagttgcctctcctgaaggccatccctgcccctcaacatggctgactcagcctttgcccagtggtaggggacaggctgcctgccggagggtgctaagaagttaattaaaccctccagaagccatttgttaacaggggagcgatggtatattcaataccagccaaaggttggtggaaagtaatgagtctttctttagctgtgaataatgtgttccctcccctyggcaaccccccagctctgaaggatggtcctggggaagccatggctcatcttaatggcctgggcactgtggggcctagcaagccagtcttaccagcaatcatcacttcccatcagagaaacttggcttctctctgtttctgtcttactcatggtctctaactattctccagatgatctctctctccctccctctacatgcatttgtttctttctctctcccccagcctgcaaggaaaagttgcagtccactgtgtcacatgcctgcactgctcatattgtatgtgggaatcaacagccctgctgggcagcaggcttagacacagtttggaaattgtggggaggaaggggaggcaagggcctggatatcactggccccaggggaaggcaactgaccaggagactgctcatggacagcttgggccagtctgtgatgccagctccctctatgtgcccaccctgcagagggcaacttacctcaggcactaagacaggtgtctgaaggaggtgtcccagccaggcacccaggcactcagcacctagtttggggcccagcgtggagtgactatggctgttccatctgtttttctgagctt

SEQ ID NO: 678610 - DNA, 1441 bp, Homo sapiens
tttttttttgtatttttagtggagacagggtttcaccgtgttagccaggatggtctggatctcctgacctggtgatccacccgtcttggcctcccaaagtgctggtattacaggcgtgtgccaccacacctggcctagatatacaaattcttaccattgggttaccgtggcttgcagtattccatacagtgacttgtagtacaggtttgtagcctgggagcaatatagtatagcctaggtgtgtaggagggtgtgccatgtaggtttgtgcaagtccactctgtgatgttcatacaatgacaaaatcacctaatgatgcatttcttataatgtatttccatcattaagtgacatttgactgacattacacaatcactgtgctgtggattcatcacacctgatgacctttttaggggaaagaatggctaaggttccagaatggtccctctgtttgtcaaggcttggattctaggcctggttaaacctcccttttgctgtgtaacctcaggcaagttgcccagcccaccttctcctatctaggctttggtcatcccatctgtaacaacagtagattggccaaggtcagacagggacactgcccctccctgtccctgccacatgggtgggagttgcctctcctgaaggccatccctgcccctcaacatggctgactcagcctttgcccagtggtaggggacaggctgcctgccggagggtgctaagaagttaattaaaccctccagaagccatttgttaacaggggagcgatggtatattcaataccagccaaaggttggtggaaagtaatgagtctttctttagctgtgaataatgtgttccctcccctcggcaaccccccagctctgaaggatggtcctggggaagccatggctcatcttaatggcctgggcactgtggggcctagcaagccagtcttaccagcaatcatcacttcccatcagagaaacttggcttctctctgtttctgtcttactcatggtctctaactattctccagatgatctctctctccctccctctacatgcatttgtttctttctctctcccccagcctgcaaggaaaagttgcagtccactgtgtcacatgcctgcactgctcatattgtatgtgggaatcaacagccctgctgggcagcaggcttagacacagtttggaaattgtggggaggaaggggaggcaagggcctggatatcactggccccargggaaggcaactgaccaggagactgctcatggacagcttgggccagtctgtgatgccagctccctctatgtgcccaccctgcagagggcaacttacctcaggcactaagacaggtgtctgaaggaggtgtcccagccaggcacccaggcactcagcacctagtttggggcccagcgtggagtgactatggctgttccatctgtttttctgagctt

SEQ ID NO: 678611 - DNA, 1122 bp, Homo sapiens
ttagttcatttttaaagaaaccatccaactgcatagatttttctttgtaaggaaaattatagtgtctgtcatttcaatgcattaccagccaacccaatcaaagtggaccatgtggttatataaaaaaaatgtaactgaagataaatctgggaaaagccttgaggagaaaagttactcagaaacaggccattttgcaaactatccacattgtgccttcaaaaatatctcttattggaaaatgatatggagggtatctgtcaatagacctgaatattgcatcatggaagacacagtgtgtaaaatgtagcaaatgcaagaacttttttggaatttattttttgggttttcccaatccacttatccataaatcatttgtaattagtatagtcaagggaataggtacactactmatgtgaacttacgtgcagtacaccaaaaagctatttgataagattaataatatagcaggagacatgcagtttagattcatttaagtagtaatgaatcccatgtaacttcaaaattgaaaatgcccttttagaaactttctggtgattgtggtctaggatattcagatctactttcttgttaaaagcaataaaaattgctggttaaaaatttcatttaaaaattaactttgaattgctgaaagaatgatgaggaaattccaggtcaatttatgggtgaaagtctgtatccagacaggtagctagaatattggcatatacaggcttcttatgcccttatgctatttgtccatgcaacacatttagatttgggttagtggctcagtggagtaagagggacaaaagtcaagacccaagtcatgttgaagttggagagctttatgggatattctccctaattaagttggcactcaaagagctacagacttagggctgaacgaggactaaactcactcttttccccttaattttaaggtgtgtagaagaaagtttatccatgctgagcacagcagtagaagagaaggatgtgagggaaaaatttaaaacagaaatccctatctctgagatagctacagactggtacagatttgtagcctggacatatataatctgggtgagcgtagatctcaagccttggtttgagatagtgcatgca

SEQ ID NO: 678612 - DNA, 1654 bp, Homo sapiens
  misc_feature 1250, 1251, 1252, 1253, 1254, 1255, 1256, 1257, 1258, 1259,1260, 1261, 1262, 1263, 1264, 1265, 1266, 1267, 1268, 1269,1270, 1271, 1272, 1273, 1274, 1275, 1276, 1277, 1278, 1279,1280, 1281, 1282, 1283, 1284, 1285, 1286, 1287, 1288: n = A,T,C or G
  misc_feature 1289, 1290, 1291, 1292, 1293, 1294, 1295, 1296, 1297, 1298,1299, 1300, 1301, 1302, 1303, 1304, 1305, 1306, 1307, 1308,1309, 1310, 1311, 1312, 1313, 1314, 1315, 1316, 1317, 1318,1319, 1320, 1321, 1322, 1323, 1324, 1325, 1326, 1327: n = A,T,C or G
  misc_feature 1328, 1329, 1330, 1331, 1332, 1333, 1334, 1335, 1336, 1337,1338, 1339, 1340, 1341, 1342, 1343, 1344, 1345, 1346, 1347,1348, 1349: n = A,T,C or G
tgctgaatgaaggcaaaaatcctgttctcaagaagcttccagcccatagggaaaatgcatataaatacagataattacaaaacattgtggaagttccacartgagaaatgcacaagttattccagctggacctacctccaggaagattaatggagtggatggtgctggtcaaagatgtacacgatgagtacaggttaatcagaaagaacaggcaacagcaaacagccctgttctactggaatgtaaagtagacacagatgggagctgaggcaggctgcacttgcccagatcctaaggcagccatctagaggctgcaggagtcaaatcttgttcatccctcctgctctgaaagagaatatactttccaagtcagtggtcctcaaattggtcaaggtgaagtttcctcacaaatgtgccttggaaatgaaaggaaacaattacattaagttttacatacacaataaatatatacagtttttatttgtcaattaagataaataaaaataaagataatcctacacatatatttactccttcgtattgccttagatccttcctatgaacaaagctaggcacattagtccccaaacaaatcaccaacatggccaatacaaggccacattaagaatacaaagatgaactgctaaaagagtggatcctcctaacccccatacaggaggatttttgccttgactctttactctccttcctttgttttcatgagcactcaatggaaagcaatacttaacatgttctattgcagatagatatatcctgcaacatttcatttcatgaaatttggagccataaagaaaacctgtctccttcgttcattttctcccagaagtttggagtcttggactcctgagggggaaaatgttacagtgggtacctagtcaggcatgagcagggcaggggagggcttccctaccacacacaccagagcattgggcccagttacattaatttttaagtagtgaaaaaatgaatgggcttgctaagcccattcctaaatatttccttatgctacctgtgttagtcagggctgccataacagaatgtcacaggctgggtggcttaaacaacagagttttatttcttacagttctggaggccggaagtccaagatcaaggcaccaacagagttggattctggtgaggactctctttctgtcctgcagacagctgccttctctctgtcctcacatgggctttcctccatgcatgtatgggggtggggggtggggggnnnnnnnnnnnnnnnnnnnnnnnnnnnnnnnnnnnnnnnnnnnnnnnnnnnnnnnnnnnnnnnnnnnnnnnnnnnnnnnnnnnnnnnnnnnnnnnnnnnnttaaattgtagaattatttttaaaaaataagattggactggactgcaattttataactgaacacattttaattctatcttgcatggggtcactgcacacatgatttgagttctccttagagctttcccatctcttcctaggaggctgaagaatttatggagacaaaataggcaaggacatttcttagagaatatgcaatgcagttcatccagaatgacatcttagaggttattttgtcctccctggtctcatataagtcatactgatgcagtaaaatatttgtaaaatgcataaccaaagtgttg

SEQ ID NO: 678613 - DNA, 1184 bp, Homo sapiens
ttgatcagaatccagtctctatacctggacacaatagtagagttaggctgagaataaggtaaggcttttatatggggcaactatgccaagccaaactttctcccatgctttagggaggagggtttggaatgcatcctgctgcagtctgcccttcgggtgtctacataatggcctgcaggtgctaatcaacacacctgcaaagtcctgtcaacacacaccctgacaacttttaataatctccagctgaaaccatcctaggtcctgggagaatgctgccctcttaacatctgggaggaatctcaactttaatgccagrtccaaaagactcaccctcaggaaactcccaggtactaaaggtccattcttgggaggctctggtctttgccacagtttaaggctgatgcctcaaaccttggcgctcccaattcaggcttaattatttgattcagtctctgtgggttacccagccatggcttatggtcatcttgtgaaactcggtgaagaaaaccaaaggacttacgtaaggctatcagctagaaaaggaaaggaattgctcctaagatcagatgggaggaaaaaggagagaaataggaagagaagaagagaggtgaagggatgggggagacagagagagagtaagggagagagagaatgagaaagagaaatgaaccatgcacttcaggattagtgggcaagtgtagctggaaaaatttcagatcctttattgggctcaagcaaaaactcctttaaatattctgtttcatcttgtgtttgcctgagattcgtggctacagaaaagcaagtcaatatcagtatggatgtgtgtatttcctggggaaaggtcagatttgttcatctattattgttacctgtgttagtttgctagaatttccattaaaaagtactacagagtgggttgcttcaacaacaaacatttatttctcatggttctgaaggccagaagtgtgagatcaaggtgttgatgggcttgtgtcttctgagggctgggagacagaatctgtttcatgcctctcttttaacttctggtagtttgctagcatattttggcattcttggcttgtggacacgcaaccccaatctcatactcacatgccattcatgttcacgtgtccttccccctatatgcatatctgtttctgtgtccaaattttccccttttgtaa

SEQ ID NO: 678614 - DNA, 669 bp, Homo sapiens
cctgaacacctgcagtgggctgggccctgtggggcacagagatgctctccaggtgttgaccacctggcccatccgtcaagtgccagaaatgtgctgctccctagaggacttggcgtaggcaamctgattaggggatgagaaatacagagcagcattttctaagctgtacgccttggagtgacgcttttaataggtattttgtgaaaaagctagatttggatcaaggttagacaggtttttttcccctgcaggacttggaaacatcaaaagctcacatcatacacatctttaatcacagacattttttgctgttcctgttctcagaatgtctgttggcatctctcaatacactccatgttcccaagaccacaggtctcagatagaaaatgctatctcagactataagtttctcaagggcagagaccaggattgatttacctacttcctggcacaatgctggccatttagtaggtgatgggcaaatattcattggatagagaattgatgctgagcttcccctgttacctgccctccgccctgcctgatgggcaacactagggtgagtggatgcttatgagactggggcaggtgggccagcttgggggctggcctgcctagaggccaaagagtgagtgaagtgatcttgaaaaggactctgctttttttttt

SEQ ID NO: 678615 - DNA, 604 bp, Homo sapiens
gaaacccacagaatggcagtcataagaagtgcaaatgtctggggtaatgaaaacaaactccactaggttaggagttacgaggtcagagatctagtccgctgtaccagtaaccagctgtgtggccttcaaggagtaatttctcttctctgggcctgcgtttcctcaactgtaaaatgcaaacagtgttgggctctaatattctacaggtttggtgctgagaaccagaagagcatagctgagtatgcagctgagaaaccaggcagcgaggctaaaacctgccccatcttttgctccatctcaccagctgcttcctctccctgaggtctgtggggctctgaggttccaacattgtcctccagcagatccttctgcytgaaggaggaggaggctggggtggccagcagagagcagaacatggactgggccaatgactttctttggagcagtcttttattttccttaagcccctagatgctttttgtgtgtcacactatctttgttttaagttttattttattataagaaagtctctctacattcaatttgtgatgtgaataatcatagattataaatagtatgatgattgttttttaattacaaggct

SEQ ID NO: 678616 - DNA, 613 bp, Homo sapiens
cgaccttgatgccctagtcctcacccaggtcctctgacctcctctcctcttccctcccagtggtcacagcaggcccagctgtgcccaccctccctccaaacggctcagcccaggaaaataaggagccggcccatcctgcaggcaggtgccctctggatctcctgawgcgaagaagaaagaaacccatatggtgagggtccaggaggttcgctgtcattctgttgagtgacttagcttggagccaggaggtggaatgccctcctcccttgtttttcttccccaaggacttcacgtcctcctggccaaaacctcgccaggcatcttctcactcccattttcctggggctctgggcacagcctccatccttgggattggcttcccgggccagtgcaggtgtcggaagtgaagcttcaagggtccaggaccatcccagggtgaggtgaggctaggtgctgggttctgcaagacacaggatattccagttggttcagaggggcagccaccccaccctgcatctgttcagtggtgaagaaaactcagaatggggcttagactacaggctctgccatcagggggtgtgggttcaaatctggagccaccacgtgctctcta

SEQ ID NO: 678617 - DNA, 1227 bp, Homo sapiens
  misc_feature 434, 435, 436, 437, 438, 439, 440, 441, 442, 443, 444, 445,446, 447, 448, 449, 450, 451, 452, 453, 454, 455, 456, 457,458, 459, 460, 461, 462, 463, 464, 465, 466, 467, 468, 469,470, 471, 472, 473, 474, 475, 476, 477, 478, 479, 480: n = A,T,C or G
  misc_feature 481, 482, 483, 484, 485, 486, 487, 488, 489, 490, 491, 492,493, 494, 495, 496, 497, 498, 499, 500, 501, 502, 503, 504,505, 506, 507, 508, 509, 510, 511, 512, 513, 514, 515, 516,517, 518, 519, 520, 521, 522, 523, 524, 525, 526, 527: n = A,T,C or G
  misc_feature 528, 529, 530, 531, 532, 533: n = A,T,C or G
ttcagtagagatggtgtttcaccatattggtccggctggtctcaaactcctgaccttgtgatctgcctgccttagcctcccaaagtgctgggattacaggcrtgagccaccgtgcccggtaggagcccatttttctaaagggctccagaaatctagcatattacagtcatggccaggaggtagttttactttagaagacagctggtctgtgacttttgtgaatcagctggacaggaagttcccagaatcctaagactgtcctctcttagcccatattagctaggattagaaaagagcggatgtaattttagtgtcacagatcctgccaaaagccagtggcaggtgagggtctggggcttgtgttctatcagtaagggaagttgggtgcaacaccctctttagggcttgagggcccaaaactaatttgtgggagnnnnnnnnnnnnnnnnnnnnnnnnnnnnnnnnnnnnnnnnnnnnnnnnnnnnnnnnnnnnnnnnnnnnnnnnnnnnnnnnnnnnnnnnnnnnnnnnnnnnttctttccccgccctgccccacctcttgccatatttgcaaccgattctccactacattgttgatttcagcatagtgccagttattcacctgtatgcccttagattcgtaaatggcctttctctgtccagccctatatgtcagggaagtccacctcccaggctccttttccctccagcctcaggtaagttcagtcattgggaggaacagtcagaagcctggagggcaagagaaagggaaaagccagggcatttctccccaccctcagactctgtgctggtcagcgtgtccattgctggctgtgcctccatcttggacccagctgggcagccctacacctgggatctggtagcaccacttcttcctgttgccccctgtccctggggatggtagcagatgtcagctcttgttcttcttgagactgcctcctgtgccctttctggtttctcagctcttccatgacgtttgtaaccaattccctgtaacaaatccactctgtgtgagaaacctggagtggcttctgatatctgataagactctaatggcacagcccaaaaataccactgctgacttcatgtgagcccctcactttccttctgactggaatgggtgccctcaccagataccctgataatcagttatctgtggaaaatctctgaaatcttcgaatggctaagttaaaagtaagtatatatt

SEQ ID NO: 678618 - DNA, 1227 bp, Homo sapiens
  misc_feature 434, 435, 436, 437, 438, 439, 440, 441, 442, 443, 444, 445,446, 447, 448, 449, 450, 451, 452, 453, 454, 455, 456, 457,458, 459, 460, 461, 462, 463, 464, 465, 466, 467, 468, 469,470, 471, 472, 473, 474, 475, 476, 477, 478, 479, 480: n = A,T,C or G
  misc_feature 481, 482, 483, 484, 485, 486, 487, 488, 489, 490, 491, 492,493, 494, 495, 496, 497, 498, 499, 500, 501, 502, 503, 504,505, 506, 507, 508, 509, 510, 511, 512, 513, 514, 515, 516,517, 518, 519, 520, 521, 522, 523, 524, 525, 526, 527: n = A,T,C or G
  misc_feature 528, 529, 530, 531, 532, 533: n = A,T,C or G
ttcagtagagatggtgtttcaccatattggtccggctggtctcaaactcctgaccttgtgatctgcctgccttagcctcccaaagtgctgggattacaggcgtgagccamcgtgcccggtaggagcccatttttctaaagggctccagaaatctagcatattacagtcatggccaggaggtagttttactttagaagacagctggtctgtgacttttgtgaatcagctggacaggaagttcccagaatcctaagactgtcctctcttagcccatattagctaggattagaaaagagcggatgtaattttagtgtcacagatcctgccaaaagccagtggcaggtgagggtctggggcttgtgttctatcagtaagggaagttgggtgcaacaccctctttagggcttgagggcccaaaactaatttgtgggagnnnnnnnnnnnnnnnnnnnnnnnnnnnnnnnnnnnnnnnnnnnnnnnnnnnnnnnnnnnnnnnnnnnnnnnnnnnnnnnnnnnnnnnnnnnnnnnnnnnnttctttccccgccctgccccacctcttgccatatttgcaaccgattctccactacattgttgatttcagcatagtgccagttattcacctgtatgcccttagattcgtaaatggcctttctctgtccagccctatatgtcagggaagtccacctcccaggctccttttccctccagcctcaggtaagttcagtcattgggaggaacagtcagaagcctggagggcaagagaaagggaaaagccagggcatttctccccaccctcagactctgtgctggtcagcgtgtccattgctggctgtgcctccatcttggacccagctgggcagccctacacctgggatctggtagcaccacttcttcctgttgccccctgtccctggggatggtagcagatgtcagctcttgttcttcttgagactgcctcctgtgccctttctggtttctcagctcttccatgacgtttgtaaccaattccctgtaacaaatccactctgtgtgagaaacctggagtggcttctgatatctgataagactctaatggcacagcccaaaaataccactgctgacttcatgtgagcccctcactttccttctgactggaatgggtgccctcaccagataccctgataatcagttatctgtggaaaatctctgaaatcttcgaatggctaagttaaaagtaagtatatatt

SEQ ID NO: 678619 - DNA, 1227 bp, Homo sapiens
  misc_feature 434, 435, 436, 437, 438, 439, 440, 441, 442, 443, 444, 445,446, 447, 448, 449, 450, 451, 452, 453, 454, 455, 456, 457,458, 459, 460, 461, 462, 463, 464, 465, 466, 467, 468, 469,470, 471, 472, 473, 474, 475, 476, 477, 478, 479, 480: n = A,T,C or G
  misc_feature 481, 482, 483, 484, 485, 486, 487, 488, 489, 490, 491, 492,493, 494, 495, 496, 497, 498, 499, 500, 501, 502, 503, 504,505, 506, 507, 508, 509, 510, 511, 512, 513, 514, 515, 516,517, 518, 519, 520, 521, 522, 523, 524, 525, 526, 527: n = A,T,C or G
  misc_feature 528, 529, 530, 531, 532, 533: n = A,T,C or G
ttcagtagagatggtgtttcaccatattggtccggctggtctcaaactcctgaccttgtgatctgcctgccttagcctcccaaagtgctgggattacaggcgtgagccaccgtgcccggtaggagcccatttttctaaagggctccagaaatctagcatattacagtcatggccaggaggtagttttactttagaagacagctggtctgtgacttttgtgaatcagctggacaggaagttcccagaatcctaagactgtcctctcttagcccatattagctaggattagaaaagagcrgatgtaattttagtgtcacagatcctgccaaaagccagtggcaggtgagggtctggggcttgtgttctatcagtaagggaagttgggtgcaacaccctctttagggcttgagggcccaaaactaatttgtgggagnnnnnnnnnnnnnnnnnnnnnnnnnnnnnnnnnnnnnnnnnnnnnnnnnnnnnnnnnnnnnnnnnnnnnnnnnnnnnnnnnnnnnnnnnnnnnnnnnnnnttctttccccgccctgccccacctcttgccatatttgcaaccgattctccactacattgttgatttcagcatagtgccagttattcacctgtatgcccttagattcgtaaatggcctttctctgtccagccctatatgtcagggaagtccacctcccaggctccttttccctccagcctcaggtaagttcagtcattgggaggaacagtcagaagcctggagggcaagagaaagggaaaagccagggcatttctccccaccctcagactctgtgctggtcagcgtgtccattgctggctgtgcctccatcttggacccagctgggcagccctacacctgggatctggtagcaccacttcttcctgttgccccctgtccctggggatggtagcagatgtcagctcttgttcttcttgagactgcctcctgtgccctttctggtttctcagctcttccatgacgtttgtaaccaattccctgtaacaaatccactctgtgtgagaaacctggagtggcttctgatatctgataagactctaatggcacagcccaaaaataccactgctgacttcatgtgagcccctcactttccttctgactggaatgggtgccctcaccagataccctgataatcagttatctgtggaaaatctctgaaatcttcgaatggctaagttaaaagtaagtatatatt

SEQ ID NO: 678620 - DNA, 646 bp, Homo sapiens
tcatatttccacatttgtcatagatcatatggggaactgggcggaagaatttgaatgagtctgggaaaatcagctccttaytgttagagaaaacattcatattcccatcctatttcttctagcaatggacagctcttctcatcaaactgctgttgctgtgctaatgatagtgaattctctctccctccgtccttcttcccttcctctgcttctccctctccctctccttcttcttctgcctccttccttcccttctgcctcttgtattctgggggaattttcctgagatgctgtgaaatgtctgctttttagtaacaagttctattattaaaggattcgtgttatattactaagcccatttggctacaacttcattgcctaccattccaaacctaactctacttcacaccaagaagagtaatttaactacacatatgcaaaaataaatgtcccattggacttctgttcttctaaaagatttagaaaattatttagtacaattacttctaatatgcacccatcagctctgacatggttctgtgaaaaacagttgtggtcatttcactcaaagtaatggattaagataataaatctgacaaggcctgcctagcaaagttaacattgaaccagtatagtccttttacca

SEQ ID NO: 678621 - DNA, 1266 bp, Homo sapiens
cagtctgagatggaataagagtgggacacaactcctcctttttcttttttcttctcctcatgatcacaaaacccacaccactaccttactgatgctacagctgctcacactgaggctttagtcgtacatacaaagaaaatagccattcttcaccgctctcgtagtgttttacttaaacattacttaaacatttccagaaagtggcctcaggagattcaaatatggaaccaagttgcagattgttccacatccaaaagatgtgctaaacaattcattggcagccttattgcctccagccagaccaccaggttgcccattacccaatatgaccgtggcaaccagatatgcaaacctgcmtgccctacccctgatgtcaattcctgcgctttgcctcataaaaaaagccctacatgctctttctggggagccagccagagaatccttccatctctgccatctccctcgcactcgagcacaagccccaaaataaagacttgtctgggaaatcttcttggcctcttgttaatttcagttacatgggaagcctaagagcctgtggtctctgaaaaatctactcaaatctcaccttcccttcaaggcaacaccattcctaccactctcataaagtctttataaacctgagacctctcacctcctccatgtcccctgctccctagaatactttatacttctctcaaaacaattattctatttaatgagtaatatagttatttaagcacaaactattatgttccctctaaattaaaacttatagaaggcagccttaatttctatattagccagttttttctgtgtcacaaaaaattccaatatcttagtggcttataacattcaaagcatttattctgctcttgcttcgcaggttaggcacaaattaactgatctagtttgagctctgctgggcagatgtgctgcagcatgcccatccagctgtgtttggatgcaatctatgggttgggcttagatgtgctgcatgtatcttcctccttgggcagaaagggaagtacttaggcaacctgctttacatggcagatcaagaaatacaagagggtactaaccactgaagcacattttaagcttttgcttctatcacattcattaacaacttattcaccaaacgaagcgtcatggcccagaccacagtgaaggaaggatacattcacccaccatggatcatggcaatagggtagatttataactccgctttaagaaagggagaaattggaacctataattcagttcacc

SEQ ID NO: 678622 - DNA, 1266 bp, Homo sapiens
cagtctgagatggaataagagtgggacacaactcctcctttttcttttttcttctcctcatgatcacaaaacccacaccactaccttactgatgctacagctgctcacactgaggctttagtcgtacatacaaagaaaatagccattcttcaccgctctcgtagtgttttacttaaacattacttaaacatttccagaaagtggcctcaggagattcaaatatggaaccaagttgcagattgttccacatccaaaagatgtgctaaacaattcattggcagccttattgcctccagccagaccaccaggttgcccattacccaatatgaccgtggcaaccagatatgcaaacctgcatgccctacccctgatgtcaattcctgcgctttgcctcataaaaaaagccctacatgctctttctggggagccagccagagaatccttccatctctgccatctccctcgcactcgarcacaagccccaaaataaagacttgtctgggaaatcttcttggcctcttgttaatttcagttacatgggaagcctaagagcctgtggtctctgaaaaatctactcaaatctcaccttcccttcaaggcaacaccattcctaccactctcataaagtctttataaacctgagacctctcacctcctccatgtcccctgctccctagaatactttatacttctctcaaaacaattattctatttaatgagtaatatagttatttaagcacaaactattatgttccctctaaattaaaacttatagaaggcagccttaatttctatattagccagttttttctgtgtcacaaaaaattccaatatcttagtggcttataacattcaaagcatttattctgctcttgcttcgcaggttaggcacaaattaactgatctagtttgagctctgctgggcagatgtgctgcagcatgcccatccagctgtgtttggatgcaatctatgggttgggcttagatgtgctgcatgtatcttcctccttgggcagaaagggaagtacttaggcaacctgctttacatggcagatcaagaaatacaagagggtactaaccactgaagcacattttaagcttttgcttctatcacattcattaacaacttattcaccaaacgaagcgtcatggcccagaccacagtgaaggaaggatacattcacccaccatggatcatggcaatagggtagatttataactccgctttaagaaagggagaaattggaacctataattcagttcacc

SEQ ID NO: 678623 - DNA, 673 bp, Homo sapiens
tgttgttgttttgttttgttttttgcatttgtgcatttgtaggcctcaaagtgatgttctcttttattttctctgatttctgccaccaaatgtatcatccacaaaagttaaggatcactgacaactcaaattgcttttacttttccaaaattctacatggaattaatttagaagaaatatgtgacagatgatgggattgtccctcaacttgatcttaagttttcagaatctgtggtttgggattgtgatctttccctaattacactataaatgctgtttccacctttgtttttgacttttctgtgggaagttataaaaaayataatcacactctactgtttacacatagatatatatatttgaaatatacatatatgatagattatatatattgctgtatatttgtatatgtatttcattaaggatttaactcattacttcttcttatataccactcttagatgttcaagatatgttatgaaatgaaagaaataggatacataaaaataggagatatacacaggagactgcaataatttaattatcatttaaatagttgtttataatgatgatgaaattattggtggttattatattatctagatttttataaatgttttaaaacatggatttttttttataaacacagttttcattataatagcgaaacaaa

SEQ ID NO: 678624 - DNA, 673 bp, Homo sapiens
tgttgttgttttgttttgttttttgcatttgtgcatttgtaggcctcaaagtgatgttctcttttattttctctgatttctgccaccaaatgtatcatccacaaaagttaaggatcactgacaactcaaattgcttttacttttccaaaattctacatggaattaatttagaagaaatatgtgacagatgatgggattgtccctcaacttgatcttaagttttcagaatctgtggtttgggattgtgatctttccctaattacactataaatgctgtttccacctttgtttttgacttttctgtgggaagttataaaaaacataatcacactctactgtttacacatagatatatatatttgaaatatacatatatgatagattatatatattgctgtatatttgtatatgtatttcattaaggatttaactcattacttcttcttatataccactcttagatgttcaagatatgttatgaaatgaaagaaataggatacataaaaataggagayatacacaggagactgcaataatttaattatcatttaaatagttgtttataatgatgatgaaattattggtggttattatattatctagatttttataaatgttttaaaacatggatttttttttataaacacagttttcattataatagcgaaacaaa

SEQ ID NO: 678625 - DNA, 644 bp, Homo sapiens
  misc_feature 197: n = A,T,C or G
ataataaataaataaaataaataaataacaaatcactaattcgaaaagaaagctgacaaatattgcaaaaatcacaaaatccaggagaacaacatgctgcttttattaattgtctgaaatatttctattgtatatattgtatactatatatattacttatatctaattatatatattatatataatatataaaaatncaattatattatatatgataatatataattagatataattaaatatgtaatatattacatgtaatacataataaatatataaaatataaaatttaatataaaataaataataaatatataatatattacatataatatataagaatataattctattatatttagtaatatataattagataatatatgaatatgtaatatattctattatgtggaatatatataattctaatatatataatrtagttgtacagattctgattgcttctttatatgacaattttgtaataccatattgtatagagataatagaaacatggttcaactttcctttagtatgattattaaaatttgtgttttattgttgatagtttagggaaatttttttcaataccacattttgttgcttgcaacgtcatgtaaaattttacaattgtcaaatttggg

SEQ ID NO: 678626 - DNA, 609 bp, Homo sapiens
gaacaggttatacgggaagacmctagaagctggaaaccagttggaaggctgatcattgtccacacaggaggtaatggtggcctgtacttgagaggcacggtggaataggaagaaattgacatgttccagggatgcttgggaagaataataatgattcattttaaattgaggaatagaggagagagaagagtcaaggagacctccagagttctgtcttgagcacctggatggaagaggagtcagagtctcaagaataaaaacaggttttggcaggggaaggtgatgcactcaccttttcatgtattgggctggaggtgcctatgaacacccatgtggaaatgttatgctggacctggaatatcctggtcctggaattccctaaggatctggctttatttagggagcagccagagttatgaggagagggtttcattttggccaagagccttcttaaaactcaaaacctgaccaaatcttctgagttctcaaatccaatcagcttccaccaggatcagctcaagatgcagacaatctcctggcatgtgtctgccctgtggtataagagaacaaagtataaagaatcagacactaagggctctcattagaact

SEQ ID NO: 678627 - DNA, 609 bp, Homo sapiens
gaacaggttatacgggaagaccctagaagctggaaaccagttggaaggctgatcattgtccacacaggaggtaatggtggcctgtacttgagaggcayggtggaataggaagaaattgacatgttccagggatgcttgggaagaataataatgattcattttaaattgaggaatagaggagagagaagagtcaaggagacctccagagttctgtcttgagcacctggatggaagaggagtcagagtctcaagaataaaaacaggttttggcaggggaaggtgatgcactcaccttttcatgtattgggctggaggtgcctatgaacacccatgtggaaatgttatgctggacctggaatatcctggtcctggaattccctaaggatctggctttatttagggagcagccagagttatgaggagagggtttcattttggccaagagccttcttaaaactcaaaacctgaccaaatcttctgagttctcaaatccaatcagcttccaccaggatcagctcaagatgcagacaatctcctggcatgtgtctgccctgtggtataagagaacaaagtataaagaatcagacactaagggctctcattagaact

SEQ ID NO: 678628 - DNA, 609 bp, Homo sapiens
gaacaggttatacgggaagaccctagaagctggaaaccagttggaaggctgatcattgtccacacaggaggtaatggtggcctgtacttgagaggcacggtggaataggaagaaattgacawgttccagggatgcttgggaagaataataatgattcattttaaattgaggaatagaggagagagaagagtcaaggagacctccagagttctgtcttgagcacctggatggaagaggagtcagagtctcaagaataaaaacaggttttggcaggggaaggtgatgcactcaccttttcatgtattgggctggaggtgcctatgaacacccatgtggaaatgttatgctggacctggaatatcctggtcctggaattccctaaggatctggctttatttagggagcagccagagttatgaggagagggtttcattttggccaagagccttcttaaaactcaaaacctgaccaaatcttctgagttctcaaatccaatcagcttccaccaggatcagctcaagatgcagacaatctcctggcatgtgtctgccctgtggtataagagaacaaagtataaagaatcagacactaagggctctcattagaact

SEQ ID NO: 678629 - DNA, 1007 bp, Homo sapiens
ttaaattaaaaaaaagaaaaaaaaatctactctttatagggccatgctcatagatgtcattaagaatccaatttgaattcatagttctatgatttcccccatatttctgaaaaaaatctgatttttttatatattaataatattggaatagttgttctccaagtaagtatttattacattattagaaaaattaaatcaagaaagtagagccaagtagaggtctggcatcactgcaccagtgaaaataccatatcatattattctaaaggaggaaaggtttccctgacttaatagatattaaaaaccaggaagaaataaaaacacaaatttccttgaggtcattctaattttcactgattactttttaaaagggagttaaaatatcttaaagaaaactagatcatcatatagtttttgtgctattattttccctttaatattcaactacaatttatgtaatttaaactataaatttttagaattccattgtttccttgcttgataataaatacagaaacgtatagtgccatcttgtgaaaaagatgcagaactgcattacactaatttatttgtgtaagttgaaatataacaggggaaagggatatagagctaaaagttgtgcataataaagattaatcagcatatttctgttagctagatttaatgttaaaaaatagaatttagatgggtttcccagctgcctaaatatttctgtagcctggataatagccagaaaggcaagggtaacatattgagttgaaattgtgcaaggggaactaccaaatttcagaacatttttattccaaagggaaaaagaagagaaaaacattatgtctgatgctctaaactgcaaagctgtgtatatgattgaaccaaagatgttgctaaccacaatggagaggagaggtgaagcacattacaaggaaattcaaggcccttggaatgatctgattaaayagacaaaagtggctacttgcctactgactcaggagcactgtccttgactg

SEQ ID NO: 678630 - DNA, 461 bp, Homo sapiens
  misc_feature 2, 3, 4, 5, 6, 7, 8, 9, 10, 11, 12, 13, 14, 15, 16, 17, 18,19, 20, 21, 22, 23, 24, 25, 26, 27, 28, 29, 30, 31, 32,33, 34, 35, 36, 37, 38, 39, 40, 41, 42, 43, 44, 45, 46,47, 48, 49, 50, 51, 52, 53, 54, 55, 56, 57, 58, 59, 60,61: n = A,T,C or G
  misc_feature 62, 63, 64, 65, 66, 67, 68, 69, 70, 71, 72, 73, 74, 75, 76,77, 78, 79, 80, 81, 82, 83, 84, 85, 86, 87, 88, 89, 90,91, 92, 93, 94, 95, 96, 97, 98, 99, 100, 101: n = A,T,C or G
annnnnnnnnnnnnnnnnnnnnnnnnnnnnnnnnnnnnnnnnnnnnnnnnnnnnnnnnnnnnnnnnnnnnnnnnnnnnnnnnnnnnnnnnnnnnnnnnnnntggcagaagcaaacacaatcatcgacctctgaggacatttcagaatacggtctgtatccacaacaagccccaacatgcagaatcgtgagtcaattaayttactggcagagcagaataacggctgctcataaggaggacggtttaggggaagtgaatctacccatcatttaaaatatatcccaagaatcaaacagcagcgtgaataggcagtcatgagaaaaaattctgacagaaacatcagactaagaagtggaacaattctgtctctataaccagaaggaagtgaggctcacacatgtaatcccagcactttaggaggccaaggtgggtggaacccttgagtttagatgttcaagatca

SEQ ID NO: 678631 - DNA, 609 bp, Homo sapiens
ttttttttttttttaattcaaaaatcaagccagcaaggagaaatgaaaaaactaaaaaacatgtctccacaagttggatattaaccttgccaaatggagtatccacatatttttcagttcttccttctaaaatttctggatcatccaggcctgttccaccaattattccaatctaagagagaaaaagacagagaagattattgtatttggtaatttttattagaaataagattctaagcaaattcatttattcatatgctcttctccattcctgccaagccctagttatttttttgaaatctgaaaattactgaacatcaatcaacaaatatttcaaagccttccataaaaatcaacaaacatttgaaggccttctatattctataagtaaccaaaacgtagggcacctttttggactacatcacatttacttctgamtgtctgaattacaagtcagcatagagaggtattttaaccaactcaaggtagaaaatcaaacctaaaagtaggcaagtatggtagtggaaagtaccttctgatcaattttgtttctctgtcaaatggactatagaataaacaatgttcagaagactgctgggatataaaata

SEQ ID NO: 678632 - DNA, 604 bp, Homo sapiens
gatcactgagtctataattyagtcttaaatttgtttaggaaaagttatttatgttcttggtatctcagtatctttatctaacagctgaaaaaaaaaaaacgtaaaaataatctgcttgggcatatagggaagtaaaaatatactgaagaatcgccattcagggaagatgaagacccagggaggggagcccatgttgacaactactgttttaaaaagcaattgtcatttctacatactagcagtaaataattaaaaaatgaatttttaaaaatctttaacttttttttttttttttttttttgagacaggatctcactcttgtctcccaggctggagtgcagtggtacgatctcagcttactgcagcctcaacttcctgggctcaggtgatcctcccacctcagcctcccaaatagctgggactacagtcatgcaccaccatgcccagctagttttttgtatttttagtaaaaacagggttttgccaagttgcctaggctggtctcgaactcctgggctcaagcaattggcctgtctcagcctctcaaagtgctgggattataggcatgagccacatcacccagcctctttaacctctttatgtt

SEQ ID NO: 678633 - DNA, 905 bp, Homo sapiens
ggccatattgtggattttgtaggatttggggaatggataagagacctacaatcttttaaagcgttgagaaatttctggaggaaatttctatgattcacaaaatgctgttcttggtttttgccttgttttaaaaagttaagaatcaacaaatttggaacataacccatctgtaggtcatgcttacaaacacgtatgcatataaaaccagaaacattaaacagacatgtgctcataagagatggagagagacacattgcgatcaatgtgccttaaaccagatgggatgacttaggcagtgtttagggtggaagtgggatcccaacttggcagcaaggggtggcgtggcctgcacagtgaactggaagtagatgcagttggaagtgggtaatgatcacttgttcattttatttgatcttcttatcatttgctgcatggcatgggctcgtcgttccttcactggcattctcctcccccagcccccagccttgcctcttctcctatamacgtgccttttgctcttactccatttttaggaggcagcacagtggcttgctctgagcctttgtgagattggcagtagtgtgtgctgctctatctgttatctctttttaaacagataaggtggacaggaaatgctaatggcaaacacagccacagctcaacccctgtgctgttttgcaaagcatattttcttatcaggctcagggccgggacccttagacagaggtggcatggctgggcagctgtgagactagcccatcaggccacactgtgttctgttctgtccacaaacacagtaaagtatgtaaccaggtagttcaggctaatcctcaacacttctctttttccacttatttccaaaattgttcataagatcagctgtacggtttgaagtgtcacaggca

SEQ ID NO: 678634 - DNA, 1005 bp, Homo sapiens
tggatgaagctagaaaccatcattctcagcatactaaaacaggaacagaaaaccaaacaccacatgttctcactcataagtgggagttgaacaatgagaacacatggacacagggatggggaacatcatacactgaggcctgttgggggatgggggcctaggggagggatagcattaggagaaatacctaatgtagatgatgggttgatgagtgcagtaaacaaccatggcacgtgtatacctatgtaacaaacctgcacattctacacatgtatcccagaacttaaagtgtaataaaaaaatttggaaaactacatattactctcataaaccattgttattgacatcttcttgaaatgtttcccagtcctttctttgacagcatgaaagttataatgtacctttgaattgtgtctcttcatttaacactgtattgtgagcatttctgtgatttgggattatcacagcataatgactgcagagtattccagcaagggggacagtcacagagtgctaatttagtggtgggactctctcatgggtcagcgctatgatgagacagcacattccttagtgacctggaagaggccccacttctggtttcccctggctgtgtggtaaataataagctaaaggtgacccgttgaggaggtgtcttgcaaactgtgttgtgtgacagggcaggagcacagtgggttgatatcagcttggatgtgaggttctgccctcgatgtgtgttcagtgacccaaggaaatttgtcatatgatcaatgttccaggagrgacgctgctcatttcttccctctgcctggattaccattgcttcctctttctgcttgagaattcatcctttaactcccaaatggctagagtcatgttcctctgccctgtgcacctgtgaatacactttcctgttattcaggggctgaactctgttccccgtctcctgattaatatgttgaagctctaaccctcagtagctcagaatatgactgtacttggaga

SEQ ID NO: 678635 - DNA, 1005 bp, Homo sapiens
tggatgaagctagaaaccatcattctcagcatactaaaacaggaacagaaaaccaaacaccacatgttctcactcataagtgggagttgaacaatgagaacacatggacacagggatggggaacatcatacactgaggcctgttgggggatgggggcctaggggagggatagcattaggagaaatacctaatgtagatgatgggttgatgagtgcagtaaacaaccatggcacgtgtatacctatgtaacaaacctgcacattctacacatgtatcccagaacttaaagtgtaataaaaaaatttggaaaactacatattactctcataaaccattgttattgacatcttcttgaaatgtttcccagtcctttctttgacagcatgaaagttataatgtacctttgaattgtgtctcttcatttaacactgtattgtgagcatttctgtgatttgggattatcacagcataatgactgcagagtattccagcaagggggacagtcacagagtgctaatttagtggtgggactctctcatgggtcagcgctatgatgagacagcacattccttagtgacctggaagaggccccacttctggtttcccctggctgtgtggtaaataataagctaaaggtgacccgttgaggaggtgtcttgcaaactgtgttgtgtgacagggcaggagcacagtgggttgatatcagcttggatgtgaggttctgccctcgatgtgtgttcagtgacccaaggaaatttgtcatatgatcaatgttccaggagggacgctgctcatttcttccctctgcctggattaccattgcttcctctttctgcttgagaattcatcctttaactcccaaatggctagagtcatgttcctctgccctgtgcacctgtgaatacactttcctgttattcaggggctgaactctgttccccgtctcctgattaatatgttgaagctctaaccctcagtagctcagaayatgactgtacttggaga

SEQ ID NO: 678636 - DNA, 653 bp, Homo sapiens
tcgtaacaatcctgtaagacagtgatcatcattcctattttacagataaagcttgagcacagaaaagtgaaataacttgcacaatgtaacaaatatttccttttttgccttttaattttgagacaagttctctctctgttgcccagtctggagtgcagtggcatgattacggcttactacagccttgacctcccaggcccaagtgatcctcccacctcagcctcctgaattgctgggactacaggcatgtgtcaccacacccacctgatttttaagaaaaaaatttgtagagacagggtctccctatgttgcccaggctggtcatgaactcctgggctcaagcgatcctaccactctggcctcccaaagtgctgagattacaggcgtgagccaccgtgcctggctacaaatatttcttgtctctttgtgtgctaggtgcttcagttactaactagcagagggagattttaaatccaggccctctgattctatgttctttgttttttctaatagtgatktggaagggaatggagagaccactcaccacttcttcttctccttctccttctccttctccttctccttcttcttattgagatggagttttgctcttcttgcccaggctggagtgcaatggtgcaatcttggctcac

SEQ ID NO: 678637 - DNA, 886 bp, Homo sapiens
ttcaaaggcaaacagtggtccacttattttaagcaaagcaaggaaactccattagagaattaagaataggattwaaaaaactcatcataatgtgattttattttgcaaagttcgttatttaagatgtatatcaataaataatataaacacacgcgtgcgtgcacacacacacacacacacagatgcctgaataagtttaccttttagtagcaacagaaaagtaagcaaagggcaggaaaatgaaaacgacaagcccagaggcaaataaaacaaactttcagggagtgtcttattattgcatagcttgaaaaaaagtcattgcctgggattaaaaaacaaacaaactttttttaacgtaaacacttgttaccttgtgatattattttactttaatgaggcagcgaagacaactttggatatatatttagatgaaaagtcacaaagaagcttaggtgtcccagtaaatgaagattattaggcacaaaaggagatgcagagatttccctagaaaacacagtctgatctttttaatttctgttttctttttctgctggggaaagtttaatgtaaatccttccctttatgggaagtgatcgactttgttctttgtttaatgtagacggggtcctggtccctgacattgtgcatttttacatatttaaaggagttttaagggacactaagacttttctttcactaaggtcttacaaacgaccgacactactccagcaaaattgcacactttggtcttcaaggatcaaagactgaaatggagctaatttcctacaacaattctacagcctggtgagttcgctaagtaggagaaggctgcccattgccatttattgaactaattaaaaataaaaacttagctttcaataaaagg

SEQ ID NO: 678638 - DNA, 886 bp, Homo sapiens
ttcaaaggcaaacagtggtccacttattttaagcaaagcaaggaaactccattagagaattaagaataggatttaaaaaactcatcataatgtgattttattttgcaaagttcgttatttaagatgtatatcaataaataatataaacacacgcgygcgtgcacacacacacacacacacagatgcctgaataagtttaccttttagtagcaacagaaaagtaagcaaagggcaggaaaatgaaaacgacaagcccagaggcaaataaaacaaactttcagggagtgtcttattattgcatagcttgaaaaaaagtcattgcctgggattaaaaaacaaacaaactttttttaacgtaaacacttgttaccttgtgatattattttactttaatgaggcagcgaagacaactttggatatatatttagatgaaaagtcacaaagaagcttaggtgtcccagtaaatgaagattattaggcacaaaaggagatgcagagatttccctagaaaacacagtctgatctttttaatttctgttttctttttctgctggggaaagtttaatgtaaatccttccctttatgggaagtgatcgactttgttctttgtttaatgtagacggggtcctggtccctgacattgtgcatttttacatatttaaaggagttttaagggacactaagacttttctttcactaaggtcttacaaacgaccgacactactccagcaaaattgcacactttggtcttcaaggatcaaagactgaaatggagctaatttcctacaacaattctacagcctggtgagttcgctaagtaggagaaggctgcccattgccatttattgaactaattaaaaataaaaacttagctttcaataaaagg

SEQ ID NO: 678639 - DNA, 886 bp, Homo sapiens
ttcaaaggcaaacagtggtccacttattttaagcaaagcaaggaaactccattagagaattaagaataggatttaaaaaactcatcataatgtgattttattttgcaaagttcgttatttaagatgtatatcaataaataatataaacacacgcgtgcgtgcacacacacacacacacacagatgcctgaataagtttaccttttagtagcaacagaaaagtaagcaaagggcaggaaaaygaaaacgacaagcccagaggcaaataaaacaaactttcagggagtgtcttattattgcatagcttgaaaaaaagtcattgcctgggattaaaaaacaaacaaactttttttaacgtaaacacttgttaccttgtgatattattttactttaatgaggcagcgaagacaactttggatatatatttagatgaaaagtcacaaagaagcttaggtgtcccagtaaatgaagattattaggcacaaaaggagatgcagagatttccctagaaaacacagtctgatctttttaatttctgttttctttttctgctggggaaagtttaatgtaaatccttccctttatgggaagtgatcgactttgttctttgtttaatgtagacggggtcctggtccctgacattgtgcatttttacatatttaaaggagttttaagggacactaagacttttctttcactaaggtcttacaaacgaccgacactactccagcaaaattgcacactttggtcttcaaggatcaaagactgaaatggagctaatttcctacaacaattctacagcctggtgagttcgctaagtaggagaaggctgcccattgccatttattgaactaattaaaaataaaaacttagctttcaataaaagg

SEQ ID NO: 678640 - DNA, 606 bp, Homo sapiens
tagttactcaacccttttacaagtcttaaggaccctataaactttgaaagttgtagtaaaatatttatagagcaagtcaaagaaaagtataaaacagtgggtctaggtgaaatttagacgtggctaaaattccttttcacctcttttgctgtttgattcataagggtataggtacctggcctagtgaaatagcaactcatttcaccctgtagaccggacatagtacaatttccacagttgcaaagccatttcattccttttcctcctggtgtttactttagaagttcaagagacgattttgatgagaaatgacagtccggtgcctcatgagaaactcaggccggtgccacaggtgaaaactctgaggtcattaccccttctgaattttcctgggaaagggccttggagccactctccactgkgactgagaaactcaagaggagccattggtgtttcaggcttttaggggagatataaatggaggcctgactagtaaaacctgccacccaaagccccaaggcactctttactcaggcagtcatagagctgggatggaacgccatctggaggaaccccactttgcctgtgtgcctccacgtccccagc

SEQ ID NO: 678641 - DNA, 1800 bp, Homo sapiens
tgttgcccaggctgatctggaactcctgggctcaagagatcctcctgccttagcctcccacagtgttgggattacaggttatttatttatagtaatatagtgaagccccrtgaactgcctgctcatactcaagcccggagtaatatctgtaacttttgtttgcctgtatgcccctcctctctcccctcctcttgcctcccccatcaagagtagccaggattcaagtcatgcattttatcattctcttacttatttttgttttaaatacatgtatgcatacaatctacttaatcaaggtaaaaaaaaaataaaataaacttttttactatttgcccagttgtgcctgccctggaagtctaagaaaaggataatataaaagattcagtagaagcctataaataattgcattatctagagaaacaccaattgtttttgagggagtaagaggaaaccagtgtttcacagagaaattagaaatagctaacttagtttccttttggtctaaaaaatcaacgatctttcttttccacttatctttaatttttttttttttttttgtcacaccaagggtttgaacccagttgttgaattgcactgtagaatggaccaagaatgtggctatggcggtatttcataactggtttgccttggaagcagagtcaacatcttcctgttaggggatgtggtataatcaccacctacatgatagatggggaggtcacaaaaagttcattattctagaggatcccaataagcttagaaaagttatttcaacacaaacgtgactgtatttcagttatctgagattgcttcttcctatactacctgctttctacatcatcctttcttttcttagagggaaaataatcccactctctccatttcttctctcagatgcttattctatagtctgtcctgagaccagggttaagatctttgcagtcttcctggtgtcctgtaagacagccagtgttattctaagtttggaatgagagaaaagatgaggaagtttctgtgtccagcagtgtggtcctgaagcctcagcctcagtacctggcatggtggaaattgatttacctcgctccgtatcagcaagtctgcggaagcctgagtctatttgccatgcgaaaaactataaaaagaccaaggccattcagatgtctgaagtctggctgtagctgcacacatagcagaattccctggcttagatcagaattgacaagttaaagagatgctcaataagattgactcagcagggactgatgaagataaattgagaaaactcagtctgaatacctctatgaggaagatgacagcttacctgtcaaggaaaatcgtgcaaaggaatatctcatccacttatgacctatccacacatgcaattggttgatttctatgctatgtagtattctggcataaaaggtgggattgataaataagacatgttctccattcaaaagaaatctacaatctcagctgggcatggtggctcacacctctaatcccagcactttggaaggccaaggtggaaggctgtcttgagcccaggagtttcagactagcctgggcaacagggcaagatcccatctctacaaaaacatttaaaaaaattggccaggtgtggtggctcacacctgtaaccctggccctttgggaggccgaggcaagcagatcacttgaggtcaggaattcaaaaccagcctgaccaacatggtgaaacctggtctctactaaaaatacaaaaaaattagctgagcgtggtggcaggcacctgtaattcaagctacttgggaggctgag

SEQ ID NO: 678642 - DNA, 627 bp, Homo sapiens
tgccatggggtgaactactgtgttcaacaagaaggggatggatctgtttccctccagtcctgcacrgagatagcaataaggctgtttctctgatggcctgggccacagtgtgagaggaaccggcagaaggagtctcataacaacataagcagcctccacgggccagccctaggcaggccatttccccaaatgtgtctctgtgttcatacacgcaaacttcacggccagtaccaggcgaccaggatggtcagcgtttgggtttctttactgaagctttggagacgtagcgttcattgtcggcagtaactaaacccaaatttctaagcaacctgggccttccacttgcaaactagctttgaagagcatggaatcttgatatcagttccttttcatggatatgtattttacatagaaaaaattgtggccaggcatggtggctcatgcctgtaatcaaagcaatttgggaggctgaggtgggcagatcacttgaggccaggagtttgagaccagcctggccaacatggtgaaaccctgtttttactaaaaatacaaaaattagctgggcgaggtggtgcacgcctgtaatcccagctacttgggaggctgaggtataagaattgccagtga

SEQ ID NO: 678643 - DNA, 1552 bp, Homo sapiens
aaagaaatccttaagcatagttatatcagctgtttaaaaatccttatctgataatttcaacatccagctcatctcaggattggtctttgttgactgtatttccccttgagactgacttttctggttctttacatcatattctgttcagtgtgattattgtgtctttgattcctagagttgttatatatctttggtgaattttgatttcttttgtgatttagtaggcaattaatttgattaatttgattagctgcaacaagttgcagctcaaaactccattcacctctctaagttatgtcctactccccagaacacgtgaatatgtcaggttacacggcaaaggggaactaaagttgcaaacagtattaaggttgctaatcagctgaccttaaatcagagattagcctggatcatgtgggcaggcctaaggtaatcacaagaaaccttaaaactggaagaagcagtcagaaagggcgatgtgacaatggggcaatgttggagacctgctatgctgctggcttcaaagataaagggagagggtcacaaccagcaaatctgggcagtgtttgaggccggaaaggcaaggtgatggattcttcctgacagcctccagaaaagaattccatactgctgacacccagattttaacctagtgatggttattttgaatttgttacccacagaactctaagatgatacatttgtgttgttttaagccactaaatgtgtggtaatttgttagagttgcaatgaaaaaaatacaaattttccgtccccaaaatttgaaaaccaactccagagaaaaataacattgctgtttagtcaagtgaatggttgattttgtaattgtgcaagaagtattttaaattgaaattataattaaggagtatcatttctcatactgactggggtaagattatggagacatagtcgagccgaattcccccaggcctaaccttctaattcttccctcatggttctcttgcatagctcctatgtcttaaacatggggctggckcagagcgtgaagtttcataagtgagtcctggctaagttctttgtctctttttccagtagcccaaatatcaatgttgacaccttaaaaggtacacaattttataaattatagacaattccctgtttcagactcttttttaaaatataaatacatgattcgaacatttttttctgcatacaagaaaaaaagttggaataatgcatgacattcatattaaacattattcatcagcactgaatgagaattgcaaaggctgagagacaaccagcatttatctatcacatatgttcaaaacgatcatctttaacatctatgtgatatctctcacatatgtcgaaactttaaagacagttgctgcaaaagttttgaaatatttcctttacaccactgagaataaaaatatcagaaggaagaggagaaatatatagataatacagcaataataaagtttagtatgaaaagagagttgtttattttctagtactggttataattatctctgaggttctatttagtattttgtatataattacc

SEQ ID NO: 678644 - DNA, 641 bp, Homo sapiens
tagaaaattaaaatattttaaaaattcatttaatttttcttaattcaagaattttaattcttgataaatctattatttcattcagctaaatacaatttcatgtttgtaatcttaaaccatctgtaaaaatgataacttactgggctgataggatattaatcctacattagtagaaattttagaagtttaaatgagaaacgaaacccaagtcttgcattaaacaaaatattgggtcaactttttattttctgaaaaagtcagggagaaggcataaagttggttttaagctaaaattttatcactataaaatgttcaaagaatcatctatcagtaatattacatagasttctaaaattataaaaaaaaaccctcagtatttacatataaaacattttcaaaaaagacttttgaactcatcatgccaggagctctaagtatctagctttttttcttgtctaggtatcaaggccattacctaaacctacctcagtagttctttgcagtgaggaaattaggaaaaggcctttaatagggtgatttttcaggtgaattttgcttgtaagaaacttgttgggatagttggattgttgggaagaggaagatatcaaggcaagttttaaagagaaagctgttagtcttga

SEQ ID NO: 678645 - DNA, 590 bp, Homo sapiens
acatcatatctccctaattctccagtattacctgccttggatggctgtaaaggcgggatttaaagcccattcttttcctcttttgtggttgacacagtcatattatccgtcagaattggttcaggagaattgcagatagagaagagaaaacattttctccaagcctggatccagggaaacccattgacttactgagactagtacacactctgcaaaaggatcaagagaaaatgaatggtagtaaataggtgtttgcacattcggctctgctacttatccatatagtcaacccttatgtatatttaacttctcatctgttcattcatttcatccaccaatctctccacccaccttagaccccattaatataaaattgaaaacttttgagtggttcccaaccctgatcatgcatctgaataagctaagaaactttttaaaataagacatacaagacttacacttctgagcatggataatttactctcccactgtaaataactagaaaactgtaccatatatatgagatcattggtttcagatctttggcagcagacagtgcataaaygtaatacctgagagaagagaaacaa

SEQ ID NO: 678646 - DNA, 600 bp, Homo sapiens
tgagaagaattacaaactggtagtaatgaaaaatagtttgatattggtaccaaagcagagaaacagattcatgaaacaggggggagaggcaagagtcagacccataggtacatggagcctaatatatggcataagggaagattgcaattttataaggaacagccagattgtttagagatggagtaggggaaagtgattcaccatgtggagaaaattagaacagtatccccatctaaggagactccagaaaaattaaagatctaaatatgaaagataaaacatcaarttattagggaaaaaatctttgcaatctaggaccaggaaaagagtttatgaacaaaagtatgaacttctttttaacaaagggcattacagacaaagttaataggcagctgataggcaagataaagattctttcaaaatctaaaatggaaaaggcataaatgatatccttgtgattctaccgtaagaaaagagaagttcctacaggaacataatttcttatgaacaattacacaagaaatttaaaagtttatagagaagtaaagaaatgctcaaaatcattaatagtcaataaatgaaagttaaagcaataagata

SEQ ID NO: 678647 - DNA, 596 bp, Homo sapiens
ttctttattcataaactttctaacttactgattttaactaagttgctgattctctttttagctgcatctaatctgctccataactcttcctttgagtttctaatgtcagtgactactatattgttctagaagttctatttgattcttttttcaaatctacctagcttcttctatttgttgagctttgtttctctttttttattccttcattaatatatttattcattttgaacataactattttaaagacttgaataatcccaatatctgaaattcctagcaattaattctgtggatgttttgttgggcctgggttaagggtaagtccttccagagagattttgygtatgctactaccagatgtccaaatatttacatatatggtaatttcttggtttggatgttattagagcatgtggacaatacaaatatgaacctcaaaaccatgtgagactagtactatagttatactacagtactagtatagtattagcattcattccttaagaaacacttttcttcaggtcagtgtccagccaaaagtagtcattttctagttctccctgttcactactgttgctgcctttgtaggtctc

SEQ ID NO: 678648 - DNA, 596 bp, Homo sapiens
ttctttattcataaactttctaacttactgattttaactaagttgctgattctctttttagctgcatctaatctgctccataactcttcctttgagtttctaatgtcagtgactactatattgttctagaagttctatttgattcttttttcaaatctacctagcttcttctatttgttgagctttgtttctctttttttattccttcattaatatatttattcattttgaacataactattttaaagacttgaataatcccaatatctgaaattcctagcaattaattctgtggatgttttgttgggcctgggttaagggtaagtccttccagagagattttgcgtatgctactaccagatgtccaaatatttacatatatggtaatttcttggtttggatgttattagagcatgtggacaatacaaatatgaacctcaaaaccatgtgagactagtactatagttatactayagtactagtatagtattagcattcattccttaagaaacacttttcttcaggtcagtgtccagccaaaagtagtcattttctagttctccctgttcactactgttgctgcctttgtaggtctc

SEQ ID NO: 678649 - DNA, 392 bp, Homo sapiens
aaagccaggctcagtggctcacacctatcatcccagtgactcaggaggctgagtcaggaggaycgcttgaggccagaagtttgaggctgaagaatcataagccatgattgcaccactgccctccagcctgggccatagcacaagaccccatctctcaatagtttttaaaaattagcagggtttggtggcatgcctgtagtcccagctattcaggaggccgaggcaggaggattgcttgaacttgggagttcaaggaggctgctgtgagccgtgatcacacactgcactgcagcctaggtgacagagagagatcccaactctaaaaaaataagaagaaccacgaggagcccattgttgtatgagtccctgctcccctgggagaagatattggg

SEQ ID NO: 678650 - DNA, 392 bp, Homo sapiens
aaagccaggctcagtggctcacacctatcatcccagtgactcaggaggctgagtcaggaggaccgcttgaggccagaagtttgaggctgaagaatcataagccatgattgcaccactgccctccagcctgggccatagcacaagaccccatctctcaatagtttttaaaaattagcagggtttggtggcatgcctrtagtcccagctattcaggaggccgaggcaggaggattgcttgaacttgggagttcaaggaggctgctgtgagccgtgatcacacactgcactgcagcctaggtgacagagagagatcccaactctaaaaaaataagaagaaccacgaggagcccattgttgtatgagtccctgctcccctgggagaagatattggg

SEQ ID NO: 678651 - DNA, 610 bp, Homo sapiens
tgggttcaagtgattctcctacctcagcctcctgagtagctgggattagagacatgaggcacgtgcttattttgtatatatagtagagacagggtttcaccatgttggccaggctggtctcaaactcctgacctcaaatgatccgcccacctctgcctcccaaagtgctggaattacaggcgtgagccaccatgcctggccacacctcagtggttttctaactgtgcccacagagctcttaggtctcagccagggtctctggaggtccctgttccatggggctcaggaagaaggagccagacgccaactgggctcttgytccctctgcccctgcctggcaatttgtgtgtttattcattcacctcaccggacaaacatgccccaggaccatgttacatgccaggcctcatgcgggtcatcagggcacagcggtgtcagggggcctacattccggtgggggactggcgtggaggcacatatggtatagcgtggtacaggctctgctgggacagacaagtgggcaggggcacagaggaggcccggaggcctcagacctggggctgggccgacttcctgaaagcagcagcatctaagctggggcctggcggga

SEQ ID NO: 678652 - DNA, 638 bp, Homo sapiens
aatcatgtttaggacaaatgcactttaatgcaatagattgtggttggttggcattaaatatttagtagaagaattctgcttaatattagtgtaattaaaggrcactgatgtaggtaggtatgcatatatatacatatctaagttatataaaggactttattaacgcttaatacaggatatttgtacatacataaatatgctattatcttatatgaaaaactacaaatcctattggttgtatttctgtttattgttaatgtttctaaaacatttggagaaaatgatattactcttataatgcattctttgtaagcttctcatgacagagatgttgtaatctctgtcagttggttgattataaagcacaacccatgtaaatatctgtactagatgagtttgttgatcatgggctgatgagattttgacttcaggtctcctgtcttcctttcctcatatcatcatttaaattctttaaaagaaaatcgtcaatcgattgtcaaaagtggaatgccaaaatctgctggaaatcttgaatgtacactattctggggtgaagaatggagatatatatatatacagatagaaagatataaaaccactgttaggaacactataacacgcattgaggtgatgcatat

SEQ ID NO: 678653 - DNA, 638 bp, Homo sapiens
aatcatgtttaggacaaatgcactttaatgcaatagattgtggttggttggcattaaatatttagtagaagaattctgcttaatattagtgtaattaaaggacactgatgtaggtaggtatgcatatatatacatatctaagttatataaaggactttattaacgcttaatacaggatatttgtacatacataaatatgctattatcttatawgaaaaactacaaatcctattggttgtatttctgtttattgttaatgtttctaaaacatttggagaaaatgatattactcttataatgcattctttgtaagcttctcatgacagagatgttgtaatctctgtcagttggttgattataaagcacaacccatgtaaatatctgtactagatgagtttgttgatcatgggctgatgagattttgacttcaggtctcctgtcttcctttcctcatatcatcatttaaattctttaaaagaaaatcgtcaatcgattgtcaaaagtggaatgccaaaatctgctggaaatcttgaatgtacactattctggggtgaagaatggagatatatatatatacagatagaaagatataaaaccactgttaggaacactataacacgcattgaggtgatgcatat

SEQ ID NO: 678654 - DNA, 678 bp, Homo sapiens
cggttttccaacaaatgaatggatatggcatctgttttatgatagtttcargatgtttccaaggtttaccccaagatatgaatgttcaacttgaaattctagaaatatgatcattaatggaaatacaaagttcttagacaaaagatggaagaaataattcaggaaggaagctaagaagaataacatttcacataaaaagcagggaatcaaaaacagtgtttggctaaaggaaaaaggtggtaaagacaagagaaggaaaaacaaaactactccacattgccagatatattacacttgttaacactagggaatccaggctatctataccatcctatgccccctaaaaccatgaagtgaatttgcaaacattaacagattatagaagtgctgttacctaactctccacacgtagcagaagcccaagtgcctgtagagttagagctgggagttatgaggaaaagctacaggaagtatgtcttggcccagaataaggaagaactttctgacaataagatgtgccaacagtggaatggctttttccccaaagtaatgagcttcctgtcactggagagtcaggtagctgctagaagattggcagggttgcaatcaagggtctctagcatgaggtcagagtttgaatcgggtgaacctgaaggtcccttaccaagattttgtgat

SEQ ID NO: 678655 - DNA, 678 bp, Homo sapiens
cggttttccaacaaatgaatggatatggcatctgttttatgatagtttcaggatgtttccaaggtttaccccaagatatgaatgttcaacttgaaattctagaaatatgatcattaatggaaatacaaagttcttagacaaaagatggaagaaataattcaggaaggaagctaagaagaataacatttcacataaaaagcagggaatcaaaaacagtgtttggctaaaggaaaaaggtggtaaagacaagagaaggaaaaacaaaactactccacattgccagatatattacacttgttaacmctagggaatccaggctatctataccatcctatgccccctaaaaccatgaagtgaatttgcaaacattaacagattatagaagtgctgttacctaactctccacacgtagcagaagcccaagtgcctgtagagttagagctgggagttatgaggaaaagctacaggaagtatgtcttggcccagaataaggaagaactttctgacaataagatgtgccaacagtggaatggctttttccccaaagtaatgagcttcctgtcactggagagtcaggtagctgctagaagattggcagggttgcaatcaagggtctctagcatgaggtcagagtttgaatcgggtgaacctgaaggtcccttaccaagattttgtgat

SEQ ID NO: 678656 - DNA, 561 bp, Homo sapiens
  misc_feature 546: n = A,T,C or G
tgatatcttaaaaggatgtatttgctaactgagagaatgagaaacaaacggttaaccagttgcatggaagttgtatttctcatggtaatttagggaattttatacatgttttgttgtttatgagttttattaatatgtatgcatcctctaagcatctttaggttagtttaatggaattcctagcactaaaagtctgaaaatatcatttccacaatagtaagatgtctggtgtgaacttatatgaggaagcccgctaatgttaccctgtatttcacattatctgtcacaagttatgagtgccattccgttctttccatcagtagtaattgtgagagaaccaatgctctttcaagggttcaaaataaaattttccattttttaccrtcttcactgaactaaaatagaatgggtttttaatagagcaataattaaacagaacaaactggaaaactggcttatggtagcatacccaactgatattgttgtccatcaaggaccccatcgtcatgtttccttttgttaatatgtgtgtgtatgtagaatttnctaccttgaaccaga

SEQ ID NO: 678657 - DNA, 584 bp, Homo sapiens
gaaataggtattatatgttattttatgtattgtctgtttatgatctatattttatttttattggtaataacaattttacataatatakgctacataaaatatttcacttttacaataaattttgcaaattatttttctacttattctattgctatttaattgattcttttttcacatacttacaaattttatatatttaaataaataattttgtactctgttccctttgcatttcttctttaaaatttattcaattcaaatagctttaaaaatttataattatatttgagtaatataattgattcactagtcatttttatttttatttttatttttttgagacagggtctggctctgtggcccagcctggagtgcagtggcgggatcttggctaaccgcaacctctgccttccaggctcaagtgatccttacgcttcagccttctgggtagctgggactccaggtgcacactaccacgcttgcctaatttagctattttttgtagagacagggtttcacgatgttgcccagcctggtcttgaactcctgagttccagtgatccatctgcctgggcctcccaaaa

SEQ ID NO: 678658 - DNA, 584 bp, Homo sapiens
gaaataggtattatatgttattttatgtattgtctgtttatgatctatattttatttttattggtaataacaattttacataatataggctacataaaatatttcacttttacaataaattttgcaaattatttttctacttattctattgctatttaattgattcttttttcacatacttacaaattttatatatttaaataaataattttgtactctgttccctttgcatttcttctttaaaatttattcaattcaaatagcttwaaaaatttataattatatttgagtaatataattgattcactagtcatttttatttttatttttatttttttgagacagggtctggctctgtggcccagcctggagtgcagtggcgggatcttggctaaccgcaacctctgccttccaggctcaagtgatccttacgcttcagccttctgggtagctgggactccaggtgcacactaccacgcttgcctaatttagctattttttgtagagacagggtttcacgatgttgcccagcctggtcttgaactcctgagttccagtgatccatctgcctgggcctcccaaaa

SEQ ID NO: 678659 - DNA, 584 bp, Homo sapiens
gaaataggtattatatgttattttatgtattgtctgtttatgatctatattttatttttattggtaataacaattttacataatataggctacataaaatatttcacttttacaataaattttgcaaattatttttctacttattctattgctatttaattgattcttttttcacatacttacaaattttatatatttaaataaataattttgtactctgttccctttgcatttcttctttaaaatttattcaattcaaatagctttaaaaatttataattatatttgagtaatataattgattcactagtcatttttatttttatttttatttttttgagacagggtctggctctgtggcccagcctggagtgcagtggcgggatctyggctaaccgcaacctctgccttccaggctcaagtgatccttacgcttcagccttctgggtagctgggactccaggtgcacactaccacgcttgcctaatttagctattttttgtagagacagggtttcacgatgttgcccagcctggtcttgaactcctgagttccagtgatccatctgcctgggcctcccaaaa

SEQ ID NO: 678660 - DNA, 584 bp, Homo sapiens
gaaataggtattatatgttattttatgtattgtctgtttatgatctatattttatttttattggtaataacaattttacataatataggctacataaaatatttcacttttacaataaattttgcaaattatttttctacttattctattgctatttaattgattcttttttcacatacttacaaattttatatatttaaataaataattttgtactctgttccctttgcatttcttctttaaaatttattcaattcaaatagctttaaaaatttataattatatttgagtaatataattgattcactagtcatttttatttttatttttatttttttgagacagggtctggctctgtggcccagcctggagtgcagtggcgggatcttggctaaccgcaacctctgccttccaggctcaagtgatccttacgcttcagccttctgggtagctrggactccaggtgcacactaccacgcttgcctaatttagctattttttgtagagacagggtttcacgatgttgcccagcctggtcttgaactcctgagttccagtgatccatctgcctgggcctcccaaaa

SEQ ID NO: 678661 - DNA, 584 bp, Homo sapiens
gaaataggtattatatgttattttatgtattgtctgtttatgatctatattttatttttattggtaataacaattttacataatataggctacataaaatatttcacttttacaataaattttgcaaattatttttctacttattctattgctatttaattgattcttttttcacatacttacaaattttatatatttaaataaataattttgtactctgttccctttgcatttcttctttaaaatttattcaattcaaatagctttaaaaatttataattatatttgagtaatataattgattcactagtcatttttatttttatttttatttttttgagacagggtctggctctgtggcccagcctggagtgcagtggcgggatcttggctaaccgcaacctctgccttccaggctcaagtgatccttacgcttcagccttctgggtagctgggactccaggtgcacactaccacgcttgcctaatttagctattttttgtagagacagggtttcacgatgttgcccagcctggkcttgaactcctgagttccagtgatccatctgcctgggcctcccaaaa

SEQ ID NO: 678662 - DNA, 771 bp, Homo sapiens
tgtaaattgttatacatattttaaaggttatttcagaagtttaaaggtataaactttgtaaacttgacactgtaattttagatacttgttctgaagaaataattgtggatgtataaaatgatataaaatatataaggtcttgactttataaagagaaaaaytggaaactggaaaatgggttcaataaattcttatatgtaatgaaaaacattatgcagctaataaaagtattattatcaaaacacttaatgacctagatcttggggttagcaaactatagccaaactatggcaaaatggcctgcaatctgctttgttttttaattttttcttttgaaacaactatatattcacgggaagttgcaaagagtacagaaaggtactctgtacccctcaactagtttcctctactggttaaatcttactacagtgcaatatcaaaccataaaattgacattagtacaatatgtgtatagattcttgtaattacaagtacaatcaagatactaactcttccatcaccacacaaatctcccttgtgctacccttttatagtcatacccacctcttcttttttccttggttagtctagctagtggtttatcaattttttaaatctattcaaagaaccaacttttcaccttgttgatcccttgtataattttttagtctctattttgtttagttctgttctcatctttattatttcttctactaattttgggtttgatttgttctggctcttctaattccttgaggtgcaactttggat

SEQ ID NO: 678663 - DNA, 771 bp, Homo sapiens
tgtaaattgttatacatattttaaaggttatttcagaagtttaaaggtataaactttgtaaacttgacactgtaattttagatacttgttctgaagaaataattgtggatgtataaaatgatataaaatatataaggtcttgactttataaagagaaaaattggaaactggaaaatgggttcaataaattcttatatgtaatgaaaaacattatgcagctaataaaagtattattatcaaaacacttaatgacctagatcttggggttagcaaactatagccaaactatggcaaaatggcctgcaatctgctttgttttttamttttttcttttgaaacaactatatattcacgggaagttgcaaagagtacagaaaggtactctgtacccctcaactagtttcctctactggttaaatcttactacagtgcaatatcaaaccataaaattgacattagtacaatatgtgtatagattcttgtaattacaagtacaatcaagatactaactcttccatcaccacacaaatctcccttgtgctacccttttatagtcatacccacctcttcttttttccttggttagtctagctagtggtttatcaattttttaaatctattcaaagaaccaacttttcaccttgttgatcccttgtataattttttagtctctattttgtttagttctgttctcatctttattatttcttctactaattttgggtttgatttgttctggctcttctaattccttgaggtgcaactttggat

SEQ ID NO: 678664 - DNA, 638 bp, Homo sapiens
cagaacagttcaaagtttgggccataaaactggagaagaggcaaacacaaactatcagataaaaataagaatactctattagttaaggttctccaaagaaacagaaccaagaggatggatggatagagaaaaaaaatttattacagcgtaargaattggcaaagtgattagggaggctgagcagtcccatgatctgctgtctgcaagctggagactcaggaaaggcaatgatgtagttctcaataccagagggctgatggtgcgagtcacagttgagggcagaagaccgatgtcccagatcaagcagatggcagacagcaaattcccccttcctcctccttttgtcatgtttaagcttgcaacagattggatgatgcccatccaccttggagagggcaatctgctttacccagtccactgattcaaatgttaatatcatctgtaaataccctcacagcacatccagaaataatatttaatctggggaccctttgtctcagtcaagttgccgcataaaattaaccatcataaattacaaagagtgtaactaaaacatgggattgccttcaccatgggcttacttagagggcaaaatccactatgagatttgtaacacttacaggaattttttctgggag

SEQ ID NO: 678665 - DNA, 1401 bp, Homo sapiens
gtaaggttatctaataggtgggtaaagtgttatttgtctgggacttgrttaagaagatgaggtattaggcattatacacacaatatataggattaggatatgtatttaggaatcatttggaggcatttgtggtattgtaaaaaaaaaaaaaacaaaaaacaaaaaacaaaacaaaaaaaccactagatttaaatagtagggttaaatttacagactttgccactttccagctttgaggccctgggcaggtcactgcccctgtctgagtctcagtttcctcttctctgaaatcacaataggttgttgcgagtattaaaggaaaggctatgtacattttataagtgtctagacaaatacaaggtacaattacacaggaaaggtgatggtgaatatgtgagaggagagcaaatgagattgccaagggagtgagcgcaaggagataggaaagactctttgggaatgcttacacagaaagggcctgggaagaggctactagcagaagagacagacaagagtttcaagactaagcatgaggtcaataatgacaaaaagtatccaagaaggatggggagaggtttcctgttgaaaggaacccatcaaattggataagttgctgctcaccaaatgctgaaccctcagaaaaacagtttcaatgacagtgtgacagcagaaatcagagataaatgaatgggagggaatatgtctctctggtagaacacctttgccactcagcatcagcatagatcctcaatgcatacaacaagatcaagatgttcctctttcttgctctctggacttttatgtcttgataccttcagcagtcaggtaagaggtttcaggagagatgctgggaggagcaacagaacaaaaccttcatagctactttaaggatgtggtaccacatattttaccaaatgagtttgtggtaccatttattttgtctttactgttgtatctgtaattacatgaatgtttcctttacttctccatgtaaataaccatactagtaaatttataggaggccaaaatccaagggtagagtgcactgcaattgccatttgtctcgtgctaattcttcaccaaactcctgtttctgttttctacatggcagtagttcttcatattctggattatagtttctataaactgcccaagtactaatagccttcatttttattctttatgctccttagtaaatctttgaataccttgcagtctgtgtgtatgtgtggtagtagttgtggggctgggactgcatgtaattctatcggattatccactctaccttccttacaatgtttctgattcttctgatagaatggttttcttctattaaatcacagttttagtgaatctgaaagcaaaagttaccttcctttttcccagcaaaattgtattcta

SEQ ID NO: 678666 - DNA, 622 bp, Homo sapiens
ttggggaaaaggaaagagttgtttttgattagtctttttcctcccctctctcttcctttatagtttttcaaaagttgtcaatccttacttactcacatattcccattttaatagcatatatttcatgtacagcttttttgaaatatgtacagaactaaaatatctaaagcaaaatccaaatttcctgtcttctctctgttgtgatacttttgcaaataaacttcacacaaaagtaatatctggtaatgtcacatgactagaaactaaggcattctagttagaagtcaaaggagtttaaataataacttgtataacctataccaatattgtgttttcttctgtttcctattgtagttcttcacagagcaacacagaaggtaaagaaatcaaaatgatgtcccaaagtttacgtccataggagctgatttctcaatggggaatatttaaatatgaatgattcccacaagcatactgagcacatmgaaaaaaactgtaagagctcactgttttgaaaaatctgctgtgcatactaaagtggctgcaacttaaacaaacatttgaagcattgtgcaagaaggaaaattaacatagacagtggttagctatcttcaggaaagtgccc

SEQ ID NO: 678667 - DNA, 609 bp, Homo sapiens
agggctgccggggcgtggtctcagatcctgggactgcgccaacccctgggccccctgcatctcttacagacctacacggctgtgtattatgtcttggcagacctggtgatgctgacgctgtacttttactacaagttcaggacgcgcccctctctgtgtgagtatggggaccgctctctgtcagatgctctaccagcagcagggggcagttggggkggggggggcgcctggagtgtgggaggaagcgggtttcccatggctgggtgataacccaaacctcggaaagccttccccgggccttatctaagagcctgagccttaactggccaagatagaggcttgagggcagtgagcgcgtcctggcccagaccacaggccggttcctctcgcccaggggctcattcagcagacacagctccagctcctcctctgtgtccggccctgggcttggagctggggaaacgagggcaagtcacacaggctgcctctgccccagccttcaggaggagcaggagacaaggtcagcttgaggctatacagacacggggagggacctggggaggaagttgtctcatcagcgttcctgcttcgtgtaaccccctcctgacc

SEQ ID NO: 678668 - DNA, 649 bp, Homo sapiens
cccatgtttccctggtaagcactcaaacagagaattagggccaacctggcaagaatatggcctgtctgccaattgcagcttctacctgagggagccctgtggaccaaaacactcaacaaaagaaatgtgagcatggagacagccaagacccaggarcaaaccagagtcaaagccagagactcaacctatgttataccagaatcaaaaccccaagggaatcaaagaagataaaagcaaaaaacaaccatacaaacaaacaaaaacacacattaaaaaaatccaaaatataagaacatccaaacaacagcaacttcaaatatagaagaaaaatcagtcagcacaggtgagaaagaaccagtgtaagaactctggcaactcaaaagccagaatatcttcttacctccaaataaccacaccagttccttagcaatggttcctaacacggctgcaatggctaaaatgtcagaaatagaattcataatatggataggaatgaagatcactgacactcaggagaaagcagaatccaatccgagaaattaaaaaatatcatgaaagaatataggagatgaaaggtgaaatggacattttaaaaaagaaccaaactgacctgatagagctgagaaactcactttaagcattccataat

SEQ ID NO: 678669 - DNA, 2501 bp, Homo sapiens
tgtaagctatatgagcaattccctacctctaatacccaaggttaagtacagctgctacaaaaggtgagtccatatccaccatatccgcagagggcccctaaggacctgtaagtgggctcccttccacctgcctctcactgcaaatgcagaatatcacccactccctgtctgtccccaggttcagctcaaaaagatcagcttagtcagggcacgatgcacacaggcagcaccctggacagcaccatggaccactgggccgagggttccccacagcccttctctgtggagccctcttcgggaatcrtgccggtggggaagatcagaagttcaaagtaaaattctccccgttggacattggagacttcgagagcaaccttttctgccagtaagaaaatgtgctcgccacaacacccttcttggcaggcacaaagctctgtggctcttatccccttttctgtccaaccactgccaccatcctttctggccctagatccctgcacatccccaaattatcccttttccctttggaaggatctaaagggtccaccctttagagaacaaggagaatatggtctttgtcctgctcatcaacctctccagatgcttccccctgcttactttccccttcccagctgcatgtaggattccactgagcaacagactggtgatagccaggtgggtttcagtccttgtgcaagcatgaacttaggaaagctttcttgtaccttctctgagacacagtttcctcatacataaaatgtaaatataatacccagctggtggaattgttgggaaagttaaatgagttaattcaaataaagtgcttacaacagtgcctggcacacaataagcacgataaacattaggtggtagtggtggtggtggtggtggagttggtggacctggtacacagcagtgagagaaaagctaacccaatgacatctgacaatgaaagtccctgatgaggtacttgctcccaggaaaacttgaagaagtacaatcaccttacagaaaaatcctgtgagctgtgacctagggtggcagagacctaagtgagctgctggggcctccttgacctcctgcagtcataccactgagacccctcccacacctaggccacctcagcttggtcctggagctgagcatctgctcatatccagttcaccttttccgaggagctcaggatacttttttaggatttccaggtcactttccatatcccactaaatgcctatgagagagaccagagggtaagactgtgctcattttgcagcaggaatattttctcaacattgatgggggaagtaacctgcggccatacttaggtacacagaaggagccaaattcaggctgcttatgctcagcccagtcatgcactcaaggcactgagtgatgctattgaccaagacagacccagcctctactcccatagagctcacattctggtggatataatattcatttccaaccaactaagaaagcaacaactgatgacaaaataaaacaaataaaaataaccttatcctctcaggattcccaacctgccacctggagagcaaggtccggtcctggtagcaaaagggcggagcaccttgcccatctgccattttgatctgaaagactcggactacataagtggccatcagcgcaacccagagctccgagggtccagtgggggagctctggatccaaacacccgggtgattgagttcaccactgtgggcataggagggaagaatctccggtgagttgcttaggtttacattgattgaattcacatcggtcctaaagaactctaaaagaattcagatagatgagctagacctattcctataagcaggctcgatatcctggggtttgacctgagttttagaggtttgactttagagaactgttacgttaagaaagctgaattctgtctccttagttttgccactgaggaaaatatggaagacacaaaagtataatccctgaccacctccttaaccacagaggatcattggcacagttgtgcccttggcagcattgttattccaaagtccagaaccctaccctgactgtggatcgctagaggagatggagttttcatttccacagtaacaaagtgctctgaacagttctgcttcccagatgggggactgggttggggccaggttctaagaaatttctcttaatcctcaatcccctgtcccactctcttctgtcaattctccccaccctggccaggacctttaccatcctaaacccaaccaatagcacctactccttctgctggatctctgaagaaattgaaagtctccagaaccctgcagcattcacatgccttacagaaaagggcttcatccaccctgaaaagaaagccgaggtatgtgcagatgagaaccactcaacccaaggcttagatcactctagccattgctgtgtagaaagtgtgccatagacagtaagtggaattaggaagaactgcctgagggtgtagtgcatcaatcaacaagtattta

SEQ ID NO: 678670 - DNA, 680 bp, Homo sapiens
tggtgtctccatctggaatctgttttaagtaggagcatgtggattttcctattttaagatcagttcaagttgctgtcacctgaccacccacccccagcccccgaccccagaccccactaccagattcagggcaggtacttttgtatgtgctctgttgaccttggatggaggtgataaggaccttatgacagtcatccatttggagacaggcttgtgtatcacttgagcttagtacaaaacacaatcaatcatgttccctagggggacttcttgagactcttggactaatgcggttgcctggtctgaaaacacttaagctgaagaaaaacttctgagactagatgcattctcaggaagtgaaagaaaattccagggggagtgccaaggtgaaagggaatgactaaagaccttcctgcttcctcatcaaaaggactgctctatgtcttsgaccgtcagcacacctgttttcctctctgctctggcttcagctcttctcacaggctttgaagatgttctcaagaatcacccacctttaaaatgaaaaaaaaaaaagttttcttcaaccctggtgcccccgacgagcaccccatttctctccttcccttcatgcttgtctccacttgctggctttgcctcgtcacccctcatttctgcctccccgtttcctaccctgattcctg

SEQ ID NO: 678671 - DNA, 680 bp, Homo sapiens
tggtgtctccatctggaatctgttttaagtaggagcatgtggattttcctattttaagatcagttcaagttgctgtcacctgaccacccacccccagcccccgaccccagaccccactaccagattcagggcaggtacttttgtatgtgctctgttgaccttggatggaggtgataaggaccttatgacagtcatccatttggagacaggcttgtgtatcacttgagcttagtacaaaacacaatcaatcatgttccctagggggacttcttgagactcttggactaatgcggttgcctggtctgaaaacacttaagctgaagaaaaacttctgagactagatgcattctcaggaagtgaaagaaaattccagggggagtgccaaggtgaaagggaatgactaaagaccttcctgcttcctcatcaaaaggactgctctatgtcttggaccgtcagcacacctgttttcctctctgctctggcttcagctcttctcacaggctttgaagatgttctcaagaatcacccacctttaaaatgaaaaaaaaaaaagttttcttcaaccctggtgcccccgacragcaccccatttctctccttcccttcatgcttgtctccacttgctggctttgcctcgtcacccctcatttctgcctccccgtttcctaccctgattcctg

SEQ ID NO: 678672 - DNA, 1916 bp, Homo sapiens
cccagatgaatagtgttatctgagaatcatgatgggatgggctgtggcacaggacccaggagcactgagtcccgctcatggccaggccactcccggtgggcaacatgtccacagagaacaatgttcagttactgagcatgcaaaatctgtaacccagcaggagggcagatgaggtgcaaagagaatgcctcatgctttgacgataggatccctggagccttgaagcatagtgggccagttgcctccttccctccatagcacaccccagatcttggatcttaccattgggagaaaaatgctcactggagtgtggcaaccagcaaggactgtacaaaagaggaagacaagacagaatgtttcccatccctcacacccccttgcatgacttcccctatgtgtcctccacgattctcctttgtgagaatccagagttccaaattaggaatcacagagcgggaatccagcaatcaggcagcatctcatagtctccccttcactccccagccttcgtgaccgaaaacaatgccttgatatttgaagagcaccagatatgtaccagtgccaacctgcaccacatcctgcagaccatagagagcggggggctgttcgtcgaggatgagaacaagttcatcttctgcaatgtcctggtgggccgccaagccaaggctcgtttcaagatcagcaacgtgggaaagatcacctgtgatgtcaacattgtagtcaggcctatctccaataaggtaagacgctcccaatggcccctggcccagcatggttcacataaagctggaaaaagggctctcagcatcctctgctctggagcctgtatgcgtgagtggaaattatctggccctgctggaagttatgtgaagtaaccgggggctttcccctaggccagtggtgatacatttgtcccagtgggtgtctcctccgggtacctttgtgataagtacgcatggacgagcaaaccgcattcctccattgaatgctcactatgtgcctaaaatagacaaagcatggtggggagaggctaaggtgagtgccagctccagacaggcctacctccagctgcatattctgctggtaagggagatttgggggcatcagattctgaggataaggtgaaatgatgagcatgttttagcccttcccatgtgacaagcactgtgctaagtgatttatatttactgcctccttttgccctcacaacaactcttccgactttgtattattatcccgattctacagttagggaaactgaggcttaaaaagctaaatccttcccctaggtcccagagcctgagaatatagggctgggcttaaagccaagcttcatccacatacaagatgaaataattgcccatctcagggggctgccaggctcgaaactgccttttctctctgagtcagatcatacwttttttcacagcagaacagaaaattcaggataccaagagaggtcttaatcagtgggtttccgtcacccttaatttccaatccaatgtgcggcaaatactctagttttatgaaggctgcttcagttctctgcctgaaagtagaatctgggcccaggaggtcctcaggccccagagctggcattgttcacagttgagggtggtggggaggtcaccaagggtgttggtatcagcctagagctacatatggagtgtgcattcctggggaatgtcaatgcagagaggtatggttggggagactacataatccgttttatgacttccttcaggccctggtgactcccagtcattattctctgatttttttttttttttttttttgagacggagtcttgctctgtcgcccaggctggagtgcagtggtgcaatctcagctcactgcaagctctgcctcccaggttcacgccattctcctgcctcagcctcccaagtagctgggac

SEQ ID NO: 678673 - DNA, 1916 bp, Homo sapiens
cccagatgaatagtgttatctgagaatcatgatgggatgggctgtggcacaggacccaggagcactgagtcccgctcatggccaggccactcccggtgggcaacatgtccacagagaacaatgttcagttactgagcatgcaaaatctgtaacccagcaggagggcagatgaggtgcaaagagaatgcctcatgctttgacgataggatccctggagccttgaagcatagtgggccagttgcctccttccctccatagcacaccccagatcttggatcttaccattgggagaaaaatgctcactggagtgtggcaaccagcaaggactgtacaaaagaggaagacaagacagaatgtttcccatccctcacacccccttgcatgacttcccctatgtgtcctccacgattctcctttgtgagaatccagagttccaaattaggaatcacagagcgggaatccagcaatcaggcagcatctcatagtctccccttcactccccagccttcgtgaccgaaaacaatgccttgatatttgaagagcaccagatatgtaccagtgccaacctgcaccacatcctgcagaccatagagagcggggggctgttcgtcgaggatgagaacaagttcatcttctgcaatgtcctggtgggccgccaagccaaggctcgtttcaagatcagcaacgtgggaaagatcacctgtgatgtcaacattgtagtcaggcctatctccaataaggtaagacgctcccaatggcccctggcccagcatggttcacataaagctggaaaaagggctctcagcatcctctgctctggagcctgtatgcgtgagtggaaattatctggccctgctggaagttatgtgaagtaaccgggggctttcccctaggccagtggtgatacatttgtcccagtgggtgtctcctccgggtacctttgtgataagtacgcatggacgagcaaaccgcattcctccattgaatgctcactatgtgcctaaaatagacaaagcatggtggggagaggctaaggtgagtgccagctccagacaggcctacctccagctgcatattctgctggtaagggagatttgggggcatcagattctgaggataaggtgaaatgatgagcatgttttagcccttcccatgtgacaagcactgtgctaagtgatttatatttactgcctccttttgccctcacaacaactcttccgactttgtattattatcccgattctacagttagggaaactgaggcttaaaaagctaaatccttcccctaggtcccagagcctgagaatatagggctgggcttaaagccaagcttcatccacatacaagatgaaataattgcccatctcagggggctgccaggctcgaaactgccttttctctctgagtcagatcatactttttttcacagcagaacagaaaattcaggataccaagagaggtcttaatcagtgggtttccgtcacccttaatttccaatccaatgtgcggcaaatactctagttttatgaaggctgcttcagttctctgcctgaaagtagaatctgggcccaggaggtcctcaggccccagagctggcattgttcacagttgagggtggtggggaggtcaccaagggtkttggtatcagcctagagctacatatggagtgtgcattcctggggaatgtcaatgcagagaggtatggttggggagactacataatccgttttatgacttccttcaggccctggtgactcccagtcattattctctgatttttttttttttttttttttgagacggagtcttgctctgtcgcccaggctggagtgcagtggtgcaatctcagctcactgcaagctctgcctcccaggttcacgccattctcctgcctcagcctcccaagtagctgggac

SEQ ID NO: 678674 - DNA, 1807 bp, Homo sapiens
  misc_feature 645, 646, 647, 648, 649, 650, 651, 652, 653, 654, 655, 656,657, 658, 659, 660, 661, 662, 663, 664, 665, 666, 667, 668,669, 670, 671, 672, 673, 674, 675, 676, 677, 678, 679, 680,681, 682, 683, 684, 685, 686, 687, 688, 689, 690, 691: n = A,T,C or G
  misc_feature 692, 693, 694, 695, 696, 697, 698, 699, 700, 701, 702, 703,704, 705, 706, 707, 708, 709, 710, 711, 712, 713, 714, 715,716, 717, 718, 719, 720, 721, 722, 723, 724, 725, 726, 727,728, 729, 730, 731, 732, 733, 734, 735, 736, 737, 738: n = A,T,C or G
  misc_feature 739, 740, 741, 742, 743, 744: n = A,T,C or G
cagaggccaactgtacatagctagtttgggaaggtgggcagagggaaggtgaagaagaactgcaagcaaattctgaacttttctgtattarcctgcttgtgctgccatatcaaataccatagactgggtaattcaaacaacagaaatttatttctcacagttctggaggctagaaagtccaaggttaaggtgctggcaaggtaggtttcaccctgagagctcttctcatttataggtggccaccatctcactgtgagctcacatgacctcttcttcgcgcaagctctccgatgtgtcttcttttagggcactaatctcatcacgagggccccaccctcatgacttcatctaatgttaattacttcttagaggccccttctccaaacatcatcacattggaggttagggcttcaacatatgaatttttggaggatacaaacattcagtccatgacatccttttggtaggtttggtttttatattagtacaggtgtagtaaacctgaaattatttttagatgtattatagcattaagcaaactatggaagaagggattacaaaaacgaaatgggggaaggtataggggtggtctggaattgaaaatactggtgtaaattcatgatttctaaaacacatatatgtaannnnnnnnnnnnnnnnnnnnnnnnnnnnnnnnnnnnnnnnnnnnnnnnnnnnnnnnnnnnnnnnnnnnnnnnnnnnnnnnnnnnnnnnnnnnnnnnnnnnagctgtgtttccatgaaaaaggttgacatgctgatatgccacccagcatttccatgcggagtgtggtcctcctagggcggtgaccagctgatgtgcctgaggccactgaggaaaggtcaaaagaagagccccaaacttcaatttgagactccagtttaaatgtggaagaattttgtggtaacttctgaatgaaagttaccacatacatgaaatggcatgggaagaagactctctccttgttcctgccagtctgggggagctccaagaagcagcccccacacgtttctctgctgtgggagacaacgggctctgcccagaactcttcccaggctgcggctttgtccctgtgtcatctctgataccccatctccagagagctcctgcagtgaggcacatacataatatgggtgcatgaaccattttttaaatcatcttaagacaatttcaaggcgttaaagcttatggaagttagtgacacccatttccccccacagtcagggtagccccctgtcctgggtcaagcaaagatgagtatcttgtgtatgtcttccaggcatttgcagcttccctccccagtcagtggttcctgtttcttgccccaggagccacagagcatgcttctctctgggctcttggcctcagatgcggtctccttggcagcctggtgcttccatcctctgctcggctaccttggttggcgtcttctggaccctgtcagcacatccaggcacgtcctttctgcagtgcctctcccagctggatcttgcctcctcctcccatcgctgtcatctccctccccggctcttacatggcatgcctttccatccaactcggtcccccttcctaggttccaacctcagacctctccccttttttccatcctttgggtgatttcctccattgccacagctgcatcagctcccatctgtttgctgctggctccccacacctatcccgcgctcatcgctcttgtccttcacactgcgacaccatcaccgtcaccaccaccaccatgcttgcagagcaactccggatagacgtagacgttgctcaagtccactgt

SEQ ID NO: 678675 - DNA, 1785 bp, Homo sapiens
tggcccagaaaagggggtacagatgtgaagcaggcgagacctgcagccaccccacatgctttgttcaaaccctcacctgtgctgttggcccttgagtgggtcacgagctccaaggggggaggggacgggacctggccacacagctggcagggaacgaaggaggtctggatgcctgtcaaaccagctatggtgacacgtttctgttcgtgccccatgcggtgtatggcgtgctgcgtgtgatggaggggctggatgcrttcgatgacctgatgcagcacacgcacatccagccctggtacctgcgggtggagagggccatcaccgaggcctccccagcgcactgaatgtccccgcgcatagcatatggaaggcagcggaagacgccagctgccatggcctggggccactgggccagcgcctggcgatactggttgggggcaggatcattctgccccttgtccacgcacccccaccagccctctcgcttctaacacagggcacctgctggggctcagggatgttagggacgagttccagccctgccactgccttggggcgacccctccctgtccctgcctccctgctctgccgcccctcttcctggaccctcagtggctgtcccatggctacatcctgtgggtgggggccctcgacaggacagcaggacggtttgttttcagtggaatcccatccctgggttcccctggttcccactcttcccaagcctcccgggactgggacatgtttgcaataaaggaaaggtttgtggcgcctgtcatggcaggcatctcatggagctccgtgtggctgagtgctgcgtggggctggcggtcaagggaggcatcaggcttgggctgtgccagcccttgtggtaactaaccgctggcctggggcttcccaggtgtcaggcacggtacggctccgcaggctttgtgtggcatcgtccccaggataccactcagggcacacagctgggccgtggagcccagcagccagagtgcaggtcggggcaccctacccacggtggggctctgcagtggggtcactcatcaagcctcagtttcttcgtctgtccccgccttgtgggagagttcagtgataggagcaggtgcagtgcacagagccgggtcacctggtccagggcaccaggctattcagacccctgctctacagacagaaccaagccctctcaggtggcggccccgggcttcagctccaggctgggccaggctttatgggagaagaggctctgccttccagggtgagtgtgggttgtgggtgggaccccctttcctgcacagagtacccaggatggggctccccagtcccgacttaactgaggtggggtggcctgctagggaccctccagaggccagtgagcccaactccacccactggcccttccgactggggggactgggcaacgtccccataccctcttgagaaacttttttgttgtttttttttattttttgagacagggtctcgctctgtcacccaggctgggatgcagtggtgcaatcatagctcactgcaacctcgacctcccaggttcaagtgatcctcccacctcagcctccaagtagctggaacaggtgcacaccaacatgcccagctaattttttgttttttatattttgtagatcctgggttttgctgtgttacccaggctggtctcgcactctagggctcaagggaactgcccgcctcagcctcccgaagtgctgggattacaggagtgagccccgacgcccagccaggaaacttttaaagttttattttctt

SEQ ID NO: 678676 - DNA, 631 bp, Homo sapiens
gctcttttcctttgtttgtttgtttgtttgtttttgaaacagggtcttgctctgttgcccaggcttgagtgcagtatggcaatctcggctcactgcaacttctgcctccctggaatcagcgattttcctgcctcagcctcctgagtacctgggactacaagggcatgccaccacacccatctaattttttgtatttttagtagagatggggttagccatgttggccaggctggcctcaaactcctgacctcaagccatttacccgcctcaacctcccaaagtactaggattacaggtgtgagccactgcgcctggcccaggctctttttctagcctccaaatctttgcctttgctgttcctcttactcagaacaactttcttcctcattactttcgtaactcctattcacccctcacatccagcgtggatctcatcactttctatagggaacttcgttgggtcacacccggcctgtgyttcctctcacgtgtttaggcacacacatgtaatcgtacggtttaaatgtctgtgtcctgctataggagggtttctcaatcccaacacaattaacattttgggctggatatactctttttttttttttattgagacggagtctcgctctgtcac

SEQ ID NO: 678677 - DNA, 1021 bp, Homo sapiens
gtatgttgggttctttgaatggtaaaggaggctgtgactgattattgataagtactgaatagaacatggtggccagatccacacagtcaacacacaagttggtcattggagatcttcaactaatttcattatgttaagtattgaagccttgatggtggaaacttgagcactgggatttcgataattaatagttcagtgcctttcattggtgaaatccttttaagactggccaaataaaactactggaaggagaaattgtgataacaatcaccttttcttcgagtaaatcttgaataccaggtcaaaggccagcagtacgttgtttcaagagatattgtggtatgttcactacctttacccacagggccagctctacaggttttcactctgtggctctaactgggccagggacttgggcttattccagtgtcacaggcagcatgcaatggcatcttttctatgcctataataggaaaactcaaagcaagaggagccaccacaatggacggctgttatttatttgttgcttgaaataattattttaattttttatttttgtgggtatatagtaggtgtatatatttatagggcacataacatattttgatacacacatgcaatgcataataatcacttcaaggtaaatgggatatccatcgactcaagcacttaatccttcatgttacaatccaattatactattgtagttatttttaaaggtacaattattactgactatagtcactctgttttgctatcaaatactatgccttattcattctttttattgtctgtacacattaaccatccccacttccctcacctaacccccactacttttccaaggtaattatcctccttctatttccatgagttcaattgttttaacttttagctcccacaagtaagtgagaacatgtgaagtttatctttctgtgcctggcttatttcacttaaaattatgatctccatttccatccatcttgttgcaaatgactgaatcttgtttttkttgttgttg

SEQ ID NO: 678678 - DNA, 1742 bp, Homo sapiens
tgttacttctctgtagaatgttcttctctaagatatccacacagcccattaattcctataccttttccaagtttctgctcaaatgccaccttccattgacacctttcttgaaatggtctcattgaaaatagcagtccctcttcctgcctgaccatccttatacccttccctgctttgtgtatctacattgcagttactgccatttgacccatatatagatttttttgtcttctctcactasaatatgaggtttaggaaggcaggtatcttcaaccgtttggttcactgctgcatctgcagcaccaaagcaggacctgaccacacaaaccatgtcctcaataaatatatattgaataaatgaatattttgttaattttaaaaaatgaaaccaatccttctttcaagatgagaaaccactcttatttctctcttgatttttttctctctctgagcagtgaaagttatataatcatattagcttatcccataaaaatgtgattagctaacaaacatgctcttttgtacatttttgtctaatttgcctaacattcttcctgctgtcctattgtaatccttgctagcgatgcttggcttatagttggcactgacacatgtaagctcatgtcccagctctgctgccagtggtatgatactgagcaagtgataacattgtcagttacctcatctacaataaatggggcaatggcatagaccacactgtattgtcatcagataaactgaaataatggatgccagtgcggatcctggcccatcagagatggggaaaatgtaagtcagtttccttttcttacaagcacgctaaatctattcagcctggcactttcccgtcaaggaggagtttcttaaaaattgctaagtggtatggtcgaggtgggggtggcggggagaactcagaggagggagatgaagtcataccaacatgcccctgctcacccctttccaaaactcagctatttggactggagtgatttgccacagagagaaacatgccctttgccctgagacaaaggggagcttttcctgaccagcaaaagctaaaatggatcctctgccctgatttaaaaccaaacttgtgggtgagaagccacatgattcatgggagaaaatgacttgactccaaatatataataaaaagtatggaagcaacacacacacacacacacacacacacacacacacacacacacacatgcacacgcacatcaaaagaaactgacttactgaagacggaaatagaggagagtggagaattggagaaggaaaaaggaagatgtggtcagtcaggcaagacgtctccaactgtgccaacagcactcagccatccaaggggcagggaatgctggcgtagggcaggatacttttccatacatctctatttatacaagcacctctgatagtctcacaaagtagttattgtaccagtaattctctttcatgagtgagggacccagggctcaggatgacggacacacttgccccaggccacacagttaacaaggagcagaacccggtctagagccacaagccacaaaagagcaatgcacagccggcttcctagcaccaagcactgctctctgaccaggaggcccgctaatcactgcagaggccagatacagtccacaagggcaagtaaacacagagagaagccagcgggcgcttcaacggaggatctgggaataggtcaggagtccagctggctgggtagagctaggccacatgct

SEQ ID NO: 678679 - DNA, 667 bp, Homo sapiens
gccatgggagataacacataaatcatgaattgcaatgtaaggcatggtataatttttcaaaataaaaataaatgaaaaagactaatagttacttaatatatgatccagaaactttatatgcattgacaaatagccttaggaaattagtagtagtatcaccatttgcacatgaaagtaagtacattttccaaaatcacggggttagtatagaaatgctttattccagatcctatgactgtggccgttctgttgctattgaagtgtcaactgaaagggtagcaaaaccaggagtggaaaaagtgataccaagtcactatgatattgtttgtgtccctggatccaaccatggctagactttctgctaggtgaacctccttttctttttgtgtttaacatagtatggtttgatcactgttgcttccaatcaagggtaccgactaacacgcaggtaaaatgcaacctgaataaagtcaacaaatgataccatagtgtatcaccagtacatgtcaatgatgatgtgagcctaracaacaggagctagtatatatataaaaaaaagaacaaacatttgctgagtacctatcatataatatactgtcagatttggtcctcataaaagccctgtgaggtccatattatgatgatctctttttataaatgaagaaat

SEQ ID NO: 678680 - DNA, 607 bp, Homo sapiens
actactaatattaatcaaaggcaaaagttcagtatgactcttttaatcttagaggcagtataagacagtggtttttatttttatttcttattcttatttatttatttaacagagatggtgtctcactatggtgaccaggctggtatcgaacttctggcatcaagtgatcctcccatctctaccacccaaagtgctgggagccactgcacctggccaagacagtgttttttcctgcctcagcctcccgagtggctgggactacagacatgtcccagcatgcctgactaattttttttttttcgtatttttagtagagatggggttttaccatgttggccagggtggtctcgaactactgacctcaatcatccacctgcctyggcctcccaaagtgaacagtgtttttttaatatatgaactttggagatagtctgaattctaaccctgccacttgtatgttaggtactaactagtcttagcattttaataaactggaatgggttgccttccttctgactctatgtattctgtcctaatgcagtagaagcaaaaaggaatcagtcacctaaggtgttttcaaataacaactaccacaactttttcacca

SEQ ID NO: 678681 - DNA, 1799 bp, Homo sapiens
ccctctcgccttccctgccctgtgcacttaacactctgaccacaccggactactggctattctttgaatatgtctcacacgttcacacctttgggcctttgcaaatgtcatttcctttctgagactcttttcctccaccataagaccagcttttcctccaccataagaccagctcagacatctcttctctgtgaacaccttccttgaacttcctcccccaaacagaatgagttactgccttcttcatgcacccacaaccttctttatggtattttattataatacgacattgcatctttttaatttgctttcctgtttgcctctccccctatactgtaaaatgttgggagaaataattaagtgagatagataggttaactacttgtacggagcaatctgcaatttttagtagcttaaaggcacagaaagtttatttctcattcaggtcatagtccgatggggtatttggccatgcagcaattctggttccccaggttcctttcatctaagggctctctcccttactgtaaagcattgggagaaataattaagtgatactgatacctaggagtccttaaagatatcagcatctcagtgaataacctcttagcaagtataagtcaataatcaggcagaaattcttgcctacaatatagtaaaaaacctgagttttatttaagagaagttgtaaactatttgggaatgtgttctagatgcatcattcatccctggagaaatataaaagctaaaagaaagcataggtaatacatttctgaggtcaagacaatcatgatactgctctccacagtggtggctgacatacacagaaacgaataaaacagatcggtgagggtctctgattaaatacaatttccacagcatttgtactgaggaaccctcaagttttggagaaatgcaggacagaaatyagctttcatgaacatttcattgcctggtctatgtgaaggaggtcctgtcacaggggaatgcggaaagctctgggctgagttactttgaatccttctttctcaataaatgagcctgaatttccaccttatcaaggtcaacacggacagctacagttcaaaagaagatttttccattaccataatggattgcaataaaaaccattggccgagcctcttcctcctcatcttggcatttacaatccaaggcttagtaactttcagagtaaaatgagttcaccttttattcagacttttatttcatgcagtaatttcatctgcttgtgcttatacaagctcaacatctctctggttccctctctcctggctctgatttccctactgcctcaggccagaccttctaagacaatctttcctagcagccaatgccatggttgttgctcccaggactgttaaaaatagaccctggtctgctgcttcgatccttaaagaaaaagagatgagatcattttccgcttggagagtagatccagactgtgagtgattggcattagggcattcaattgcagaagaaacaggtgttaaagagacttctcccatcttattaagcatccttttcatacgttgattcacagacttgtttcaattctcatgactgaataggcaaccctgtaatttgtcagctatatccatttttccaccccctggcaacagtttctcttcagtttctgccaagattgtctattgtctccataagtttctgcccaaggtaagtgacagaaggatggccatatgaaattaaacagcaaaaagcaacaggcatgtaatttaacagaactaccaggcaggaacatcaatctgtacttttatttg

SEQ ID NO: 678682 - DNA, 625 bp, Homo sapiens
gtcatatacttactccttttacccttgtcatatacttactattttgctttttaaaagttttttaaaaacttatttacaataatagctaatacttaaagttttttcaaacctgtgggaatacttatttaatcrgtgctaaatttcgtgttgtccttttaaaaaatgcaataattaattgagatgtttttaagctcgtctgttttccctaaacatcgggttgttcagcatattgcgatggggagagtgccacataatatgagacgctttgtaaggacttttcaaagggaaattttggagaaatgatctgatatttgggtgtatgtatacattattagtagccattaaccatgctcaattagtgatttcactaaagaaattgcttttgattagatactctgaattacaagatagagcatttactgtgtacacttgggtcagttctgggaaaggtattactttcttggaaatgattgttttttaacaagaacacttaccacagtttggatgaagggagcattttgtttaaaagccagaattggggtacattagatgtgatttgatgttttgcaatttaattgcttatttgcaattattatgtaaaaaggtttgaccattacaattttca

SEQ ID NO: 678683 - DNA, 625 bp, Homo sapiens
gtcatatacttactccttttacccttgtcatatacttactattttgctttttaaaagttttttaaaaacttatttacaataatagctaatacttaaagttttttcaaacctgtgggaatacttatttaatcggtgctaaatttcgtgttgtccttttaaaaaatgcmataattaattgagatgtttttaagctcgtctgttttccctaaacatcgggttgttcagcatattgcgatggggagagtgccacataatatgagacgctttgtaaggacttttcaaagggaaattttggagaaatgatctgatatttgggtgtatgtatacattattagtagccattaaccatgctcaattagtgatttcactaaagaaattgcttttgattagatactctgaattacaagatagagcatttactgtgtacacttgggtcagttctgggaaaggtattactttcttggaaatgattgttttttaacaagaacacttaccacagtttggatgaagggagcattttgtttaaaagccagaattggggtacattagatgtgatttgatgttttgcaatttaattgcttatttgcaattattatgtaaaaaggtttgaccattacaattttca

SEQ ID NO: 678684 - DNA, 1594 bp, Homo sapiens
  misc_feature 669, 670, 671, 672, 673, 674, 675, 676, 677, 678, 679, 680,681, 682, 683, 684, 685, 686, 687, 688, 689, 690, 691, 692,693, 694, 695, 696, 697, 698, 699, 700, 701, 702, 703, 704,705, 706, 707, 708, 709, 710, 711, 712, 713, 714, 715: n = A,T,C or G
  misc_feature 716, 717, 718, 719, 720, 721, 722, 723, 724, 725, 726, 727,728, 729, 730, 731, 732, 733, 734, 735, 736, 737, 738, 739,740, 741, 742, 743, 744, 745, 746, 747, 748, 749, 750, 751,752, 753, 754, 755, 756, 757, 758, 759, 760, 761, 762: n = A,T,C or G
  misc_feature 763, 764, 765, 766, 767, 768: n = A,T,C or G
ggcatggtggtgggcgcctgtaatcccagctgttcgggaggccgaggcaggagaatcgtttgaatctgggaggcagagtgagccaagatcgcgccattacactccagcctggatgacaagagcaagaattcgtctttaaaaaaaaaaaaaaaaaaacttcacaaaaaggattatgtactgcaacgcattgggcatcttgttaaacttgtctaactaatttttatttaaaactgataattattctattccttagatgtatttgaatttatttaatcagaggataattgtttaaatgtaagaatgcagttccatctattctgtaagctagagatcacacatcaacaacatttactggtgaaatttcgaatgaagtgcttcatttccacaagccagtgttctgactataagagaaaaattgtgtagttgacgtttttggcatgtggaagccactggaaaattatagataatgaaggatgttatttttatcataaaaggagaagggtaattaaggacttcagtgtaaacttagctaaatgaagaaaatagtcaggaatacaaaaatattaaagagtttaaccatcaaaacttttcagattaagattatttcattctagtacaataacacaaaatgcaaaattctttcaacttgaaacgttacccaacgggcannnnnnnnnnnnnnnnnnnnnnnnnnnnnnnnnnnnnnnnnnnnnnnnnnnnnnnnnnnnnnnnnnnnnnnnnnnnnnnnnnnnnnnnnnnnnnnnnnnnaagtaattaagaaattggtaatgacaaattaaattaaattaaatctwaattgccaaaataaaggttaccatgtaaattcaattatctagcacattcagatcaaaataatagtacaactctcacatgacacacttcataccatgtaatatatactagctgttgagaaagaacttttaagaattaaagagtaggcttccacatggcaggcattttatttacagtatattttaatattggcactgttctggttctagaaacaatacaggcttaggagagccaagaggaagtatcaactatttcaagcaattaggaaatacttacttatgctcagcacagacaccaaggcaggtctgacacatctcacacgtttgcccttgaaacttcggatctgtacacttacagacaccacactcgcagatgccccggccattgcagatctgtccgttgctggcttcacaagtactagtatccaaagaacagtcacatgcactgccagtgtagttggggttgcactcacacacacgacacttgcaaacaccatttcctgcaattaagcatatcatttctcaaaatggtaaaaatatacaatcacagtattgactgaaaagtaaaataagcaacaacatgtgagaaagtatacctaggggcgagactgaccctcaagctaccccttttctacttatgcaccaactaaactcaagatttttcgtggcattagatgggatcacatcttacaaccacttcaggccctttacttacctccacaaattaagccattggatctatcacagttgaaattatcacactcgcagaatttgccagaata

SEQ ID NO: 678685 - DNA, 1594 bp, Homo sapiens
  misc_feature 669, 670, 671, 672, 673, 674, 675, 676, 677, 678, 679, 680,681, 682, 683, 684, 685, 686, 687, 688, 689, 690, 691, 692,693, 694, 695, 696, 697, 698, 699, 700, 701, 702, 703, 704,705, 706, 707, 708, 709, 710, 711, 712, 713, 714, 715: n = A,T,C or G
  misc_feature 716, 717, 718, 719, 720, 721, 722, 723, 724, 725, 726, 727,728, 729, 730, 731, 732, 733, 734, 735, 736, 737, 738, 739,740, 741, 742, 743, 744, 745, 746, 747, 748, 749, 750, 751,752, 753, 754, 755, 756, 757, 758, 759, 760, 761, 762: n = A,T,C or G
  misc_feature 763, 764, 765, 766, 767, 768: n = A,T,C or G
ggcatggtggtgggcgcctgtaatcccagctgttcgggaggccgaggcaggagaatcgtttgaatctgggaggcagagtgagccaagatcgcgccattacactccagcctggatgacaagagcaagaattcgtctttaaaaaaaaaaaaaaaaaaacttcacaaaaaggattatgtactgcaacgcattgggcatcttgttaaacttgtctaactaatttttatttaaaactgataattattctattccttagatgtatttgaatttatttaatcagaggataattgtttaaatgtaagaatgcagttccatctattctgtaagctagagatcacacatcaacaacatttactggtgaaatttcgaatgaagtgcttcatttccacaagccagtgttctgactataagagaaaaattgtgtagttgacgtttttggcatgtggaagccactggaaaattatagataatgaaggatgttatttttatcataaaaggagaagggtaattaaggacttcagtgtaaacttagctaaatgaagaaaatagtcaggaatacaaaaatattaaagagtttaaccatcaaaacttttcagattaagattatttcattctagtacaataacacaaaatgcaaaattctttcaacttgaaacgttacccaacgggcannnnnnnnnnnnnnnnnnnnnnnnnnnnnnnnnnnnnnnnnnnnnnnnnnnnnnnnnnnnnnnnnnnnnnnnnnnnnnnnnnnnnnnnnnnnnnnnnnnnaagtaattaagaaattggtaatgacaaattaaattaaattaaatcttaattgccaaaataaaggttaccatgtaaattcaattatctagcacattcagatcaaaataatagtacaactctcacatgacacacttcataccatgtaatatatactagctgttgagaaagaacttttaagaattaaagagtaggcttccacatggcaggcattttatttacagtatattttaatattggcactgttctggttctagaaacaatacaggcttaggagagccaagaggaagtatcaactatttcaagcaattaggaaatacttacttatgctcagcacagacaccaaggcaggtctgacacatctcacacgtttgcccttgaaacttcggatctgtacacttacagacaccacactcgcagatgccccggccattgcagatctgtccgttgctggcttcacaagtactagtatccaaagaacagtcacatgcactgccagtgtagttggggttgcactcacacacacgacacttgcaaacaccatttcctgcaattaagcatatcatttctcaaaatggtaaaaatatacaatcacagtattgactgaaaagtaaaataagcaacaacatgtgagaaagtatacctaggggcgagactgaccctcaagctaccccttttctacttatgcaccaactaaactcaagatttttcgtggcattagatgggatcayatcttacaaccacttcaggccctttacttacctccacaaattaagccattggatctatcacagttgaaattatcacactcgcagaatttgccagaata

SEQ ID NO: 678686 - DNA, 2059 bp, Homo sapiens
cattgacaggttatgtsgtctaaaacaatgaaacatatcctagaattgatcgttttctactagttgaattggcaacatcagtttcattatcagagggtacataaaagtagtggtgtagatctgaaggaagaaaagttctaccttctaaagcaactggaatagaggaaaaagaacagtaaagaaacgacatggaaggtagcacaagaaaagaataaggcagccagcaggtaagaagctaaagtggttacgagtaggagctttcagccgcacatatgtgggttgaaatttttctctaaaatcaggttggtggctgggtgcagtggctcacgcctgtaatcccagcactttgggaggccaaggtgagaggatcacttgagcccaggaattcaagacctgcgtggatgaaatagtgaaaccctgtctctacaaaaaaaatagttaaaaaataataaaataaaatggggttggcaaggtctaccttgaagatttaatgagataatgtgtggaaagggcttagcaaggtcctaacatgtgcttgggtagttctgaagccataaccacagacttgaagtctaaataactctttaaaaactcatgcttttcctttggtcctttcttggagaaagatctcctgttgtttagcttttgagccatcctagatgtcatccctgccttcagtttacctgtcattttcgtttcctgtctttgggatggctcatatactcatttcccccttcccagtctcactttgggacaacttctctgcccttccaaggttcataatcaggaaacagaagagtgattagtacatatttctagtccagaagtcctctcaagaagaaaaacaactagaatgatactgaagattacactttctaagtgaacaaacaataatatccatgaaagattttttaaagaattttatgcataactagaaatgctggggactaatgagctaaaacagtttggaattgtatatcaatgtatactaggaaaacactacccacaataaaatattttataatgaaatttggatttgaaattttttttttttgagacggaatttcgctcttgttgcccagtctggagtacaatggcgcaatctcagctcaccacaacctccgcctcccaggttcaagtaattctcctgcctcagcctcccgagtagctgggattacagacatgcaccaccacgcctggctaattttgtattttttaagtagagacagggtttctccatgttgaggctggtctcgaactcctgacctcaggtgatccgcctgcctcagcctcccaaagcactgggattacaggcttgagccaccacgcctgacctgaaaaatgtttttaattctacactgataatgcagcaagctcaaacctaagctgcaactctacttgtaaatggttgcaatactgtctttcttttcttttttttttccaagacagggtctccctctgtcacccaggttggagtgcagtggcgccatcatagctcactgcagtccagagctcctgggctcaaaggatcacctcagtctcccgagtagctgggattgatggcatgcagcaccacacccagctaatacttaaatttttttgcagagacgaggtctcactatgttgccccaagtggtctgaactcctaggctcaagtgatcctcccaactcagcctcccgaagtgttgggatttcaggtgggagccactgctcctggccaatattttcttattatataaatgacagtaagatttagatatgcagaaaaaaaggaaaaataaatgtattttcaatgagttatagtaagttcaaaattttaaaatgaagggcaagtattcaacctgacactgataacattagaatctaatcaaaatgggataacagcaaaagttatttccttcccacctatttttgcatacatcctgattgaccacctgcaagacttttactatgcttgaggtgctgctactaatttacattgtaggcctgttttagatgagtcatgctgtgaaaaaagctgtggcctcaactttgtgtggtcttttatgccaagttatat

SEQ ID NO: 678687 - DNA, 2059 bp, Homo sapiens
cattgacaggttatgtggtctaaaacaatgaaacatatcctagaattgatcgttttctactagttgaattggcaacatcagtttcattatcagagggtacataaaagtagtggtgtagatctgaaggaagaaaagttctaccttctaaagcaactggaatagaggaaaaagaacagtaaagaaacgacatggaaggtagcacaagaaaagaataaggcagccagcaggtaagaagctaaagtggttacgagtaggagctttcagccgcacatatgtgggttgaaatttttctctaaaatcaggttggtggctgggtgcagtggctcacgcctgtaatcccagcactttgggaggccaaggtgagaggatcacttgagcccaggaattcaagacctgcgtggatgaaatagtgaaaccctgtctctacaaaaaaaatagttaaaaaataataaaataaaatggggttggcaaggtctaccttgaagatttaatgagataatgtgtggaaagggcttagcaaggtcctaacatgtgcttgggtagttctgaagccataaccacagacttgaagtctaaataactctttaaaaactcatgcttttcctttggtcctttcttggagaaagatctcctgttgtttagcttttgagccatcctagatgtcatccctgccttcagtttacctgtcattttcgtttcctgtctttgggatggctcatatactcatttcccccttcccagtctcactttgggacaacttctctgcccttccaaggttcataatcaggaaacagaagagtgattagtacatatttctagtccagaagtcctctcaagaagaaaaacaactagaatgatactgaagattacactttctaagtgaacaaacaataatatccatgaaagattttttaaagaattttatgcataactagaaatgctggggactaatgagctaaaacagtttggaattgtatatcaatgtatactaggaaaacactacccacaataaaatattttataatgaaatttggatttgaaattttttttttttgagacggaatttcgctcttgttgcccagtctggagtacaatggcgcaatctcagctcaccacaacctccgcctcccaggttcaagtaattctcctgcctcagcctcccgagtagctgggattacagacatgcaccaccacgcctggctaattttgtattttttaagtagagacagggtttctccatgttgaggctggtctcgaactcctgacctcaggtgatccgcctgcctcagcctcccaaagcactgggattacaggcttgagccaccacgcctgacctgaaaaatgtttttaattctacactgataatgcagcaagctcaaacctaagctgcaactctacttgtaaatggttgcaatactgtctttcttttcttttttttttccaagacagggtctccctctgtcacccaggttggagtgcagtggcgccatcatagctcactgcagtccagagctcctgggctcaaaggatcacctcagtctcccgagtagctgggattgatggcatgcagcaccacacccagctaatacttaaatttttttkcagagacgaggtctcactatgttgccccaagtggtctgaactcctaggctcaagtgatcctcccaactcagcctcccgaagtgttgggatttcaggtgggagccactgctcctggccaatattttcttattatataaatgacagtaagatttagatatgcagaaaaaaaggaaaaataaatgtattttcaatgagttatagtaagttcaaaattttaaaatgaagggcaagtattcaacctgacactgataacattagaatctaatcaaaatgggataacagcaaaagttatttccttcccacctatttttgcatacatcctgattgaccacctgcaagacttttactatgcttgaggtgctgctactaatttacattgtaggcctgttttagatgagtcatgctgtgaaaaaagctgtggcctcaactttgtgtggtcttttatgccaagttatat

SEQ ID NO: 678688 - DNA, 2537 bp, Homo sapiens
  misc_feature 1099, 1100, 1101, 1102, 1103, 1104, 1105, 1106, 1107, 1108,1109, 1110, 1111, 1112, 1113, 1114, 1115, 1116, 1117, 1118,1119, 1120, 1121, 1122, 1123, 1124, 1125, 1126, 1127, 1128,1129, 1130, 1131, 1132, 1133, 1134, 1135, 1136, 1137: n = A,T,C or G
  misc_feature 1138, 1139, 1140, 1141, 1142, 1143, 1144, 1145, 1146, 1147,1148, 1149, 1150, 1151, 1152, 1153, 1154, 1155, 1156, 1157,1158, 1159, 1160, 1161, 1162, 1163, 1164, 1165, 1166, 1167,1168, 1169, 1170, 1171, 1172, 1173, 1174, 1175, 1176: n = A,T,C or G
  misc_feature 1177, 1178, 1179, 1180, 1181, 1182, 1183, 1184, 1185, 1186,1187, 1188, 1189, 1190, 1191, 1192, 1193, 1194, 1195, 1196,1197, 1198: n = A,T,C or G
atttctttaatacaatatatttgctaaatctagtatttaatactcaagaattataagggaaggacaaaaaaaaaaaagaaaacaaaaaataaagaaaaaaagccctatatagatgagtccaaagtgtaatttatatggaagaacttacctttggagaaaaatctgtcttgtcgtatacacaaacatttgtatttattatttcaaagtccactcaaacaaaagtttaacatgcaaggttagaggtaaaattaagctcactatctgtattaggcatcattttaaatgaaggtaaactaaaataattcaaattagtttccatcattcagagtgcaacaccaccccaccccaaaaaaacccgcagcaagagaacagggttatattatgaaaggaagccctcaagctcagtaaaatgtcatctttgtgctcactctggaatggctgacagtggtagctgcagaaccatctctacaatgtattaaatacataatgcagaagtgtgggagatttgggagccacatttaaacccgcatagcagcagatgaggacagaccatttttttaacccactccaacagttagaagctgataatgtgacatgttctttttaatgttcctacatggtagtcttctgccaaagtaattagcgcctgcccattatttcaaaaatttcaatgacataattgactggcaaaccttggtccatatcagaaaagtttcttacaatccatgatgtaatttcttgatgctcattcatttatttcaattgttaatttctactttttcttgagaaaaacatctcttaaaataatctgtagccatcaaattgcctggacttcaataatgcatagagaaatttttaccaaacttctgcttcctgaattacataaaatgcttattttagcaacattttagccatatatacattataaacattaagtttaaataacatttactgataatttccttcaaaatacaatgaaaggtacagcaagggtgaaaatttcacctcagtaggacagaaatttttctcttgtgagaaataaccacatgaaattgtcaacatttgactatttttgacctacaactaaagaaaaaaagannnnnnnnnnnnnnnnnnnnnnnnnnnnnnnnnnnnnnnnnnnnnnnnnnnnnnnnnnnnnnnnnnnnnnnnnnnnnnnnnnnnnnnnnnnnnnnnnnnntaaggaatagatctccttgttagaaagcaattgtaaaacataacttacatttaaacttacaggatttctccaatctttttcctccccaaaatatcctttatagagtcatctattctgatgaattgtgctagaaaagtttttttttttgccaattcttctcttcccatatattcagaggatatgggtttctatttcaggaggtacacactcatatatacgtataccataaaatatataaaaatgtaaatatacatgtgatttgcctatttcaaaaagatttatagtgttgttttcccctcacagatgggaggaagttgaattgaaattaaagaggaattggcttatcctttttgagcataattcagtgtactttaatcacaccgagttagccttcattaataatcatttaaataatctgaaggcggttgtaatttggtaggtaacccttgtgtgtctcgtgcaccactttcagcccccatccccctaaccctttggcagcttgaattttagacatttttacttcatgtcatgggggtaccataacgctttggaaaggccagcctaccatatgaggcttcccttttttatggggtaccataatggtttggaaaggcctgacttggaggggtttttataaaggtttttaatattttacttgttccacagcttttcccattctcccctgtcttagataattttcctaactcttgttctttcaggggtgtgaacaagagatagcttgccattgtacccttctccatttgtcctgaatagtctcatatgttaaacaagccctggcttgaatccttccttcttgggggattttgtttttttttttttttggctgggctacaatrgttccttaagcaaatttgttcctagactgcatagttgattgtttaccctagtccatagttagctggagaggtaggactacagaaatgccattttgccgatggggaagacagcatttatttcgtttttttttggggggtttctgtttttgtttttgtttttgttttttagatggagtcgcactctgttgctcaggctggagtgcagtggtgtgatcttggctcactgcaacccctgcctcccgggttcaggcgattcttctgtctcagcctcccgagtagctgggattacaggtgcacactgccatgcttggataatttttttttttttttgttttttagcggagatggggtttcactgtgttggccaggctggtctccaactcttgagctcaggcagtccacctaccttggcctccaaaagtgctgggattacaggtgtgagctaccacacccggcctattccacatttttaagactcctcc

SEQ ID NO: 678689 - DNA, 2537 bp, Homo sapiens
  misc_feature 1099, 1100, 1101, 1102, 1103, 1104, 1105, 1106, 1107, 1108,1109, 1110, 1111, 1112, 1113, 1114, 1115, 1116, 1117, 1118,1119, 1120, 1121, 1122, 1123, 1124, 1125, 1126, 1127, 1128,1129, 1130, 1131, 1132, 1133, 1134, 1135, 1136, 1137: n = A,T,C or G
  misc_feature 1138, 1139, 1140, 1141, 1142, 1143, 1144, 1145, 1146, 1147,1148, 1149, 1150, 1151, 1152, 1153, 1154, 1155, 1156, 1157,1158, 1159, 1160, 1161, 1162, 1163, 1164, 1165, 1166, 1167,1168, 1169, 1170, 1171, 1172, 1173, 1174, 1175, 1176: n = A,T,C or G
  misc_feature 1177, 1178, 1179, 1180, 1181, 1182, 1183, 1184, 1185, 1186,1187, 1188, 1189, 1190, 1191, 1192, 1193, 1194, 1195, 1196,1197, 1198: n = A,T,C or G
atttctttaatacaatatatttgctaaatctagtatttaatactcaagaattataagggaaggacaaaaaaaaaaaagaaaacaaaaaataaagaaaaaaagccctatatagatgagtccaaagtgtaatttatatggaagaacttacctttggagaaaaatctgtcttgtcgtatacacaaacatttgtatttattatttcaaagtccactcaaacaaaagtttaacatgcaaggttagaggtaaaattaagctcactatctgtattaggcatcattttaaatgaaggtaaactaaaataattcaaattagtttccatcattcagagtgcaacaccaccccaccccaaaaaaacccgcagcaagagaacagggttatattatgaaaggaagccctcaagctcagtaaaatgtcatctttgtgctcactctggaatggctgacagtggtagctgcagaaccatctctacaatgtattaaatacataatgcagaagtgtgggagatttgggagccacatttaaacccgcatagcagcagatgaggacagaccatttttttaacccactccaacagttagaagctgataatgtgacatgttctttttaatgttcctacatggtagtcttctgccaaagtaattagcgcctgcccattatttcaaaaatttcaatgacataattgactggcaaaccttggtccatatcagaaaagtttcttacaatccatgatgtaatttcttgatgctcattcatttatttcaattgttaatttctactttttcttgagaaaaacatctcttaaaataatctgtagccatcaaattgcctggacttcaataatgcatagagaaatttttaccaaacttctgcttcctgaattacataaaatgcttattttagcaacattttagccatatatacattataaacattaagtttaaataacatttactgataatttccttcaaaatacaatgaaaggtacagcaagggtgaaaatttcacctcagtaggacagaaatttttctcttgtgagaaataaccacatgaaattgtcaacatttgactatttttgacctacaactaaagaaaaaaagannnnnnnnnnnnnnnnnnnnnnnnnnnnnnnnnnnnnnnnnnnnnnnnnnnnnnnnnnnnnnnnnnnnnnnnnnnnnnnnnnnnnnnnnnnnnnnnnnnntaaggaatagatctccttgttagaaagcaattgtaaaacataacttacatttaaacttacaggatttctccaatctttttcctccccaaaatatcctttatagagtcatctattctgatgaattgtgctagaaaagtttttttttttgccaattcttctcttcccatatattcagaggatatgggtttctatttcaggaggtacacactcatatatacgtataccataaaatatataaaaatgtaaatatacatgtgatttgcctatttcaaaaagatttatagtgttgttttcccctcacagatgggaggaagttgaattgaaattaaagaggaattggcttatcctttttgagcataattcagtgtactttaatcacaccgagttagccttcattaataatcatttaaataatctgaaggcggttgtaatttggtaggtaacccttgtgtgtctcgtgcaccactttcagcccccatccccctaaccctttggcagcttgaattttagacatttttacttcatgtcatgggggtaccataacgctttggaaaggccagcctaccatatgaggcttcccttttttatggggtaccataatggtttggaaaggcctgacttggaggggtttttataaaggtttttaatattttacttgttccacagcttttcccattctcccctgtcttagataattttcctaactcttgttctttcaggggtgtgaacaagagatagcttgccattgtacccttctccatttgtcctgaatagtctcatatgttaaacaagccctggcttgaatccttccttcttgggggattttgtttttttttttttttggctgggctacaatggttccttaagcaaatttgttcctagactgcatagttgattgtttaccctagtccatagttagctggagaggtaggactacagaaatgccattttgccgatggggaagacagcatttatttcgttttttttkggggggtttctgtttttgtttttgtttttgttttttagatggagtcgcactctgttgctcaggctggagtgcagtggtgtgatcttggctcactgcaacccctgcctcccgggttcaggcgattcttctgtctcagcctcccgagtagctgggattacaggtgcacactgccatgcttggataatttttttttttttttgttttttagcggagatggggtttcactgtgttggccaggctggtctccaactcttgagctcaggcagtccacctaccttggcctccaaaagtgctgggattacaggtgtgagctaccacacccggcctattccacatttttaagactcctcc

SEQ ID NO: 678690 - DNA, 2537 bp, Homo sapiens
  misc_feature 1099, 1100, 1101, 1102, 1103, 1104, 1105, 1106, 1107, 1108,1109, 1110, 1111, 1112, 1113, 1114, 1115, 1116, 1117, 1118,1119, 1120, 1121, 1122, 1123, 1124, 1125, 1126, 1127, 1128,1129, 1130, 1131, 1132, 1133, 1134, 1135, 1136, 1137: n = A,T,C or G
  misc_feature 1138, 1139, 1140, 1141, 1142, 1143, 1144, 1145, 1146, 1147,1148, 1149, 1150, 1151, 1152, 1153, 1154, 1155, 1156, 1157,1158, 1159, 1160, 1161, 1162, 1163, 1164, 1165, 1166, 1167,1168, 1169, 1170, 1171, 1172, 1173, 1174, 1175, 1176: n = A,T,C or G
  misc_feature 1177, 1178, 1179, 1180, 1181, 1182, 1183, 1184, 1185, 1186,1187, 1188, 1189, 1190, 1191, 1192, 1193, 1194, 1195, 1196,1197, 1198: n = A,T,C or G
atttctttaatacaatatatttgctaaatctagtatttaatactcaagaattataagggaaggacaaaaaaaaaaaagaaaacaaaaaataaagaaaaaaagccctatatagatgagtccaaagtgtaatttatatggaagaacttacctttggagaaaaatctgtcttgtcgtatacacaaacatttgtatttattatttcaaagtccactcaaacaaaagtttaacatgcaaggttagaggtaaaattaagctcactatctgtattaggcatcattttaaatgaaggtaaactaaaataattcaaattagtttccatcattcagagtgcaacaccaccccaccccaaaaaaacccgcagcaagagaacagggttatattatgaaaggaagccctcaagctcagtaaaatgtcatctttgtgctcactctggaatggctgacagtggtagctgcagaaccatctctacaatgtattaaatacataatgcagaagtgtgggagatttgggagccacatttaaacccgcatagcagcagatgaggacagaccatttttttaacccactccaacagttagaagctgataatgtgacatgttctttttaatgttcctacatggtagtcttctgccaaagtaattagcgcctgcccattatttcaaaaatttcaatgacataattgactggcaaaccttggtccatatcagaaaagtttcttacaatccatgatgtaatttcttgatgctcattcatttatttcaattgttaatttctactttttcttgagaaaaacatctcttaaaataatctgtagccatcaaattgcctggacttcaataatgcatagagaaatttttaccaaacttctgcttcctgaattacataaaatgcttattttagcaacattttagccatatatacattataaacattaagtttaaataacatttactgataatttccttcaaaatacaatgaaaggtacagcaagggtgaaaatttcacctcagtaggacagaaatttttctcttgtgagaaataaccacatgaaattgtcaacatttgactatttttgacctacaactaaagaaaaaaagannnnnnnnnnnnnnnnnnnnnnnnnnnnnnnnnnnnnnnnnnnnnnnnnnnnnnnnnnnnnnnnnnnnnnnnnnnnnnnnnnnnnnnnnnnnnnnnnnnntaaggaatagatctccttgttagaaagcaattgtaaaacataacttacatttaaacttacaggatttctccaatctttttcctccccaaaatatcctttatagagtcatctattctgatgaattgtgctagaaaagtttttttttttgccaattcttctcttcccatatattcagaggatatgggtttctatttcaggaggtacacactcatatatacgtataccataaaatatataaaaatgtaaatatacatgtgatttgcctatttcaaaaagatttatagtgttgttttcccctcacagatgggaggaagttgaattgaaattaaagaggaattggcttatcctttttgagcataattcagtgtactttaatcacaccgagttagccttcattaataatcatttaaataatctgaaggcggttgtaatttggtaggtaacccttgtgtgtctcgtgcaccactttcagcccccatccccctaaccctttggcagcttgaattttagacatttttacttcatgtcatgggggtaccataacgctttggaaaggccagcctaccatatgaggcttcccttttttatggggtaccataatggtttggaaaggcctgacttggaggggtttttataaaggtttttaatattttacttgttccacagcttttcccattctcccctgtcttagataattttcctaactcttgttctttcaggggtgtgaacaagagatagcttgccattgtacccttctccatttgtcctgaatagtctcatatgttaaacaagccctggcttgaatccttccttcttgggggattttgtttttttttttttttggctgggctacaatggttccttaagcaaatttgttcctagactgcatagttgattgtttaccctagtccatagttagctggagaggtaggactacagaaatgccattttgccgatggggaagacagcatttatttcgtttttttttggggggtttytgtttttgtttttgtttttgttttttagatggagtcgcactctgttgctcaggctggagtgcagtggtgtgatcttggctcactgcaacccctgcctcccgggttcaggcgattcttctgtctcagcctcccgagtagctgggattacaggtgcacactgccatgcttggataatttttttttttttttgttttttagcggagatggggtttcactgtgttggccaggctggtctccaactcttgagctcaggcagtccacctaccttggcctccaaaagtgctgggattacaggtgtgagctaccacacccggcctattccacatttttaagactcctcc

SEQ ID NO: 678691 - DNA, 584 bp, Homo sapiens
tactcagttcagcctttgtagcaggaatgcagctatagataatatgtccatgaaaggttacaggtgtgttaaacaaaacattatttataaaaaccgatagtgagcctgcaggtcatagtttgcttatctctgctatagaacatgggaaaaacaaatacagtggataaatgwagctaaatatggtaataaccctatgtgtccatgggttcaatcaactttggattgaaaatattaggaaaaatactgcatcagtactgaacatgttcagacatttttccttgttattattccctaaacaatatagcataacaactatttaataactaatctagagatgatttaaagtacaggggaggaagtgcatagcttatatgcaagtactatgccatttatatctaggacttgagcatctttgggttttggtgtctgcaggagtttcttagatccaatcttccacaggtactgagggatgacaaagcaagtggcttgtgagacatgttaacacaaataaagtaagtggactggaacatctgtgttttgtttatacataaaaggatagaagagctcagaaggaccacatgggt

SEQ ID NO: 678692 - DNA, 584 bp, Homo sapiens
tactcagttcagcctttgtagcaggaatgcagctatagataatatgtccatgaaaggttacaggtgtgttaaacaaaacattatttataaaaaccgatagtgagcctgcaggtcatagtttgcttatctctgctatagaacatgggaaaaacaaatacagtggataaatgaagctawatatggtaataaccctatgtgtccatgggttcaatcaactttggattgaaaatattaggaaaaatactgcatcagtactgaacatgttcagacatttttccttgttattattccctaaacaatatagcataacaactatttaataactaatctagagatgatttaaagtacaggggaggaagtgcatagcttatatgcaagtactatgccatttatatctaggacttgagcatctttgggttttggtgtctgcaggagtttcttagatccaatcttccacaggtactgagggatgacaaagcaagtggcttgtgagacatgttaacacaaataaagtaagtggactggaacatctgtgttttgtttatacataaaaggatagaagagctcagaaggaccacatgggt

SEQ ID NO: 678693 - DNA, 643 bp, Homo sapiens
ggccagaaaaaggtagaggcagagtgctgggatagataggatctatagccagggtttcgcaacctcagtgctgtcgacattttggaacaaatagttctttgttgtgggccccatcctgtgtactatagaatgtttaacagcattcctggcatctaccgactcgatgccaggagcagtccacccattgtgccaaccaaatatatctccaggcactgctaagtgtcttctggatgggcaaaatcattgagaactgcttgtctctaggttatgtacttgaagctttgactccactcctaactcctagcaccctcaaacccttaggggaggagataggggtgtcagggggtcaagaggtcagtagctagtagctaggatgctggttacaatgatggtgatggttagggtggtgctaatagcaatgttgggagttctggtgctggtggtggggctgggatgacaatggctgaagtcacagctatttgagcagcttcagaggctttcaaggtcaaacaggacatttggagaaatgcttgtcataattcagcaaatgctcaggacacactcayagagtaagccacaccagcttctggttgtgcctcttgtaccgacctagatcagaggcctggagcaggggcatatgaag

SEQ ID NO: 678694 - DNA, 2644 bp, Homo sapiens
gaaaatatcattactgagtttccatagggttacaccacaaaatttaaaaagaaaaaaataaaccacaaaaattctgtggtattcaattttataattgttttgttttcactgtaacttatttaacttctcattattcaaacaataggtgaaaagaacgctygtgtgttatttataattaaaattgagatggatttaccacctactgtttattgtcagtatattttccaaaagcagtggaaaaatttatcttctactaatgttcaatttatgaacattcatatttttgtttcagtggaaaatatcactctatcaactgcagaaataaatgcatattaataggcaaaagtaggtttactcattttaagatgctgcaagatgctggtgttttatcagataagcacataatctttacctcaacataaaaatgtatatcattacaaaaagtccttctgaacattttagtaaatgaattgtaccaaatttgaaaatctactcaataagtagacttgaaactagaaaaattaaggaaaaaaccttacaacttacaaaagtgatcttagaaggaaaatcagagataagatattatgatatccaccttgtgttttcataggatcattcaatattaaaaatgaaagaagtcattaaaaccatgttatcaaattcccaatattgatgcttctttcaatagcaaccttaacaaatagtaatctaattgaataatctcataccaattatattgattcttaatttaattattaaaattccatttctacttagaaatattctattattgttaaatttagttttaataaattatgtaaacatgaggatgacacagacagcctactcttttagattattgtcattttctgcttctagaagctactcagagaatgagaacttggctaagaaataaggaaattctgaattataggcttggcttgtgtttgaggctaactaacccttatgggttttatttttctcatattttaaatcaagtgtccaagctttgacaactatgctactttcctactctcaatttcaataaatatagtcgttaataaaactgagctggtattacatttctatttctttttataaaatagtcactaaactattctgtacatctaaacactttcctccaaacttttcaacactatatgaaaaattattaaaataatttaagttttgctattaataattagttcttcaaataattatagtatttaaaccgcaggttgtaactgaaatgtaagtttttacaggaaatatttatttcagtcccagaatgtataagcttacattaatttgtatgactaacttaaatatattgttcatttttgcttttcggtgcgtggactataactatggtgttttatctgccacatctgttagttttctttaagataaatgtatctgttaattaattcatttaaatgtctccattttaatgaatttgtaagcaaaatctggagaaataattttaatgaaattagtgagacaaataaaattgtaattaacatttctatgaatgacgttagtgaaatttattttcaggtatagtaattaataaaaactttaatttattacagaattagaatattttgtacctgaagtgacatagaatcaaccgtaattcttcatatagtactaaattatatgagaaggggcactcattttgatgtgttctgatcctctcattcctttttgcattgctttatattgttagttgtgtatcagaataccatgatgaaaaacctctaccaaggtttggtgatgagaaataaaacaaagtgtaaatataataaatcagaaccagaaacaatccgtgctttttcctaagacagctattagtcacaataattttataatttttataaattcataagttgctaattattttttgcataattaaacacttatacaaatgcttatcacatttttccataaattacctttatttaaaatatgccctatgattttatcattatatgcattggttttctcatatttgctcatggcatcacaaattaataaaatatgttttaacatgagtagatatttttcaaaacattttgtataatattaattgtgcccacggtacagccatgttatgtgaactgaaaaaatggttcagagccccaacaacctttatttcattcttattccttcaatattgaaagtatactatatgtttctgatgtgctataagagatagttaattacacttctgtatacataaaatgtttcctagaagataattttaattttgtataaattacttcatttaattgaaggtcagaaattaccaaataatcctaaaaaataagaattaccatgataacatgccaaataaaattcaataaaagtaaattatgtggtaatttaacacatatagataaatacaaaaattcagaataatataaaatgaaatcgaattatacactgaatttatatattacctaaggtgatttgtttaaatattcaagaatggttaacatttcaaaatatttacacttcacaatatgataattaaataataaaatatttcagtagtgtacagtcaatttaaaaagttatctattcatgctgaaatagattaccatattatagaaactggaaagtgaattatgaaacaattcta

SEQ ID NO: 678695 - DNA, 2644 bp, Homo sapiens
gaaaatatcattactgagtttccatagggttacaccacaaaatttaaaaagaaaaaaataaaccacaaaaattctgtggtattcaattttataattgttttgttttcactgtaacttatttaacttctcattattcaaacaataggtgaaaagaacgcttgtgtgttatttataattaaaattgagatggatttaccacctactgtttattgtcagtatattttccaaaagcagtggaaaaatttatcttctactaatgttcartttatgaacattcatatttttgtttcagtggaaaatatcactctatcaactgcagaaataaatgcatattaataggcaaaagtaggtttactcattttaagatgctgcaagatgctggtgttttatcagataagcacataatctttacctcaacataaaaatgtatatcattacaaaaagtccttctgaacattttagtaaatgaattgtaccaaatttgaaaatctactcaataagtagacttgaaactagaaaaattaaggaaaaaaccttacaacttacaaaagtgatcttagaaggaaaatcagagataagatattatgatatccaccttgtgttttcataggatcattcaatattaaaaatgaaagaagtcattaaaaccatgttatcaaattcccaatattgatgcttctttcaatagcaaccttaacaaatagtaatctaattgaataatctcataccaattatattgattcttaatttaattattaaaattccatttctacttagaaatattctattattgttaaatttagttttaataaattatgtaaacatgaggatgacacagacagcctactcttttagattattgtcattttctgcttctagaagctactcagagaatgagaacttggctaagaaataaggaaattctgaattataggcttggcttgtgtttgaggctaactaacccttatgggttttatttttctcatattttaaatcaagtgtccaagctttgacaactatgctactttcctactctcaatttcaataaatatagtcgttaataaaactgagctggtattacatttctatttctttttataaaatagtcactaaactattctgtacatctaaacactttcctccaaacttttcaacactatatgaaaaattattaaaataatttaagttttgctattaataattagttcttcaaataattatagtatttaaaccgcaggttgtaactgaaatgtaagtttttacaggaaatatttatttcagtcccagaatgtataagcttacattaatttgtatgactaacttaaatatattgttcatttttgcttttcggtgcgtggactataactatggtgttttatctgccacatctgttagttttctttaagataaatgtatctgttaattaattcatttaaatgtctccattttaatgaatttgtaagcaaaatctggagaaataattttaatgaaattagtgagacaaataaaattgtaattaacatttctatgaatgacgttagtgaaatttattttcaggtatagtaattaataaaaactttaatttattacagaattagaatattttgtacctgaagtgacatagaatcaaccgtaattcttcatatagtactaaattatatgagaaggggcactcattttgatgtgttctgatcctctcattcctttttgcattgctttatattgttagttgtgtatcagaataccatgatgaaaaacctctaccaaggtttggtgatgagaaataaaacaaagtgtaaatataataaatcagaaccagaaacaatccgtgctttttcctaagacagctattagtcacaataattttataatttttataaattcataagttgctaattattttttgcataattaaacacttatacaaatgcttatcacatttttccataaattacctttatttaaaatatgccctatgattttatcattatatgcattggttttctcatatttgctcatggcatcacaaattaataaaatatgttttaacatgagtagatatttttcaaaacattttgtataatattaattgtgcccacggtacagccatgttatgtgaactgaaaaaatggttcagagccccaacaacctttatttcattcttattccttcaatattgaaagtatactatatgtttctgatgtgctataagagatagttaattacacttctgtatacataaaatgtttcctagaagataattttaattttgtataaattacttcatttaattgaaggtcagaaattaccaaataatcctaaaaaataagaattaccatgataacatgccaaataaaattcaataaaagtaaattatgtggtaatttaacacatatagataaatacaaaaattcagaataatataaaatgaaatcgaattatacactgaatttatatattacctaaggtgatttgtttaaatattcaagaatggttaacatttcaaaatatttacacttcacaatatgataattaaataataaaatatttcagtagtgtacagtcaatttaaaaagttatctattcatgctgaaatagattaccatattatagaaactggaaagtgaattatgaaacaattcta

SEQ ID NO: 678696 - DNA, 2312 bp, Homo sapiens
cataaaattaatgaaaatatgatttttaacatcatatctgagggcagtgtgaaactagatcatattttatcatgcccatttactttggatcagcaattccaattctgggaagctatctgtcagaagtatgcttaattgcccatggtgatatatgctcagaggtgttcactgcaacattatttacagtgggtaaagattagaaaaatctgggctatctcccaatagtggtgaatgttttaaaccaaaactaacagaaaataacacttatcaaggagacattcttaatagtgactatgacctacaatttgtaacatttgtcatttccaaaatatgttgaggatatttaacatacagttgcattttgtaatcattaaataatttgtatagttatgaatgcaatatatgtacaaaaatgatagaaaaagttatataaacaaatataagtgatatttaattcactttttattagcagtacacttatatacataattgagtttacaattatgtgcatacattttttctgttctatatttttattttttaataaaaattgcatatatttaagtgtacaacctgatttttttatatacacatacayatacatagtgaaatgattaatacagtcaagctaattaacataaccatcttctcacatagtttagatgggagcacttgaaatctactctcttcaaaaatttctggtaatacaatacaatatcattaactacagtaaccatgctgtagatattagatctctagactcattctttctgcataactgcaactttgtactctttgaccaatagattccttttctcccacctccctgcccctagtaaccaccatttaatcctgcttctatatattggacttttttagagtctacatgtaagtgagatcatgatcatgcattttcaaaacatgaatcaagacacatgtatacattaataaatgcctggatatattgcttctaaattatttcatttgcattttccattttattgaacactgcagaacatactatttttaatgattgcatactaatgtgttatgaatatacatctattgttggatattttgtgttgctaatttaaatatatgaagtttatctttgtgatgacagtgtacaaatatatatttctgtccacttttctcattttgagccttagaataataattgataaatcaaaatttatgaacatattttaagcttcttaaagaataacatcaacatatcttcgaaacagattgggaaaatttgcaatatttgcaaatggtgtaccttcttggcagctcatattgatctttgtgattttctttttttattttgatgactttagaataatacctattttaatttacatttatgattattggtgagaattaaacaaactccagatatttgcagaccattgttatgtatttctttatgtagttattaatttattcatttagctggtaatgtaccattgattttgccaatttttaagaaattaggtatttgtaagtaaatttatattttaaatgtaagatgttaaaaaagttgcagccagtgaaataaaaatttggatattgaaaagtattttgatagactcattaccataattggatattttgtttactttaggtaaatgtacataattacatatgggttctgggtatgcatttatttatccaaaaactcagagtgatactaagccaagaattatgcatgaaatagggattagaataatgaacagaatgtgcacatatttttcctgtcatggaacttacattgtagcaagaggggacaaaacatatagttaaaatatataaaaacaaaaagttaaaatatataaaattttaggtagccaaatgagatatagagaaaagtaagaaaagctatggggaattttgtatgttcagaagagatagcactaagatgatacttgaataaaaacttgaagcggatggagagagttatgtggatatctgtaggaagagcagttcaggcacaggaacctgtaggcacaaagcccaggtaggagcaagggtggcatttaccaaatcagagtgagagaggggaactgagtggagataaagttgttactggaagggaatccttaacggtctgcatcaacctcaattcttgcctcctcaaaagaaaaaattcaacaaaggggtataaggcagagtgagaagccaaggcaagttttagagaaggagtgaaagtttattaaaaagtttagagctggaatgaaaggaagtaaacttggaaaagggctatgtgagtgacttgagagattcaagtacatggtttgaactttgacttg

SEQ ID NO: 678697 - DNA, 2312 bp, Homo sapiens
cataaaattaatgaaaatatgatttttaacatcatatctgagggcagtgtgaaactagatcatattttatcatgcccatttactttggatcagcaattccaattctgggaagctatctgtcagaagtatgcttaattgcccatggtgatatatgctcagaggtgttcactgcaacattatttacagtgggtaaagattagaaaaatctgggctatctcccaatagtggtgaatgttttaaaccaaaactaacagaaaataacacttatcaaggagacattcttaatagtgactatgacctacaatttgtaacatttgtcatttccaaaatatgttgaggatatttaacatacagttgcattttgtaatcattaaataatttgtatagttatgaatgcaatatatgtacaaaaatgatagaaaaagttatataaacaaatataagtgatatttaattcactttttattagcagtacacttatatacataattgagtttacaattatgtgcatacattttttctgttctatatttttattttttaataaaaattgcatatatttaagtgtacaacctgatttttttatatacacatacatatacatagtgaaatgattaatacagtcaagctaattaacataaccatcttctcacatagtttagatgggagcacttgaaatctactctcttcaaaaatttctggtaatacaatacaatatcattaactacagtaaccatgctgtagatattagatctctagactcattctttctrcataactgcaactttgtactctttgaccaatagattccttttctcccacctccctgcccctagtaaccaccatttaatcctgcttctatatattggacttttttagagtctacatgtaagtgagatcatgatcatgcattttcaaaacatgaatcaagacacatgtatacattaataaatgcctggatatattgcttctaaattatttcatttgcattttccattttattgaacactgcagaacatactatttttaatgattgcatactaatgtgttatgaatatacatctattgttggatattttgtgttgctaatttaaatatatgaagtttatctttgtgatgacagtgtacaaatatatatttctgtccacttttctcattttgagccttagaataataattgataaatcaaaatttatgaacatattttaagcttcttaaagaataacatcaacatatcttcgaaacagattgggaaaatttgcaatatttgcaaatggtgtaccttcttggcagctcatattgatctttgtgattttctttttttattttgatgactttagaataatacctattttaatttacatttatgattattggtgagaattaaacaaactccagatatttgcagaccattgttatgtatttctttatgtagttattaatttattcatttagctggtaatgtaccattgattttgccaatttttaagaaattaggtatttgtaagtaaatttatattttaaatgtaagatgttaaaaaagttgcagccagtgaaataaaaatttggatattgaaaagtattttgatagactcattaccataattggatattttgtttactttaggtaaatgtacataattacatatgggttctgggtatgcatttatttatccaaaaactcagagtgatactaagccaagaattatgcatgaaatagggattagaataatgaacagaatgtgcacatatttttcctgtcatggaacttacattgtagcaagaggggacaaaacatatagttaaaatatataaaaacaaaaagttaaaatatataaaattttaggtagccaaatgagatatagagaaaagtaagaaaagctatggggaattttgtatgttcagaagagatagcactaagatgatacttgaataaaaacttgaagcggatggagagagttatgtggatatctgtaggaagagcagttcaggcacaggaacctgtaggcacaaagcccaggtaggagcaagggtggcatttaccaaatcagagtgagagaggggaactgagtggagataaagttgttactggaagggaatccttaacggtctgcatcaacctcaattcttgcctcctcaaaagaaaaaattcaacaaaggggtataaggcagagtgagaagccaaggcaagttttagagaaggagtgaaagtttattaaaaagtttagagctggaatgaaaggaagtaaacttggaaaagggctatgtgagtgacttgagagattcaagtacatggtttgaactttgacttg

SEQ ID NO: 678698 - DNA, 943 bp, Homo sapiens
  misc_feature 704, 705, 706, 707, 708, 709, 710, 711, 712, 713, 714, 715,716, 717, 718, 719, 720, 721, 722, 723, 724, 725, 726, 727,728, 729, 730, 731, 732, 733, 734, 735, 736, 737, 738, 739,740, 741, 742, 743, 744, 745, 746, 747, 748, 749, 750: n = A,T,C or G
  misc_feature 751, 752, 753, 754, 755, 756, 757, 758, 759, 760, 761, 762,763, 764, 765, 766, 767, 768, 769, 770, 771, 772, 773, 774,775, 776, 777, 778, 779, 780, 781, 782, 783, 784, 785, 786,787, 788, 789, 790, 791, 792, 793, 794, 795, 796, 797: n = A,T,C or G
  misc_feature 798, 799, 800, 801, 802, 803: n = A,T,C or G
tagcaaactaacacagaagcagaaaaccaaatactgcatgctctcacttacaagtgggagctaaacaatgaaaacaaatggacacatagaggggcacaacagatactggggcctatcagagggtggagggtgggaggagggagaggatcaggaaaaataactaatgggtactaggtttaatacctcrgtgatcaaataatctgtagaacaaacccccatgacacaaatttacctatctaacaaacctgcacatgtaccactgaacttaaaaaatatattaaataaaagcttacaaaaagaaacaagtttaaaaaaagtgtttaacttaaaagaaaatatttttaaaagataattcccagaaaaaataaaaataaagaatgtaaaaagacagttaccttcactcgcagtcaatgaaataaaattacaaacaacaatgccatatcaattattgtctattacactgacaaagataaaagaatggaaaataatcaggattaatatgagacaagatttatgagctctcctgtgtagtgttgggataagtataaactggcaggacatttataaaagtccctttactaaatacattaaaattttaaatatgcgggaagcaatcacattgtgagggtggggaggtcgaattggtaaaacaaagatagtttgtcctaaaaaaagtctacgtgtctcttctcggggtggggggnnnnnnnnnnnnnnnnnnnnnnnnnnnnnnnnnnnnnnnnnnnnnnnnnnnnnnnnnnnnnnnnnnnnnnnnnnnnnnnnnnnnnnnnnnnnnnnnnnnnctgatttgacagagccaaaaatctaatctgcactgaatttttgaaaattaagtttgagtcatgcccatgttattaactcctcagtttataagcattatttgatcccagtacattttccaaaaaaatacaaatgtctccct

SEQ ID NO: 678699 - DNA, 943 bp, Homo sapiens
  misc_feature 704, 705, 706, 707, 708, 709, 710, 711, 712, 713, 714, 715,716, 717, 718, 719, 720, 721, 722, 723, 724, 725, 726, 727,728, 729, 730, 731, 732, 733, 734, 735, 736, 737, 738, 739,740, 741, 742, 743, 744, 745, 746, 747, 748, 749, 750: n = A,T,C or G
  misc_feature 751, 752, 753, 754, 755, 756, 757, 758, 759, 760, 761, 762,763, 764, 765, 766, 767, 768, 769, 770, 771, 772, 773, 774,775, 776, 777, 778, 779, 780, 781, 782, 783, 784, 785, 786,787, 788, 789, 790, 791, 792, 793, 794, 795, 796, 797: n = A,T,C or G
  misc_feature 798, 799, 800, 801, 802, 803: n = A,T,C or G
tagcaaactaacacagaagcagaaaaccaaatactgcatgctctcacttacaagtgggagctaaacaatgaaaacaaatggacacatagaggggcacaacagatactggggcctatcagagggtggagggtgggaggagggagaggatcaggaaaaataactaatgggtactaggtttaatacctcggtgatcaaataatctgtasaacaaacccccatgacacaaatttacctatctaacaaacctgcacatgtaccactgaacttaaaaaatatattaaataaaagcttacaaaaagaaacaagtttaaaaaaagtgtttaacttaaaagaaaatatttttaaaagataattcccagaaaaaataaaaataaagaatgtaaaaagacagttaccttcactcgcagtcaatgaaataaaattacaaacaacaatgccatatcaattattgtctattacactgacaaagataaaagaatggaaaataatcaggattaatatgagacaagatttatgagctctcctgtgtagtgttgggataagtataaactggcaggacatttataaaagtccctttactaaatacattaaaattttaaatatgcgggaagcaatcacattgtgagggtggggaggtcgaattggtaaaacaaagatagtttgtcctaaaaaaagtctacgtgtctcttctcggggtggggggnnnnnnnnnnnnnnnnnnnnnnnnnnnnnnnnnnnnnnnnnnnnnnnnnnnnnnnnnnnnnnnnnnnnnnnnnnnnnnnnnnnnnnnnnnnnnnnnnnnnctgatttgacagagccaaaaatctaatctgcactgaatttttgaaaattaagtttgagtcatgcccatgttattaactcctcagtttataagcattatttgatcccagtacattttccaaaaaaatacaaatgtctccct

SEQ ID NO: 678700 - DNA, 278 bp, Homo sapiens
agggagctggagcagacttgaatattcatggatatctgccaagtatccatatatatttgcatacatttagaagtggctaaaaatacttgctgaggcagttcctgccagagtgtygtttgttctgctgggtgatacagtgagaagagcattagcagtcaggaggcttggagtctaatctttccttggtacaaaatggctgtgaaacctcaggcaaatcacttcatccctagccccagttttcatatctgtgaaaggatattctactctacccattcctc

SEQ ID NO: 678701 - DNA, 278 bp, Homo sapiens
agggagctggagcagacttgaatattcatggatatctgccaagtatccatatatatttgcatacatttagaagtggctaaaaatacttgctgaggcagttcctgccagagtgtcgtttgttctgctgggtgatacagtgagargagcattagcagtcaggaggcttggagtctaatctttccttggtacaaaatggctgtgaaacctcaggcaaatcacttcatccctagccccagttttcatatctgtgaaaggatattctactctacccattcctc

SEQ ID NO: 678702 - DNA, 1988 bp, Homo sapiens
caaataaagtctaaatcagctaaataaatcaagaaggagcccaacaagtaacttttgtaaatagacaaatgtgaatcccaaaagaaaaggctaagagttgaaagtagttacctctagaagtggaattaaacgttggagagagataggaagggaaaagtcttcttaatatgagctttttggtaattctttgatttgaaaactgtgtgctgacattactttgatgaagaaacaactcgataaaaacaaaaattaaattttgtgagttgcattcaactagaactctgagtgacaacaatctaaggtattctattctccccaccacagcctgtggttttctttccctgttctgtgaatggcacagcccacaagcttagtattaagaaagggaaactctaagttcagaataaagattcaaaggcttggctgaacatgatttttagataactgaatctcccaaaatcaaggtgacaagggactcattaggctattaagctgcattgccatcgggggaatacaataacaagtaagtctgtgattgttcaacaactcaggccatgcccaggtttaagtagcctcaccagtgagaaggaaaagtttaggcaacacagaagactcagcaaaagaattgtccttcatgttcctctcaaagtgatgcgtaggatactagaaaatgaatgtgtgctggtaagtggaccacagggaggctgcaggctgagaaattcaaagatgcccatgagattcttaggtcctsccatgtatctcagtggtcttcaaattattttacatctgtagaattttgaaaaattatgtacctctcacatactggcatttaatatgtttcatcagaaatttaaattgttgcaaataacataatccctggtatattataaatattgaaaccaaaataaagacattgttgtctagtgttttcatcatcataaatgtaaacagttagaagtaatttagttgttggcctatttcaagtattgaccttttaatatcttaaaataaaactgttatattactcttttaagtgtatccaatggaatgaaaaaaccatcaggattttacatctatcatcagccacttaaaaaatacatgaactgtccatcttgaacagtcaaaattttattttttttttctcctttatttcatatttccaatctacttcttcacatactttttactacctgaaatctaatttatgctttaatatatttataggtttttttggtcacacattatatttctctgtagccaaatttcatatgtaggttaaaacattaaaacatattttaattttatgattatatgtttccaagcattaaaataaatcttaatgacatttgttgttaataaaactcaattggttaaaataatccaattgcacaattctgataaacaattattaaacataaaaataaatgtaatgaatgtatatacttaggtgctagaataaaacagatcatttaaatgtacaaccagggctaataaccagtgtttatagaagagcctaaggagtcaacttctaggtgttacaaagggcccatccagctgcagccatgcttctcaaagtgtaattgcagatgaaaatgcagattctgacctgacatggtaggtgtggggcctgaggttctgtgttcctggcaagctgccaggtgattgatgctgatgttactggtctaggggtcatactttcagtaacaagaagaagtagcagtgaagtagtggttcttaacataatctacactttggaatcccctgggaatctttaacatgtcccacccactttcagacattttgacaactgatctcacagtttggactgtggcctgggcacaagggcagatcatcgtgtagtgtagaattcaccactgaggttaaggagctagtgctaaatgcattgtgaatgtttactcaggatccttctttttactaaacctcataccctaaaatgcctgctactctaaagacaaatgggtgtaaat

SEQ ID NO: 678703 - DNA, 1493 bp, Homo sapiens
tcttcctcaaaatctgagggacagaaattttgaatgctgctgtctttgtatttcggctgctcagctgttacttaagttgggttgtaaagtttaaaatgtcaaaggttgacaactccaggagccaggaggaatgggaagaaattgcatcagcctgggagcctgaagatcagtcactgggtcattttccactgctcacccatgactctgtttcttagcttcaagttggataattatgcttacctcacagagrtgccgggagaattatttgagacaatgtcgtgatagtagtctgcatactcaaaatgatgaaaaattaaaaccaatgtaaaatgccataatttgaaaaacctttagtaattacagagtctgaatcagtgcctgacaatgccagagagaaaactgtcctccaaattatggtccagtctcctagaaaagcctattcatttttaggcacttattcctagggagttttactacgtctgagtctacaaatgaaattcaaatacagaactgagtccgttaaggatggagaactcatactaaaataactatggactgaaggagccaagtaattaaggacagagtagctgaagccgtgaattacctggatggtgctaagaattaagataggacctgtagccaagggctagatgttgtcttcggcccctaatgagactgtaaccctgtggaagcctggttagcagcctctgagaaaccttaacaaatattacataccacgttgataataatgtgtctataattgttgttatagcttctgaatattaaaacaaatgaaagaaaacaagaatacttatgcattatgctacaggtaacagaaaattctattaattttatagttatcaacctacctgtctgtcttctagttttctccagaacaaattaaacatctaactgttaatattagtagtagtagtaataataatagcagctaaagtttattaagcattctctatgtgccaggcattattctgggcaattttcatacacaaccttattttacactcacaaaaactctaggagatagatacagttccctttttacagatgcggcagctgaggttttgagaatgaaataatttctcaagttcacagagttgataagttggagaattaaaggctataaaaacaaactacaatacacaggttcacagtctgaatccataggctgagtttttaacatctaacttctcttctaataaatgtctacagattgatgaattgtggaaaatcaagatattctctatattagttttgctttcctgaggacttcctctaaaagacatttctgttcaacaaaccacctcctatttctcactaattcactcatcacagtctcttccaaaatcacgtttctcaaatccctactgttcttgtatcagttagaaacctttttgttctaacagaaaatctaactcaacttggcaataaagggtatttttgggcttgtgaaattggaaagttcagattccaca

SEQ ID NO: 678704 - DNA, 1493 bp, Homo sapiens
tcttcctcaaaatctgagggacagaaattttgaatgctgctgtctttgtatttcggctgctcagctgttacttaagttgggttgtaaagtttaaaatgtcaaaggttgacaactccaggagccaggaggaatgggaagaaattgcatcagcctgggagcctgaagatcagtcactgggtcattttccactgctcacccatgactctgtttcttagcttcaagttggataattatgcttacctcacagagatgccgggagaattatttgagacaatgtcgtgatagtagtctgcatactcaaaatgatgaaaaattaaaaccaatgtaaaatgccataatttgaaaaacctttagtaattacagagtctgaatcagtgcctgacaatgccagagagaaaactgtcctccaaattatggtccagtctcctagaaaagcctattcatttttaggcacttattcctagggagttttactacgtctgagtctacaaatgaaattcaaatacagaactgagtccgttaaggatggagaactcatactaaaataactatggactgaaggagccaagtaattaaggacagagtagctgaagccgtgaattacctggatggtgctaagaattaagataggacctgtagccaagggctagatgttgtcttcggcccctaatgagactgtaaccctgtggaagcctggttagcagcctctgagaaaccttaacaaatattacataccacgttgataataatgtgtctataattgttgttatagcttctgaatattaaaacaaatgaaagaaaacaagaatacttatgcattatgctacaggtaacagaaaattctattaattttatagttatcaacctacctgtctgtcttctagttttctccagaacaaattaaacatctaactgttaatattagtagtagtagyaataataatagcagctaaagtttattaagcattctctatgtgccaggcattattctgggcaattttcatacacaaccttattttacactcacaaaaactctaggagatagatacagttccctttttacagatgcggcagctgaggttttgagaatgaaataatttctcaagttcacagagttgataagttggagaattaaaggctataaaaacaaactacaatacacaggttcacagtctgaatccataggctgagtttttaacatctaacttctcttctaataaatgtctacagattgatgaattgtggaaaatcaagatattctctatattagttttgctttcctgaggacttcctctaaaagacatttctgttcaacaaaccacctcctatttctcactaattcactcatcacagtctcttccaaaatcacgtttctcaaatccctactgttcttgtatcagttagaaacctttttgttctaacagaaaatctaactcaacttggcaataaagggtatttttgggcttgtgaaattggaaagttcagattccaca

SEQ ID NO: 678705 - DNA, 1154 bp, Homo sapiens
gtcacggtaaggcctagatttcaggtgttgacaacatgagggacaaytgtcacccacttcactcctttcaaactcccactgcactctgaaagaaactctcacactcacacacgcatgcaataccatttgggtctgactcagtataaccttgctttttttttcttttaacataggaacactataatatataggagatgcctcaaagggagaggctacataaatgtaagatattatatatgtattgaggtgataacaactgtatttagagacatgcctctggaatttaaaaaaaaaaaaaattaaatccggaacgttagcactgccggcatttctcccagggcaaaatacatttagcatcctattaaatcaaaggaagtccactgcacacagtggcaagcttttccagctggtgttaacacagattgatgcacatgttcaatcacgctgaacctgacactgggcttcctgaaatttatactacaaaacggaaacgctttatgtgttgcaacttcccaacccctttaaggcaataactcaccaggcagaaatacaattcacttagcattttaaaaatccatgctgaaaacattttctggggctaaagatttcactgaaatagaatatataaaatggaacttgttaaaaaatatcatgtaggagacttgacgggagtcatttttgattatcagtgaaggccaggggaatcaaaggatatggtatgattttttgtgaagtatggcaaaagaaatattaatgcagaattaaaacgtaggagcatgcaataaaatccaagtcaaaattcaaagttgggtacaaatattctattcccaacattttctttttcaaataaaattaaggcatatatttggaaccacagcaatctgtcacctaataataaattaggcctttcattggctcagttttgacacattgatgggtataccattgggaggaatgcttatttttgaattaggaagatctgaactaaaaactggattctgtctataataagccatgtcaataacgtggccttaggcaagtcacaatctcccttggtcccatcatctttaaaaagaggccagagagctctccttgcctacattatacaactgagattaagtgcatgaaactcttctgcaaattacgatattctg

SEQ ID NO: 678706 - DNA, 1410 bp, Homo sapiens
  misc_feature 1025, 1034, 1035, 1036, 1037, 1038, 1039, 1040, 1041, 1042,1043, 1044, 1045, 1046, 1047, 1048, 1049, 1050, 1051, 1052,1053, 1054, 1055, 1056, 1057, 1058, 1059, 1060, 1061, 1062,1063, 1064, 1065, 1066, 1067, 1068, 1069, 1070, 1071: n = A,T,C or G
  misc_feature 1072, 1073, 1074, 1075, 1076, 1077, 1078, 1079, 1080, 1081,1082, 1083, 1084, 1085, 1086, 1087, 1088, 1089, 1090, 1091,1092, 1093, 1094, 1095, 1096, 1097, 1098, 1099, 1100, 1101,1102, 1103, 1104, 1105, 1106, 1107, 1108, 1109, 1110: n = A,T,C or G
  misc_feature 1111, 1112, 1113, 1114, 1115, 1116, 1117, 1118, 1119, 1120,1121, 1122, 1123, 1124, 1125, 1126, 1127, 1128, 1129, 1130,1131, 1132, 1133: n = A,T,C or G
aaactgcaccctcctaccccgtccctctcagggttgggaatgttggccttgatccaacccagtcttttctatggcattttcctccttttttgggaatataatgacattgtcttttacaatatttggggtgttctaccccaaccccaatggccacaggtgcatacactggaagggtgggcaagggacagctccctgctcctttcctttccagctgtggaacatgatttttcttgccacatgtacatgcagcatccaacggctacacacagcaggaatgaaccacagccactgccactgcccagaacccaggatggccttggggacccatgctccacgtggcccgctggccagcatttcccatcactgtctaaggtgtcttcccctttcccagctgaaggatcaagctcagtctgacagaaattaaaagtttctcttcctgttgaagaaactcatttgcataagaataagagatttcttccccaggcatcttttttttcctccaacccgtcagcaattaatgcagctctgtacttaagttttgttttgttttttttttttggttgtttgtttgcttattttttaattttctccaccctgtcagcagttaatacagcgctgcatttaagcctttttttttttttttcttttccccaccaggtcaggagttgttgagtaggtaagaaagtagttgtggttttttttattaataagaatggcagggaccgtgattactcttgcaccaacatagtaacacagccctcttctctataccggagggtttttttttgttgttgttgttgttgttttgttttggaaggtgtcttattagatcaggacaccaattcataagacaaaaatctctcccatgtttgaggaggcagcaaaggagcaacaccactggctgctggctgcagtctgatgagagacacctgggacttgatgagtccatgcacccttgaggcagttcttttgtcccaaactcggttccaagctcaggtcgaagccctaagaaagaaaactggatntgagggatnnnnnnnnnnnnnnnnnnnnnnnnnnnnnnnnnnnnnnnnnnnnnnnnnnnnnnnnnnnnnnnnnnnnnnnnnnnnnnnnnnnnnnnnnnnnnnnnnnnnggaaaggcaggtgtggctgaggtagcctgagcaagctgcagtttacaggagattgttaccagcctgcaggccactagaaggaagtcagattttattctggaggcctttggcagcatagtgacttgatgtgactaacatttttaaaagattatgctggttgyagggtcaaggttaaattgcagaggaacaaacatggaagcagacagactggtatgaaggctctcacattgcttggggcaagacaagttattgcctcattaatctaaagcaatgttga

SEQ ID NO: 678707 - DNA, 442 bp, Homo sapiens
ggctcacacctgtaatcccagcactttgggaggctgaggcaggtggatcatgaggtcaggggttcgagaccagcctgaccaacacggtgaaaccctgtctctactaaaaatacaaaaatttgctgggtgtggtggcrggcacctgtaatcccagctactcaggaggctgaggcaggagaattgcttgaacctgggaggcggaggttgcagtgagctgagatcgcgccactgcactccagcctgggcgacagagcgagactccatctcaaaaaaagaaaaaaaaagttgaggacatggagggcatcatcactttctcaggaagtctgagttaaagagaagacagaggtcaaaggtgctgcttgaagaggtggggcagataccactgaggggagtgagttagagcccccaaaccaaggaatatttgaaaatgtctgtggcccaa

SEQ ID NO: 678708 - DNA, 627 bp, Homo sapiens
aagcggaaaagtcaaggaggggaaagagggaggggtgtggtaacgcacacattgcaagagaaaaggagcaggtaggggaagagtgaatggctgtattcctctcgcactcagtaagttggaacttcacagaagataagatgaacatagagttgctccctgtggagatatttaaccttttatttgtagctgtctgtttaggaacaaaagggaaggcaacgtcttgcrtgactcagctttcagcttactttattccttttggcagcgtgaactggggtcccgcgtttttattttcctttcactagagggcatcaccagaagatatatggggggagataagggttactttacctatagtggaagataagggttcctttgttgagtatatttattcagctcctttgcagccccgttcccagtctctggtgataagggctattttctcgccccgaaatgctgagggttcccctcccagaggaatcttgatggcttgctgcctgcaggaagaggaggtcagctcaccctttctggaaccgcagtttctccaatgttttcaactagaagtaatcagtgcaccaatctagcatttttggggatggcatgtctttcagtccttcagtgggcatctgc

SEQ ID NO: 678709 - DNA, 582 bp, Homo sapiens
taaactccttaaaatttccccatttctttggagaattggacctggacttattttgagaataattaaaagtgaggtttcaccttggtttatgtcaaatcattacaccagaaaatagctaagaacattgttctttatagaatcatgccactagtattattatttattttgattaaaaggatttgttattagaagcaatattttctctcataccaattacatgcaaccaccagcttttgaaagacaaagtaagttgccgccagaatgacccacaagttcctattttcctttttgtctcaaggtcatgttaaaaaacatattcggccttgtatggctacttttgctattttctagtgttactgttcatatgtcctttctcyagtttgggctgctatagtcctttgaagccttgttatttatttatttatttatttattgttgttgttgttgttgttttctatcaacttcagattgaactggcttccttctttcagatggcactcaccatgtcaatgataacaatcaacaaaagacacccatacacccaaagcttgcgccttactgaccaaaacctaatagtctact

SEQ ID NO: 678710 - DNA, 582 bp, Homo sapiens
taaactccttaaaatttccccatttctttggagaattggacctggacttattttgagaataattaaaagtgaggtttcaccttggtttatgtcaaatcattacaccagaaaatagctaagaacattgttctttatagaatcatgccactagtattattatttattttgattaaaaggatttgttattagaagcaatattttctctcataccaattacatgcaaccaccagcttttgaaagacaaagtaagttgccgccagaatgacccacaagttcctattttcctttttgtctcaaggtcatgttaaaaaacatattcggccttgtatggctacttttgctattttctagtgttactgttcatatgtcctttctccagtttgggctgctatagtcctttgaagccttgttatttatttatttatttatttattrttgttgttgttgttgttttctatcaacttcagattgaactggcttccttctttcagatggcactcaccatgtcaatgataacaatcaacaaaagacacccatacacccaaagcttgcgccttactgaccaaaacctaatagtctact

SEQ ID NO: 678711 - DNA, 535 bp, Homo sapiens
tcccaagaaatggagacaaaacacatamcaaagcaaaagaatcttgtcctcatgaagtttatattctaatgaaggatatgaatagtaaagcagaaatataagtaaatatgtattatgttagaaaaggtgatcactgggatgaatgtgttagggaagtatgttagcaagagtcagaagaggccttctcaccgagaagatgacatttcaggaaagacctgaagcaaatgagggaatgagctaggtggccatctataggaaaggcattccaggtagagcggacagcaatatattccttgagggtggagtataaggtggaagatggtgacaatacttttcccaaagttagacacataaagtcattaatattcaaaatggtaagctgcttctgatgacaaagtagaagccaatgatgagggcatgttgtagatcgaaccaagtactgagaatcattgttttgactatggtgcaaatagggtttgctatcattctatattagtccattttcatgctgctgataaagacataccagagactg

SEQ ID NO: 678712 - DNA, 574 bp, Homo sapiens
agattatgactataagagatatttcccagatagagtgttagtcaggatgtttttgagagaaagggaggagtcaagattgaacatagattcctgtattagtcaaactgaaaaaaaatcaccaaaacaaagaagaatcaggtttgagggaactaataacgttgactttgaacaccttgacattgagggatctgtatgatgtcctcatgaaaatggccagtgggtagtatgtagatatgttgatctggcaagcaagatgtgagtaaagatgacatttctgaagtctcattaaaccgtcatcatatctcagtttagggctgacatcctatatttaaaattgcttgtttgaggcctgcactcctaaagagtaagcttcctgagggtgatgacatatttccaccttagtgttgctcttacaggaatcctcagcctgttttccaccaccaactaatgacaggtaataactctcccatgtaacatactcaaatgggaraacatagggcaataaaccttttcttctaagtatattggaatgtaaataagtgagaatgctttcttttgcaggttttttttttta

SEQ ID NO: 678713 - DNA, 647 bp, Homo sapiens
tttttgggtaaattaaatattagaactgtcctttgggaagacactacccaaatttttgttgacaaccaaaagacctggccagaactctaaggcaaagatagtgaagtggaggaaattttgcactctatattgttagacctttcttgtccctactcttctccttcgtctcttgatctctactgattttagaatgaatctctacaaaaccagttatttcatcctaattttttctgacttggaaaaaaagatgaaaaactctttcatatagtgctagggaaagaagaacaatgattctcaggaatattttcgtcttaaagaattatcgaggtccattccaagatggctgaataggaacagctccggtctgcagcttccagagtgactgacacagaagatgggtgatttctgcatttccaactgargtacctggttcatctcactgggaatggtcagaaagtgggtacagcacatggagggcaagcctaagcaaggtagggcatcacctcacccgggaagcacctcacccggggtcaggggatttccctttcctagccaaggggagccgtgacagactatactgggaagatcggctaatcgggacactgccacctaaacactatgcttttccaacggatttagcaaatgga

SEQ ID NO: 678714 - DNA, 630 bp, Homo sapiens
gggaaaaccagagcagcccccagagggggaaattcctattgtgtccaaaggtcaggtgctaaattcacagcagtgaaaaagtaagacatcatagagttctaaaatactaccattttcaactgactgctggctcctaacccaagactacagatctttcaagtgaaggtgaagtgcagacctttctggagaagcagcacatgctaactaagggaaatgcraaaatgtgaaatatccccggggaatgtggaaagggaacgaaggaacgcagggcgatgtgtaggtttaatgtgtggctcagtcaaatagtacgttttactaatccaatgatcataatgatgtccatgtgacttaaaatatatggtgccttaaaattaatgagagtaacttgagaatcacaaggagggtaaatggaattaagatgttccagacttctagcattgtgtaggaagagtaaaaaggtctaatttactccaaactttattatacagattttacagtatgtatataagtaaaaaatatatctcagggttaaaccaatactaaaacaagtattcattttgggattttggcagtttaaaaataattaacattatttttatattaaaaatgtaaatgtaaaaagtgtaccat

SEQ ID NO: 678715 - DNA, 630 bp, Homo sapiens
gggaaaaccagagcagcccccagagggggaaattcctattgtgtccaaaggtcaggtgctaaattcacagcagtgaaaaagtaagacatcatagagttctaaaatactaccattttcaactgactgctggctcctaacccaagactacagatctttcaagtgaaggtgaagtgcagacctttctggagaagcagcacatgctaactaagggaaatgcgaaaatgtgaaatatccccggggaatgtggaaagggaacgaaggaacgcagggcgatgtgtaggtttaatgtgtggctcagtcaaatagtacgttttactaatccaatgatcataatgatgtccatgtgacttaaaatatatggtgccttaaaattaatgagagtaacttgagaatcacaaggagggtaaatggaattaagatgttccagacttctagcattgtgtaggaagagtaaaaaggtctaatttactccaaactttattatacagattttacagtatgtatataagtaaaaaatatatctcagggttaaaccaatactaaaacaagtattcattttgggatttyggcagtttaaaaataattaacattatttttatattaaaaatgtaaatgtaaaaagtgtaccat

SEQ ID NO: 678716 - DNA, 664 bp, Homo sapiens
tgtggtattcatacaatttacttttaggttagtatagtacatctgaaatttattcttatttctttagttttcattctttctatcctaactaaatattttgagtattaattacaccatccagcaaatgaattatctagtgccactttaagtatgttaatatattttccatatctcctttcaactttaagcacataaacggttaggaacaagtagcatgccattagagacttctattcaagttgatattcaggttgatatcaagtattttctaggtatgattgttcaagtagctaaaaaaaaagccattaatctaattaattgtttaatcctgcttacaagattatcttgaaaaaatgtgctggggagtatggtataatgaattacrggtccaagaatttgggttcagataccaccttcagtctttactaagctgcgtgactttagcaaagtgcttagtctctctaagcttcggtttcctaatctatgaggagggcctaagatatcaccacccatcatattcccccctctgtaccgcttattttagattctactatcattgtatatcacagaggacatttatcttgttcatctttacaatcaacacttagcaagacagatggtacttagaaggccccccaggtatctgttaaactagacaacctca

SEQ ID NO: 678717 - DNA, 623 bp, Homo sapiens
tcttgtaataatttcatagtttgaggtctagcttctgaattatcagggaggcagatttgagaaataacatcgtctctatcatcctttcatttgcctggccctgcaattattaagctctttctttgctgcagtacctgctgttcctagtrcattgtcttttctgggcagcaggaagaaagaacccattgggctatgacagtctgacttccagtgccagaggaaattcactcactgcaaatgtcatttacctagtacttccaattctccttccaggcacatggaagtattacatttccctgccccttggagccaagcttggccatgtgacatgctgtgtgaaccacagtggtatgtgtcacttctgggtggaagcattcagagctagtgtgtgattttccgtgctggaggttccttatgctgtgggaaccactattgtatcagacagtggcttctctgagaaagctgctcagcctccaagggggacacagtctccagagctcactcctgacttggccaaagagaaagaatattcccagagggctgatccagagatctcagtaggcagaggacaatgggagcttctttcagagctggaaatgaaggcctaatcaagaaacaatccc

SEQ ID NO: 678718 - DNA, 623 bp, Homo sapiens
tcttgtaataatttcatagtttgaggtctagcttctgaattatcagggaggcagatttgagaaataacatcgtctctatcatcctttcatttgcctggccctgcaattattaagctctttctttgctgcagtacctgctgttcctagtacattgtcttttctgggcagcaggaagaaagaacccattgggctatgacagtctgacttccagtgccagaggaaattcactcactgcaaatgtcatttacctagtacttccaattctccttccaggcacatggaagtattacatttccctgycccttggagccaagcttggccatgtgacatgctgtgtgaaccacagtggtatgtgtcacttctgggtggaagcattcagagctagtgtgtgattttccgtgctggaggttccttatgctgtgggaaccactattgtatcagacagtggcttctctgagaaagctgctcagcctccaagggggacacagtctccagagctcactcctgacttggccaaagagaaagaatattcccagagggctgatccagagatctcagtaggcagaggacaatgggagcttctttcagagctggaaatgaaggcctaatcaagaaacaatccc

SEQ ID NO: 678719 - DNA, 933 bp, Homo sapiens
tatgtatgtctatgccataccaaaaacccaactactaggttcaaatcccagcttcatcacttttacatgcatgattttcattagaccatttaacttccttgtgactcgttttcttcatctgaataatagggagtagaacacttattttatggggtgccagaaaggtgagtaagatcaggcaaggaaatcacttgagagtgctatatactggaaattgcaccataagtagtggtctttaaaagaatcaattaacattattttgtttttaacatgatactttgcaagtttcgtaacaccactgttaaaaatgtaatgacctgtaagcccagcactttgagagtccaagacgagcagatcatttgaggccaggagttcaaccaacctgtacaacatggtgaaatgccatctctatttaaaaaaaaaaamgaaagaaagaaaagaaaaagtgcaaaaaattaaccagatgtgatggcatgcaccttaatcccagctactctggaggctgaggcaggagaatcccttgaacccaggaggtggaggttgcagtgagagtgagctgagatcgcaccactgcactccagcctgggcaaaagagagaccttgtctcaaaaaaaaaaaaaaaaggatgtaatgagacagagaaacttttattaaatgagattcctctgatgaagtgctgtctttttattgggtagaaatattttgataaactgattggcattgagggtaagacctcagggtcatgcttcaggtgagaaaaatgctaaattgagattcaagaggcaagatgcagaattcactctacttctgagaaaaaaggaagagaagaaaagtaaaatggggtggggactggggtgggagagagagagagagaaggagagagatagaaaaaaaaaactttagaattttatgcccgggttacctaacccaatc

SEQ ID NO: 678720 - DNA, 597 bp, Homo sapiens
tttcatatttttgtgttcactttattttcattattcatttattcagtgaatatttattgtgccaccatatgccaagcacagctgcaggccttgaacgtacagtagtgagcaaagtgcctccctcgtggagtctgggtgtgagtgagggtgccattttacattgaggggtcaggaaaagtctctctgatatggtcacatatgatcaggaacctcagtgagtcccctcctgtcaccctggagcctgtggaggcctgctgggaacaggacttcttaaaaggaaatacgtctggaaggctgtggtcyaagtccttttttgctggctataagcggagcctccagaaccaaagggagcatacagctcttcttaaaattgaaggtggttatgcccaagatgaaactgaattctatttgggcaagagatgtgcttgtgtatacaaagcaaagagcaacacaatgattcctggcagcaaaccaaacaaaagcagagtaatctggggaaaggtaacccgggcccacaggaacagtggcatggttgctgccaagttccatagcaatcttcctgctaaggccggcccggcgcggtggttcacacctgta

SEQ ID NO: 678721 - DNA, 1443 bp, Homo sapiens
  misc_feature 341, 342, 343, 344, 345, 346, 347, 348, 349, 350, 351, 352,353, 354, 355, 356, 357, 358, 359, 360, 361, 362, 363, 364,365, 366, 367, 368, 369, 370, 371, 372, 373, 374, 375, 376,377, 378, 379, 380, 381, 382, 383, 384, 385, 386, 387: n = A,T,C or G
  misc_feature 388, 389, 390, 391, 392, 393, 394, 395, 396, 397, 398, 399,400, 401, 402, 403, 404, 405, 406, 407, 408, 409, 410, 411,412, 413, 414, 415, 416, 417, 418, 419, 420, 421, 422, 423,424, 425, 426, 427, 428, 429, 430, 431, 432, 433, 434: n = A,T,C or G
  misc_feature 435, 436, 437, 438, 439, 440: n = A,T,C or G
taatttttaaattttttgtagagacaaaaatctccctatactgcccaagctggtctcaaacttttgggctcaagtgatcctcctcgttcagcccccaaagtggtaggattacaggtataagccaccatgcccacccctcaaaattttaaaaaagaagaaaaaatgtttatggttgctactatgggaacttgcttcttacaggaaaatctccatgggaagtgacattacacttaagttattaattgggcatagatcggcataagaggactaagttggatgatcctcatggcccaccaagccacgaaagcctcatcattcatcagtgttgtaagaaggtatannnnnnnnnnnnnnnnnnnnnnnnnnnnnnnnnnnnnnnnnnnnnnnnnnnnnnnnnnnnnnnnnnnnnnnnnnnnnnnnnnnnnnnnnnnnnnnnnnnnaccagagcatccttcaagtccacatttctactaataacctattcaaggtaatctaggctttttctaccatgctcctaaacgtttttagtatcaccacccaccacctgattataagctatttccacatggttaggtatttgttatagcagtacctcattcctggtaacagaatcagtatttgttttcttttttctttttttttttttgacagagtcaaagtctcttttgccatgtaataaaacattcacagattctggagattagagcgtgaaaatctttgggggatcattattctgtccaccacagaatcccacaaatctcccaagacatggctaagaacagggaaggaggtgggaactgaaataaaaatagtccctaggagccaaaggaaattgggaaggattcagtagggtttatggtcctcagtttcagagtaattccataggatagaggctgagaggactgagcaacctctcttagcagcctaacagtccagaaaggcctttctggtttgactaatgaacacaaggaaggtaagtctaggcagcaaagaagctcaagtgaaaaaaaaaaaggctctatctttagtcattataaatgcatctgatcagaagtttgacagtgagagtagggagatagggcagcccctgccctctaacccggcagcttgatagaagttgcagacaccaacatgtaaatcatattaagataggctgtgatacctaaatagaagacttctgaatcctggaagagtgtgcaggaatctatttaaggatgctkccatttccatctgctataatttaaattactttgaagtgtgatatttaaacttttactagaaaattaatcaaagaatctcattcatttcagtttgcttttctgtggtgttggctcaccagtacagaaatgtgataagataccatatttagtttagcacttaagtcaaagttacaaggctctcttaagtatatatactgatgttagtgtgttcatcatcattttc

SEQ ID NO: 678722 - DNA, 1443 bp, Homo sapiens
  misc_feature 341, 342, 343, 344, 345, 346, 347, 348, 349, 350, 351, 352,353, 354, 355, 356, 357, 358, 359, 360, 361, 362, 363, 364,365, 366, 367, 368, 369, 370, 371, 372, 373, 374, 375, 376,377, 378, 379, 380, 381, 382, 383, 384, 385, 386, 387: n = A,T,C or G
  misc_feature 388, 389, 390, 391, 392, 393, 394, 395, 396, 397, 398, 399,400, 401, 402, 403, 404, 405, 406, 407, 408, 409, 410, 411,412, 413, 414, 415, 416, 417, 418, 419, 420, 421, 422, 423,424, 425, 426, 427, 428, 429, 430, 431, 432, 433, 434: n = A,T,C or G
  misc_feature 435, 436, 437, 438, 439, 440: n = A,T,C or G
taatttttaaattttttgtagagacaaaaatctccctatactgcccaagctggtctcaaacttttgggctcaagtgatcctcctcgttcagcccccaaagtggtaggattacaggtataagccaccatgcccacccctcaaaattttaaaaaagaagaaaaaatgtttatggttgctactatgggaacttgcttcttacaggaaaatctccatgggaagtgacattacacttaagttattaattgggcatagatcggcataagaggactaagttggatgatcctcatggcccaccaagccacgaaagcctcatcattcatcagtgttgtaagaaggtatannnnnnnnnnnnnnnnnnnnnnnnnnnnnnnnnnnnnnnnnnnnnnnnnnnnnnnnnnnnnnnnnnnnnnnnnnnnnnnnnnnnnnnnnnnnnnnnnnnnaccagagcatccttcaagtccacatttctactaataacctattcaaggtaatctaggctttttctaccatgctcctaaacgtttttagtatcaccacccaccacctgattataagctatttccacatggttaggtatttgttatagcagtacctcattcctggtaacagaatcagtatttgttttcttttttctttttttttttttgacagagtcaaagtctcttttgccatgtaataaaacattcacagattctggagattagagcgtgaaaatctttgggggatcattattctgtccaccacagaatcccacaaatctcccaagacatggctaagaacagggaaggaggtgggaactgaaataaaaatagtccctaggagccaaaggaaattgggaaggattcagtagggtttatggtcctcagtttcagagtaattccataggatagaggctgagaggactgagcaacctctcttagcagcctaacagtccagaaaggcctttctggtttgactaatgaacacaaggaaggtaagtctaggcagcaaagaagctcaagtgaaaaaaaaaaaggctctatctttagtcattataaatgcatctgatcagaagtttgacagtgagagtagggagatagggcagcccctgccctctaacccggcagcttgatagaagttgcagacaccaacatgtaaatcatattaagataggctgtgatacctaaatagaagacttctgaatcctggaagagtgtgcaggaatctatttaaggatgctgccatttccatctgctataatttaaattactttgaagtgtgatatttaaacttttactagaaaattaatcaaagaatctcattcatttcagtttgcttttctgtggtgttggctcaccagtacagaaatgtgataagataccatatttagtttagcacttaagtcaargttacaaggctctcttaagtatatatactgatgttagtgtgttcatcatcattttc

SEQ ID NO: 678723 - DNA, 604 bp, Homo sapiens
tgtttaccataaatttcaagaaagaaacatttctggtccctttccttagtttgggggattctccttagtttatttattattattattcttttaagaaggagtttcgctcttgttgcccaggctggagtgcaatggtgcgatcttggctcatcgcaacctctgcctcctgggttcaagtgattctcctgcctcagcctcctgagtagctggaactacaggcatgcgccaccacgcctggctaatttttgtatttttagtagagacgggatttcaccatcttggccaggctggtcttgaactcctgacctcgtgatccacccgcctcggcctcccaaagtgttgggattacaggtatgagccaccgcgccaggatgatgatgatgatgatkattattattattattattattgagacagtctcactctgttgcccaggctggagtgcagcggtgagatctcggctcactgcaacctctgcctcctgggttcaagtaattcttctgcctcagcctgccgagtatctgagactagaggcacgtgccaccatgcccagctaatttttgtatttttagtagagacagggtttcactatattggccaggct

SEQ ID NO: 678724 - DNA, 1414 bp, Homo sapiens
ttagtgtcactaacctaaaaaaaaagaaaaattggtcttgctaaactttcctgcaacataccctactatatgtgcaagtataacttggtctttttgacatcaccctgtgggaactggggctcagggtattggcaggagtgcttatactctggctacatatatgagtaataaactgtcatttgcctctgatccaggaatcttgtgtcttcagccagcgcctgtaaacctgtggtaggatatcatgttagcttgcaagtagggtaaaatctcagatccttcacagttctcaacagtcagtatagcttggaaatgatcatcttctttgctcaagtatggaaatattttaaaagataatattatcacctaaagcccaagtaaaaactggacttcagggccaggtgcagtggctcacgtctgtaatcctagcactttgggagactgaggtgggtgtattacctgaggtcaggaatttgagaccagtctggccaacgtggcgaaacccgtttcttttttttctttttccttttttttttctttttgagatggagtctcgctctgtcgcccaggctggagtgcagtggtgcaatctcggctctctgcaagctccgcctcccgggttcacgccattctcctgcctcagcctcctgagtagctgggactacaggcacccgccaccacgccctgctaattttttgtatttttagtagagacggggtttccccatgttagccaggatggtctcgatctcctgacctcgtgatcggcccgcctcggcctcccaaagtgctgggattacaagcgtgagccaccgcccccggcggcgaaaccccgtttctactaaaaaacaaaaattagctgagtgtgatggcctgtgcctgtggtcccagctacacgggaggctgaggtaggagaatcgcttgaaccggggagacggaggttgcagtgagccgagatcgagccactgcactccagcctgcgtgatagagactcagtctcaaaaaaaaaaaaaaaaaaaaaaagaagccaaaaaactggacttcaatttccctaagctcccgtcactgcaggagaggtgttgggagtgagtagagctcttgatcattttgactaggtttctagtccattataaaagatctctggctctcctgtttcccaattatctctagtttaagggrtaaagagacataatatgtaattatacatatgtgttggcttgcactggattttgtatttagtaatagtgcctagttttaccctttttgttgtgtttgtatatttatgtaaaagcatcatataaacattttgtcagtttgtttagatggcttcatcagtaggctatactctgtcacatggatactgacatctactttgaactggatttttccattcttccttagatttggctcttgtgaac

SEQ ID NO: 678725 - DNA, 594 bp, Homo sapiens
tcgtgaaatcccgtctgcactaaaaatacaaaaattagccaggtgtagtggtgcgcgcctgtaatcctagctacttgggaggctgaggcaggagaatctcttgaacccaggaggtgaaggttacagtcagccaagatcatgccactgcactccagcccgggtaacagagtgagactccatctcaaaaaaaaaaaaaaaaagactctatgatcatctttaaaattcatgatttcttcatatacttgctcctcaaaagaatgcctttgacacacttaaaagagctagttaataatgaatgycccttccttactagttagcagagaacctgaaaacttccttatcttattctgcttctgaaggatctatgtactcacagaaaaatgtgacttcttacaacagtccagggaaaagaatacctacctcaatttacgagtgaaaacttgcatgagaacattgttgaactaagtaaaaagttccaaagcagaaatactttcaagagagtccagctacttcctagactcctgagtaagggatttcaatattttcaaagattactatttctacactttctccagaagttgactatagagaaag

SEQ ID NO: 678726 - DNA, 674 bp, Homo sapiens
tgggattccaggtgcacaccaccacaccaggctaatttttgtgtttttagtagagatggggttttgccgtgttggccaagctggtctggaactcctgacctcaggtgatccacctgtcttggcctcccaaagttctgaggttacatgtgtgagctaccatgcccggccccagttttccttttcttggtgcacccatcatttgttagaccctcctgagtaaaagacgcacatgggagggaaaaaattgaggattcgcatgttagagaatacctttattattttctctcagttgtttctagagtaatggtttgaaattaatttttagttagcatttcaaaggcttatgtttccatgtgaactgtttgttttggctttttcccctctttggaagcttttagggacttccttggtgttctgtaatttttgtggtatggtttatgcagatttttgtttgtttttgagattcatctatgcttttgcatctatcattaatttattgcttttatggatgtgtattattccattgtatgggtatgccacaatttgtttrtccactctcctgttaacgggtgtgtggttatttcaggttttgggctttacaaataaaactaccaagaacatttttgtgcaaggatttgtatgatcatatagtttcattatgcctagataaaaac

SEQ ID NO: 678727 - DNA, 930 bp, Homo sapiens
tgaaacatctataggtcacattgattatttcccattaaaaatgaaaaggrttctattaaatccaataagggggaaatgaatattccttcaatttaggtttgttccttttatggaataaagtaataacgcgttagataagtgtcactgctttttagccattcatacattaccatttggaattctttagtatttacaacccaaagttggttctctaatctatttctcatctttgtgtgataattttacaaaatgtcctcttcatttttgaagacaaagaaacgtgaaacgtccacgatcaaatgatttccccctgtgttgtattagacaaacccgaagcaaagcctccggagggcgctggagaagccgcagctgcagacaccgcgacagtctcaagacacttaagctggaagcgaatgtggcatttcaaagaggcacgaaatgcaaccggctaggaaggagggattccgccgcacggctgcggcgtccgcgggacagagacgcctaaccggaagagctagcaggaacgccggacgccgctgggaggtgtccggaagcgcggcggaacggcggactacatttcccataagcccgcggggcagggcgaggggcgggcgtcggggacattaccggacaggccttgtccggcaataccaaggtaaatgccggcgccgcggctcagagggaagagtaacttacgatctgcgcctagatttttcctagtaaccctcctaacccatccccctaactgacaaaaacgactcttccatccgggagactttgggatttccgggctacaggactccaccccccacaacctagtcagtcccaccaccaacgttcggcctggggcacttcccaaatgcctaaggacgcagggggttgcgctagtaagttgaaggcccagggcaccccctttctagggttgacgac

SEQ ID NO: 678728 - DNA, 930 bp, Homo sapiens
tgaaacatctataggtcacattgattatttcccattaaaaatgaaaagggttctattaaatccaataagggggaaatgaatattccttcaatttaggtttgttccttttatggaataaagtaataacgcgttagataagtgtcactgctttttagccaytcatacattaccatttggaattctttagtatttacaacccaaagttggttctctaatctatttctcatctttgtgtgataattttacaaaatgtcctcttcatttttgaagacaaagaaacgtgaaacgtccacgatcaaatgatttccccctgtgttgtattagacaaacccgaagcaaagcctccggagggcgctggagaagccgcagctgcagacaccgcgacagtctcaagacacttaagctggaagcgaatgtggcatttcaaagaggcacgaaatgcaaccggctaggaaggagggattccgccgcacggctgcggcgtccgcgggacagagacgcctaaccggaagagctagcaggaacgccggacgccgctgggaggtgtccggaagcgcggcggaacggcggactacatttcccataagcccgcggggcagggcgaggggcgggcgtcggggacattaccggacaggccttgtccggcaataccaaggtaaatgccggcgccgcggctcagagggaagagtaacttacgatctgcgcctagatttttcctagtaaccctcctaacccatccccctaactgacaaaaacgactcttccatccgggagactttgggatttccgggctacaggactccaccccccacaacctagtcagtcccaccaccaacgttcggcctggggcacttcccaaatgcctaaggacgcagggggttgcgctagtaagttgaaggcccagggcaccccctttctagggttgacgac

SEQ ID NO: 678729 - DNA, 597 bp, Homo sapiens
tctcactctgtcacacaggctggagtgcagtagtgggatctcagctcactgcaacctctgcctcctaggttcaagcaattctcctgcctcaacctccaggtagctgggactacaggcacatgccaccacgcccagctaattttctgtattttttttagtagagatggggtttcattgtgttagctaggatggtttcaatctcctgacttcgtgatccacccayctcatcctcccaaagtgctgggattacaggtgtgagccaccacacctggcctgcaatgcctatttccttttaggtaactatctctaattttcaaataatttgatagtattctattacatacatatttataaaatgttcagatcttattgtattctcatatttttgtaagcttatgttctttaaaatgaactcagaacctcgaaacactgaattttttataattattgtttatttcttggaaattatttacagtattttttagtcctatgctgtattctagaaacccaaaatgctgcaatatgccagttggaactgtgtttcattctgtcttgtgttttccctaaacattgctaatgtgattaatgaaccagact

SEQ ID NO: 678730 - DNA, 597 bp, Homo sapiens
tctcactctgtcacacaggctggagtgcagtagtgggatctcagctcactgcaacctctgcctcctaggttcaagcaattctcctgcctcaacctccaggtagctgggactacaggcacatgccaccacgcccagctaattttctgtattttttttagtagagatggggtttcattgtgttagctaggatggtttcaatctcctgacttcgtgatccacccacctcatcctcccaaagtgctgggattacaggtgtgagccaccacacctggcctgcaatgcctatttccttttaggtaactatctctaattttcaaataatttgatagtattctattacatacatatttataaaatgttcagatcttattgtattctcatatttttgtaagcttatgttctttaaaatgaactcagaacctcgaaacactgaattttttataattattgtttatttcttggaaattatttacagyattttttagtcctatgctgtattctagaaacccaaaatgctgcaatatgccagttggaactgtgtttcattctgtcttgtgttttccctaaacattgctaatgtgattaatgaaccagact

SEQ ID NO: 678731 - DNA, 1310 bp, Homo sapiens
cttcattatgtaggcttgattgattaagccagtggccgttggtggtcagcttgacctttagcacccctccctggaggttgggggtagggctgaccgtccaaccctctaattgtacctttatttttcaggtgaccagccccgccctaaagctgttagtcaatattagcatacaaaaatagagctatttggagataacaaggagtttaggagccctacctcaggawatagggatgaagaccagatacatattgcacaatatcacactcactatttattctcctattcttggacattgaggttgtttacagttttataatattatggtgttacagtaagcatttgtgtaaatgtctttttttgggtcggggtgggggcaaggtagagggtcttcctgtgttttccaggttgatgtcaaactcctggccaagggatcttcctattttgataggtctttttatccacgcatgtatcctggggtttctatttgtcctttctcctgtctggcattccatgactcttgcctgaattcagtagctcaattctcacatctgaagaatttttctttaactgtaacatttgattgatgggtcatttttcttagctttataaaggcattgcttcagtgcctttaaacttacagtgttgctgttgagaaatccaatgccataatgattcctgattttttttagctgttctgcttttttctctctggaagctttcagaatttctactacagaatgtctgagtaccaaggataatgtgccttgagatggatcatttttctttaaaaaaaattactatgaaatatttcagacgcagatataaagaataataacaatcactctggcccaagaaataaaacatcatcagtgcagttgaaccctaccccccaccacccttttttatgtggaaatccatcctttatggagttttttcttgtattacttgttaattttctttctcagttatcgtttttttctgaaacttttattaattgtatattaggcctcccgattcaacctcaattttcttatctttcctattatatttttcattgtcttttttcctgctttctgggggtagatttaactagcttcttaatgttgattaatgtcagctgtaatgttttcagtttgagagcttgttcttgttctctgtcccttttttaataacttcctattgtttcatggatacaataccttttttcatctctctgatactaattatacttgtttttaagttttcttttatactcttaagttgttcaagttcttttttatttttattttagtcttctggttatgttttca

SEQ ID NO: 678732 - DNA, 1337 bp, Homo sapiens
agtcatccctgcaggtagaaatgtagacagacatttagccccacatggagtagactatggctacccacccagcatccattcctcccctttaattccctgacagaaccctaattttyattaggcatctcattctgccctgtatgtgacctcattcacaagctccagagttaatttctgatgagtactggtaaattatggtaagctcatttcccctgacagtgactgatttaggaatagacatgaactgattctgtctaatagtatgaaaggaaatatgctgaagagacttctgggaagtttcctagctcctaagaaagaagtacaagaaaagatactatcttcttctattagatatagccaaatcaagatgtgatgtctagaactgcctcagccatctagcaactataaagggagctagtgtaagtaaatagcctaagccaagagaatgttagaacagagaaaaggaaagaatctggtcccttgataacagcactgacacactgaccatatggtgcctagaaccaacctctctggacttctcgatatacaagacagacattttattttataaacaagtttgaaccaaaatttttgttgcttatagccaaaaacatcctgataaactttcagccagaaaaactgcacattctctaaacacatggaaattgccacaaaaatagaacataatcctctgaaatttgggcacatcatttagtgtccatttctatgcctgttcactctaagttgacaactgacaattgtctacctgttgacaagactcaccaaaatataaatagaactcacaatagacccaatgctttattttaacatatgaatgggtcaaccgagaatcaccagcttctgaagatagcagcctgacagagaaaaaccaaaatgaacaatgctaaaattttaaaacaccaaagaaaggttagaagacaaaagtccagtaaatgtctccgaatcaaaagcaaaaagataataggaaatatgaggaccatcaaaccaggagctctattattcaaccaatagtagtttcagaaagaaataagagaaaatgaagaagaaattaccaaaccaattaagtaagaaaaattatcagaaaggaaaggagacatgaatctttcaatttaaggtgactactaaacaacaaaaagtataattaaaaaataagaatgaaagactcaagacatattgtgaaatttcagactgctgatgatagaggatgctataagcttgcagacaagaaaaaaataggatacctacaaaagaataaaaattacactagcattaggacttctcataaataatattagatgccagaagacaacagagca

SEQ ID NO: 678733 - DNA, 1310 bp, Homo sapiens
actcagaaggaaatgagttattgggtttaatttatgtactgattagaggcaatacagtaagtaaaaatatgtaaggtttttatcccatatcccaatagcttaacacatgtaacaaacagatgtaagtgtgtatatacatatatacataaagtcacttgtgcacacacatatgcacacacacactattgagactatgcagaatagtgaaaataactagcacttatcataaccttaactttgtagtgaagaatagcccacaggttcatatggrgttgaaaattctacttatattaatttttttaggcactaagctggcctgaaaaaaaagacttttggctatttatgaatgcatttcttttacttttctgagccacactttctttagcagtaaaatggagaaccaaagtagctgatctaattcatgaaacgtgtttttcagaggagttcatatatataaaagcactttgaaaagtggaagttctcatagaaatagaagtatagctatcattcattcattcatttattcaatatgtatttactgagcacctattatatgctagggactatactaactgctggggcctcattgatgaaaaagagaggtctatttggagagggtgaagaaaattggaagagccttgtgagattttacattgccatttaataggtgtatcatttcagataggtgtagaatagaagataatatcttttgggactatgtcacaagatggctataaaaatcaaatggggtaattgttgtaaaatctaaaaagtgctattcagctttgatcctgccaaagagaacaaagaaattggaagaagattgaatcatggaaactcttccaagctaaggttagtgatagaagaaaaaaagagaaaaggaagtgaaaatcaggcaaaggagacaggaagcaggaaaacgagaggcattaatacatgggaaatataaactagttgtactaaaaatatttttcagattttacctagtttaatatgttaaactctttggtcgtattccagcaatatatcctgcaaaatttggatataagtaaattaaaaagcctctttgactcttatttttacattctaaatttaaattttaattaatctaattctaaagttgatttctatcttaaagaaaggcatgctcactctacaaaaacagcctgcatttgcaatttatcctggacctgatttttcatctacttttctcaaaaaggtctttgctctgaacttgaaaaaagggcaacaattgtagcaaaaggaagactctctccccttggcaatagatgtctagttgtgcatgggag

SEQ ID NO: 678734 - DNA, 1310 bp, Homo sapiens
actcagaaggaaatgagttattgggtttaatttatgtactgattagaggcaatacagtaagtaaaaatatgtaaggtttttatcccatatcccaatagcttaacacatgtaacaaacagatgtaagtgtgtatatacatatatacataaagtcacttgtgcacacacatatgcacacacacactattgagactatgcagaatagtgaaaataactagcacttatcataaccttaactttgtagtgaagaatagcccacaggttcatatggggttgaaaattctacttatattaatttttttaggcactaagctggcctgaaaaaaaagacttttggctatttatgaatgcatttcttttacttttctgagccacactttctttagcagtaaaatggagaaccaaagtagctgatctaattcatgaaacgtgtttttcagaggagttcatatatataaaagcactttgaaaagtggaagttctcatagaaatagaagtatagctatcattcattcattcatttattcaatatgtatttactgagcacctattatatgctagggactatactaactgctggggcctcattgatgaaaaagasaggtctatttggagagggtgaagaaaattggaagagccttgtgagattttacattgccatttaataggtgtatcatttcagataggtgtagaatagaagataatatcttttgggactatgtcacaagatggctataaaaatcaaatggggtaattgttgtaaaatctaaaaagtgctattcagctttgatcctgccaaagagaacaaagaaattggaagaagattgaatcatggaaactcttccaagctaaggttagtgatagaagaaaaaaagagaaaaggaagtgaaaatcaggcaaaggagacaggaagcaggaaaacgagaggcattaatacatgggaaatataaactagttgtactaaaaatatttttcagattttacctagtttaatatgttaaactctttggtcgtattccagcaatatatcctgcaaaatttggatataagtaaattaaaaagcctctttgactcttatttttacattctaaatttaaattttaattaatctaattctaaagttgatttctatcttaaagaaaggcatgctcactctacaaaaacagcctgcatttgcaatttatcctggacctgatttttcatctacttttctcaaaaaggtctttgctctgaacttgaaaaaagggcaacaattgtagcaaaaggaagactctctccccttggcaatagatgtctagttgtgcatgggag

SEQ ID NO: 678735 - DNA, 663 bp, Homo sapiens
ttaaattaaaaagaaaattttgtgttctataaaatttgaaattttcaattttaactttaaaattttcaacttttaaaatcacaaggaacataaaccaggtaaatggatagtatttatttatattttacttattttagagcttaattttaaatagataatactatttatacagttcaaaattaaaaggtacacaaaatggtaggtattataaagccatcttcctagcctagacattatattctctacattatatggcccatggggataataaacattgccartttttctgttatctttgttgatatattttataaaaccacatataagatatctatatcaatcttctcttaaaaacacaaatgatagtagaattacttttttgtcacttgacttttttctctcaataataaaattcagagaccatgatatttagtatgtggcctaaatattttttcttaaactgtatcttaaaatttctgttctgttatttcattttcttttcagagactccaattatttatatgtttgatctctgccttagcctatttggggtcttataacaaaatagcatgaattgggtagcttataaacaacagaagtggccgggcgcagtggctcacacctgtaatcccagcactttgggaggccgaggcaggcggatca

SEQ ID NO: 678736 - DNA, 740 bp, Homo sapiens
aaggatttacctcaaacaattgtgtaaaaatccgcatttctccagatagtagtgatttcaaaccaagcaaaacttattcccgtttaactttttttttaccaggctcagaaaaggagatgctatgatccatcttgaaaacgcccatgagtcaattctaaacaaccttgaaagattatctttcagactctaacaggagaccaacataaataaaatwatccacttttagaaaaagacatttttttctaaatattattgtcttttgaaattatattaacatgctgcattcttcttctgattaaaaaatacatattaaattacaatgtagcctattttgctgaaaccagaaattgtttagatcaagtaaagagaccagctggtccaaagaggagcctgtgagagacccagacaagcatcaccctggctccaaggagacatcaaatcagatagcagcaacgaagtgactgtcctgcctggtgaatcaccatagctcatctgtgtctggaaatggcaatgcaagagtaacttacactcacttgcattattgatagctggatcttcagacctagacttggaaaaggctttccactactgtattaatggattcttgcactgctataaagaagtacctgagattaggtaatttatatataatatatatatatatatttttaacttgtggtaagagccatctactcaaatctaagagttagtgagttttaatgtttctttttttttttttt

SEQ ID NO: 678737 - DNA, 654 bp, Homo sapiens
attctatggaataaaagtcaatgaagattttgcagagattgcttgtatatatagccaatacgaaaaaaattaattcaaaaaattaatataattaatcagatggctcagtttgaaagaattattatattggctctggggaggggaataaatctttttattatttattgagtgcttgatattctaagcaccttacatgaggtaaccaatttaatttcacaacacatgtaaaagaaagtactatatcatcccaattttaaagaagaggaaactaaagaacagagagcttgtcagcttcatcttcacaggatctgggctctccctcctagtagcaaaatgcagcagttttagccttcacacctttatgtctctttccagagaaaaagaaagtcttctctggattcacattctcattagcatgattgtgttacatgctcttstcgtgcggacagggaggctgggatatgactagaacaagccaatcagagcctacacctaagggcatgtggtggcatcaacaccacctaagcttcctagctgagaagggagggaagtcaatcccccccaccccaaggtgttaggagaagggaagtaatggatactggggaggtgaccaccaaatatctgctctagaactcattagccagaaacaaagaa

SEQ ID NO: 678738 - DNA, 747 bp, Homo sapiens
ggaggtcaccatgagaaatgaccttccaggagggagatatcacttccacactgctaccccaagccttcttcattacaagtgagagagctgcttaacctgagtcaatagaaggtcaagcaagtcgttacactgtctggctgcagggcttaaccaagtttcaatgggcgttgtcaccaggtaccacaggtgaagctttaggatgaggtggcattatggcttgaaggtctccagccttctaccaccttagtaagaggagaagtatccaggtagtggcaatggtaggaagtctagtgtttcaatatactctcatgaaaaagagaagtgacaaattctcaaaagaaatcttatggacttgaaaggcaagttgtagaaactttatgtttcatccaagcccagatagtcaatgaataagttcagaaacttatagtccatattttttttctaaataataggatcacagttttctacttggcataacaataatacttaatttcagggttgtgacaaataaatgagattgcagtyttagcccagtgcctgacacaatgttagcattcaacaagtgaaacttctctttccacttccataaatgtgagtatccttccacctccccaagaaactgggatttatgttggtctgcaactcagcctgaatatattattcacagatgttttattattgtcactatcagtttttaaggaccacctctaggttcttgtgtttcaaataaaattttgttgaaatgaa

SEQ ID NO: 678739 - DNA, 1222 bp, Homo sapiens
tttacacattgtacgtaagtgccttctaaaataattacacaaatacctctaagaatggtgggtctcaatattgaagcatggtcaataaagtagatgaccctccgctgaaaatgaccccccgctgaaaatgaccccccaatttacccaccaagtagccgtagctaggcttgtattcttttaccctcccctctaagtttagctgattagaagtctgaagatgccccaatcgatcctcttacctgggtatttgaagttgaatttcttgtttggtcacttaaactgaggtcttataaatttagagcaatcttatacgtagaaaaacagagaaagcaggtttaaaagttaggttgcaggttctggcttcctcaataaaatcccaatataatactagctcaaatgagatctatgtttccctcttatataagagtctgaggctaagcagttgggtcagggctaataatcacattagctccatggagttggggacccaggctcctttcaccttgttgctctgccattctccacctgtaattctattgctaggttaaagacaattacttcaactcctgccatcttattcacacccaggcagcaaggagggaaaaagaggaaaggaggcgcccattcctttctatttaagagtgtaacctggaagttgtacatatcatttctgcccatatcrcattggctaaagcctagtaaatgcctacaattaacagcaagggaagcttggaagtgcatctgtcagctgagtggccaagtgttcagctaaaactctcttttcagagaaaaaggggaacagtgacatcataggtacaacaagcagcctctgctcatctccacagataaaactgatctccaggaagtgagcacgaagttgaggctcagaataaaagcagctgtgagagacttggggcctccaagagacaaggagagcaacactggttcctgttagcatccagttcttgggttttatccctcattgagacgcagaagctttccttcccttgtgtataataaattcctggctttgcataagccagcccaagtggccttctgttccctgataccaaaacgtcttgtctaatacaaactcattatatgctcctggagggcaagggtcacattttacttttttattcccgacccagggtttaggtagtaccaatgctcagtaaataaatactgatttgacttaatgtattgcctccttctgcagctg

SEQ ID NO: 678740 - DNA, 619 bp, Homo sapiens
tttatttctttatcttggtatttacttctcaaacttcacttttcatagctgtaaaagctcatgagtgattgtgattgggaacagttcttattaaggaaaagtgaaaattaacttgtgggttaacacagcaataagaagaagagaagatgttaagaataatacacttgttatggtggagagtgaagaggaaacactgatctttggctttagggactgatcgagtgaggttttctgccctaggatacacccagtcaggaagcagtgactgtggtctgttccaatcacgcctgcagatctggccgggctagaatccgttagttgaacgacttagccatttagcagagaccagctggtttctcacaaaatccatttcctgttcttgagcagtcccataagctacatttttctgcctcccttgcagtaatgtatcaccatatagctgagttcttttctcccacatgctgctgttcatcccctttccccatctgcaagctggatgtggaggactctgaggtcttagaaaatgatgaagaaatatatgaaaggaccgtggaccccagaatgaccacgtggwatgtttactggtgaccaggaatacacattttgaacataggtgagc

SEQ ID NO: 678741 - DNA, 471 bp, Homo sapiens
tggtgtaagtgcagggctagacaaatggaataatgggacagagtagagagtccaggaacaggcttatgcacataagaaaacatgctccagaaatggaagaaggccaggtacggtgcctcacggctgtaatctcaacactttgggaggccgaagggagaagattgyttaagcccaggaggttgagaccagcctgggcaacatggaaaaaccctgtctctacaaaaaaataccacaattagccaggcatggcatcatgccatggcatatgtctgtgataccagttactcaagaggctgaggtggaaagatcgcttgagcctggaaggtcaaggctgcagtgaaccatgataatgccactgcactccagcctgggtgatagagtgagaccctgtcttggttaaaaaaaaaaaaaaaaaaaagaaaaaagaaataaatgagatagcaatacagatcagtgaggggagagtggaat

SEQ ID NO: 678742 - DNA, 1732 bp, Homo sapiens
taatatattaatattattatcagtgtgaacttctaaatactactgacagtaaaggctacgaaggtttccttttaatccattaaaatatattttcactttactctttcccaaagtatcaatattgaatgttataaaaatacttttagcatttgctttcaaataaaatattcaatactcaatgctttcatggaatattttcccttaaaaatccattatactaaaagtaaatatctgtatggaacctactagactgatgtaattaaaattaaatttacaaaaaggtaatggagattatatcagcaatagcatgcaattcaatgcagcagctgaatcaccgtagatttttttccctatttaatcttatctcggatgaacaaaaaggttaagtcccacagcaatccttagattaggctattatttttgttatggctacttagtcgttttattacaaactattaaataacgcaagaaaatcaaagaggtacaaaggtaagaagttggctacatttatttttaaactgttgatctaactactcagagatgacctgttagtgagtgtggttatcactgaatgtcccgggctgattttagacttctgaaggaaaaggttgacttcagacctttggtcaaaggattcccatgattccttttaggtttgctctcaggggtttaagactacacagagctgcaaactttaagaagtcccattaaaccaaaaccttgtcatatcattccttaattctaggactccttaactctacacckctcagaactgcttcttgctgaaacaactgtacagccaacttccagtcaaactcagaaactaatttaaaaagtcagtaattcatctgcggagtgaagagcaaaaatgatgatggctcaccctgtcaaatgcccttagcctctcatgagaaatgtcataggaacctatctgactgagcccattcctttctgcagacttcaccttttattgcatccctctttgttatctacattccatttccatttttccaacatgccatctttcttcttaggtggtttccacacatctgtggtctaactactgtatgtgcctttaaccaatgcgtgctcctacttgtcctttataatttgcttaaaggcagtttctcttggaagcctttcctgactgcctataacttcccagaaggactaagttatatctgctcaaatacactcccataacactctgcacttctgtgatatcgtcacacttacaatcagtaaggattgccctcacctctacactgaagctcttgagggcaggaaccatgtctatcttgttcagggccatatccccactgcctggcacagggctatctacatagtagtggcccagtacattttttaaaatataattaatggttaatagttattggtttatgtgtcagtctcccttactggtgcttctgcatgttttgtctatcttggtattgtctatgtttatcctagagcctggtacagagtaagccctttaatagatgttggctaaatttatctctgaaatggtgtgcacatctaatttcttaaggacagtgctgtgcaaagacccttgaggccctcctttcccttttgcttactttcaactatgagaaagggcttagaagatggctggattgttcggcaaaagggcaaataagccaccagaagagaagcgaaatagcctcagaaagttagacggatgtgaaaatgaaaaatagattgttcattcgac

SEQ ID NO: 678743 - DNA, 1732 bp, Homo sapiens
taatatattaatattattatcagtgtgaacttctaaatactactgacagtaaaggctacgaaggtttccttttaatccattaaaatatattttcactttactctttcccaaagtatcaatattgaatgttataaaaatacttttagcatttgctttcaaataaaatattcaatactcaatgctttcatggaatattttcccttaaaaatccattatactaaaagtaaatatctgtatggaacctactagactgatgtaattaaaattaaatttacaaaaaggtaatggagattatatcagcaatagcatgcaattcaatgcagcagctgaatcaccgtagatttttttccctatttaatcttatctcggatgaacaaaaaggttaagtcccacagcaatccttagattaggctattatttttgttatggctacttagtcgttttattacaaactattaaataacgcaagaaaatcaaagaggtacaaaggtaagaagttggctacatttatttttaaactgttgatctaactactcagagatgacctgttagtgagtgtggttatcactgaatgtcccgggctgattttagacttctgaaggaaaaggttgacttcagacctttggtcaaaggattcccatgattccttttaggtttgctctcaggggtttaagactacacagagctgcaaactttaagaagtcccattaaaccaaaaccttgtcatatcattccttaattctaggactccttaactctacacctctcagaactgcttcttgctgaaacaactgtacagccaacttccagtcaaactcagaaastaatttaaaaagtcagtaattcatctgcggagtgaagagcaaaaatgatgatggctcaccctgtcaaatgcccttagcctctcatgagaaatgtcataggaacctatctgactgagcccattcctttctgcagacttcaccttttattgcatccctctttgttatctacattccatttccatttttccaacatgccatctttcttcttaggtggtttccacacatctgtggtctaactactgtatgtgcctttaaccaatgcgtgctcctacttgtcctttataatttgcttaaaggcagtttctcttggaagcctttcctgactgcctataacttcccagaaggactaagttatatctgctcaaatacactcccataacactctgcacttctgtgatatcgtcacacttacaatcagtaaggattgccctcacctctacactgaagctcttgagggcaggaaccatgtctatcttgttcagggccatatccccactgcctggcacagggctatctacatagtagtggcccagtacattttttaaaatataattaatggttaatagttattggtttatgtgtcagtctcccttactggtgcttctgcatgttttgtctatcttggtattgtctatgtttatcctagagcctggtacagagtaagccctttaatagatgttggctaaatttatctctgaaatggtgtgcacatctaatttcttaaggacagtgctgtgcaaagacccttgaggccctcctttcccttttgcttactttcaactatgagaaagggcttagaagatggctggattgttcggcaaaagggcaaataagccaccagaagagaagcgaaatagcctcagaaagttagacggatgtgaaaatgaaaaatagattgttcattcgac

SEQ ID NO: 678744 - DNA, 1732 bp, Homo sapiens
taatatattaatattattatcagtgtgaacttctaaatactactgacagtaaaggctacgaaggtttccttttaatccattaaaatatattttcactttactctttcccaaagtatcaatattgaatgttataaaaatacttttagcatttgctttcaaataaaatattcaatactcaatgctttcatggaatattttcccttaaaaatccattatactaaaagtaaatatctgtatggaacctactagactgatgtaattaaaattaaatttacaaaaaggtaatggagattatatcagcaatagcatgcaattcaatgcagcagctgaatcaccgtagatttttttccctatttaatcttatctcggatgaacaaaaaggttaagtcccacagcaatccttagattaggctattatttttgttatggctacttagtcgttttattacaaactattaaataacgcaagaaaatcaaagaggtacaaaggtaagaagttggctacatttatttttaaactgttgatctaactactcagagatgacctgttagtgagtgtggttatcactgaatgtcccgggctgattttagacttctgaaggaaaaggttgacttcagacctttggtcaaaggattcccatgattccttttaggtttgctctcaggggtttaagactacacagagctgcaaactttaagaagtcccattaaaccaaaaccttgtcatatcattccttaattctaggactccttaactctacacctctcagaactgcttcttgctgaaacaactgtacagccaacttccagtcaaactcagaaactaatttaaaaagtcagtaattcatctgcggagtgaagagcaaaaatgatgatggctcaccctgtcaaatgcccttagcctctcatgagaaatgtcataggaacctatctgactgagcccattcctttctgcagacttcaccttttattgcatccctctttgttatctacattccatttccatttttccaacatgccatctttcttcttaggtggtttccacacatctgtggtctaactactgtatgtgcctttaaccaatgcgtgctcctacttgtcctttataatttgcttaaaggcagtttctcttggaagcctttcctgactgcctataacttcccagaaggactaagttatatctgctcaaatacactcccataacactctgcacttctgtgatatcgtcacacttacaatcagtaaggattgccctcacctctacactgaagctcttgagggcaggaaccatgtctatcttgttcagggccatatccccactgcctggcacagggctatctacatagtagtggcccartacattttttaaaatataattaatggttaatagttattggtttatgtgtcagtctcccttactggtgcttctgcatgttttgtctatcttggtattgtctatgtttatcctagagcctggtacagagtaagccctttaatagatgttggctaaatttatctctgaaatggtgtgcacatctaatttcttaaggacagtgctgtgcaaagacccttgaggccctcctttcccttttgcttactttcaactatgagaaagggcttagaagatggctggattgttcggcaaaagggcaaataagccaccagaagagaagcgaaatagcctcagaaagttagacggatgtgaaaatgaaaaatagattgttcattcgac

SEQ ID NO: 678745 - DNA, 1732 bp, Homo sapiens
taatatattaatattattatcagtgtgaacttctaaatactactgacagtaaaggctacgaaggtttccttttaatccattaaaatatattttcactttactctttcccaaagtatcaatattgaatgttataaaaatacttttagcatttgctttcaaataaaatattcaatactcaatgctttcatggaatattttcccttaaaaatccattatactaaaagtaaatatctgtatggaacctactagactgatgtaattaaaattaaatttacaaaaaggtaatggagattatatcagcaatagcatgcaattcaatgcagcagctgaatcaccgtagatttttttccctatttaatcttatctcggatgaacaaaaaggttaagtcccacagcaatccttagattaggctattatttttgttatggctacttagtcgttttattacaaactattaaataacgcaagaaaatcaaagaggtacaaaggtaagaagttggctacatttatttttaaactgttgatctaactactcagagatgacctgttagtgagtgtggttatcactgaatgtcccgggctgattttagacttctgaaggaaaaggttgacttcagacctttggtcaaaggattcccatgattccttttaggtttgctctcaggggtttaagactacacagagctgcaaactttaagaagtcccattaaaccaaaaccttgtcatatcattccttaattctaggactccttaactctacacctctcagaactgcttcttgctgaaacaactgtacagccaacttccagtcaaactcagaaactaatttaaaaagtcagtaattcatctgcggagtgaagagcaaaaatgatgatggctcaccctgtcaaatgcccttagcctctcatgagaaatgtcataggaacctatctgactgagcccattcctttctgcagacttcaccttttattgcatccctctttgttatctacattccatttccatttttccaacatgccatctttcttcttaggtggtttccacacatctgtggtctaactactgtatgtgcctttaaccaatgcgtgctcctacttgtcctttataatttgcttaaaggcagtttctcttggaagcctttcctgactgcctataacttcccagaaggactaagttatatctgctcaaatacactcccataacactctgcacttctgtgatatcgtcacacttacaatcagtaaggattgccctcacctctacactgaagctcttgagggcaggaaccatgtctatcttgttcagggccatatccccactgcctggcacagggctatctacatagtagtggcccagtacattttttaaaatataattaatggttaatagttattggtttatgtgtcagtctcccttactggtgcttctgcatgttttgtctatcttggtattgtctatgtttatcctagagcctggtacagagtaagccctttaatagatgttggctaaatttatctctgaaatggtgtgcacatctaatttcttaaggacagtgctgtgcaaagacccttgaggccctcctttcccttttgcttactttcaactatgagaaagggcttagaagatggctggattgttmggcaaaagggcaaataagccaccagaagagaagcgaaatagcctcagaaagttagacggatgtgaaaatgaaaaatagattgttcattcgac

SEQ ID NO: 678746 - DNA, 591 bp, Homo sapiens
cttgccttggctttatctttgttgacataaaggatccacataaaatatttcgcactagaaaatactctatcttctttgtactgattttaagttttactttwaagttctgagatacacgtgcaaaacgtggagggttgttacataggtatatgtgtgccatggtggtttgctgcacctattgacccatcctctaagttccctcccttcaacccctaagaggccctggtgtgtgttgtttccctccctgtgtccatgtgttctcaatgttcaactctcacttacgagtgagaacatgtggtgtttcattttctgttcctgtgctagtttgctgaggatgatggtttccagcttcatccatgtccctgaaaaggacatgatctcattcctttgtatggctgtgtaatattccatggtctatatgtaccgcattttctttatccagtctatcattgatgggcatttgggttggttccatgactttgctattgtaaacagtgctgcaataaacatatgtgtgcatgtatcttcatagaatgacttatattcctttgggaacaggacccattaatgaagcactttcactgtcctttg

SEQ ID NO: 678747 - DNA, 591 bp, Homo sapiens
cttgccttggctttatctttgttgacataaaggatccacataaaatatttcgcactagaaaatactctatcttctttgtactgattttaagttttacttttaagttctgagatacacgtgcaaaacgtggagggttgttacataggtatatgtgtgccatggtggtttgctgcacctattgacccatcctctaagttccctcccttcaacccctaagaggccctggtgtgtgttgtttccctccctgtgtccatgtgttctcaatgttcaactctcacttacgagtgagaacatgtggtgtttcattttctgttcctgtgctagtttgctgaggatgatggtttccagcttcatccatgtccctgaaaaggacatgatctcattcctttgtatggctgtgtaatattccatggtctatatgtaccgcattttctttatccagtctatcattgatgggcatttsggttggttccatgactttgctattgtaaacagtgctgcaataaacatatgtgtgcatgtatcttcatagaatgacttatattcctttgggaacaggacccattaatgaagcactttcactgtcctttg

SEQ ID NO: 678748 - DNA, 931 bp, Homo sapiens
ccttccaaattatgctcttaggcccttacaaatttatgaatgaaggaatcagtagttttaaagattgctttgaaagaaccttggcctagaaatgagaagctttccatcactctccacccagaggcctggcttactcttggtttccttagttgctcttattagatcaatgcttttttttgacattctatyagtcataatacaaagcaggaactgtgagtggcccaaggctcaacattagctgggagtggtttccacattaaccaagttcagcatttcctgagcaattatttgcccttctccatccaccctcccctatcatcccaaagagggtttatgtgtattttcaaatataaccaaaatatagttgtagtgtaaccagagaaatcgggtactaaacttctgttggaagtccaaaaagactatccctgagccaagttggtttaatgaagtggcttcccccatcttgggcttcgttcatgtgcatggtctgcacacttcagagcccctggggaagcatgtctttccaaagcctgaaagacagacattgacaatgtggagcaatttctttttttgtgactgataattattgaatgttgaaattgatttctttgggaattgtatttagtcattggattttaaaactgaggaaacgtcatagacaattgcttcattttacagatgagagacagagacccataagagtcttgcccaaggtcacagaagcagtggcagaattgggaccagaacccaagtcgcttatgcacaatgacttttgagctgtcttgattacgaactgctataagcagcgtactttccattgtgatccagtcacatttgtatacaagcgactggaacaaaatttcaagaagcaaatctgaccttcattgtatgtgatttgagctgatctgtgcaatctgcttgattctagttc

SEQ ID NO: 678749 - DNA, 931 bp, Homo sapiens
ccttccaaattatgctcttaggcccttacaaatttatgaatgaaggaatcagtagttttaaagattgctttgaaagaaccttggcctagaaatgagaagctttccatcactctccacccagaggcctggcttactcttggtttccttagttgctcttattagatcaatgcttttttttgacattctattagtcataatacaaagcaggaactgtgagtggcccaaggctcaacattagctgggagtggtttccacattaaccaagttcagcatttcctgagcaattatttgcccttctccatccaccctcccctatcatcccaaagagggtttatgtgtattttcaaatataaccaaaatatagttgtagtgtaaccagagaaatcgggtactaaacttctgttggaagtccaaaaagactrtccctgagccaagttggtttaatgaagtggcttcccccatcttgggcttcgttcatgtgcatggtctgcacacttcagagcccctggggaagcatgtctttccaaagcctgaaagacagacattgacaatgtggagcaatttctttttttgtgactgataattattgaatgttgaaattgatttctttgggaattgtatttagtcattggattttaaaactgaggaaacgtcatagacaattgcttcattttacagatgagagacagagacccataagagtcttgcccaaggtcacagaagcagtggcagaattgggaccagaacccaagtcgcttatgcacaatgacttttgagctgtcttgattacgaactgctataagcagcgtactttccattgtgatccagtcacatttgtatacaagcgactggaacaaaatttcaagaagcaaatctgaccttcattgtatgtgatttgagctgatctgtgcaatctgcttgattctagttc

SEQ ID NO: 678750 - DNA, 1443 bp, Homo sapiens
acttattgtgtgtttattatgtgccaggcactattctaggttgctggggttacagcagtgaacagaaaaatccgttttgggatagggaactgttcctactctcataggaagtaaatgaaatttmtatgtggattgccctagttgaaacttagggggaaaattttgatgtatgtcattaaggtggacatgactagatggcttatactttgattgaaacaagccttcttttacaaataattgataacaatcagttgcaaaatcaaaattcacaatggttatttgactactgaatttgaaatttagaaacatttctatagtaataagctagtattttaaacttcagatggagaatttgtagtgggataatatgaaaatttatttaaaatatacttgttatccattatcttttgctgcataaacaaacctgcccaaaatcttttggcttaaaacatcattttttccaactcactcttcagtgggctagcaaactagggctgggcttagctggaatggttcttctctgttccacacagtgttggcttgactctttcaggcatttgcattccgttagcaggtcacctgggtctgcgtgctctcacgtgacctcattcacgtctggcagttggctggggcttctccattctcatctatattgtctctactagagtttctcttgcacgtgttcacacagcaataacattggaaagctgagaccagaacctgtggggcttctcgggggcctaggctcgaagttagattgtcatatcctctccgttcaagagaatggagaatagatgccacatttctctctctctctttctttttttctttaggcttcaaatgagtcctttaatttgtatatcaaagtcattttttcgtgtagtatatgaatgtttaataattacactctaatttacttgccttgtttactgataggcgtttccacatttgcatttctgacataacttcttaaaaaattttacttcaataggtttttagggagcaggtggtgtttggttacatgaataaattctttaatggtgatttctgagatgtcggtgcacacatcactcgacagtgtgtactttaccccaatgtgtagtcttttatccctcaccacctcccaccctttcccccaagtccccacagttcattttatcattcttatgcctttgcatcttcatagcttagctcccacttaggagtgagaacctgtaatgtttggttttccattcctgagttgcttcacttagaataatggtctccagctccatccaggttgctgcaaatgccattatttcatttctttttatgactgagtagtattccatggtgtgtgtgtgtgtatgtgtgtgtatgtatatatatatatatatatataaaatctatatctcacattttctttatctactcatagatagctgggcatttgggctggttccg

SEQ ID NO: 678751 - DNA, 1443 bp, Homo sapiens
acttattgtgtgtttattatgtgccaggcactattctaggttgctggggttacagcagtgaacagaaaaatccgttttgggatagggaactgttcctactctcataggaagtaaatgaaatttctatgtggattgccctagttgaaacttagggggaaaatkttgatgtatgtcattaaggtggacatgactagatggcttatactttgattgaaacaagccttcttttacaaataattgataacaatcagttgcaaaatcaaaattcacaatggttatttgactactgaatttgaaatttagaaacatttctatagtaataagctagtattttaaacttcagatggagaatttgtagtgggataatatgaaaatttatttaaaatatacttgttatccattatcttttgctgcataaacaaacctgcccaaaatcttttggcttaaaacatcattttttccaactcactcttcagtgggctagcaaactagggctgggcttagctggaatggttcttctctgttccacacagtgttggcttgactctttcaggcatttgcattccgttagcaggtcacctgggtctgcgtgctctcacgtgacctcattcacgtctggcagttggctggggcttctccattctcatctatattgtctctactagagtttctcttgcacgtgttcacacagcaataacattggaaagctgagaccagaacctgtggggcttctcgggggcctaggctcgaagttagattgtcatatcctctccgttcaagagaatggagaatagatgccacatttctctctctctctttctttttttctttaggcttcaaatgagtcctttaatttgtatatcaaagtcattttttcgtgtagtatatgaatgtttaataattacactctaatttacttgccttgtttactgataggcgtttccacatttgcatttctgacataacttcttaaaaaattttacttcaataggtttttagggagcaggtggtgtttggttacatgaataaattctttaatggtgatttctgagatgtcggtgcacacatcactcgacagtgtgtactttaccccaatgtgtagtcttttatccctcaccacctcccaccctttcccccaagtccccacagttcattttatcattcttatgcctttgcatcttcatagcttagctcccacttaggagtgagaacctgtaatgtttggttttccattcctgagttgcttcacttagaataatggtctccagctccatccaggttgctgcaaatgccattatttcatttctttttatgactgagtagtattccatggtgtgtgtgtgtgtatgtgtgtgtatgtatatatatatatatatatataaaatctatatctcacattttctttatctactcatagatagctgggcatttgggctggttccg

SEQ ID NO: 678752 - DNA, 599 bp, Homo sapiens
tttagattattgtatttcagcatgtcctctttaacaataagaagcatctttggggaaaagattatgaatatggctttagagtatgatcataacgctgctctatgcttctgccttcttaggtaacttcacttgcattatcagtgcaccagatccaatattaaatagtaaatcaactgggctcaacaacaaaatctggatttattccaacccatcaaaaatgaagcaatrttcattacaatttccctactgcttcaaaaaggctgtaatagtaaaagtctaacattatatgaaatgtagggttatgtagtagaaacagcataattttattgttaacagactggggttcaaaaccagattttttcattaactggcattttgattttgagaagttcacttaaatcattgggtcttgttttatcactaacaaaatgggagctataacaattgcccatgaaatcattaagaggtttattttaaacatacataaaatacctggcatgtattaggcattactatcgctctcagtatcaggattctgaagcaactgctctattgtgaacctgtaaagaacttataagccaagtagaaaacacattttt

SEQ ID NO: 678753 - DNA, 599 bp, Homo sapiens
tttagattattgtatttcagcatgtcctctttaacaataagaagcatctttggggaaaagattatgaatatggctttagagtatgatcataacgctgctctatgcttctgccttcttaggtaacttcacttgcattatcagtgcaccagatccaatattaaatagtaaatcaactgggctcaacaacaaaatctggatttattccaacccatcaaaaatgaagcaatgttcattacaatttccctactgcttcaaaaaggctgtaatagtaaaagtctaacattatatgaaatgtagggttatgtagtagaaacagcataattttattgttaacagactggggttcaaaaccagattttttcattaactggcaytttgattttgagaagttcacttaaatcattgggtcttgttttatcactaacaaaatgggagctataacaattgcccatgaaatcattaagaggtttattttaaacatacataaaatacctggcatgtattaggcattactatcgctctcagtatcaggattctgaagcaactgctctattgtgaacctgtaaagaacttataagccaagtagaaaacacattttt

SEQ ID NO: 678754 - DNA, 599 bp, Homo sapiens
tttagattattgtatttcagcatgtcctctttaacaataagaagcatctttggggaaaagattatgaatatggctttagagtatgatcataacgctgctctatgcttctgccttcttaggtaacttcacttgcattatcagtgcaccagatccaatattaaatagtaaatcaactgggctcaacaacaaaatctggatttattccaacccatcaaaaatgaagcaatgttcattacaatttccctactgcttcaaaaaggctgtaatagtaaaagtctaacattatatgaaatgtagggttatgtagtagaaacagcataattttattgttaacagactggggttcaaaaccagattttttcattaactggcattttgattttgagaagttcacttaaatcattgggtcttgttttatcactaacaaaatgggagctataacaattgcccatkaaatcattaagaggtttattttaaacatacataaaatacctggcatgtattaggcattactatcgctctcagtatcaggattctgaagcaactgctctattgtgaacctgtaaagaacttataagccaagtagaaaacacattttt

SEQ ID NO: 678755 - DNA, 599 bp, Homo sapiens
tttagattattgtatttcagcatgtcctctttaacaataagaagcatctttggggaaaagattatgaatatggctttagagtatgatcataacgctgctctatgcttctgccttcttaggtaacttcacttgcattatcagtgcaccagatccaatattaaatagtaaatcaactgggctcaacaacaaaatctggatttattccaacccatcaaaaatgaagcaatgttcattacaatttccctactgcttcaaaaaggctgtaatagtaaaagtctaacattatatgaaatgtagggttatgtagtagaaacagcataattttattgttaacagactggggttcaaaaccagattttttcattaactggcattttgattttgagaagttcacttaaatcattgggtcttgttttatcactaacaaaatgggagctataacaattgcccatgaaatcattaagaggtttattttaaacatacataaaatacctggcatgtattaggcattactatcgctctcagtatcaggattctgaagcarctgctctattgtgaacctgtaaagaacttataagccaagtagaaaacacattttt

SEQ ID NO: 678756 - DNA, 1148 bp, Homo sapiens
tgaaaaatgttttgaaattttaaattcagctttgccataaaaagcatcattctgttgagattccataaaagagaataccttatttccttttttttttcagacagagtctcactctgttgcccaggctggactgcagtggcaggatctcagctcattgcagcctctgcctcctggtttcaagcgattcttctgcttcagcctcctgggtacctgggattacaggtgcactccaccataccaggttaattttttgtatttttagtagagacggggttttaccatgttggccaggctggtctcaaactcctgagctcaagtgatccacccgctttggcctcccaaagtgttgggattacgggagtgagccaccacgcctggctgataatacctcattctcagaaaaagtgttctccatttaccaaacaatgatcaagattttatatctaccacttgcttgcattacttattgttgagatatattttaacactgttaattgcttgattttctgaagttataaatgaagaatttggggaagagaaagcaagatttaaaaagaggaagacaatataatttgtcatccrggttgaaactcaaaattgagagaaggggttaccatacataataatagcaggaaattggtataaacagataaaggaaaatcaacatgtacagtcaccttccttttaaacagctctattttgcctttaagtaagcattcgtatgaacaggaagttttcacaatattgcaacagaagcagaaacatctaaaatcaattctgcagaataaccccctcttgctgtccacagaaaagtaatctagtcaaaataagtgtatataaactcgatgtaagaatgtgagaatataaatacagaaaacctaaggcatccaataaagaatcttaaaaagttcttaaacacatgcaatttattacatcactcaatggtaaactgacatgaaagaaaactacctgacaaatatacatgaccccttattcagctaattctgaaaatgaagaatttattaaacccagtgacactaaaattattactgtatttctccaaatttttttctgtaaaagatgaggaaattaccccaagctaatttctcttctcatttttgaattaggattgccttttagatctttca

SEQ ID NO: 678757 - DNA, 1435 bp, Homo sapiens
tctaaattttacaaagttatctgaattaatcaggatccatgctgaataatataatatgctgaccctagttatggattttcttagcacaatgctttattaatacacatttttatcttcaaaaaactttaaatacttataataacatttagaattcattatagcaaagttagaaaattcaaataagaaaatcacctctctttataataccatttccaaccttacaatgtgtgtgtgattatggcatataaaattttgtagtttgatttttcactaatttatatattgtatacctcttcttaagcccattaatatacaaaatagctacagttcagtctcctaatgaagatgccataatttttaaaatgtatatctatttaagatttaaggtttattccatcttctcttgatacaaaaaaagttactgtgaataactttgtcattcatttttgtacagttacagcaagtatatttataaaagaataagtacaaagctaaaggatatgcacatttatatggcttttgaggcatattgacaaattatcctcccccaaatttaacaataaaccctatcaactgcggtgtgtgactttttccacacaacttcattgactctggccataatgattttttttattcttgtcaatattatagataaaaggaagctctctcatttcaatttgaattttaatataagtgaggtaaataagtttcaaatttatatctttttaaaaataaattgattaaactgcccattttcatttgacagtttcttattgattggcaataactctttatatattaaaattattaactcttcaacagtctatattgtaaatgttttatctgttgttgtcttttagtttttgttttatagygtgttttacgtacaggtgtggttgactgctaagagccaaatccatcagtctttacctttatggcttctgcctcaaaagttatgcctccaaagccttcctcttcataacatgatatagatattaatccattttagtttaatgacttttatggttaagcctaatgttatcactactacaatttgaaatacctaatgttattattactattagatttgaaaaatctaatatttgaaagatttgctaatttgaaaaatttagcagtcattaagtttgcaaattccatgtaggcacatttaaaatatcttctaatgaagaaaattattgtcgttcttaagtaaaatgtttcactattattttttgtaatattctacaaccacaaacataaaattatgcatatataggtatgtatgtacatttatatatatttaaaccaatctactctttcttctctccttcagaatcatctgttattgtctttgtagggatatgtgtacgtgcatgttaacaacgtatgggtttatcaaataattgatgctttagccataatttttcactgtcat

SEQ ID NO: 678758 - DNA, 653 bp, Homo sapiens
tgatctcctgacctcgtgatccgcctgcctcggcctcccaaagtgctggaattacaggcgtgagccaccatggccggcctattcagtatacttttgtgttttaatctgtacacagtaactagagctattttaattttcaaggtagaataacttagtactgkataacagtaatgtgctttgtcctcagttttttcactgaagattgttgtctgataagaaatttttattttataaaaaaataaatcgaaatgccttcggtagcactccattgctgcaatttgtcgtcaggcactgtgagacacgcgtgttacaaataaatattttaaatatttagttacataataagtgatgctgtggagatggccatccattggagttatgcttttatggcgtgaaagttgctgtggtcccttacaacttctgcaagtgatctctctagattgcaatcacacatgtatgctttactcttttctatactcatcactgggggctcccttgtatagggagatattcaccttgaaagaaaatcccactaagaaacattactattctggagcgttttagcattgctgagataaaaacattcatggtgtagagatattttctggcagcgtgtttcatgggagttacacagagacaatggttggattcat

SEQ ID NO: 678759 - DNA, 626 bp, Homo sapiens
ctgtaagctcaagatcaggatgtaaataggactttttttcctgaggcctcttttcttggcttttatatggccatcttctccttatggtggacacaggttgattctgtatcttttctgttgtgaatagttctatgataaatatgtgagtgcagatgtctcttccacactgttatcatttcctttggatatacacccaaagatatatatattcatataagatatggtatatatattcatataagatatggtatatatatgaatatatatattcatatatatatcaaataagagatatatatatcttatttgagtttatgtatacttaatgtttagtatgtcaatttgtcttgtatacttaatgtttacaaatatcatgtatacttaatgtttagataccacttacaaatgagaacatgcaktatttggttttctctttctgtgttagtttccttaggataatgaacaccagctccattcatgttgcagcaaaggagatgatctcattcttttgggggggctgtgtagtaatccatggtgtatatgtaccacattttctttatccagtgtaatgttgatgggcattaatgttggttccatggattcgttattgtgaacatcagcaagca

SEQ ID NO: 678760 - DNA, 613 bp, Homo sapiens
atttccactcattatttgtaaggcacgcattccatacagaaaaaaattcttccgtgtaaaggacaggaaacaaggcagattaacatttcctgctcatggttctggcaaacatttatgttcacacgaggcagcagtaagacttcagtcagattctctctaatgtggaggctgtgagtaaggccacgctgcacacacactgtgcactacaccgaccacgttgcagtggcttaggagaggccggagtcagcagaagtttatccatagcctgctaggcaccagacccagtggtagaggctgggatccagctcccaaaggcagctctcatgccagacaggacccaccaagctcactgctccagggcagcactgcatggtggggtagggcccagccccaagagcatggagaggaggtgactgggcagtggaggcagacgcagagctggggacagacggattttytcaagtcaggccaggaaggaactctcagatccctctgacgacttgaagatgccatttctggcaaattaacatgaggatcctggaactattttccctactgttttcatttctcagcacctaaaatgccacaggaggcagccaaggcagagaaaaga

SEQ ID NO: 678761 - DNA, 677 bp, Homo sapiens
ccatccccgtaatcagaaaactaaattttattgatactttctgaacattttaaacgtggggcaaatatacatgttttcaaccaacaacttgatcctttttgtaaaaataaacaaactcttctttccaaacctcaaccaactaaaaaaggtcagctactcgtttatccctgtcctctactggtgccataacaagataggccattaactctatgtttcttctgattgtcctttaacttgtagcaatcttattctttcctggtcctaactaatatcaaatctcatcaagaagtaaaaacactaacctcccactctcttacagcaagacatgaaaactattttcaaagaaattctgtttttttttttcttctaggaggtttagaccccacaaactcctctatcttatggttaccatttttatatgcttatacatgcctataactcatacaggataacatttttgaagaggcttsagtcagttattcagggaagtgccatcttactgagttgaaaggttgagtgaactgtcactcctttgaattttgggtaaatatcccctgtagcgaacaagaaaaggtagaggaattgaaactaaggctcgctttctttcagaggttgatttccgagcttgaggctgtcattgaattgcagaccatgaatttagaaggtcacttatagaa

SEQ ID NO: 678762 - DNA, 1198 bp, Homo sapiens
actcatagagcatgtgcagtagagacttctgagactaggcaataaaaggcagtaagtacataaagccagttgctaatattcttaatgatgaaagattgaatgctttgcccctaagatcaggaactaggcaaggctgtccattttcactgcttgtcttcaacattgtactggatggaaggtctagccaatgcaaaaagggaagaaaaagaaatgagacctacacatttaaaagagagaaatraagctgtctttgtttatgtacaggatgatgacctatgtagaacatgccaaagaatcaatattaaagctattagaactaatagtaagtttatcagggtcacaggattgagcagcactatataaaaatcagttgtatttttttaaattagcaatctcagatgtatccatgctgagtttctgcaagcctcctagctatccttaacaccttcccctacacactctatcaaattacccaaccacctagctacagagaaaatggaaatcattagataggagccacctcagcctcctctgctaaaactactagccttggcacttagcttctcctgccttctcatcacaatagaggagactggcaggacctgccatctggtcctagaacattgcaacacatacccatctcagaacttacacatagcatgtgtgtaatacttttaacctcacttttctaagctaattcgtacacttaagatcttagcttaagcagctcatatttggagaagctttcccttacctctccctcccccatgttatataatctcttagctgctgtatttccccttcagatcatgtttaaactaattaaataatttgttgtgtataatgctcttattatttcacaatgcttgaggttgcaaaaaaaaaaaaaaaaaaagtctttttatcccttccaaaacaaatgtatttgaagaccatactttggaaattggcaaggaagccagttttaggcattttagggaataaccatttgtttccctttagaaaaaatacaaccagagactacctttgcatccactatttaaatattccagcaaacataaacaagccatatactttgttgaaggaaaatagcaccactgaatttgtcctctttttttcttcagttaccacttaaaatgttttatttattgattttttttaactgacccataataattgtacatacttatggggtaca

SEQ ID NO: 678763 - DNA, 683 bp, Homo sapiens
tcagcctcccaagtaggtgggactataggcgcccatcaccatgcctggctaatttttttgtatttacagacggtgtttcaccacgttaaccaggatggtctcgatctcctgacctcatgatccgcctgccttggcctcccaaagtgctgggatcacaggcgtgagtcaccgtgcccagcctaatttgtgtattttcagtaagagacggggtttcagcatgtgggccaggctggtctcgaactcctgaactcaggagatccgcccacctcggcctcccaaagtgctgggattacaggcatgagccactgtgcctggccacacatggctatttttttaaaaagcttttgtagagaagagatcttgccatgttgcccaagctagtctcagacccctgggcccratcgaccctcctgcctcagcctctcaaacaactgggattacaagcatgagccaccttgcctggcctggactttttttaggacggcagcaattgagataagatgctcttgaaagaacacctgccccctagtggcatctccaccacagaactgatgccaactacgattttgagcctctggaaccagtgaactctgtttccaagcagcttatgtgaacctctccctgtctgccaaataaaagcttcctcttcctttccccttttcgggtgcacctgtggctcgcca

SEQ ID NO: 678764 - DNA, 1336 bp, Homo sapiens
gaggcctcataaaaacaggtggggctccattcaggaagggaggtaaatgccaagagtggcgcttccagtgctaaggaggaaaagactcctgcttgctcccaccaccagctatgctgtggtgccgccttccttctctgctgactccatgggtgctcagttcccaccaggtgaccagctgttccagcttgcccaggactgtcctggttttagtactgaaagtctcaggtcctgggaaaccccctgtccccagacagcaggccagctggccatctgaactcccagtccctgtccatgtgcaacgcctgcctagcacacagtaagcactttcgaaggcgttgctgttgcaggagaaggcaaagcrgaattcaggtgggactataagagctgactgaccccgatagacaggttggttagttagttaattggtattgattgattgatttaatttatttagaggcagggtctcactctgtcacccaggctagagtgcagtgtcacgatcatggcttgctgtagccttgacctcctgggctcaagagatcctcaaacctcagcctccaagtagctagtaccacaggcacatgccaccatgcctgccaattaaaaaaaaaattttgtagagatggggtctcgctatcttgcccaggctggttttgaactcctgagctcaactgatcctcttaccttggcctccccaaagtgctaggattatgggtgtaagccaacacaccctggcctcattccattggtaaaagctgctccctttgctttcggtcagaggtaggagccagaatgtgtgaggggaaatcctcaaaacagtccgtttcttctccagctcaccttgtatctttgacctccctccctcttccttccctctcatgctcgcccgcctgcctcaacaatctcaccctccccagagtccagaggcagagaactccgtgttccaaggaagggtggagcctcttagagtgggcaggtggcagggctggtaaacaggacaggccagaggaggggttgaggcaggccaggaggcgcttcagccacctagacatggagcagcgggatttaggcagcccaaagaatctgtgcgaggtttcctggagccctccccctcctgcccccacatccaagcagggatgtgcacattcctctttcctcctctagctcaatgtgctgtggcttatctgctcacgtcactgttgacccctccagatggttcacttggactcccagtgcctagcttggggagtcaggcacggcaaacgccaccctgtgctatggcttgaaggaggccagcaagctttgcttaagccaaggcatgtgtgagaaacttgca

SEQ ID NO: 678765 - DNA, 608 bp, Homo sapiens
taacacagtccacaccatyaccacttaaataaagtaaccgaatgctaaatattatccttatcaaacatccatcactttgttgcttttatgagatgtagattgctaaaaacttttgagctagtagacgttacctttaagcatcaatgaatgcaaacagtgaagacctcaaagaagagttacctcattttctctacatgatctccaatgtagtctcagataaggcccatacatagttaaaagctggtaacagctctgaacagaagtatgtattaaatgtttcaaacttgtatatatttttgaatgcttttgtttttggagtgaatttttaatactctgtgttaaaagaaaaacattccatcttgtaggcagtgttcctcagtaaaaatctttgttgcattttcccatataaatgaatcacccttattaaaacaggaggagggagggatttgtggtgacctaccgctgccctccctttctaagagaagaggaggccatggggtatgataactaaatgaacatctctggaagttcctccgtctgatatgtgtattctgacataacagaatttcccaagacttctttgaggaaggctgtccacgcttcaggca

SEQ ID NO: 678766 - DNA, 653 bp, Homo sapiens
atgggcaaactgatgcctctttatgagaccttgagccagccactccctctttgttaagccagccgggtctctctgcaggtttgtctgaggatgctctgaaagagaatgggggagttgggttctctacttaggtgtcaagctatgcagtttatgtggctaaaaatagtcttcaaacttttggcttagaatgacttctcatggtttctttctgytctgacaccctaaggttctatgagctcagagccttgccaggatattcaccctctttctaacttatatcccaggtatcttctggatctacttacccataatctccagagaggctaggagaactaatctttgcatcctacccaatgacatggaagaaacgggcagtgtggactgatcctttctcccttcctggcctcagtgtctccatctgtacaatgggaagaattgaattcagtattttccaagccccccatcccacacctccaatggttgagttcttcctgcaggccagaggagagccagtctcaaggattgaccttagtgggtagggttacagtagaaaagatctcctgggaggtgggatcaaggattgcaaccccactgcctggaggagttatagttgtcctttgaatacttgctgtgttattgactagctgtgtgac

SEQ ID NO: 678767 - DNA, 643 bp, Homo sapiens
cccaaagtgctaggattacaggcgtgagccaccgcacctggcctcaaatttattttaataatatagtaatatttaccactaatctctataatgatttaatgcatatcttgattgacattcaatggtttgatataccaggcactaaagcaaggtaagtaaatatattaagcaactacatttaatatcctttgacagtaacaagataacttatttctgatatgcattagtttgctttaaatattctctgaaaaatggtaggacatttaaaaggataaagtaatacattttgttattgagcattcttctaagtaaatgacatcaatttagttctctaaattaaaaaaaggatccacaatggggaccagaatacactatgtcctatctttattatattgactctctagataaaaggcttctgaatcattcatccaggtaatctattcttgcaataccttgtgtgctgacaaggaacatcctggtaagtgctgtatttctgaccatttaacattgtgtaaataagyctttatttagaagagagttgttttattacttttctatgatacataaatcagtaagtttagttatagaatttatgtccacatgttctagtttaatgttattttaaataatattaaataaaatc

SEQ ID NO: 678768 - DNA, 1987 bp, Homo sapiens
  misc_feature 328, 617, 618, 619, 620, 621, 622, 623, 624, 843, 1885, 1886,1887, 1888, 1889, 1890, 1891, 1892, 1893, 1894, 1895, 1896,1897, 1898, 1899, 1900, 1901, 1902, 1903, 1904, 1905, 1906,1907, 1908, 1909, 1910, 1911, 1912, 1913, 1914, 1915: n = A,T,C or G
  misc_feature 1916, 1917, 1918, 1919, 1920, 1921, 1922, 1923, 1924, 1925,1926, 1927, 1928, 1929, 1930, 1931, 1932, 1933, 1934, 1935,1936, 1937, 1938, 1939, 1940, 1941, 1942, 1943, 1944, 1945,1946, 1947, 1948, 1949, 1950, 1951, 1952, 1953, 1954: n = A,T,C or G
  misc_feature 1955, 1956, 1957, 1958, 1959, 1960, 1961, 1962, 1963, 1964,1965, 1966, 1967, 1968, 1969, 1970, 1971, 1972, 1973, 1974,1975, 1976, 1977, 1978, 1979, 1980, 1981, 1982, 1983, 1984: n = A,T,C or G
gcagaaagagtgggtgcaggggatctagccatgagaagttagccatgaatgagttaatggtccagttaagtgtgatgttttaattaatgaaccctaagactaacgctgctttaaaacaaaactgcatgcattaaaaaaaaaaattctcacattctgaaggcaccatagagatgtttggtgattagaatgaggaaaggaggagaggggatggcctctctggagggctaagaggcaggagtggagtgaggcagtagttcccttagaaggcagagacaagaggagcccggggctaaggaagaggaagacttgcccttctctcagctgtccntggcaaggacgaaaacagctcagctcaaatgctgggctcctggcatggcttcctctggtaaaaacrttttctgacaatgagatgtgaggttggaccatgtcctcttggttaattaacatgtagctgtgatgccttctctgtggcgggcacgccttgttggtatcaggctccgccagccctctagggtatattagttactgtggggggcagtcttaacctcgctatttctcggccaggagaaagaagcactggtgcatcccggcaaaacaaaaggtcggcggtctcacannnnnnnnatcacaatgccccttcacctacctcagatcttcccctatacccacgccatacacccacaccatggggcagagagcagctccccaaacagcaccctggatcaatcaagcccagagctgtttccttgggaagtgttctagatctatacctatggaagataatcagcccatagccaacaaagggttttgctgcttcaaataacaaagaaatagagggaaagnctatataggaaaagtactgtactagacagtaaaagaaaaaaatgagaccatggaaatgaacttcctattagaggcctgacccagggcctttatgactcttggtatctgctcctgagcctcccagtttaaaaaactgacaggagttcagcagataaatttgacctagagttgaaagaagacatcaaatttcccaaaagacaatggcttccagggacacttgtgggggtttctgttacttcatagtttgaacctttaaatcttatagtacaggggatacgatagaactctcttagattcgaataaaccctcagattctatttctacccctcaaaacaacagccagggcagtctttttcacaattctcatgctcatcttggctgatcctggtgtgttttctttgctttgattttcacatgtaccatctcctgcagctaagcttctgtgttaacctcctgtcatcgtctctttcatgggcagcccagtaagccacacctcctgagactcatgcgcttgtacagtcttctcctcttgaagctgggctggccctgtgactgttttgagcaatgcatacaatgtggtgaaaattatttctgggactcctgagtccaggcaccaagatcaggaagcttctcctcttgtatttaggggaagctggccacattgtaagaagtgggactatgctgagactgtcatgatgacagaaaacccaagctagccaggtggagagatcacacagaaagagatgcctggccagctgtgacctgatatgccatcatgtaagtaaaaagtccaccttggatggtccagctcatagatgccatgtacagcagaggtgagccattcctgccaagccctgcccaattgcagaattgtgagtaaataaataattactattggtgtaagccactatattttgggatgagttgttacatagccattgaaaaccaaaacacctcgcgacaccaagccatttccataacttcctgcagacggaggcgaaggacctacattggaaacgtacctgacaagctcaatacagcnnnnnnnnnnnnnnnnnnnnnnnnnnnnnnnnnnnnnnnnnnnnnnnnnnnnnnnnnnnnnnnnnnnnnnnnnnnnnnnnnnnnnnnnnnnnnnnnnnnnggc

SEQ ID NO: 678769 - DNA, 1172 bp, Homo sapiens
tgtaatgatcaacctatcacccagcttcaggaattataaaccaatagtcaattttgtttcatgtttttcccccagcccttcatccctttcccctatcattatgttgaataaaattccatattatgtcattacatttgtaaatattttggtatgactttttttttwaaaaaataggcttaagaatactgaattaacttcacactgcaacaagctttcactagaaaacaaagagctcacacaggaaacaagtgatatgaccctagaactcaagaatcagcaagaagatattaatgtgagttgaaaaagaaagtgctggtgacttagttttcttccaattagcaggttagaatagatgacctctaaagaccctttgacctttaaagtctgattgctttagagctaaaactttgttttagcagaaaaatatgcatattggtcttatagggtggtaataggcaacagaggctaccctctgattaaaattaaaatggaagccattactagaaaaagttaatttaattttaggcatcaagatttttaaaaagtatttagtcaataggtatttattaagtcatacaagattgtggaggatacaatgatgaataaaatgtcaccctttctctttaagaacttatgacttaataaaaaatagtaatttctcacataacttaagcaaaatagtatgtcatatatgttgttagtgggacaaggtgctatcagagtttgcaggatcacttctgctttggataaagagaaggcttctgagagaatatagcattgattttggtcttaaaaggtgaattatgagttcagtaggtaacaatgaatggaaaacattacttgaagtgacaatatgaacaaaggatacagactcaaagtaacgctggaaaaccaaatgatacttgttttgttaactgttatatagagattgttgggagaataattaaagtaaggcttaaaaaagtagtatggaactatacaagttgaaaagcccatttttttgctttatatataactaaataaattttatgctgatagataaaggtcttaaatagtagtttaaattttatttttgtttaaacaaaataattgatataaacaacattatttctttagaataacaaaaagcaagaagaaaggatgttgaaacaaatagaaaatcttcaagaaac

SEQ ID NO: 678770 - DNA, 2549 bp, Homo sapiens
  misc_feature 375, 376, 377, 378, 379, 380, 381, 382, 383, 384, 385, 386,387, 388, 389, 390, 391, 392, 393, 394, 395, 396, 397, 398,399, 400, 401, 402, 403, 404, 405, 406, 407, 408, 409, 410,411, 412, 413, 414, 415, 416, 417, 418, 419, 420, 421: n = A,T,C or G
  misc_feature 422, 423, 424, 425, 426, 427, 428, 429, 430, 431, 432, 433,434, 435, 436, 437, 438, 439, 440, 441, 442, 443, 444, 445,446, 447, 448, 449, 450, 451, 452, 453, 454, 455, 456, 457,458, 459, 460, 461, 462, 463, 464, 465, 466, 467, 468: n = A,T,C or G
  misc_feature 469, 470, 471, 472, 473, 474: n = A,T,C or G
tggagctgaattgggcaggatagcaaagacagactgaatcttaccattatgtatgttgacttttccattatatatacccccacccatccctgtgcctggaataccgatgtttagagattgcctttttcaatttgatatgmcactgtctcttacaaagataatagggccagttctctgactacattggctgccagggagtagagaccagggtgggagggttaagtggaccagctgaaaagcatgtagacaagtacataaaataattgtaggtattataaatgttaaggtgtcatatttaaattttcatattgataatgtattatttaaatattttaggtatcactactattgatccaaatcactgagaaagaaaannnnnnnnnnnnnnnnnnnnnnnnnnnnnnnnnnnnnnnnnnnnnnnnnnnnnnnnnnnnnnnnnnnnnnnnnnnnnnnnnnnnnnnnnnnnnnnnnnnnaacatgccgtaaggcgaggtgcagtggctcatgcctgtaatcccaatatgcctctgtaagccaaggcagaagaattgcttgaggccaggaatttgagaccagcctgggcaatatagcaaaggccctgcctctgcaaaaaactatacataagagtaactgggcatggtggtgtggtagctactgggaaggctgaggcaggaggattgcttgaggctaggagttccaggttgcagtgagctatgattgcaccactgcacacttacctgggtgacacagcaagactctctctgtaaaataaggaaataaaataaaacataaaatgtgctatagggattctttggtgaatttgatttgatgacacgtctttgttaaataagatgaaagtagtaagtagtaacaaaacttaaacctactatctccaaccaaaaagcacaaaaatgtcttaaataataacaatcacaacaataatgaacatttattgaacactttatatgtcttaggcatctgataagcatttacaggtatttgctcatttattcttcacaatattttatgaaatgactactagtaaagggtattggtgtgttttaaaactttctaaaatgttcttcaaatgtgataatcgtaagttcactcatactaatcaactattaaattagtatgaatttaaaaaagagaaggcatccttgaccaaaagagattcaaattttcagttcagatattccttaaaaactatatgataaaaatctgctgttatgccatcttatcagtaatattactcatattaaaataacagaacttctttgaattgattttattcttgatttcctgccagaagattcccctggtatttactttttaaaaatgtcccattaagctttactttcagaacattaaccatttaagtaattaatttacacagttttattaaaagtttaaagtattactaatttcattcaacattattggtgtttagtatattcattgaaatttaaacgaccattgacatatggaatatttaatcagattttcttagccatttaaaattcactcaaggaataatatataatataatcgatggaagagtagtggaaattcaattcaattgttaaacaattattttaggccaggtgtagtggcacacgccagtaatcctaacactttgggaggctaagtgcggggatcacttgagactaggagtttgagaccagtctgggcaaggtaggaagacccctatctctaaggggaaaaaaaaaaagctgggcgtggtggcacacacctgtcgtccccagctactcgagaggctgagatgaggattgcttgagccctggaggtcagggctgcagttagctgtgatcactccaggctgggtgatagagcaagactctgtctcaaaaaagaaaaaaaaattctgaattatctaggagaaagaaatacaatgtatgcttaagctgtagacaacacaactgagccatttactgagattatttatgtttgtgtttccttgggacttcagtgcgatctctctcagagaatttcttcacagagtctaaagatcttttatcttcctatgtttagttattgaagaaatgctttttctagcatatcttggataagcaagtatcctctgaaactctatcactctcatggaacagagattcattctaggtttaaacccctctaactcagttagtagttttgaatacctttatgaaacttgacttggtttatcgagctaaaaattaatggggcagttccttggccttttgggatttgcaagatacacatggaattctgtctctagctactcctttttgcccattttcatggtcttctccctgacggatggttgcatgtcccagtagatgagacctaaatgctagtcttacatttatgccattgttctgcccctggtagcactcactctgccagttctttcgatggtctcttgtatgagatgggccatgttcaaggacaagtcaagaagtcccaacaggttactcctagaacatgaggattatgatttccatgttaggcccctttctttcctgtggtcatatggccatacatattgt

SEQ ID NO: 678771 - DNA, 2549 bp, Homo sapiens
  misc_feature 375, 376, 377, 378, 379, 380, 381, 382, 383, 384, 385, 386,387, 388, 389, 390, 391, 392, 393, 394, 395, 396, 397, 398,399, 400, 401, 402, 403, 404, 405, 406, 407, 408, 409, 410,411, 412, 413, 414, 415, 416, 417, 418, 419, 420, 421: n = A,T,C or G
  misc_feature 422, 423, 424, 425, 426, 427, 428, 429, 430, 431, 432, 433,434, 435, 436, 437, 438, 439, 440, 441, 442, 443, 444, 445,446, 447, 448, 449, 450, 451, 452, 453, 454, 455, 456, 457,458, 459, 460, 461, 462, 463, 464, 465, 466, 467, 468: n = A,T,C or G
  misc_feature 469, 470, 471, 472, 473, 474: n = A,T,C or G
tggagctgaattgggcaggatagcaaagacagactgaatcttaccattatgtatgttgacttttccattatatatacccccacccatccctgtgcctggaataccgatgtttagagattgcctttttcaatttgatatgccactgtctcttacaaagataatagggccagttctctgactacattggctgccagggagtagagaccagggtgggagggttaagtggaccagctgaaaagcatgtagacaagtacataaaataattgtaggtattataaatgttaaggtgtcatatttaaattttcatattgataatgtattatttaaatattttaggtatcactactattgatccaaatcactgagaaagaaaannnnnnnnnnnnnnnnnnnnnnnnnnnnnnnnnnnnnnnnnnnnnnnnnnnnnnnnnnnnnnnnnnnnnnnnnnnnnnnnnnnnnnnnnnnnnnnnnnnnaacatgccgtaaggcgaggtgcagtggctcatgcctgtaatcccaatatgcctctgtaagccaaggcagaagaattgcttgaggccaggaatttgagaccagcctgggcaatatagcaaaggccctgcctctgcaaaaaactatacataagagtaactgggcatggtggtgtggtagctactgggaaggctgaggcaggaggattgcttgaggctaggagttccaggttgcagtgagctatgattgcaccactgcacacttacctgggtgacacagcaagactctctctgtaaaataaggaaataaaataaaacataaaatgtgctatagggattctttggtgaatttgatttgatgacacgtctttgttaaataagatgaaagtagtaagtagtaacaaaacttaaacctactatctccaaccaaaaagcacaaaaatgtcttaaataataacaatcacaacaataatgaacatttattgaacactttatatgtcttaggcatctgataagcatttacaggtatttgctcatttattcttcacaatattttatgaaatgactactagtaaagggtattggtgtgttttaaaactttctaaaatgttcttcaaatgtgataatcgtaagttcactcatactaatcaactattaaattagtatgaatttaaaaaagagaaggcatccttgaccaaaagagattcaaattttcagttcagatattccttaaaaactatatgataaaaatctgctgttatgccatcttatcagtaatattactcatattaaaataacagaacttctttgaattgattttattcttgatttcctgccagaagattcccctggtatttactttttaaaaatgtcccattaagctttactttcagaacattaaccatttawgtaattaatttacacagttttattaaaagtttaaagtattactaatttcattcaacattattggtgtttagtatattcattgaaatttaaacgaccattgacatatggaatatttaatcagattttcttagccatttaaaattcactcaaggaataatatataatataatcgatggaagagtagtggaaattcaattcaattgttaaacaattattttaggccaggtgtagtggcacacgccagtaatcctaacactttgggaggctaagtgcggggatcacttgagactaggagtttgagaccagtctgggcaaggtaggaagacccctatctctaaggggaaaaaaaaaaagctgggcgtggtggcacacacctgtcgtccccagctactcgagaggctgagatgaggattgcttgagccctggaggtcagggctgcagttagctgtgatcactccaggctgggtgatagagcaagactctgtctcaaaaaagaaaaaaaaattctgaattatctaggagaaagaaatacaatgtatgcttaagctgtagacaacacaactgagccatttactgagattatttatgtttgtgtttccttgggacttcagtgcgatctctctcagagaatttcttcacagagtctaaagatcttttatcttcctatgtttagttattgaagaaatgctttttctagcatatcttggataagcaagtatcctctgaaactctatcactctcatggaacagagattcattctaggtttaaacccctctaactcagttagtagttttgaatacctttatgaaacttgacttggtttatcgagctaaaaattaatggggcagttccttggccttttgggatttgcaagatacacatggaattctgtctctagctactcctttttgcccattttcatggtcttctccctgacggatggttgcatgtcccagtagatgagacctaaatgctagtcttacatttatgccattgttctgcccctggtagcactcactctgccagttctttcgatggtctcttgtatgagatgggccatgttcaaggacaagtcaagaagtcccaacaggttactcctagaacatgaggattatgatttccatgttaggcccctttctttcctgtggtcatatggccatacatattgt

SEQ ID NO: 678772 - DNA, 1366 bp, Homo sapiens
atggtgattctttttaaaattctgtcttctttcagttaccatattgtcttaactggtgttttcttcttctccttgtctgaatctctgctggtccttatttccaactcttaattgggcattgtataagactcttagcctccattattctctyttggaaggtttacacatttttgtctgtcatgacacccaaacaagaaactttcaagtaatcttggacaacttttttttatcaccacctatatcttatcagtcatcaagtcttttgagtgtcttctttcatttaacatgatgcttttgacattcatctaatttgatgcacatatcagtagttagttccttgctaagtagtacttcatgtatgggtgtacttcgattgatccattcaccagtttctggatattgaggttgtttatggctttcggtgattatgaataaagctgtcaaaaccatttgcataccaggttttgtgcggacttatgtcttaacttctcttggataaaaacctcaaagtgggatggctggattgtatggtaactccaataagaaactgccaaactgttttcccaagtgattgtatcattttgccaccaaaccaacagtgttttaagagttccagctgttgtgtatcctcactagcatttgaaattgttagacttgctctttattacaaaatgtgagccattctaataggtgcacagttgatgaatgcccctttttaagacataaattactttaaaaatatttatttacactatcatcagtgagaccaacaaataccaacaggtcattcacttttttggatacaggacagtgggaccttgccactaggattagaaagtttctatgaagctttaggtctgagagagtccagaataactatgtacaatgtctccagcaagattgttgcctaagtagagaagttaaatttagtatgaagcagaaagatttcaaaacataatgattcccaaaggccattcagccctctttcaggttcatcacctccttttttgactttttccagccagttgacaaggttccttacaaatgttctgagtgtgcagttgatcttttaaccattattgttgttcatttgcatattgatactgttcacttgataggctattgatagaatgtaattgtaaaaaaatgagcctagtttatgttcttgctttgtcacacttcgtatgctgacatggcaagaatgaaattcctaaaatatctttttaccaacctgctgctcagattatatcttttcgtttctgattttcatctgcagattcctaccaaatatgctcttcttttcccaggaagatcgtgttctaacaggtcaacagtagtttattttctgctagtagaaatgggtttt

SEQ ID NO: 678773 - DNA, 666 bp, Homo sapiens
ttaaaacattccctttgatttttctacttctgcccccagtttataagcaggactatgtagagatagtcaactcacttaggactgttctaaagacaagttgtaggtctggttttaatcaggtgtgtttgagccacaagcacccaaaacataccctctatgttcttctgggaaagaggcaytgagaagctcttatttaaggaatctttaacttattagactaaagatgctaccatctgggtcatttccctggttgatgtccctttgtcctagatgcactttcaagactaagattcacacacagtcagcctagtggttggttggtagacctgaaaaatttcaaagcagcctaggtggttattaagaggctgcaggccatcttctttgggggctaatggtgtattcacctggctctttgtcctcagtgagcaaggtcagggttccttgctgtgtttgctcttctgtcaccaaagggaaccagtacaatttaaagcattctctgatgtgctaaaagcttctaaaaaagatggttaagcaaacaaagcattcacttgcctttcaagccagcctggcctgaagagctgattgacaaaattgatgatccttaaggaaacatttcctcctcatcaggtcatttctcagcacaaaagatccaagtgctcctcaagg

SEQ ID NO: 678774 - DNA, 608 bp, Homo sapiens
gctgtgacttcctcagaagcagggactatgtttagccaattgtgtatccccagcactctgcatgggtttgggcagaaaatatgtctccataaatgaatgagttctctgaagatagtagccagcgtcctcaaataatgttcctccttagtttgtttggactaagtgatttatttttaggggagggaggtgaaaaacaccaattttcttctaagaattttgtttcaaggactctgcaaaccaagcgacagtgacaccagaactttacaaaatggtccattaaaacaggtgtgtttggggaggggatggtgactttgccagaactcatccagcactttagccatggttgtttgtgtgcaaataaatgcatgcatcatttattttcagcctttgatagcctcctttggtctctacctccttgacaaaggtcaagaaataagaaaataaatgatattytggaagccaattctcttccctcaggtggcaaataacttcttacttctcttcagtccctgcctcttaacctcccagtgattttatcttatggtcctttacaaatcagtgaatctcagaaatcacgtccagggccagttattttatggaaaagtgat

SEQ ID NO: 678775 - DNA, 801 bp, Homo sapiens
gttattattctcactttactactttcttttattgacttaatgattttaagttctatcgctaaagcacttaatcacttggaatgctttcatctgtttttttaagttgttttctttcagatgtagttgctcatctatgttctataccatagatctttattatataaataaaagaataatctgactcttactatataaaagaataatcttttattatccttcagctggccaatgatctccctctgtctctatccctcccctgtctctctccctctgcacccyctaacttttttttttttttttttgagatggagtctcggtctatcgcccaggcttccaggctggagtgcaatggcacgctcttggctcattacaacctctgcctcctgggtccaagtgattctcctgtctcagcctcccgagtaactgggattacaggcgcacaccaccatgcccggctaatttttgtatttttagtagagatggagtttcactgtgttggtcaggctggtcttgaactcctgacctcgtgatctgcccacctcagacttccaaagtgctgggattacaggtgtgagccaccatgcccagcacagctctcccttttctaaaggaccttggcatggttgtccagaccttctatttgccacaatatagtgtgtatgactcctcctctatgactttcccagcttatctgaagtttgggtgtgtatgggtgtgtgtgcgcgcatgcgcacatgtgttttcctcttagtttggggacagagtgctacatgactcttagctactcctatctttttttcc

SEQ ID NO: 678776 - DNA, 604 bp, Homo sapiens
ggtctgatttttctaaacagtttggggaaatttcatgtatggcttcagagtcgagtgatcccactcatttataacctgggtagaattctacaacaggtgtgctgagggattcaggaaaacacgtagagaacatgttccacaggtgtcggtagaaagtctccagataattcagaaaaagacagctcatgtgaataaccctccatggccaagatacaggaaaatacagaataagaatggctgcattttagacatttcagtttaagaaagaactaggtccaaccatcaagtgtagataaacctgctaaggaaaaaaaaagaaaaaaaaaaaaascattctgcaggagatttggcaggaagtagggtattaggagagaaagagaacaggaaactgggatgatgttgaaatcagtcttagtttcagatggaggccaggcgaagtggctcatgcctgtaaatactagcactttgagaggctgaggcaggcaggttgcttgagtccaagagttcaagaccagccttggcaacatggcgaaacccagtctccaaaacaaacaaacaacaacaaaaaaaaccctgtcagattcaattacctattgatgattac

SEQ ID NO: 678777 - DNA, 617 bp, Homo sapiens
gcaggagacaagtcctgcccattgagtttggcacacatctggtagcacatcccaggaggcctaagcctggaagtgttctttccttgaagtgatctacaataataaaatcagagaaaagtctgaggtggcagaataagaagtggtattgattatcaggtttgaatgaaagaaagaaagaaatgagtcccgatgttagaagcctggagaatctctaggaaattaggattcagaagtgggtcaagacagttggttccaggataacctayaaaggagtggcaatgttggagtgccacttttcaaaatcaacagtgctatacaacttatcagatgtcaaaaatacagtgacgaggaaacacatgatctctgccttcaatggagtttatagttaagataggcattaattgaatatatagttataagccatacaagttgccatgagtgaaaagttttatcagagaaataataggaaaatctgatgtggtttccagattcaaaggttacactcctgaggaagtgattttgagctgagttataaaaataagttgattttaaaaggggggcaggaaggaagttggtagagaaaattgctccaggaaagagaacaatgggaacaaagt

SEQ ID NO: 678778 - DNA, 617 bp, Homo sapiens
gcaggagacaagtcctgcccattgagtttggcacacatctggtagcacatcccaggaggcctaagcctggaagtgttctttccttgaagtgatctacaataataaaatcagagaaaagtctgaggtggcagaataagaagtggtattgattatcaggtttgaatgaaagaaagaaagaaatgagtcccgatgttagaagcctggagaatctctaggaaattaggattcagaagtgggtcaagacagttggttccaggataacctataaaggagtggcaatgttggagtgccacttttcaaaatcaacagtgctatacaacttatcagatgtcaaaaatacagtgacgaggaaacacatgatctctgccttcaatggagtttatagttaagataggcattaattgaatatatagttataagccatacaagttgccatgagtgaaaagttttatcagagaaataataggaaaatctgatrtggtttccagattcaaaggttacactcctgaggaagtgattttgagctgagttataaaaataagttgattttaaaaggggggcaggaaggaagttggtagagaaaattgctccaggaaagagaacaatgggaacaaagt

SEQ ID NO: 678779 - DNA, 563 bp, Homo sapiens
gaaaattcagggagcacacgcctattgtgtagccacacctgttgatcarttcccaggtgcctatcttcaagcctcttactagtaagtattatagagttttactccaagtattattaaacataaatggaagctttctataatcatttatgtttctgcctttccctccctctcttcctttcttacgtccttcctttctttctttccttcctttgtaaaagctataaggtgctttatttaataagcaaatgaaaggtactccttgtaagggcaatatatttttcctagaaattgattttactgatatataatttacatatatatattttgtttgtttgtttgtttctttgagatggagtcttgcactgtcgcctgggctggagtgcagtggtgccatcttggctcactgcaaccttcacctcccaggttcacgcaattctcctgcctcagcctcccgagtagctgggattacaggcacacgcacaccaccatacccggctaatttttcgtatttgtttttagtacagatggggtttcaccatgccgacctcgtgatctgcctgcct

SEQ ID NO: 678780 - DNA, 629 bp, Homo sapiens
taaaacatacccataatgactcaaattatgctgctggggaatgagcactgtactcaaattcttgggagacagctttgccaaataagatttttatttgtggaatctgattcgtagtcaaattacacctgaattgtggttgttggtatttttgggagtcagaaattactctgaagtatgtactcttttttacataatgacaatgacattatcacaactaatacaaatggaaacagtcttttggtagtatataatacctggtccaaagccatatttccttgcttgtctttcaaatactgtgtcacagcgtctttgtttaaatacgtattaaaacaaagcctaggctttacatttatttcgcrtatctatcttattctatcatctatctatctatctatctatctatctatcatcatctatcagtctcttttaacttaaattaatacattcactcattttttttcctgccattgatttagtacagcaatgacatcgatggtcctatattgtgtcctaccttctgtggctttctttcttaacatcatttagcttgttttaccccttctatatgccaagaatggatataatttctaaaagttggttaaaatcaggttccaattttgacaagactg

SEQ ID NO: 678781 - DNA, 631 bp, Homo sapiens
agtgctagtgtagcttaatgaacaaagtgttctggaagcagaatcatgagaaactatcttgaatgaaagcagaggtgagtctattgaagccaccagagaaataacttttgctcaaagggtaagtaggatcttggcaggcgggagagcagaggaagagcataagagagaaagggaacagtagcatgagcaaagactcagaagcttgaaagtctggcatctggcacacagaccctaagatgatccctatgatccctgccttctggtgttcatgcctgagtgtgagtgggacctgtgacttgtttctgaccaataaattatggcaaagatgatatgccacttctgtgatgacattactttccaaagactccatcttgctagcagtcttgctctcgctctctcccactggctttgaaaaggcaagcatctgtgttgtgcactgtctgtaaagagacccacgtggcaaagaactgtaggtggtttgtaggagttgagagcctcagyccttcagcttcaaggaactgatgtctgccaacagactgggtgagccttagagaggacccttccctactccaacctcaagatgagaatgcagcacagccaacaccttggttgcagcctgttgagaccttga

SEQ ID NO: 678782 - DNA, 624 bp, Homo sapiens
ggagtatggtcttcactaccatattgttttctatttttgtttttctcacgtaaccatattttttgaacattcatgtcatatagagagagatattsacatttaattactgaatagtgttccattttatggatagattataatgtatttaaccaatcctctattcttgtataccgagactatatccagtttttgatattataaaaaatgctgaagatatagtttttataaaaaatcatgattacttattctttattctagaagcagaatttctgggctaaagggcataaatattttaaaaataatagtagctaccagttattgagcacttgctgtataccaattattttacctgtaacaatcataacacttttataaaccagacacccttactataccatttgcagataaggacacatgaatggagacattgaataacttacccaagattccatggcaagtaagttgcagaacaaggatttgaacacaggaactcttacatgacactgtctccctggttaagacgaatcactattataataaattaaagtatataacctatacatgctgtaggattttagggatagaaaataggtggagagattgatgtaagctgggagagtaggg

SEQ ID NO: 678783 - DNA, 624 bp, Homo sapiens
ggagtatggtcttcactaccatattgttttctatttttgtttttctcacgtaaccatattttttgaacattcatgtcatatagagagagatattgacatttaattactgaatagtgttccattttatggatagattataatgtatttaaccaatcctctattcttgtrtaccgagactatatccagtttttgatattataaaaaatgctgaagatatagtttttataaaaaatcatgattacttattctttattctagaagcagaatttctgggctaaagggcataaatattttaaaaataatagtagctaccagttattgagcacttgctgtataccaattattttacctgtaacaatcataacacttttataaaccagacacccttactataccatttgcagataaggacacatgaatggagacattgaataacttacccaagattccatggcaagtaagttgcagaacaaggatttgaacacaggaactcttacatgacactgtctccctggttaagacgaatcactattataataaattaaagtatataacctatacatgctgtaggattttagggatagaaaataggtggagagattgatgtaagctgggagagtaggg

SEQ ID NO: 678784 - DNA, 624 bp, Homo sapiens
ggagtatggtcttcactaccatattgttttctatttttgtttttctcacgtaaccatattttttgaacattcatgtcatatagagagagatattgacatttaattactgaatagtgttccattttatggatagattataatgtatttaaccaatcctctattcttgtataccgagactatatccagtttttgatattataaaaaatgctgaagatatagtttttataaaaaatcatgattacttattctttattctagaagcagaatttctgggctaaagggcataaatatttwaaaaataatagtagctaccagttattgagcacttgctgtataccaattattttacctgtaacaatcataacacttttataaaccagacacccttactataccatttgcagataaggacacatgaatggagacattgaataacttacccaagattccatggcaagtaagttgcagaacaaggatttgaacacaggaactcttacatgacactgtctccctggttaagacgaatcactattataataaattaaagtatataacctatacatgctgtaggattttagggatagaaaataggtggagagattgatgtaagctgggagagtaggg

SEQ ID NO: 678785 - DNA, 624 bp, Homo sapiens
ggagtatggtcttcactaccatattgttttctatttttgtttttctcacgtaaccatattttttgaacattcatgtcatatagagagagatattgacatttaattactgaatagtgttccattttatggatagattataatgtatttaaccaatcctctattcttgtataccgagactatatccagtttttgatattataaaaaatgctgaagatatagtttttataaaaaatcatgattacttattctttattctagaagcagaatttctgggctaaagggcataaatattttaaaaataatagtagctaccagttattgagcacttgctgtataccaattattttacctgtaacaatcataacacttttataaaccagacacccttactataccatttgcagataaggacacatgaatggagacattgaataacttacccaagattccatggcaagtaagttgcagaacaaggatttgaacacaggaactcttacatgacactgtctccctggttaagacgaatcactattataataaattaaagtatayaacctatacatgctgtaggattttagggatagaaaataggtggagagattgatgtaagctgggagagtaggg

SEQ ID NO: 678786 - DNA, 1507 bp, Homo sapiens
gctccgcttctccagcatgagtaatctgggagcaatagcgagtacggccttctagtgcccggccttgtgaccatgtcaccacacctgactctcaatgtggctgtaagcaacctgtgaatgggccctgattccaaatcccagcaaatttatttttctgagggtgcctggggtctatccatcccctgactagctgatcttcatcttcctcataggaccagggggaatactgagcatgcagtggactgaggttcatagaggtaatgtggagcgctgcacacacctgagggagttgtgcgcctgtctgacttccgggtgattcatgaggaacattcctgatggggtgggaagggaacctgtcactaagctatttaggagaakcagtctccagcaggtcacaccagccagccacttttatggcagaaggaaaatcctacctagccccttccccagagatggcagaatgcagcctggctgactggcagagcctctcaggctgtgctccggaccctggactccagcaagggggaagaacagcagctcccagttctttcttacagactgctttcttgaggagcttcaagtgctctggctatgattggtgcagggctctgctgcctccagagggtgctgtctcctttccctagcagaggcaaagggtctggcaggcaactctgggagtattggtttaacctgaaatgtctgctaggaagagctacctacccctctcctgggcattatggtcctgaaggaagagcttggactttggattgaaagtccagccctaccatctacaagttggctggctgagacaagacactctacttctttgaggctcagttttctcgcctgtgagatgggatgatcacaccacaccagttaggcatgaggatggactaagggcaggttcacatgcttctgcctggcatgggagctgtttgctgcttttaccaccatttcagctcttctgctgttctctgacccacaagagctagggttcaggctgcgtgccttgcgcagtagttctcaaatgtgtctatgtggaagcttgcctccaagggcttaccagcaaatccagaccccacacagctgccctgcaagaaggaggtgacagtggctgcgttcttgcctgcacagaggacgggtgtccatagagctcccagctggagttgagcagtttctggtcaagcaatgttctctgattttacatgtctggaagctaccattacaatcaggtcttcttaaatgtcctccctccctccgtcttcctttcttcctttctttctttgtcagatgctgtgtgtggacttgtgctgggatctggaggcggagacaagagctgtgacctagacataggggagtggggaacaaaggtgctcaggcagacaaccaactaggctgctacatctgcctctgcagcagagcatgggagggtggtaggaatttgtcatggcagcagggacatcggagctggggtgcaacagaggagcagccgctttccaggtagtca

SEQ ID NO: 678787 - DNA, 2597 bp, Homo sapiens
tgcaataatctagattatggtaaacacggtgccatgtacaagggtggtagtktgctttaaggaaaactctttcaagaatgagggcaagaaaaaaacattttcacataagtgataactcaatttaccagcaatagtacttcactgaaggaatttcagaaagcaaagaaatcatctctgaagaaaactcgaaatttaagaaagtatggcaggcaatgatattgggaggttataatacaaatattaatattaaataatatattactaatataattaaataatgataatgacaataatgcataatttcttgggttccaaataaaaaatgatagaattaaaattctgcaaaatagcatacataacacaagaaggttaattacagcacaaatgttctggaatccttgaattgttaaagaggaggaataagattttaaattattttaaattaagcatctgtggtaagcttacaaggataactggaacaatagaaatagtgcatgactttcaaaccagtagagcaatgtttctcaagggaagtgtaaatgacaatttgtgcaggacaattattcattagacaaaactattctgccatttatgcaacatattcagcattcctgaactctgctctccaaatgcaagtagcacccacttcagtcattgtgataatctaaaaacaccacagatttccaaatgtttgcagggagagtactgtatcacctttacatgagaaccactgaagttcatggagaaaacaaattaatataaaagtttagccacactcaaaataaaaagcaagatttaaaaaaagtcaaggaaaaaaaaaacaaatagagaggccaaaggtgaaaaaacagtatataactaattataataataaacataattgaattaaatttgctggagtattggttgaattaaaaaaatatattacccaattacataattacattgtgtacaagtaacacttctaaaacttaagaacacagaaagatttttttaagcattagaatacagcatggtcttctctgctgctggattttaacattttttaaatgttaaaaaattcaagtgtttttaaatattagccagaagaaagttagattatattattagatatattacaagatgtatatactattagatagtgtatattaggagattttgacatgctttaattattgccaggtcaaggacacaaaaccacaagtaatgtataagtgatttgaacaactcaattagcaagtttgaagatgtgtgtccatatattcctacatatatttctatacctaaaatgggtgaacacatattcttcttttataagaatgatcatttaactaatttcttggttgagtgataatgtgccaaagaatattacagacacttgacaggcattaactaattcagttaattctcataaaactgccaagagatagctttgtaaggacaaagtttaaatctgaccctttgtaattcggctctagtgcccatgtgtttaacccatataaaacattttctgaaggaatattttcacaacataatacttagaaattttcacaaatttaacaaatttatagctgctaaaggaaaaaaaataatgaaccttgttaaagatggtaaaggaagactattcaggagactactgcaatcgggctttgcggtagggaaaagagattgaactcaactccctgacaaaaagtgtcttcttaaccttgagtcaggttcctctgagacctcttcttgactaggccctgatcttaggttctgccctttgtctgcttattccaattttagcaaccatcctgttgtgttactttagtaagaattcccctccctcaatatctaatcagatgcctcattctccacccttgatatcttcttcaggaagaatactttcaagtcagccattacaaaatctcccttgccctgatgttttcctcttagtaattttctttccactgactcccaccatgatccttggctatcaaatcccatttgtccttcttgtattcagagttcagcgaagactctttcacttactgcaagacccctctgcagccatcgcttccccctactgcaaaaccctattgcaataatccccttcttgaataaagtttcttgaccatctttaacaagtgcctaaataattttcaacacagtccacatgctcttgatgcaatactgttcatttagaagtcaataacaagaataacagaaaaggataattttaaactccataagttggatatttaaagcaaacatgcatacttccacatacttctaaataactcatgggccaaagaagaaatcataacaaaaccttttcaaaaatcttggaattgattaataaactattgcatactgaaacttgtgggaagctgtgaaagcaatactttgaggggaacattaagttaatcataaaaaattaccatttttggtaattcaatagcagccaaatatcagcaatttcctatggtttaagctaaacctgtagccttacatgcttatattagaaaataagaaatgctgaaaattaatgagtacagctttgaacttaagaagtcagaaaacaatagaataaactcaaagaaaatagaaaaaag

SEQ ID NO: 678788 - DNA, 2597 bp, Homo sapiens
tgcaataatctagattatggtaaacacggtgccatgtacaagggtggtagtgtgctttaaggaaaactctttcaagaatgagggcaagaaaaaaacattttcacataagtgataactcaatttaccagcaatagtacttcactgaaggaatttcagaaagcaaagaaatcatctctgaagaaaactcgaaatttaagaaagtatggcaggcaatgatattgggaggttataatacaaatattaatattaaataatatattactaatataattaaataatgataatgacaataatgcataatttcttgggttccaaataaaaaatgatagaattaaaattctgcaaaatagcatayataacacaagaaggttaattacagcacaaatgttctggaatccttgaattgttaaagaggaggaataagattttaaattattttaaattaagcatctgtggtaagcttacaaggataactggaacaatagaaatagtgcatgactttcaaaccagtagagcaatgtttctcaagggaagtgtaaatgacaatttgtgcaggacaattattcattagacaaaactattctgccatttatgcaacatattcagcattcctgaactctgctctccaaatgcaagtagcacccacttcagtcattgtgataatctaaaaacaccacagatttccaaatgtttgcagggagagtactgtatcacctttacatgagaaccactgaagttcatggagaaaacaaattaatataaaagtttagccacactcaaaataaaaagcaagatttaaaaaaagtcaaggaaaaaaaaaacaaatagagaggccaaaggtgaaaaaacagtatataactaattataataataaacataattgaattaaatttgctggagtattggttgaattaaaaaaatatattacccaattacataattacattgtgtacaagtaacacttctaaaacttaagaacacagaaagatttttttaagcattagaatacagcatggtcttctctgctgctggattttaacattttttaaatgttaaaaaattcaagtgtttttaaatattagccagaagaaagttagattatattattagatatattacaagatgtatatactattagatagtgtatattaggagattttgacatgctttaattattgccaggtcaaggacacaaaaccacaagtaatgtataagtgatttgaacaactcaattagcaagtttgaagatgtgtgtccatatattcctacatatatttctatacctaaaatgggtgaacacatattcttcttttataagaatgatcatttaactaatttcttggttgagtgataatgtgccaaagaatattacagacacttgacaggcattaactaattcagttaattctcataaaactgccaagagatagctttgtaaggacaaagtttaaatctgaccctttgtaattcggctctagtgcccatgtgtttaacccatataaaacattttctgaaggaatattttcacaacataatacttagaaattttcacaaatttaacaaatttatagctgctaaaggaaaaaaaataatgaaccttgttaaagatggtaaaggaagactattcaggagactactgcaatcgggctttgcggtagggaaaagagattgaactcaactccctgacaaaaagtgtcttcttaaccttgagtcaggttcctctgagacctcttcttgactaggccctgatcttaggttctgccctttgtctgcttattccaattttagcaaccatcctgttgtgttactttagtaagaattcccctccctcaatatctaatcagatgcctcattctccacccttgatatcttcttcaggaagaatactttcaagtcagccattacaaaatctcccttgccctgatgttttcctcttagtaattttctttccactgactcccaccatgatccttggctatcaaatcccatttgtccttcttgtattcagagttcagcgaagactctttcacttactgcaagacccctctgcagccatcgcttccccctactgcaaaaccctattgcaataatccccttcttgaataaagtttcttgaccatctttaacaagtgcctaaataattttcaacacagtccacatgctcttgatgcaatactgttcatttagaagtcaataacaagaataacagaaaaggataattttaaactccataagttggatatttaaagcaaacatgcatacttccacatacttctaaataactcatgggccaaagaagaaatcataacaaaaccttttcaaaaatcttggaattgattaataaactattgcatactgaaacttgtgggaagctgtgaaagcaatactttgaggggaacattaagttaatcataaaaaattaccatttttggtaattcaatagcagccaaatatcagcaatttcctatggtttaagctaaacctgtagccttacatgcttatattagaaaataagaaatgctgaaaattaatgagtacagctttgaacttaagaagtcagaaaacaatagaataaactcaaagaaaatagaaaaaag

SEQ ID NO: 678789 - DNA, 2597 bp, Homo sapiens
tgcaataatctagattatggtaaacacggtgccatgtacaagggtggtagtgtgctttaaggaaaactctttcaagaatgagggcaagaaaaaaacattttcacataagtgataactcaatttaccagcaatagtacttcactgaaggaatttcagaaagcaaagaaatcatctctgaagaaaactcgaaatttaagaaagtatggcaggcaatgatattgggaggttataatacaaatattaatattaaataatatattactaatataattaaataatgataatgacaataatgcataatttcttgggttccaaataaaaaatgatagaattaaaattctgcaaaatagcatacataacacaagaaggttaattacagcacaaatgttctggaawccttgaattgttaaagaggaggaataagattttaaattattttaaattaagcatctgtggtaagcttacaaggataactggaacaatagaaatagtgcatgactttcaaaccagtagagcaatgtttctcaagggaagtgtaaatgacaatttgtgcaggacaattattcattagacaaaactattctgccatttatgcaacatattcagcattcctgaactctgctctccaaatgcaagtagcacccacttcagtcattgtgataatctaaaaacaccacagatttccaaatgtttgcagggagagtactgtatcacctttacatgagaaccactgaagttcatggagaaaacaaattaatataaaagtttagccacactcaaaataaaaagcaagatttaaaaaaagtcaaggaaaaaaaaaacaaatagagaggccaaaggtgaaaaaacagtatataactaattataataataaacataattgaattaaatttgctggagtattggttgaattaaaaaaatatattacccaattacataattacattgtgtacaagtaacacttctaaaacttaagaacacagaaagatttttttaagcattagaatacagcatggtcttctctgctgctggattttaacattttttaaatgttaaaaaattcaagtgtttttaaatattagccagaagaaagttagattatattattagatatattacaagatgtatatactattagatagtgtatattaggagattttgacatgctttaattattgccaggtcaaggacacaaaaccacaagtaatgtataagtgatttgaacaactcaattagcaagtttgaagatgtgtgtccatatattcctacatatatttctatacctaaaatgggtgaacacatattcttcttttataagaatgatcatttaactaatttcttggttgagtgataatgtgccaaagaatattacagacacttgacaggcattaactaattcagttaattctcataaaactgccaagagatagctttgtaaggacaaagtttaaatctgaccctttgtaattcggctctagtgcccatgtgtttaacccatataaaacattttctgaaggaatattttcacaacataatacttagaaattttcacaaatttaacaaatttatagctgctaaaggaaaaaaaataatgaaccttgttaaagatggtaaaggaagactattcaggagactactgcaatcgggctttgcggtagggaaaagagattgaactcaactccctgacaaaaagtgtcttcttaaccttgagtcaggttcctctgagacctcttcttgactaggccctgatcttaggttctgccctttgtctgcttattccaattttagcaaccatcctgttgtgttactttagtaagaattcccctccctcaatatctaatcagatgcctcattctccacccttgatatcttcttcaggaagaatactttcaagtcagccattacaaaatctcccttgccctgatgttttcctcttagtaattttctttccactgactcccaccatgatccttggctatcaaatcccatttgtccttcttgtattcagagttcagcgaagactctttcacttactgcaagacccctctgcagccatcgcttccccctactgcaaaaccctattgcaataatccccttcttgaataaagtttcttgaccatctttaacaagtgcctaaataattttcaacacagtccacatgctcttgatgcaatactgttcatttagaagtcaataacaagaataacagaaaaggataattttaaactccataagttggatatttaaagcaaacatgcatacttccacatacttctaaataactcatgggccaaagaagaaatcataacaaaaccttttcaaaaatcttggaattgattaataaactattgcatactgaaacttgtgggaagctgtgaaagcaatactttgaggggaacattaagttaatcataaaaaattaccatttttggtaattcaatagcagccaaatatcagcaatttcctatggtttaagctaaacctgtagccttacatgcttatattagaaaataagaaatgctgaaaattaatgagtacagctttgaacttaagaagtcagaaaacaatagaataaactcaaagaaaatagaaaaaag

SEQ ID NO: 678790 - DNA, 2597 bp, Homo sapiens
tgcaataatctagattatggtaaacacggtgccatgtacaagggtggtagtgtgctttaaggaaaactctttcaagaatgagggcaagaaaaaaacattttcacataagtgataactcaatttaccagcaatagtacttcactgaaggaatttcagaaagcaaagaaatcatctctgaagaaaactcgaaatttaagaaagtatggcaggcaatgatattgggaggttataatacaaatattaatattaaataatatattactaatataattaaataatgataatgacaataatgcataatttcttgggttccaaataaaaaatgatagaattaaaattctgcaaaatagcatacataacacaagaaggttaattacagcacaaatgttctggaatccttgaattgttaaagaggaggaataagattttaaattattttaaattaagcatctgtggtaagcttacaaggataactggaacaatagaaatagtgcatgactttcaraccagtagagcaatgtttctcaagggaagtgtaaatgacaatttgtgcaggacaattattcattagacaaaactattctgccatttatgcaacatattcagcattcctgaactctgctctccaaatgcaagtagcacccacttcagtcattgtgataatctaaaaacaccacagatttccaaatgtttgcagggagagtactgtatcacctttacatgagaaccactgaagttcatggagaaaacaaattaatataaaagtttagccacactcaaaataaaaagcaagatttaaaaaaagtcaaggaaaaaaaaaacaaatagagaggccaaaggtgaaaaaacagtatataactaattataataataaacataattgaattaaatttgctggagtattggttgaattaaaaaaatatattacccaattacataattacattgtgtacaagtaacacttctaaaacttaagaacacagaaagatttttttaagcattagaatacagcatggtcttctctgctgctggattttaacattttttaaatgttaaaaaattcaagtgtttttaaatattagccagaagaaagttagattatattattagatatattacaagatgtatatactattagatagtgtatattaggagattttgacatgctttaattattgccaggtcaaggacacaaaaccacaagtaatgtataagtgatttgaacaactcaattagcaagtttgaagatgtgtgtccatatattcctacatatatttctatacctaaaatgggtgaacacatattcttcttttataagaatgatcatttaactaatttcttggttgagtgataatgtgccaaagaatattacagacacttgacaggcattaactaattcagttaattctcataaaactgccaagagatagctttgtaaggacaaagtttaaatctgaccctttgtaattcggctctagtgcccatgtgtttaacccatataaaacattttctgaaggaatattttcacaacataatacttagaaattttcacaaatttaacaaatttatagctgctaaaggaaaaaaaataatgaaccttgttaaagatggtaaaggaagactattcaggagactactgcaatcgggctttgcggtagggaaaagagattgaactcaactccctgacaaaaagtgtcttcttaaccttgagtcaggttcctctgagacctcttcttgactaggccctgatcttaggttctgccctttgtctgcttattccaattttagcaaccatcctgttgtgttactttagtaagaattcccctccctcaatatctaatcagatgcctcattctccacccttgatatcttcttcaggaagaatactttcaagtcagccattacaaaatctcccttgccctgatgttttcctcttagtaattttctttccactgactcccaccatgatccttggctatcaaatcccatttgtccttcttgtattcagagttcagcgaagactctttcacttactgcaagacccctctgcagccatcgcttccccctactgcaaaaccctattgcaataatccccttcttgaataaagtttcttgaccatctttaacaagtgcctaaataattttcaacacagtccacatgctcttgatgcaatactgttcatttagaagtcaataacaagaataacagaaaaggataattttaaactccataagttggatatttaaagcaaacatgcatacttccacatacttctaaataactcatgggccaaagaagaaatcataacaaaaccttttcaaaaatcttggaattgattaataaactattgcatactgaaacttgtgggaagctgtgaaagcaatactttgaggggaacattaagttaatcataaaaaattaccatttttggtaattcaatagcagccaaatatcagcaatttcctatggtttaagctaaacctgtagccttacatgcttatattagaaaataagaaatgctgaaaattaatgagtacagctttgaacttaagaagtcagaaaacaatagaataaactcaaagaaaatagaaaaaag

SEQ ID NO: 678791 - DNA, 1838 bp, Homo sapiens
tgtccactgagcaagtgcagaagcagtgatacaactgtagtaacaaggacaactagtgcctacaaattctttctttctttctttttttaagagacggggtcttgctctgtcacccaggctggtctcgaactcctggcctcaagggatcctcccaccttggcatcccaaaatgctggaattacaggtgtgagcccctgtgcctggcccctagattgtggtttctaaatatcattctttaataaaataaataagagctctttgtagaaatagctgattctagggctgtagggaaaatacagtttgagcctggagtatcttgtagtaccagaaagggaagaagtattcaataaaaaaaaggatgcaggaccatggcaaaggcacacaggaaccaaactgaaagagctgtcatattctaattaagcttggaattaatgagttttttaaaaagatatttttacttcatttctttgattgatagtaatgttaaacatttttttcacttttactatttatatttcctttgtaaagcatctgatctggccttttttcatttttctataggtgcattagtggttttctaattgatttgtaagagctctctaaattttttgcaacattaatctttatatgtcttaacctaatatttctaggtatttttagaggctttttcttgcttgtaaggcaaatgaattttgtttattatttcatgtctatttattagtgatcaattttatgaatttatgttggattgtcccataaagaggcaaagggctattaattgaatacctactgagaacaattataatgataaaatctactttctccatattcttttagactcaacgtctattgcaacagaatattctctgaaatttgatgaatccatgacagaagatgaaatagaagaacaatcatttcgatcattactaccttcagagagtcaccgcagatttaacatggaaaagagaagaggtcatcatgatgactctgatgaagaagcttctccagaaaaaactacactgtctactgccaaggtgtgtttcactttatctgtggaggtaaatggttgtggatatgttctctcaaagatatgagaaaacattttgtacttatctcatttgtcagctactagaatgatttttctaagatatcagttttattttatagttttcctatgaaatctggtttcactttccttacaaagtacaatacaaacttattttttggaatgatatataaggcctttgaggatctgagccaatattatctctctagcttttgtacttgcttcactcttctaatactttattccatttagaaatttacattcgttcttaccaaattgtaatcctcttggttaagaggaacaaattcttacccactttgtatccttgggacagtaattggcttgcagtagtttattaaaattttattggctgaataaattagcagatgaatgttaatctgcctcatgtgcctttttaaagaatatwctcttacattgttggtggccttgttaaatacatagtttgtttttgtaaatgcatacctcttttagtggaattaagtaccaaaaggttagatgatgataaacaagaaagaaaccatctactttaggaactgaacatgccattctcaggaggacaagatagcttttctaaatttactatggagatggttcgacagtatatgaaagaggaagaaatgagggcagctcaccagtcttcactcctgcgtctccgtgaaaaggccttgaaggagaagactaaggctgaattggcctggttagagcatcaaaaaaagtaagttcttttgagcagttttcactaatttcttca

SEQ ID NO: 678792 - DNA, 2226 bp, Homo sapiens
actgttgatcacgtgttaaatgcaagcttttaaaaaaatatatagattttgctcatattttagaaatgtccaatctaatatatggtcttcatttcatcataaatataatacattttcctttggagaggtatttttcttcccatcaaattatgttactttttgttctttatggggaaaggaaataatgtaaaagagattaaggtgaggtttacctcagccctgattaaagtcaaacttaaaaaaaaaaaaaaaaactctaccaaattggtgagtgttatgagacaaaagtagtgtagtgatttaattgaggctgagagtcagatgatcagaaattttttatttctgcacgaacctgaaagattaaaatagttataaataagcactacttgatttcagaaatccagttcattgtttttaatatgtgcctgtgggtttgcaaaataagtggattatgtttcaagtggagagaaacccataatattaaaaatattcaaaattaatacagaagatacatatgttttgttatgtggtttatcattttgtcacacatttaatctagtattaaatacttattcttcacaaatagctatttcagataattaaggtaggacatatgtgaatgagacaagggaatggcccatacatgaatgagacaagggaatggcccataggagctagttacctagtaatagagacagatcaatgtattagcattaataaatcacaagttagagagcaatgagattttgttttctagcactgaagaatctaaataactgaatcttctccacataaaatagaaagcasataaaatgtatgaataaattgtaatcaatatcaactttaaacacatattagatgaaaagaaaagatgatgtttatgttataactgcccataggtggtagcaaaaaaaatcagtgcccgtaactagctaagggtcagaacctaacaagagaaactattgggctcaagttaagttgaaatttggagttgagaactccatgtatagctgaagctcatggagaacatacaactaatttaaaaataaattgtttgagaaaaagcatgcccactgtattcattttgactccacaaaaaataaatcccatttatatgtatgtatatataaacagacacaaaaagtgatccagagctactaacatccatgggaacattaacagaggcaaagaatactcctctttttaagatatctcataaatccaaatcatatggaattctgaaaaataaaatcctgtgaaacattaatgtacaacctaaaattacaaaagacatattgatacaaagcttaacaagaaaggacttgtacacatgcagacaataagataatacttaaaattattaatgtttcaaaggaaaaaacagataaacaaggtaaaatgttacaagagagcaagcatatttacaaaaaattatacaattaaatatccgatgatttaaaaataattgaaattaaaattcaaaggaaagcagaaagaatactttctatctcattctatgaggctatttttctaatgccatcaccaccatagcaaaaacaaaacaacaacaaaaacctgtagggaaatatctctcataaacaaaaagcaaaaaaccttaacacaatattagtgatactgacaaatgaatcctaaaatttatatgaagaggcaaaagacccagaatagctaacacaatactaaagaataaagttggaagactgtcacaacctgacttcaagacttactaaaaatctacagtaatccagacagcctggtgttggtgaaacaaaagatacaccgatcaacagaatagaagattagcactataagacagggtgagaaaaaaaaaaaaattagaagagcccagaatcagacccacatcaatacagtcaactgatctttgacaaaaaagcaagggcaattcaatggggaaaaggtatctttcagcaaatcttggaatgactggaagttcatttgtgtatgtgtaagagagagaatctagacatagagcttacacctttcataaagcataacttaaaatagatcaaacacctaaatattaaatcaactcaaaaaattctagaagatacacaggagaaaatataagtgatgttgagtttggcaagaagttttcagatacagtaccaaaaacaatctatgaaacaaagaaggatacattggactttattaaaaacttatgctgtggctgggtgcagtggctcacgc

SEQ ID NO: 678793 - DNA, 758 bp, Homo sapiens
gtttttcttttgcttgtttgttgtgtacccgatttgccgtacaattgttcagctctaaaagctgacagagctaaaggcaacaataagttaaatcccataatcaggatttctttatgttttaggatcacattagccttttccagagatagccgaagtgcctagagagatagcaaaatatttcactgttttgtatgtaaattgaaattgtactagtagtatatttgaaaagtgatatttaataagaagcctgtaaaaccctaagcttctctcccttattatttgaaaattattttaagacctgtagcccccacattttgatgttgttagatttatcaacattgtctgggtaatggtcctgttctatttagggtggtttttctgcttatggtctgtgctacttcttaatatacagtattaagagttttggttaactctgaactgcccgggttgattagagtgattccagacagatcgtgttttgaacttrcatttttattttcccattttaatggattgaaaaacattatttaatatgtgttctgggccaggcacagtggctcacgcctgtaatcgcaacactttgggaggccgaggtgagcagatcacctgaggtctggagttcgagaccagcctagccaacatggtgaaaccccatctctactaaaaatacaataaattagctgggcatggtggcatgagcctgtaatcctagctacatggtaggctgagacacgagaatcgcttgaacccgggaggca

SEQ ID NO: 678794 - DNA, 758 bp, Homo sapiens
gtttttcttttgcttgtttgttgtgtacccgatttgccgtacaattgttcagctctaaaagctgacagagctaaaggcaacaataagttaaatcccataatcaggatttctttatgttttaggatcacattagccttttccagagatagccgaagtgcctagagagatagcaaaatatttcactgttttgtatgtaaattgaaattgtactagtagtatatttgaaaagtgatatttaataagaagcctgtaaaaccctaagcttctctcccttattatttgaaaattattttaagacctgtagcccccacattttgatgttgttagatttatcaacattgtctgggtaatggtcctgttctatttagggtggtttttctgcttatggtctgtgctacttcttaatatacagtattaagagttttggttaactctgaactgcccgggttgattagagtgattccagacagatcgtgttttgaacttgcatttttattttccmattttaatggattgaaaaacattatttaatatgtgttctgggccaggcacagtggctcacgcctgtaatcgcaacactttgggaggccgaggtgagcagatcacctgaggtctggagttcgagaccagcctagccaacatggtgaaaccccatctctactaaaaatacaataaattagctgggcatggtggcatgagcctgtaatcctagctacatggtaggctgagacacgagaatcgcttgaacccgggaggca

SEQ ID NO: 678795 - DNA, 612 bp, Homo sapiens
aaccctgagttccacacagtaatagctatccccaaccggctaatgtgtcaaaaattatccaagctgatttacactcatgaatttgtttgattttcacaacaaatttgttgtgaagttttgttgtaaagatttgttggtcttcccatcgtgtatcctcagttccattttacagatgaggaaactgaggtgaggaaggagaagtaacttgattagggacctgcagctggcaatgacaggcaagattcaaattcaaatctacccagagtttgttgtcctctatgccacagcacatcttggttttgttgctttttcaaaaagccctgatactgttaagatatcagagatacctggagaaaactccactctaaaaatgcactattctgacattgggtaaaaattaaggaagtctggccaggtgcagtggctcacgtyggtaatcccaacactttgggaggcagaggtgggcagatcacttgaggctaggagttcaacatggtgaaaccccatctctactaaaaatacaaaaattagctgggcttggtggtgcatgcctgtaattccagctacttgggaggctaagagaggagaatcacttgaacccaggaggcagag

SEQ ID NO: 678796 - DNA, 595 bp, Homo sapiens
tcccatgcaagcaggtcctgaggcagggtcccaaggtgtctgccccttcctgagcagcacaaactgctcagcttcctggggaaggttccagaagctaagctgccctagatgggataaggggcagggaggctgcctaggagagccaggctgtctagtcacaatgtcaagcttgtggaagaaatattccttttgtggttcatatccttcttgttgctctaatcactgggagaccatctggtacatcgttgatggctgcaaacgtgcatttaagagcttgagagaatacagcacaacagggaggccaccataatgactgtcaggacaatataccaaaagtttggagtgtttcttagtcaaggtccccatgaaccaaaccaatgaaaataaacaaaagaaaacaaaaagttaatggctagaacaaactattaactcagtctctgagtctacagggcagtaaagaagatttctgtatgttggtctgttccatgataagcaggtctatacaatcctacccacaaataccragagagctgacaggctggccagttgcagtggctcacacctgtaattccagccctttgagaggccgaggcag

SEQ ID NO: 678797 - DNA, 610 bp, Homo sapiens
gcatggaggtggggggtattatctccactaaacatcagagctcaagcacatgttcatactatttggatcgttcaaaaaacctcragcccagaactcaaaatggtcctaagctggcacaagcaaatgcaaatccactccacagaaacccacctccatcctaggcactgaattttcaaagataagatgccaaagaagaaagagctttcagttaaaaattattaaattagcatggaagcttgcaccatgagtgaaatcctgcaaaaatggcaggcagaaaaacaaaacttgcaaatacattacaaattagaattatcatataagaataagaaatgagtaataaaatttcagtaatagaaacctgaaaactcaagaacaaaaattgaaaaataaactaagtagaactcctagaagtcaaaaataatcccaaatggattacagatttaaatatgaaggaaaacctatttttataaacccagggtagcaaaaaaattacttaaacagttacaaaaagtgtcaaccataaaaagatacatttatattaaaattaagaagtcttctgttccttaatagaattaagaaagtgaaaagaaaagcacaaaatgagaaaaga

SEQ ID NO: 678798 - DNA, 610 bp, Homo sapiens
gcatggaggtggggggtattatctccactaaacatcagagctcaagcacatgttcatactatttggatcgttcaaaaaacctcgagcccagaactcaaaatggtcctaagctggcacaagcaaatgcaaatccactccacagaaacccacctccatcctaggcactgaattttcaaagataagatgccaaagaagaaagagctttcagttaaaaattattaaattagcatggaagcttgcaccatgagtgaaatcctgcaaaaatggcaggcagaaaaacaaaacttgcaaatacattacaaattagaattatcatataagaataagaaatgagtaataaaatttcagtaatagaaacctgaaaactcaagaacaaaaattgaaaaataaactaagtagaactcctagaagtcaaaaataatcccaaatggattacagatttaaatatgaaggaaaacctatttttataaacccagggtagcaaaaaaattacttaawcagttacaaaaagtgtcaaccataaaaagatacatttatattaaaattaagaagtcttctgttccttaatagaattaagaaagtgaaaagaaaagcacaaaatgagaaaaga

SEQ ID NO: 678799 - DNA, 610 bp, Homo sapiens
gcatggaggtggggggtattatctccactaaacatcagagctcaagcacatgttcatactatttggatcgttcaaaaaacctcgagcccagaactcaaaatggtcctaagctggcacaagcaaatgcaaatccactccacagaaacccacctccatcctaggcactgaattttcaaagataagatgccaaagaagaaagagctttcagttaaaaattattaaattagcatggaagcttgcaccatgagtgaaatcctgcaaaaatggcaggcagaaaaacaaaacttgcaaatacattacaaattagaattatcatataagaataagaaatgagtaataaaatttcagtaatagaaacctgaaaactcaagaacaaaaattgaaaaataaactaagtagaactcctagaagtcaaaaataatcccaaatggattacagatttaaatatgaaggaaaacctatttttataaacccagggtagcaaaaaaattacttaaayagttacaaaaagtgtcaaccataaaaagatacatttatattaaaattaagaagtcttctgttccttaatagaattaagaaagtgaaaagaaaagcacaaaatgagaaaaga

SEQ ID NO: 678800 - DNA, 1309 bp, Homo sapiens
gggaaaacaaacagaagtttcaggatattcaaattttatcataagcttcaaataatttcaatgtttcactatgaactgctatcacaggtataaactggaatcatctactgaatttaaaacacaagtttgtccttaacccagcaacttcctgtgtaaacccaaaagaaatgaatacacgtgtccaccaaaagattatgtacaaaaatttttagtagctttaatcagaagactgatgggtcacacaagtcaaaacagtggttaccttgtggttgcaggggtgtatattaactgaaaaggaacatgagagaacgaggggttgggaaacgttccatatcttgacctgggtggtactttatgtgtatctacatatgtaaacattcactgagctgtatacttcagatttgtgcactctagtttaattttaaactacaataaaacattttttaagtattttgaaaaatgacaataaaaagtgaaaactaattacaaattgccaaaaatactaaaattcatagaatgaagcccaacaaatctcattatgatcaactgaagaagactcctgtttaaatgaggctttttttagttgagtgttaacaatatgccaacagatctctcaatgagacacttaaggacttaaaatacttctatataaatatggtaccaaaaaagtgactaaaaatacatccatactttggtagatataacttccaaggatgaaataataaattgctgtataaagtctagggggtaccttttacgtaaaatacaatggtataataataaactaggacaacggttctctagcctgtaaraaaaccaaaaacacctggggagctttttaaaaatacatattcccagaccccattctacatctactgaatcataattcttcataaaactcaaaaaacaataaaatgttgtaaaatgctctgcaagagtctgaaaacagctgactggtgtctaggaagcactgacccatgagcttcactaacacttcaatgttaccacaatgagttgaactcacttagttcaacaaatattcactgagcctccactacacacctatcacttgctagacactgcagatacaatgatgaagaagacatggtctttgcttaaaggaacagtctaatgggaaaaagaatcagaaaaaagatttaatataatatggtaagttccagatttgaaaacaaaatgttagtaggggcacagaagatgggaccagttaaacgaggaatcaagtaagacttactgtaagaagtgaaacttgaattcagtcttagaaggttagtaaaagttatctaagcaa

SEQ ID NO: 678801 - DNA, 701 bp, Homo sapiens
tggtggtgcacgcctgtaatcccagctactcgggaggctgaggcaggaaaatcggttgaacccaggaggcagaggttgcagtgagccgagatcttgccactgtactccaccctgggcaacagagcgagactccatctcaaaacaaaaacaaaaacagaaacaaaaaattaaaaacattatacaaatgtaaactgcaatgatgacragaaggaggaatgtggactccgtatgaaattccctcgtggtatctgcactagaacatctctacttttcttaaacctcaaactttgctcatctctttgacccttagtctctacagaggatctgttctcctactctccaaaattgttcaaggtcatctgatgagtggcctcaatttattttcagatgtgcatgtgctttacttggggctttgttttggtttttagttcagtttttttttattggggttcaaatatgagacagtcttggggaacctagtagggaaaatctgaaagcaaatacagtaccatactgagaattgtacaatatatatatatatatatatatatatatatatatatatatatatatatatatatatatatatataaaagaaacaatacagaaacttcattctgctatcacaaagccttcaaagaaatgacgattgatgccttagtgaggttcactagaagggaaaaagttggcagatgtttccc

SEQ ID NO: 678802 - DNA, 701 bp, Homo sapiens
tggtggtgcacgcctgtaatcccagctactcgggaggctgaggcaggaaaatcggttgaacccaggaggcagaggttgcagtgagccgagatcttgccactgtactccaccctgggcaacagagcgagactccatctcaaaacaaaaacaaaaacagaaacaaaaaattaaaaacattatacaaatgtaaactgcaatgatgacgagaaggaggaatgtggactccrtatgaaattccctcgtggtatctgcactagaacatctctacttttcttaaacctcaaactttgctcatctctttgacccttagtctctacagaggatctgttctcctactctccaaaattgttcaaggtcatctgatgagtggcctcaatttattttcagatgtgcatgtgctttacttggggctttgttttggtttttagttcagtttttttttattggggttcaaatatgagacagtcttggggaacctagtagggaaaatctgaaagcaaatacagtaccatactgagaattgtacaatatatatatatatatatatatatatatatatatatatatatatatatatatatatatatatataaaagaaacaatacagaaacttcattctgctatcacaaagccttcaaagaaatgacgattgatgccttagtgaggttcactagaagggaaaaagttggcagatgtttccc

SEQ ID NO: 678803 - DNA, 701 bp, Homo sapiens
tggtggtgcacgcctgtaatcccagctactcgggaggctgaggcaggaaaatcggttgaacccaggaggcagaggttgcagtgagccgagatcttgccactgtactccaccctgggcaacagagcgagactccatctcaaaacaaaaacaaaaacagaaacaaaaaattaaaaacattatacaaatgtaaactgcaatgatgacgagaaggaggaatgtggactccgtatgaaattccctcktggtatctgcactagaacatctctacttttcttaaacctcaaactttgctcatctctttgacccttagtctctacagaggatctgttctcctactctccaaaattgttcaaggtcatctgatgagtggcctcaatttattttcagatgtgcatgtgctttacttggggctttgttttggtttttagttcagtttttttttattggggttcaaatatgagacagtcttggggaacctagtagggaaaatctgaaagcaaatacagtaccatactgagaattgtacaatatatatatatatatatatatatatatatatatatatatatatatatatatatatatatatataaaagaaacaatacagaaacttcattctgctatcacaaagccttcaaagaaatgacgattgatgccttagtgaggttcactagaagggaaaaagttggcagatgtttccc

SEQ ID NO: 678804 - DNA, 1644 bp, Homo sapiens
acagccttcaagcaagacaaggtgtccatttaccacagctatattgtacttaacagatctccattgatagcttatttgaatttgtttttctctatataaatgtttagcctagaggaatcagggacatttatttttctctgaatttatggtgagttagtagagagtcctgtttacaaagacatagttacaaccagagatatatggccactgaggttaaagtggttaaatgatttgctggcattcacacaactagtatgtgttgtatgaaggcctagttaattccaatacctttacttattatggtgctggtgctttgcatgtaacacttcatattaggaaaatgcttgttttcagaattctattattgaaacatctttggaagttgaatttcctgtttaatattcagcactgctagcaactaattatctgaattttaagaaggaaattctgccttggcaactccagtctacttttaaatgggcctatacttggatttcggcttggggaatttgccagaatcaatgctttcactcctacttgcttattttccacatactagatcagtctggacctgactcccccaacccccattttttcagctacatgctaagactatgtttaaaatacctaaagactgggaaggggttgtttttgtctcagaaaggataagtaacacctcatggtgccctccccatcctggggggctcgcctgactgtggctgagggatcatattttcaaggctaagtggagcatccatccattcagtggatgccccaggacactacttctattgaaatctaccccattttgtaaataaaattccaaactgggctcagaacattccacaagttgtctctggcaaaaattcaaatagcatttaaagttagaagaaagtccagaatacaagagatgtcctattgacccaaggtggctctatgtgattctattttaaaacactcaaatgcactgaggacttgttttcctctgcctcagagcattttctgagttctgtggccagcaagacaagcatgatctgaatttcttttttctgaaygcttatggctaaagtgctaaattagtcatagactatttataatgaattgtataataatactgttttattttcatagcagtttcacagcctgtgattcatctttccttaatctgtctcattatcttcagtccttttctgcttgttacattccacagaaacgtctttctttcttgtcttttccaaggccagtgagggaagaggtaacttgcaactagtgtcttcttatcatggtcatggtggaaagggtggaaagaagcaataacttctgacatacagaaagcattcactggccaggcacagtggctctcgcctgtaatcccagcactttgggaggccaaggcaggaggatcacttgaggtcaggagttcgagaccagcctggccaacatgttgaaaccccatctctactaaagatacaaaaattagtgggcatggtggggggtgcctgtaatcccagctaatcgggaggccgaggaatgagaattgcttgaacccaggaagtggaggttgcagtgagccgagatcacaccactgcactccagcctgggtgacagagcaagactctgtcggaaaaacaaaacaaaacaaaa

SEQ ID NO: 678805 - DNA, 1644 bp, Homo sapiens
acagccttcaagcaagacaaggtgtccatttaccacagctatattgtacttaacagatctccattgatagcttatttgaatttgtttttctctatataaatgtttagcctagaggaatcagggacatttatttttctctgaatttatggtgagttagtagagagtcctgtttacaaagacatagttacaaccagagatatatggccactgaggttaaagtggttaaatgatttgctggcattcacacaactagtatgtgttgtatgaaggcctagttaattccaatacctttacttattatggtgctggtgctttgcatgtaacacttcatattaggaaaatgcttgttttcagaattctattattgaaacatctttggaagttgaatttcctgtttaatattcagcactgctagcaactaattatctgaattttaagaaggaaattctgccttggcaactccagtctacttttaaatgggcctatacttggatttcggcttggggaatttgccagaatcaatgctttcactcctacttgcttattttccacatactagatcagtctggacctgactcccccaacccccattttttcagctacatgctaagactatgtttaaaatacctaaagactgggaaggggttgtttttgtctcagaaaggataagtaacacctcatggtgccctccccatcctggggggctcgcctgactgtggctgagggatcatattttcaaggctaagtggagcatccatccattcagtggatgccccaggacactacttctattgaaatctaccccattttgtaaataaaattccaaactgggctcagaacattccacaagttgtctctggcaaaaattcaaatagcatttaaagttagaagaaagtccagaatacaagagatgtcctattgacccaaggtggctctatgtgattctattttaaaacactcaaatgcactgaggacttgttttcctctgcctcagagcattttctgagttctgtggccagcaagacaagcatgatctgaatttcttttttctgaatgcttatggctaaagtgctaaattagtcatagactatttataatgaattgtataataatactgttttattttcatagcagtttcacagcctgtgattcatctttccttaatctgtctcattatcttcagtccttttctgcttgttacattccacagaaacgtctttctttcttgtcttttccaaggccagtgagggaagaggtaacttgcaactagtgtcttcttatcatggtcatggtggaaagggtggaaagaagcaataacttctgacatacagaaagcattcactggccaggcacagtggctctcgcctgtaatcccagcactttgggaggccaaggcaggaggatcacttgaggtcaggagttcgagaccagcctggccaacatgttgaaaccccatctctactaaagatacaaaaattagtgggcatggtggggggtgcctgtaatcccagctaatcgggaggcygaggaatgagaattgcttgaacccaggaagtggaggttgcagtgagccgagatcacaccactgcactccagcctgggtgacagagcaagactctgtcggaaaaacaaaacaaaacaaaa

SEQ ID NO: 678806 - DNA, 1644 bp, Homo sapiens
acagccttcaagcaagacaaggtgtccatttaccacagctatattgtacttaacagatctccattgatagcttatttgaatttgtttttctctatataaatgtttagcctagaggaatcagggacatttatttttctctgaatttatggtgagttagtagagagtcctgtttacaaagacatagttacaaccagagatatatggccactgaggttaaagtggttaaatgatttgctggcattcacacaactagtatgtgttgtatgaaggcctagttaattccaatacctttacttattatggtgctggtgctttgcatgtaacacttcatattaggaaaatgcttgttttcagaattctattattgaaacatctttggaagttgaatttcctgtttaatattcagcactgctagcaactaattatctgaattttaagaaggaaattctgccttggcaactccagtctacttttaaatgggcctatacttggatttcggcttggggaatttgccagaatcaatgctttcactcctacttgcttattttccacatactagatcagtctggacctgactcccccaacccccattttttcagctacatgctaagactatgtttaaaatacctaaagactgggaaggggttgtttttgtctcagaaaggataagtaacacctcatggtgccctccccatcctggggggctcgcctgactgtggctgagggatcatattttcaaggctaagtggagcatccatccattcagtggatgccccaggacactacttctattgaaatctaccccattttgtaaataaaattccaaactgggctcagaacattccacaagttgtctctggcaaaaattcaaatagcatttaaagttagaagaaagtccagaatacaagagatgtcctattgacccaaggtggctctatgtgattctattttaaaacactcaaatgcactgaggacttgttttcctctgcctcagagcattttctgagttctgtggccagcaagacaagcatgatctgaatttcttttttctgaatgcttatggctaaagtgctaaattagtcatagactatttataatgaattgtataataatactgttttattttcatagcagtttcacagcctgtgattcatctttccttaatctgtctcattatcttcagtccttttctgcttgttacattccacagaaacgtctttctttcttgtcttttccaaggccagtgagggaagaggtaacttgcaactagtgtcttcttatcatggtcatggtggaaagggtggaaagaagcaataacttctgacatacagaaagcattcactggccaggcacagtggctctcgcctgtaatcccagcactttgggaggccaaggcaggaggatcacttgaggtcaggagttcgagaccagcctggccaacatgttgaaaccccatctctactaaagatacaaaaattagtgggcatggtggggggtgcctgtaatcccagctaatcgggaggccgaggaatgagaattgcttgaacccaggaagtggaggttgcagtgagccgagatcacaccactgcactccagcctgggtgacagagcaagactctgtcggaaaaamaaaacaaaacaaaa

SEQ ID NO: 678807 - DNA, 1644 bp, Homo sapiens
acagccttcaagcaagacaaggtgtccatttaccacagctatattgtacttaacagatctccattgatagcttatttgaatttgtttttctctatataaatgtttagcctagaggaatcagggacatttatttttctctgaatttatggtgagttagtagagagtcctgtttacaaagacatagttacaaccagagatatatggccactgaggttaaagtggttaaatgatttgctggcattcacacaactagtatgtgttgtatgaaggcctagttaattccaatacctttacttattatggtgctggtgctttgcatgtaacacttcatattaggaaaatgcttgttttcagaattctattattgaaacatctttggaagttgaatttcctgtttaatattcagcactgctagcaactaattatctgaattttaagaaggaaattctgccttggcaactccagtctacttttaaatgggcctatacttggatttcggcttggggaatttgccagaatcaatgctttcactcctacttgcttattttccacatactagatcagtctggacctgactcccccaacccccattttttcagctacatgctaagactatgtttaaaatacctaaagactgggaaggggttgtttttgtctcagaaaggataagtaacacctcatggtgccctccccatcctggggggctcgcctgactgtggctgagggatcatattttcaaggctaagtggagcatccatccattcagtggatgccccaggacactacttctattgaaatctaccccattttgtaaataaaattccaaactgggctcagaacattccacaagttgtctctggcaaaaattcaaatagcatttaaagttagaagaaagtccagaatacaagagatgtcctattgacccaaggtggctctatgtgattctattttaaaacactcaaatgcactgaggacttgttttcctctgcctcagagcattttctgagttctgtggccagcaagacaagcatgatctgaatttcttttttctgaatgcttatggctaaagtgctaaattagtcatagactatttataatgaattgtataataatactgttttattttcatagcagtttcacagcctgtgattcatctttccttaatctgtctcattatcttcagtccttttctgcttgttacattccacagaaacgtctttctttcttgtcttttccaaggccagtgagggaagaggtaacttgcaactagtgtcttcttatcatggtcatggtggaaagggtggaaagaagcaataacttctgacatacagaaagcattcactggccaggcacagtggctctcgcctgtaatcccagcactttgggaggccaaggcaggaggatcacttgaggtcaggagttcgagaccagcctggccaacatgttgaaaccccatctctactaaagatacaaaaattagtgggcatggtggggggtgcctgtaatcccagctaatcgggaggccgaggaatgagaattgcttgaacccaggaagtggaggttgcagtgagccgagatcacaccactgcactccagcctgggtgacagagcaagactctgtcggaaaaacaaaamaaaacaaaa

SEQ ID NO: 678808 - DNA, 1639 bp, Homo sapiens
aataacagatccatctactgagcacccactatgtgtatgggactaggacctctgtgacaccctggtgaggtcagctctattctgagccccatgttacaggtggaaaaactgagggccagagaggttaagtaacttgtccaggttcccacatccaggacgtggcagagccaggatgacaaaccaaattcagcgtgttttcagaacctgggctcttacagtgacaggctgacccgggcttccttagatggggccagtggcaaagagccccaggaaacgtcctgagttcatgagcttcaatccaacaccactgctttggtctctcttccaaggagagagaacattggtggtgaaggagagttggttcagaaaatggcccttcctttagagcttttcaaactttgacaggtacctgaattgcctggggagcttgttcaaacatggattactaaacccaccacgatgttctgattccacaggtctgcgctggagcctggaatttgcatttccaagaagctccaaggtgatgctggtgctgctggtctagcgaccacactttgagaccactgccatggcctgtgacattcacctgaagtatcaagctaagcaacaccgggtctcagcctctgctcttcccaccactgggttacacacactttcccaagtcytgggatcccagagggatgttctcactgtccacatctccacctgcagagttctgatagtcactctcacctccagtcacaatcctttccaaaggggcactgacacagaaaacaggagggacagaacaatttctaacacaaccgagcaggtcaggaacggcaggtagcctttccgggcataccacggacctgctctgtttgtggtaaggactttcccgcgtcccttaagccacactctataggatcaccatttcttctgccttgtcagactagcctgatgctcttgatatccgaggctaccgaaccagtttccctaggacacaagagggtgtacacgcctgtaaagaaaaaaagagtgcaaccaggcgcatataagaaaaaacacagatacaagggaaaagctgggaggtagggggctgaggtggcagctgaaggaaatgatgaattaaaggctggctttccccatggcaatcgcctgttctgtgcatcagcgaaaacaaccataggtggcttttccctccttcattttctttccaattaagtcctgcatatttcttcacgtactcaccttaggaaggaccctggacctccctccgtccacaccctcctttcatctgccccctcccatcaccacacctgcctctgccggcagagtgacctttcctcagcagggcctcccttccagccagcgggaggagaagggcgtgcgctggcaggtggtcacgtaggcgggaatgcaaccttgctgtgcccctccagcaccactgcagaccccccaaggaaaatgaagtccaccactcccctgcagactcctcaagggcagagaagcaccccaccaccctgcagacccctcaaggaaaatgaagccccccgccacaactttgcacacctctcaaggccaatggttgtgcctttttggcacaaagtgaggattgaactgaggcttcgtgaatgagttaaacgaatgacattttagg

SEQ ID NO: 678809 - DNA, 1639 bp, Homo sapiens
aataacagatccatctactgagcacccactatgtgtatgggactaggacctctgtgacaccctggtgaggtcagctctattctgagccccatgttacaggtggaaaaactgagggccagagaggttaagtaacttgtccaggttcccacatccaggacgtggcagagccaggatgacaaaccaaattcagcgtgttttcagaacctgggctcttacagtgacaggctgacccgggcttccttagatggggccagtggcaaagagccccaggaaacgtcctgagttcatgagcttcaatccaacaccactgctttggtctctcttccaaggagagagaacattggtggtgaaggagagttggttcagaaaatggcccttcctttagagcttttcaaactttgacaggtacctgaattgcctggggagcttgttcaaacatggattactaaacccaccacgatgttctgattccacaggtctgcgctggagcctggaatttgcatttccaagaagctccaaggtgatgctggtgctgctggtctagcgaccacactttgagaccactgccatggcctgtgacattcacctgaagtatcaagctaagcaacaccgggtctcagcctctgctcttcccaccactgggttacacacactttcccaagtcttgggatcccaragggatgttctcactgtccacatctccacctgcagagttctgatagtcactctcacctccagtcacaatcctttccaaaggggcactgacacagaaaacaggagggacagaacaatttctaacacaaccgagcaggtcaggaacggcaggtagcctttccgggcataccacggacctgctctgtttgtggtaaggactttcccgcgtcccttaagccacactctataggatcaccatttcttctgccttgtcagactagcctgatgctcttgatatccgaggctaccgaaccagtttccctaggacacaagagggtgtacacgcctgtaaagaaaaaaagagtgcaaccaggcgcatataagaaaaaacacagatacaagggaaaagctgggaggtagggggctgaggtggcagctgaaggaaatgatgaattaaaggctggctttccccatggcaatcgcctgttctgtgcatcagcgaaaacaaccataggtggcttttccctccttcattttctttccaattaagtcctgcatatttcttcacgtactcaccttaggaaggaccctggacctccctccgtccacaccctcctttcatctgccccctcccatcaccacacctgcctctgccggcagagtgacctttcctcagcagggcctcccttccagccagcgggaggagaagggcgtgcgctggcaggtggtcacgtaggcgggaatgcaaccttgctgtgcccctccagcaccactgcagaccccccaaggaaaatgaagtccaccactcccctgcagactcctcaagggcagagaagcaccccaccaccctgcagacccctcaaggaaaatgaagccccccgccacaactttgcacacctctcaaggccaatggttgtgcctttttggcacaaagtgaggattgaactgaggcttcgtgaatgagttaaacgaatgacattttagg

SEQ ID NO: 678810 - DNA, 634 bp, Homo sapiens
gcctgtgactatctagaatgtggtagtgacacaaagcaaaccttgtcaaaactaaaaactgtctctaaggctcacgccttacacaatgctgcctactgcccagagtcccaccttcacagatgtttccgtactcaatgttctacctcttggtgagcaatatgagtactgctggttatggtagagaatctgtcatttctctgagatgttacgatgaaatgaggccgtaaaattctatttctcatggtataccagacttctttgcccrtcttaattttagggagtctcctctctttctttttctgctttacatgtgtggattcatatgagaataactccttcaagggatgaagatccccttctcgttgtaaaattgagtaggaaaacaaatttgttttagagggacttctgcttttggcctggcaatttaatcattctctgaggtacaggaggacaaagtgtctggcaatttatttgaagtagtaagataacaagtgtacgcaaaaatagagtgaaaactgctgctgcttcaaacacaaggagctgctagtcgcctttatatttaggaaatattgcagtaaatgaacaaagacatttagattttagatcactagaaacatggagaaaacaatgaact

SEQ ID NO: 678811 - DNA, 631 bp, Homo sapiens
cagagggaaagcactgtcttgcacagaattcccaatgatatacaaatatgtgtgtgtatatatctctctctagtgcacacacatacatgtacacaaatgtatagataaatgcatatacacacacatatactcatatatgcatacccatatatacacattcatacacctgcttatgcatgcatacatatacacatacatatacacacatatatgcatatatacacatatatgcacacatagacagtgaacaaatttccaatttatcttcaaggaagaaaacagcattatttctggtcacgtgtgtaaaacttttaatgaaactcttttttctagaacccagaagctacatttttataagcatgcagccaactgtaaaatgatccaactagtggaggggcatagggcactgtttttggtcccgatctgattcacacatgtccccagttggaccacaagacaccttgaggctgcgacctgttttattcrcctttcacgtgtatctgactcagcagtaaaaactgcagtgcctggggagctggtaagcagcccaaaaatgtgtgtttaatatatgaataaattaatgaatagcccaaatccatgacttcttattgagatattaatgatccactga

SEQ ID NO: 678812 - DNA, 693 bp, Homo sapiens
gaaacttaaatctttatggtctttgacctaaaaatgataggcagaaactgagtactgacctgaaatccaggttcacctttttggccctgaaagaattcgagagacagatcagcactatcaaacagctgtatcatttgttatatgctgcattaaacacacagcagaaaaaaaaaaaacctttttctgatatattaacaaagaaattcatgttgatctccagcactcacttgacattgactggtataaatgtaagcagggcagggtttatcatgcttgacccatgatgactggccctgcccccctcctgccccccagcccagctccctcctcctgaccaagccatctccaacttggggcacatttaagaagccctgatccagcggggtgagcctcagatcaggcttggaccaatccagttccagctgtctctgctctcaaaggggctcgtattttatggactgaacagtctataaatctgttttccagaccaggattgaatgtagctggaaaaactgagttttgacccattttctctttatcttttggaatttgtccaaaattagaaaatcagtattcactgatgaagcccaytcataccttttctcccttggtggcgaagtctcctttttcttgaacttgagcttgtcctggtactcctggaggcccactgaccccttggtcaccctgtcgaca

SEQ ID NO: 678813 - DNA, 596 bp, Homo sapiens
tatcaaaggaaatcagatgtcctctaagccaggcttactaggtccacatgaaggcgtttctcccgtctggcagggaaccctgaaaaacacaagtgagccccactggcgcctctcagttctccagggaggccccccagcctgtggagggcagaaaggggaacacagcccaggcacctggacagactgcaggtgctgcgggagtaggggaagaaagggatagaggccaagagcaattccaagaagggctcctggctgaaggcaacatccccctagaccctccctctacagtgtaaagcgtgactcccaggaaccctccccatgcccagaatgctagsggtcatgtgcaggatggcatctccacactgtggactaagagagcccctcacgacacaaagccaacacacctagagaaggagcacccacctgtcacccttccctgctcagtgagacctgaccccacatcccacccaggagcacactcccctcgcagagtccaacgcccctcccacagcccctgatctccctgcagccctacaccccaccctcttccgttccacacgcccagcagcccctggcccatacccaggacatcacac

SEQ ID NO: 678814 - DNA, 596 bp, Homo sapiens
tatcaaaggaaatcagatgtcctctaagccaggcttactaggtccacatgaaggcgtttctcccgtctggcagggaaccctgaaaaacacaagtgagccccactggcgcctctcagttctccagggaggccccccagcctgtggagggcagaaaggggaacacagcccaggcacctggacagactgcaggtgctgcgggagtaggggaagaaagggatagaggccaagagcaattccaagaagggctcctggctgaaggcaacatccccctagaccctccctctacagtgtaaagcgtgactcccaggaaccctccccatgcccagaatgctagcggtcatgtrcaggatggcatctccacactgtggactaagagagcccctcacgacacaaagccaacacacctagagaaggagcacccacctgtcacccttccctgctcagtgagacctgaccccacatcccacccaggagcacactcccctcgcagagtccaacgcccctcccacagcccctgatctccctgcagccctacaccccaccctcttccgttccacacgcccagcagcccctggcccatacccaggacatcacac

SEQ ID NO: 678815 - DNA, 1306 bp, Homo sapiens
actaaaagctgtaatgaatagtatagtgtcatttttaaatgaacttggatgttatgtaaatacaaacattacatcaaaacatacatatattctactcgggaggctgaggcacgagaattgcttaaacctgggaggtggaggttgcggtgagccaagatggctccactgcactccagcctgggtgacagagtgagatcctatctcaaaaaatatatatataaataaaagtaaattttaaaaacatacatatattaacatttgtgaagctctaaaagtacatttgaaaagtgtaaagtgatatattggtaagacttttttttagtttacagacaatatttgatggcattcatattcttgaactctttgtaaaaatttcatggttcttacaggatttgttacccactggatgagaaattcggaataaattcttaaattagttttgctaattatgtgaaaatatctatatacatataatgcttatggtgatcacgtaaccagactatttaattttctcttaaattattccagataaacaagaatgatactgaaaggtttaagaacttatacatattagtgcattgcctctgattaactaaaaattgaacagtatacaaattatgcaactttatgaagttgaaagggattttaaagatgagaagtcttacgatgcagggaaagaattcagaaagaactagagttatagctgggtaggttctacagttttcaagctgtgagccattgaataaattcagctttgtaagcctcagttttctgctttgaaacttggacataaaacacatacctcacagtatcgttgtgaggctctgcatgtrataggtatttggcaaatagtagctatgttctaacccatctctcatttttttagatgagaaacttaagggtcagaaagattgagacttaaagaacacgcacaaaaaatggtctgtagcatttcgaagatctactgactcatgcatctgtgttctaccgcaattcttaaatttatactttctgcttcctatcctcgaaacatgcatgccaattttccaggctggaattggcagtgagctgacagacagaggtttgttttttaaaaagatgagagaacaacttgcagaatcttttatccaaattctcagaatgttttttagtaaatgcttcttatcctaagaactcaaatggtggctttctgctcttcctgccttctctgattctgttgccacttagccctgcggttcacagctaattaaaaagggatggaagaaaattatacctctgttgatgctattgttttaatctatctcaa

SEQ ID NO: 678816 - DNA, 2001 bp, Homo sapiens
tggcaaagcacaacttgaactcaggactgtttgactcctgatgccatattcttggtaattggattattcaattcacccaatcctattgcctttctgaagaaaagtttattagttcatgtgaagagaaacaactatgagataaatctctccagtccctaccaaataaaatagaaagaaagctgacactctctacgatctgactttgtctttctagcctgtttcctactctgtctctctatagattctgtattcctaccagctactcacgctgtctattgtgtggccttcaataccctaccatatctctttgccatccattcttcacacatgaatgttccatccattcttcatacattggaattctcagtctttataactagccttagtgagtcttcttgggtgaaacactttttttagttcctgcagttgccaggaactgtctatttctcaatattcccccagcaaataatgtctacctttatttgccttattccatcccagttcactgtttacatgcctatcttcccctagacagtgaacaacttcctgcctccctctttccttccttcttctcttgttttcaatagattttatatttctgctgtgtcccaggctctatgttatagcctaggactatagaaataactaagacgtaaattctgccatcggataacttacagtgttcagtacaggaaagccattgaataagcattgaatgaataaatgaatgagcttgcagtctagtggggaaggcaggggtgtaaacaattgtaatgtcaaatctatgctggaaacatgagtagtgcctcacattatagacactcggtaaatactcatccatttatttactctctgtamtgaaataggcctaggttcaaatcttgatcttacgtacttggtaattttgagcaagtcactttagctttctgatgctcagttatcaaagctgtgaagcaatcaatagttactgacctcataaggttctgtgaaaattaaatatgtagcaagtgtctacagtaagagctcaatgtatttcagtattctacattccccacttaacttaattccagaaagaatatacagcaatacattgttggatgaattaatgagtgaataaattaatgaataagtgaatgcatgaggcaaggtttgagtggagtaaaactgcagggcatgatgatacagacagaccctgcggggcaagagagcatcaactctctctagggggatcagagccactaaagccctggaaatcacccagttctgttacccctagcccctccccagaggccatgtccttgctcctccccttcacagggggcccaaacagcttgtttttctcctctttgtgtgttggggatatgtgattttactgtcagcatggtgtttctaatgaaaggcaaatggtgtccaatgtgacttggagaaaaacatacaaacaacaacaaaattatatgttctttcttcctgtagtgttcgcagggagaatatgtgacttgtttgctgtcaatacagcttataatgacacggtgcacagaagcactgccaaatgtgtgcggcattcattatacacatgtattaaatgtaatgcgatatgagtttggtggagagcagatgagagctgccctggggctgatgtagagttacagcacctcttcccaggggatgattactggggaaaggggaagtgggcagcagcatgggcgtgacgcagggtgtctagaattttcaggactgattctgggctagattgagagaaatgatcagctcaaagggtccttaaactttatttcaacaacaagaaatcatttaatgatcaattcttgtgctcctactaagtgccgggcttgtaataggttctgggaataagattcttcaccagctttcaggacgttcacagattagcaagagagacaaacagatggagagagaataacggtgcaccgtgattggtaaatgcaatgatctagaagcagaggttcatgtgaaactacagataag

SEQ ID NO: 678817 - DNA, 649 bp, Homo sapiens
gttcttagcatagttgtttctcaaactggaacaacctataaacagttgtgaacaaggtattagaagtgatgggggccgggtgcggtagcttctcccaaagctcattacctcccaaagcaaccccagtactttgggaggatcactttgagcccaggagttccagaccagcccggccaacatggcaaaaccccatctctctaaaactacaaaaaattagctgggcatggtggcacatgcctgtagtcccagctacttggatggctgaggcaggagaatcgcttgaacccgggaggcagaggttgcagtgagctgagatcacgccactgcactctagcctgggggacagagtgagwctctgtctcaaaaaaaaaaaaaaaaaaaaaaaagtgatgggaatagattgttttgtctcaaaaagctctttccaacactaaaatgaaacatataattaaaaatatttttctggctatagaaatatcgatgcttattatagacatctgcaaagtatgaaaatatatgaagaaaaaaattaaaatcccatcatcccccatgaaaactattgttatcatttttgtctgatttctttagtgtttctctttttctttttttaatttttaatttttttgagtatgtagtaggtatatctatt

SEQ ID NO: 678818 - DNA, 649 bp, Homo sapiens
gttcttagcatagttgtttctcaaactggaacaacctataaacagttgtgaacaaggtattagaagtgatgggggccgggtgcggtagcttctcccaaagctcattacctcccaaagcaaccccagtactttgggaggatcactttgagcccaggagttccagaccagcccggccaacatggcaaaaccccatctctctaaaactacaaaaaattagctgggcatggtggcacatgcctgtagtcccagctacttggatggctgaggcaggagaatcgcttgaacccgggaggcagaggttgcagtgagctgagatcacgccactgcactctagcctgggggacagagtgagactctgtctcaaaaaaaaaaaaaaaaaaaaaaaagtgatgggaatagattgttttgtctcaaaaagctctttccaacactaaaatgaaacatataattaaaaatatttttctggctataraaatatcgatgcttattatagacatctgcaaagtatgaaaatatatgaagaaaaaaattaaaatcccatcatcccccatgaaaactattgttatcatttttgtctgatttctttagtgtttctctttttctttttttaatttttaatttttttgagtatgtagtaggtatatctatt

SEQ ID NO: 678819 - DNA, 649 bp, Homo sapiens
gttcttagcatagttgtttctcaaactggaacaacctataaacagttgtgaacaaggtattagaagtgatgggggccgggtgcggtagcttctcccaaagctcattacctcccaaagcaaccccagtactttgggaggatcactttgagcccaggagttccagaccagcccggccaacatggcaaaaccccatctctctaaaactacaaaaaattagctgggcatggtggcacatgcctgtagtcccagctacttggatggctgaggcaggagaatcgcttgaacccgggaggcagaggttgcagtgagctgagatcacgccactgcactctagcctgggggacagagtgagactctgtctcaaaaaaaaaaaaaaaaaaaaaaaagtgatgggaatagattgttttgtctcaaaaagctctttccaacactaaaatgaaacatataattaaaaatatttttctggctatagaaatatcgatgcttattatagacatctgcaaagtatgaaaatatatgaagaaaaaaattaaaatsccatcatcccccatgaaaactattgttatcatttttgtctgatttctttagtgtttctctttttctttttttaatttttaatttttttgagtatgtagtaggtatatctatt

SEQ ID NO: 678820 - DNA, 1079 bp, Homo sapiens
tatagtatgatggaagagtgccacacatacctgagtcctcaaagaggtacctgctagcctgacatattgacagtaccctaccacatactgcgcattccttgcactctggacatactcatctgtcttcagtttrtatctgctacactccctcctactacaaggtgcaagctatttccttttctggaaagctctttctcactccttaagaatcaactacctctctttctccagaagttacctccatcatcactttttaaaggaagttttccaagtttccctcagttatattactatgttcctgcccattggatccattgtagcacttgctgcaatgaaaattttgcatttatttgtgtgattccataagaacaagggccatgtattgtcgttcactactgtcttctcagtgctttgcatgatccacaacaagtagttgttttttggtttaattgtgcaatgaatgaatggcctgaaatgcccaccaaccaagtcttccaaacatctttgtccatatgcacaaaccacgtgggaagagaagaagtatcctgaagtgcatctgggatggttcccttctatcagcaagttggtgcataggagtttagcagatgaacaatgtgagtttctagcaaggatgacacatgctatgtacctttctagagtagagtaattgtgataactgggacacagagaaatgcaacatgcccaagctcatttagctagtagatagcagagccaggattcaaatcttagtggtccaactccacttgattcaccttgctgaacctttgtagttttctcatctgtaaaatgggagcaatgttaccagcttgcagagtcattacaaaaattaaatgagatgatgtattgaaaccacttgcacatattaagtattcattgtatggtacctattagtattagtttctctgaagatgaagggaagtcagagaagatgcatgctaggacagagaggaatgcctgcctttccatagtctccgcccatctttgtcccatttctctctctctctttctttctccctctgtcttcctctcgcatcccaccacccagctatcatctccag

SEQ ID NO: 678821 - DNA, 1079 bp, Homo sapiens
tatagtatgatggaagagtgccacacatacctgagtcctcaaagaggtacctgctagcctgacatattgacagtaccctaccacatactgcgcattccttgcactctggacatactcatctgtcttcagtttatatctgctacactccctcctactacaagstgcaagctatttccttttctggaaagctctttctcactccttaagaatcaactacctctctttctccagaagttacctccatcatcactttttaaaggaagttttccaagtttccctcagttatattactatgttcctgcccattggatccattgtagcacttgctgcaatgaaaattttgcatttatttgtgtgattccataagaacaagggccatgtattgtcgttcactactgtcttctcagtgctttgcatgatccacaacaagtagttgttttttggtttaattgtgcaatgaatgaatggcctgaaatgcccaccaaccaagtcttccaaacatctttgtccatatgcacaaaccacgtgggaagagaagaagtatcctgaagtgcatctgggatggttcccttctatcagcaagttggtgcataggagtttagcagatgaacaatgtgagtttctagcaaggatgacacatgctatgtacctttctagagtagagtaattgtgataactgggacacagagaaatgcaacatgcccaagctcatttagctagtagatagcagagccaggattcaaatcttagtggtccaactccacttgattcaccttgctgaacctttgtagttttctcatctgtaaaatgggagcaatgttaccagcttgcagagtcattacaaaaattaaatgagatgatgtattgaaaccacttgcacatattaagtattcattgtatggtacctattagtattagtttctctgaagatgaagggaagtcagagaagatgcatgctaggacagagaggaatgcctgcctttccatagtctccgcccatctttgtcccatttctctctctctctttctttctccctctgtcttcctctcgcatcccaccacccagctatcatctccag

SEQ ID NO: 678822 - DNA, 1087 bp, Homo sapiens
agttgattggattgagggatgcaaagtattaatcctgggtgtgtctgtgagggtgttrccaaaggagattaacatttgagtcagtgagctgggaaaggcagacccacccttgatctgggtgggcactgtctaaccagctgccagtgcagctagaatataaagaggcagaaaacaggaaaagatgagatgggcctagcctcccaccctacatctttctcccatgctggaccctttccgtcctcgaacattggacttcaatttcttcagttttggaattcggactggctctccttgctcctcagcttgcagacgtcctattgtgggaccttgtgatcatgtgagttaatacttaatacaattcccctttagatgtatatctatcctattagttctgtctctctagagaaccctgagtaatacaatatcacagagcagtagaggactagcggcaacacttcatcaccaaaagcaaggtgagtgcatttaccataaaaagcaggagagacgcggggcatctctcctgtaatcctggctcacagattatgctggctcatgcctgtaatcccagcactttggaaggctgaggtgggaggattgcttgagcccaggagtttgcaaccagcctggacaatatagtgggaccctctctctacaaaaaaaaattttataattagctggccatggtggcacatgcttatggttccagctatttgggaggccatggcagggggatcgcttgagctcaagagcgtgaggctatagcgagtcatgtttatgctactgccctccagcctgtgtgacagagtaaggccctgtctcaaaaaaaaaaaaaaaaagcaagagggatgtcccagtaatcagaatgctcagcccacagaaatctaggcagtggctaagtgatcatggtgtctcaggaatgaaatatatcatcagtttattagggtgatttttttaatttaaaaaaagctccaggtctagtgcctataaaccacttaagtcaccacagtagagccatgacctctcatccagtttccaaacctaagtcactccacagatacagaaacccttgataaaagtagagcctggg

SEQ ID NO: 678823 - DNA, 1087 bp, Homo sapiens
agttgattggattgagggatgcaaagtattaatcctgggtgtgtctgtgagggtgttaccaaaggagattaacatttgagtcagtgagctgggaaaggcagacccacccttgatctgggtgggcactgtctaaccagctgccagtgcagctagaatataaagaggcagaaaacaggaaaagatgagatgggcctagcctcccaccctacatctttctcccatgctggaccctttccgtcctcgaacattggacttcaatttcttcagttttggaattcggactggctctccttgctcctcagcttgcagacgtcctrttgtgggaccttgtgatcatgtgagttaatacttaatacaattcccctttagatgtatatctatcctattagttctgtctctctagagaaccctgagtaatacaatatcacagagcagtagaggactagcggcaacacttcatcaccaaaagcaaggtgagtgcatttaccataaaaagcaggagagacgcggggcatctctcctgtaatcctggctcacagattatgctggctcatgcctgtaatcccagcactttggaaggctgaggtgggaggattgcttgagcccaggagtttgcaaccagcctggacaatatagtgggaccctctctctacaaaaaaaaattttataattagctggccatggtggcacatgcttatggttccagctatttgggaggccatggcagggggatcgcttgagctcaagagcgtgaggctatagcgagtcatgtttatgctactgccctccagcctgtgtgacagagtaaggccctgtctcaaaaaaaaaaaaaaaaagcaagagggatgtcccagtaatcagaatgctcagcccacagaaatctaggcagtggctaagtgatcatggtgtctcaggaatgaaatatatcatcagtttattagggtgatttttttaatttaaaaaaagctccaggtctagtgcctataaaccacttaagtcaccacagtagagccatgacctctcatccagtttccaaacctaagtcactccacagatacagaaacccttgataaaagtagagcctggg

SEQ ID NO: 678824 - DNA, 1087 bp, Homo sapiens
agttgattggattgagggatgcaaagtattaatcctgggtgtgtctgtgagggtgttaccaaaggagattaacatttgagtcagtgagctgggaaaggcagacccacccttgatctgggtgggcactgtctaaccagctgccagtgcagctagaatataaagaggcagaaaacaggaaaagatgagatgggcctagcctcccaccctacatctttctcccatgctggaccctttccgtcctcgaacattggacttcaatttcttcagttttggaattcggactggctctccttgctcctcagcttgcagacgtcctattgtgggaccttgtgatcatgtgagttaatacttaatacaattcccctttagatgtatatctatcctattagttctgtctctctagagaaccctgagtaatacaatatcacagagcagtagaggactagcggcaacacttcatcaccaaaagcaaggtgagtgcatttaccataaaaagcaggagagacgcggggcatctctcctgtaatcctggctcacagattatgctggctcatgcctgtaatcccagcactttggaaggctgaggtgggaggattgcttgagcccaggagtttgcaaccagcctggacaatatagtgggaccctctctctacaaaaaaaaawtttataattagctggccatggtggcacatgcttatggttccagctatttgggaggccatggcagggggatcgcttgagctcaagagcgtgaggctatagcgagtcatgtttatgctactgccctccagcctgtgtgacagagtaaggccctgtctcaaaaaaaaaaaaaaaaagcaagagggatgtcccagtaatcagaatgctcagcccacagaaatctaggcagtggctaagtgatcatggtgtctcaggaatgaaatatatcatcagtttattagggtgatttttttaatttaaaaaaagctccaggtctagtgcctataaaccacttaagtcaccacagtagagccatgacctctcatccagtttccaaacctaagtcactccacagatacagaaacccttgataaaagtagagcctggg

SEQ ID NO: 678825 - DNA, 1087 bp, Homo sapiens
agttgattggattgagggatgcaaagtattaatcctgggtgtgtctgtgagggtgttaccaaaggagattaacatttgagtcagtgagctgggaaaggcagacccacccttgatctgggtgggcactgtctaaccagctgccagtgcagctagaatataaagaggcagaaaacaggaaaagatgagatgggcctagcctcccaccctacatctttctcccatgctggaccctttccgtcctcgaacattggacttcaatttcttcagttttggaattcggactggctctccttgctcctcagcttgcagacgtcctattgtgggaccttgtgatcatgtgagttaatacttaatacaattcccctttagatgtatatctatcctattagttctgtctctctagagaaccctgagtaatacaatatcacagagcagtagaggactagcggcaacacttcatcaccaaaagcaaggtgagtgcatttaccataaaaagcaggagagacgcggggcatctctcctgtaatcctggctcacagattatgctggctcatgcctgtaatcccagcactttggaaggctgaggtgggaggattgcttgagcccaggagtttgcaaccagcctggacaatatagtgggaccctctctctacaaaaaaaaattttataattagctggccatggtggcacatgcttatggttccagctatttgggaggccatggcagggggatcgcttgagctcaagagcgtgaggctatagcgagtcatgtttatgctactgccctccagcctgtgtgacagagtaaggccctgtctcaaaaaaaaaaaaaaaaagcaagagggatgtcccagtaatcagaatgctcagcccacagaaatctaggcagtggctaagtgatcatggtgtctcaggaatgaaatatatcatcagtttattagrgtgatttttttaatttaaaaaaagctccaggtctagtgcctataaaccacttaagtcaccacagtagagccatgacctctcatccagtttccaaacctaagtcactccacagatacagaaacccttgataaaagtagagcctggg

SEQ ID NO: 678826 - DNA, 606 bp, Homo sapiens
tgtggcatgggggctttctagaaagtgaaaacccccaaagaagcaatgaggctggagaacttatataccattttgacaatgaacaataaatttatagagaagtgagaagacaaaggaaaaaggggkttaggcttttaagggtggcaaactgtgggaaggtaaatatatgggtaaacagatgaagatagaagttgttttgtaaattttgtatgtaaatgtctttaggtgctgtctctgggctgatgagagtctagagtcatcttcctctgcccttcctggtacaaaagagggaagagtgatgctttcacaaaggagaatttatagaacataagtttatatatttacatatatgttcatagaatatatttgctttttaggcaaataagtgtttactgttttctcagttgtcttcagttcaatataatccttatgtcaaagcagcatattttgggggagcattttctgatcccctacaatagtcttcaagttttatctcatttaatttcctgagtccagtaggatattagtatccacctttggcggactaaatgacttgcccaaagccaacagctagttaggtgtaggaccaggatttgaacccaggct

SEQ ID NO: 678827 - DNA, 606 bp, Homo sapiens
tgtggcatgggggctttctagaaagtgaaaacccccaaagaagcaatgaggctggagaacttatataccattttgacaatgaacaataaatttatagagaagtgagaagacaaaggaaaaaggggtttaggcttttaagggtggcaaactgtgggaaggtaaatatatgggtaaacagatgaagatagaagttgttttgtaaattttgtatgtaaatgtctttaggtgctgtctctgggctgatgagagtctagagtcatcttcctctgcccttcctggtacaaaagagggaagagtgatgctttcacaaaggagaatttatagaacataartttatatatttacatatatgttcatagaatatatttgctttttaggcaaataagtgtttactgttttctcagttgtcttcagttcaatataatccttatgtcaaagcagcatattttgggggagcattttctgatcccctacaatagtcttcaagttttatctcatttaatttcctgagtccagtaggatattagtatccacctttggcggactaaatgacttgcccaaagccaacagctagttaggtgtaggaccaggatttgaacccaggct

SEQ ID NO: 678828 - DNA, 606 bp, Homo sapiens
tgtggcatgggggctttctagaaagtgaaaacccccaaagaagcaatgaggctggagaacttatataccattttgacaatgaacaataaatttatagagaagtgagaagacaaaggaaaaaggggtttaggcttttaagggtggcaaactgtgggaaggtaaatatatgggtaaacagatgaagatagaagttgttttgtaaattttgtatgtaaatgtctttaggtgctgtctctgggctgatgagagtctagagtcatcttcctctgcccttcctggtacaaaagagggaagagtgatgctttcacaaaggagaatttatagaacataagtttatatatttacatatatgttcatagaatatatttgctttttaggcaaataagtgtttactgttttctcagttgtcttcagytcaatataatccttatgtcaaagcagcatattttgggggagcattttctgatcccctacaatagtcttcaagttttatctcatttaatttcctgagtccagtaggatattagtatccacctttggcggactaaatgacttgcccaaagccaacagctagttaggtgtaggaccaggatttgaacccaggct

SEQ ID NO: 678829 - DNA, 611 bp, Homo sapiens
gattatattctaaactgtgacaatgctatgaaggaaatgagtggggtgacagagaaaaacaaggtggggaggtggctgctaagaagggtcagaaaagacctctttaggaagggaacatgtgactaagttgggaagaatgagagtgagccacactccaggtaacagygtgccttgctggtgagaaggcctcatgcaggaaagaaccggctctttgagagactgaaaggaggccatgacggcagggcctagtgggccacaaaagagagaaaatatttaggcagcatgttttcttttagatgaagacatggaggcacagagaggttaaatggctcgttcaaggtcaccagcaggttagcaagaagaagaacccaagtgctctgagtctgggctagggcgcttcctgcagcccttgctacctatgggctggatttagggtaacagaaggtgacctgggaggctgctgggtgtggaagcagagctggaagccttgttctcacaacaggaatctagaagttggacttcagggcaggctttcctaggcgtggtaggggaagcctggggaagtgtcccaaaggaggaggagcctcaggggttccccaagaaacagaatg

SEQ ID NO: 678830 - DNA, 638 bp, Homo sapiens
ccaacacaaggtagagattcactttcctctackcttgcagtcatcagagaaagctggaagagggtgaggaagaagaggcttcgaagtactctgcccacaattgaccctgatgcagtcgctgacccggactcttccccttgagaggaggagcttttcccgctgaagaagaggcctatatcagcctaggtgaacctagtaggtgctgaaatcaattttctgcaggtcaaaccagttacacaatggagacttacacattagaataaatgaaatcacaaagtcagctatttatcaccagaagcaatgtatcaatgtgcttagcttaaatgatcaggctgaaagtagaaagaaaagcataatccttgagggggtctcaaaatgctgagggtatgagcacagagtaacactaatgagaaacatcagtgcagccagactcaggccagatgacgtgaacaggtgacgtggacatactgaattcaggcagcagactgtcacgtcatgcggagaaattcatgcaaggcaacaaatgccaaaaccgttgtaacacagaaaacgaaaaactgaagcgaacacagcaatttccataaaacaagtcctgggaggatgtaaatgccccgtggggaagtctctctggaagagca

SEQ ID NO: 678831 - DNA, 612 bp, Homo sapiens
gagtgtaggatagagctccatgggcagggtcatggtttttcttggaaataagtatgttgggaagaggattccacctcaagaaaggctgtcaaaattggcccaataacctagagtaaccaaactcatagagacaggaagtagaatggtggttctacaggtgctgagaggagggagaaatggggtgttgttatttaatgggtagagagttttagtcttataacataaaaagagttctggaattttttcatgcacaaatgtgaatgttcttgacaatattgaactgtacacttaaaatggcaaaggtgataaattctatgtgatatatattttaccacaattaaaaatttttgagaagaaaaaatcagccctgacatgacctagcatgcccacatagacaaaatggccaaggactaattggcctaagcaagtaggccaactgstgatgagaaagttaatataaagctaagtaactcagaaatagccatatgctcaaccaaagcctttccttctataatataatactgctttgataagatggcaaagcacattcacaattgttgggatgtgtataatctatccagaaactgcacttgcacccaagatgaatttatg

SEQ ID NO: 678832 - DNA, 705 bp, Homo sapiens
ttagagccatgccatgtgacctgtcctgactctaaaaaactccagtgtacacctttataaaaataaaagtaataaaaaaataacgaaggtagtattcccctgcttccttcctctgcatggattttgaacttcaggggtaatcagatcacaatttagaaccagagttttcaaccatacataggattcctaaatgccaagtgataaacggttcgttgatgatgagatagctctgaatgtttcatctctgcatgttttgcttttttatcttgtcttagaaaggtcaaagccagctattttcttcataaaggaaaatatttcggttacatattcatttcatatcacatgacactctgctttctttgcacttagtgaggatgtacatttatcatatttttacctaaaacaaacagatgtattaatggtatcatttcttatatatgaaattctgaggtttcttcagtgcttcagaagtaaagtttaaagatattaatgaatcgagaatgaccttctcatcgtaattaaggcaggtttttatttaaagtgtgttgaatacacwtttaagcactttttttctaaaacacctacctgcaatacggtcatgtatttagccttaaaatgcttggacatacattttttgtgttttagagagtttatatccctgaagtgtcttcattattgatcaatcatctctcaagggaaacagca

SEQ ID NO: 678833 - DNA, 647 bp, Homo sapiens
aaccatgtgtattagttgtctactgctgcattaaaaactacccccaaatttagcaaattagcacatttattatcacaaagtttctgtgagtcagggattgaatagtggcttagctgggtggttcaggatcagtgtctctcacaaggtgcagtcaagatatcagctgggactaaagccatcagaaggtttgactgggactggaaaatctgcttataccatggctcacttacgttcttggcagaaggccttagttccttgctagatgttgacaggaggcctcaggtcctggcttggagctcataggactatttgagtgttctcatggcatcagatacagctcctcttattagagaaaagctccaagccacagtgtcttttatgatcccatctctgaagtcatatataatggcttctgttatattctgttggtcaaacaccaatccaattaacatgtgacaggaaactacacacaaatgtgaatacctaaaatagggatcattagagccctctcacaatctggtgatcacacacagggcctgtaactcattttctccttcttaggagacatctgaggtgctgtggayataaaccagagccttctataaatatgctcagagtagtttacttgctgggaagtaactagaaaa

SEQ ID NO: 678834 - DNA, 1463 bp, Homo sapiens
cattgaatttattctccttctctgacagcaataatcttgacatgtattgctatagtcttgaataaagtctttcttgtctgtttgataggtccagtgcaatctttgacagaagtagcacagagtcactatatcacctcatggattttttttttttttttttttttacattcactatacagtaacactgttttggacttgtcataaatttaaaaaaaaaaacaattctattgtttcagttattaaggcatttggggttgatcaatagaacaattaactttaccttaatataatccctaaaacaaatactcactccttctttctttctttttttttttttttttttggcaaagtctcgcactgttacccaggctggagtgcagtggcaccaccttggctcactgcaacctctgtctcctgggttcaagcgattctcctgcctcagcctcctgagtagctgggattacaggcatgcaccaccacgcctggctaatttttgtatttttagtagagacggggtttcaccatgttattcaggctggtttcgaactcctgactttgtgatctgtccacctcggcctcccaaagtgctggaattacaggcatgagccaccacacccgggcccttctttcttattcatcattgtttccctataatcttgagaacacagaagaaggtgagaaaaaaaaaaaaatctaattgggaggagtcaggaaagttttccaaaaggtaacattgatataaaaacttactgagaagaaatttttcaagagctgatgtctttaaagagtgataagcacatacaaaccgaataccatagaagtaaccaggagatgtcacaaactagcttcaagctataattaggtcacataaaatcaaagagtttggattgatgctaaatcagtawatatgggctaaatagcaatatctgaatctctttgttactgttgatgaattttaaacttagccagggtgtaggtttttactggaccaagaatgatagaaaaaaaactaagattcagagcacacagaaatcagagaactgaggaaatccaggaagctggtggggaacttaattcaaaaagctgaagaaatagctagacagaagcatatatcaaagtcaagaatatggaactagcaatatactgatcacagatattagctagaagagtgtagatggttattgcagtagtacaggagaaaaaaataaggacctaaatgtgtggcattatggtggagggaaagaatcagataaaagaaatgcaatccacagaactctgtaattgatagactttgagagactttacagaggaaaatccactgggcctcaggttaatggcttctggcataggcaaatgatagataatgtagtcattcactgaaattgcatgaatggattttattgacagttttagttaaaaataacaagatcatttaggataaggcaaattttgaaatctttatg

SEQ ID NO: 678835 - DNA, 620 bp, Homo sapiens
tatttgtggggaaaaaaatgactaatgattcactggctaaatactgtctacattcaagaatacagacaagaagtcacatttagaaggaggcttttaatcacagagtgaccattttacaaacagggagcagagacatttttgctgtgctccagcactcaaaaactttttcttttttttttaagtacagtctaattcagatgaagaaaatatacttatgggctatgacctttttccccaaccaaaatgaaataattatattaaatgccatgaaaaaaatgaygtatatttatacctaagattatctattttactcagtagaagaatatgatgaggaaacaggcactggctttcaccttccgaaatggccatatccaggcatctttggaaagtgacaggccatggagccttatcatccctcctcctgatgtggattcaggtttatattggaaaattcaatcgctctcaggctgcttcttgctgctgtaaaaatcctttctggccgggcgcgatggctcgcgcctgtaatcccagcactttgggaggctgaggcgggtggatcacgaggtcaggagatcgagaccatcctggctaacacagtgaaaccccgtctctactaaaaa

SEQ ID NO: 678836 - DNA, 632 bp, Homo sapiens
tggaatgacaccctgccttaaaacaaacaaaaaaaggcaatgcaataggcttactattcaattaaatcaagttacctatttcctcagcaattttttgtctttgtgacttttctttcacagaaaaaactatccggcgtttctcatcgtcatcttcatcatcactggcatcattctcatcttctctaacaaggcggcctttaccaggctcattatcatgaggagtgaaatctcccaattctcgggccatttggcgctttttccttgcagcatgtataaaagctgcatctggaatttctcctagaaacaaatggtaagaatatggcagtatgagagatgcaaagtttctattttcttgaaaatatgaagggtaaaataatccaagatagcctcatcacagtgatgtttcagctgctggcacctccttcccatactatgtctgcaatccaaaagattgttaattgagtttaaatggaatataaaagtcactgaggaaactaaaaagaacatataatggtaatatayatgggaaagagtgggacggggtaaaaaggaaaaacccaccaaagcagttttattttagctataattttttttttcatttttaacaaatagaagtggccgggcacagtggc

SEQ ID NO: 678837 - DNA, 644 bp, Homo sapiens
tttgagacagagtcttgctctgttgcccaggctggaatgcagtggcacaatctaagttcacttcaacctccacctcccgggttcaagcgattctcctgcctcaacctcccgagtagctgggactatagttgtgtgccaccatgcctagctaacttttgtatttttagtagagacggggtttcactatgttggccaggctggtatcgaactcctgacctcaagtgatccggccaccttggcctcccaaagtgctgggattacaggtgtttctgttactttcatttttgscttattgcttcaattagccactctctccagattagctgagcccttgacagatgcattgctgacacccatgagagaaggcctgatgtccctggaaaggacacaagagaagtgaccagacctacagcccccgctctggcctttggcaggaggagggatactcccgaggttgtcactggagagaacacaggccagggataggcaggtgatcccactaagggggtgaggggttaaggaagcctggtgtcttctatgttcctggcaaagtataggtcatcaacaaagggagggaagagaggggcttgggaggaaatgagtaggatggagcagctccctaggggaatgagaaagtgagccca

SEQ ID NO: 678838 - DNA, 644 bp, Homo sapiens
tttgagacagagtcttgctctgttgcccaggctggaatgcagtggcacaatctaagttcacttcaacctccacctcccgggttcaagcgattctcctgcctcaacctcccgagtagctgggactatagttgtgtgccaccatgcctagctaacttttgtatttttagtagagacggggtttcactatgttggccaggctggtatcgaactcctgacctcaagtgatccggccaccttggcctcccaaagtgctgggattacaggtgtttctgttactttcatttttgccttattgcttcaattagccactctctccagattagctgagcccttgacagatgcattgctgacacccatgagagaaggcctgatgtccctggaaaggacacaagagaagtgaccagacctacagcccccgctctggcctttggcaggaggagggatactcccgaggttgtcactggagagaacacaggccagggayaggcaggtgatcccactaagggggtgaggggttaaggaagcctggtgtcttctatgttcctggcaaagtataggtcatcaacaaagggagggaagagaggggcttgggaggaaatgagtaggatggagcagctccctaggggaatgagaaagtgagccca

SEQ ID NO: 678839 - DNA, 644 bp, Homo sapiens
tttgagacagagtcttgctctgttgcccaggctggaatgcagtggcacaatctaagttcacttcaacctccacctcccgggttcaagcgattctcctgcctcaacctcccgagtagctgggactatagttgtgtgccaccatgcctagctaacttttgtatttttagtagagacggggtttcactatgttggccaggctggtatcgaactcctgacctcaagtgatccggccaccttggcctcccaaagtgctgggattacaggtgtttctgttactttcatttttgccttattgcttcaattagccactctctccagattagctgagcccttgacagatgcattgctgacacccatgagagaaggcctgatgtccctggaaaggacacaagagaagtgaccagacctacagcccccgctctggcctttggcaggaggagggatactcccgaggttgtcactggagagaacacaggccagggataggcagktgatcccactaagggggtgaggggttaaggaagcctggtgtcttctatgttcctggcaaagtataggtcatcaacaaagggagggaagagaggggcttgggaggaaatgagtaggatggagcagctccctaggggaatgagaaagtgagccca

SEQ ID NO: 678840 - DNA, 343 bp, Homo sapiens
tgttaccttttcacaaccagaaaattgtagtcttgtccataaatggatttggatagattattcaagaagcgcagcaactcccttccaccctcacttgccctgaatcccagccccggaaagcaattttaatctctctacctcctccttagctgaaggcaggctttgcctaagctaattgaacactacactgaatttaacaagaaaaggacaagaaccagccccaggaaatgtagccctataagggccacaggcckgcagattttgagaggaggggaatgctggcgtggtggcagcctagggctgccaggctctgggtgtgtgttgggagggggggttgggggtg

SEQ ID NO: 678841 - DNA, 628 bp, Homo sapiens
caccatatacaggggcgcatgcctataatcccaactactggaggctgaggtgcaaagattgcttggggccatgagttcaagaccagccaaaatagtgagatcccatctctacaaaaaaacgttagggcttggtggtgcatgtctatagtcccagctactcaggaggctgaggcaggaagattgcttgagcctaggagtttaaggctgcagtgtgctatgactgtcctactgcaccccagcctgggcgacagagcaagatcttgtctcttaaaatcacagtatattcaatgttctttaacaatgtgaatggaggccaagtgcagtggctcatgcctgtaatcccagcactttggrtggccgagatgggcagacagcttgcgtccaggagtaacatgggtgaaaccctgggtaacatggtgaaaccctgcctcacaaaaaaaaaactaaaaaattagctgggcactcaaaaattagtggcgcatgcgcgcagttccagctactcaggaggctgaggcagaaggatcacttaagcccaggaggcagaggttgcagtgagctgagactgtgccactgcactccagcttgggtgacagaaagggacacccaggctcaaaaaaaaaaaaaaaaa

SEQ ID NO: 678842 - DNA, 628 bp, Homo sapiens
caccatatacaggggcgcatgcctataatcccaactactggaggctgaggtgcaaagattgcttggggccatgagttcaagaccagccaaaatagtgagatcccatctctacaaaaaaacgttagggcttggtggtgcatgtctatagtcccagctactcaggaggctgaggcaggaagattgcttgagcctaggagtttaaggctgcagtgtgctatgactgtcctactgcaccccagcctgggcgacagagcaagatcttgtctcttaaaatcacagtatattcaatgttctttaacaatgtgaatggaggccaagtgcagtggctcatgcctgtaatcccagcactttggatggccgagatgggcagasagcttgcgtccaggagtaacatgggtgaaaccctgggtaacatggtgaaaccctgcctcacaaaaaaaaaactaaaaaattagctgggcactcaaaaattagtggcgcatgcgcgcagttccagctactcaggaggctgaggcagaaggatcacttaagcccaggaggcagaggttgcagtgagctgagactgtgccactgcactccagcttgggtgacagaaagggacacccaggctcaaaaaaaaaaaaaaaaa

SEQ ID NO: 678843 - DNA, 1463 bp, Homo sapiens
tgtggtggcatgcacctgtattcccagctactagggaggctgaggtgggaggatcacctgagtctgggaggttgaggctgcagtgagctgagatcgtgccactgcactccagcctgagtgacagagtaagactctgtctcaaaaagagaaaagcagtccaaatgtacccaagaatgcaaatgtatccaaggatcaaggtatagccacaggccacgaaccattttcttggtaggtatcacactggccgcctccacagttgaaactactgactatacaattagacatgcttaggtcctagtatcctttagacratgctcctcacacttcaatgtgcaaacgattcacttagggagctggttaagatacagactctgattcagcaggttgctgtgaggcctgagattcttcactgccaacaggctcccaggtgatgctgatgccgcccacagtccatggaccacatttccagtcatagtttcaagacacctcaaatgaaaaagttctaatactcactgatcagattggtagtgaggggagagaacctctcttttgctgtgatgtcatttaggcttttcactttaatggaacgcttcacatagggattcaaaacagaagcagccactttgggttccttcaggatttgctgaaagcatcaaaaaataatttcttaaattttttagagcacaaatgaaggatgtgccatgcacacactttctttctttcttttttggagacaacgtcttgctccgtcgctcaggctggagtgcagtggcgcaatcttggctcacacaacctccacatcccgggttcaagcgattatcctgcctcagcctcccgaatagctgcaccaccatgtcccgctaatttttgtatttttagtagaaacggggtttcgccatgttgaccaggctggtcttaaactcctgacctcgagtgatccacccacctcggcctcccaaagtgctgcgattacaggcatgagccactgtgcccggccatacaaacactttcttatgaattaaatattttatgaattaaattagcactgccgaagaacatatgaaaaaaagattataatcaaacaattttctgactgcctttcagaatacactgtgcactgcaccaggattttatatagaatgatgttcctcaaaaaaatttaaaaatactgtacgaactttcttaaatttgtttttgcttttcaagaaagattataaaacactaaacagccaaaccttcattagactgcatactttaatatatttaagagaggagtcgtctggttttctagcagtgctatttctagagtgcagacctcacaactgtgctctgaccacagaggcctccgcaccgctcccttggaggggccctgcctcttacagagtccagggaacccagcagattctgtgaggcctctggtgctgccagagcggccccaaagagtctgggagacagagtggaca

SEQ ID NO: 678844 - DNA, 1016 bp, Homo sapiens
tgggagtgggttcattgtcatgagagtggatttgttataaaagtgaatttggccccttgttgctctttctcacccaggtgatgccttytgctatgatattgcaagaagatcctcaccagatgcagccctttgatcttgggtttcccagccttcagaaccacaagccatacacattcctatccccattcatataatggcattcattataaactactcagtctgtggtattcattacaacagcacaaaatggactaagacgggtgtgtaggatagattggagtgaagagcagagctggggataacttggaacatgaggttccacattaggagggacttagtctatgttagttacagtagaagcaaaaggaaagatggaactacaagtagaatttcaaaaacttgggaactgctttaagactgggagggaaaagtagtcaaaagtaacattaccaatttaaaacctagatgacagttagaatggtgtcaacattgacagaaataggttgtatagtgatttccaatttctaaaatgtgtttccaaactttcaagaaagatgggaacttaaacatatgccagtaacttcttgcctctagagtcccacaaaaattacctgttggtaatgatggggtttattttgcattggaaactagtgaagggtgcaaggcaagttccagaaacttggggaacattttaataaaatgtatgtcaaaatttaccttatctggccaacaacctatgcattttcctgcacatgaaagagaagtttgctagataagtgaaccaaagagacccaatcaaatcttttcaatcccccaacccatccaaggctctgagcagtggagctttttgtttggacatactgtgggatggcctgagaagacatctgtgtccaattggtttgtccatggtaccagtctggttctagagactgcaccaagcaattggctgatgacaattcataatccggcatagacaacagaatatggagaatggtccctaacaatttctgactgtc

SEQ ID NO: 678845 - DNA, 1016 bp, Homo sapiens
tgggagtgggttcattgtcatgagagtggatttgttataaaagtgaatttggccccttgttgctctttctcacccaggtgatgccttttgctatgatattgcaagaagatcctcaccagatgcagccctttgatcttgggtttcccagccttcagaaccacaagccatacacattcctatccccattcatataatggcattcattataaactactcagtctgtggtattcattacaacagcacaaaatggactaagacgggtgtgtaggatagattggagtgaagagcagagctggggataacttggaacatgaggttccacattaggagggacttagtctatgttagttacagtagaagcaaaaggaaagatggaactrcaagtagaatttcaaaaacttgggaactgctttaagactgggagggaaaagtagtcaaaagtaacattaccaatttaaaacctagatgacagttagaatggtgtcaacattgacagaaataggttgtatagtgatttccaatttctaaaatgtgtttccaaactttcaagaaagatgggaacttaaacatatgccagtaacttcttgcctctagagtcccacaaaaattacctgttggtaatgatggggtttattttgcattggaaactagtgaagggtgcaaggcaagttccagaaacttggggaacattttaataaaatgtatgtcaaaatttaccttatctggccaacaacctatgcattttcctgcacatgaaagagaagtttgctagataagtgaaccaaagagacccaatcaaatcttttcaatcccccaacccatccaaggctctgagcagtggagctttttgtttggacatactgtgggatggcctgagaagacatctgtgtccaattggtttgtccatggtaccagtctggttctagagactgcaccaagcaattggctgatgacaattcataatccggcatagacaacagaatatggagaatggtccctaacaatttctgactgtc

SEQ ID NO: 678846 - DNA, 1016 bp, Homo sapiens
tgggagtgggttcattgtcatgagagtggatttgttataaaagtgaatttggccccttgttgctctttctcacccaggtgatgccttttgctatgatattgcaagaagatcctcaccagatgcagccctttgatcttgggtttcccagccttcagaaccacaagccatacacattcctatccccattcatataatggcattcattataaactactcagtctgtggtattcattacaacagcacaaaatggactaagacgggtgtgtaggatagattggagtgaagagcagagctggggataacttggaacatgaggttccacattaggagggacttagtctatgttagttacagtagaagcaaaaggaaagatggaactacaagtagaatttcaaaaacttgggaactgctttaagactgggagggaaaagtagtcaaaagtaacattaccaatttaaaacctagatgacagttagaatggtgtcaacattgacagaaataggttgtatagtgatttccaatttctaaaatgtgtttccaaactttcaagaaagatgggaacttaaacatatgccagtaacttcttgcctctagagtcccacaaaaattacctgttggtaatgatggggtttattttgcattggaaactagtgaagggtgcaaggcaagttccagaaacttggggaacattttaataaaatgtatgtcaaaatytaccttatctggccaacaacctatgcattttcctgcacatgaaagagaagtttgctagataagtgaaccaaagagacccaatcaaatcttttcaatcccccaacccatccaaggctctgagcagtggagctttttgtttggacatactgtgggatggcctgagaagacatctgtgtccaattggtttgtccatggtaccagtctggttctagagactgcaccaagcaattggctgatgacaattcataatccggcatagacaacagaatatggagaatggtccctaacaatttctgactgtc

SEQ ID NO: 678847 - DNA, 1009 bp, Homo sapiens
  misc_feature 862: n = A,T,C or G
atggtgaaacccgatctctacaaaaaaactgcacaaattatccaggcatggtggtgcacccctgtggtcccagctacctgggaggctgaggtgggagaatggcttgagccctggaggttgaggttgcagtgagccttgatcatgccattgcactccagtttgggcgacagaaccagatcttgtctcaaaaaattaagataaaataaaataaaaataaaaaaataggagagacaagaaaggaggtgagagagaggcaagcaggatccagaacctggggtcatttaaaggagtctgcaccttgacccaaggacaagtggggaagaaataggcactaagaagtggaaatgaaatattttaaaagttttagacaaaatgttttattatgatatttgcattttagaaagatttctctggaactcctggataaaatggagttgtgattatggatgtctaatttctgcctcgcagaatacaatgaaaatgaacttcctattttaaaaaataggaaaaagcatatagttgtgccaaggactaggaggagtgttatttacaatccagcatgtaatttcaacaatgtttgggtaaataatgacatcagatctaataaaacatatatcatatctcttaatatatacagaagcatgtactttctaaatagaaatatatcttcttttgaaacatccatgctatgtttatgaaaattaatcttactctgggtaaaaagagaaatctccaataaattcaaagactagaaattttacaggccccactgatcatgatgcaaaaataaaattttaaaaatacaaataaaagtatatacmtaagcaatccaaacagttgggccattaggaggaaaaagagnaaccacttttgtgcagaattaaaaggcaaatactatatatgattatggactatttagcaagtaaaccataagtatgaatgcatgtgaaaaatcaataaagtaattattttccaaaactattttatgggggaatatttaaggagacaa

SEQ ID NO: 678848 - DNA, 1009 bp, Homo sapiens
  misc_feature 862: n = A,T,C or G
atggtgaaacccgatctctacaaaaaaactgcacaaattatccaggcatggtggtgcacccctgtggtcccagctacctgggaggctgaggtgggagaatggcttgagccctggaggttgaggttgcagtgagccttgatcatgccattgcactccagtttgggcgacagaaccagatcttgtctcaaaaaattaagataaaataaaataaaaataaaaaaataggagagacaagaaaggaggtgagagagaggcaagcaggatccagaacctggggtcatttaaaggagtctgcaccttgacccaaggacaagtggggaagaaataggcactaagaagtggaaatgaaatattttaaaagttttagacaaaatgttttattatgatatttgcattttagaaagatttctctggaactcctggataaaatggagttgtgattatggatgtctaatttctgcctcgcagaatacaatgaaaatgaacttcctattttaaaaaataggaaaaagcatatagttgtgccaaggactaggaggagtgttatttacaatccagcatgtaatttcaacaatgtttgggtaaataatgacatcagatctaataaaacatatatcatatctcttaatatatacagaagcatgtactttctaaatagaaatatatcttcttttgaaacatccatgctatgtttatgaaaattaatcttactctgggtaaaaagagaaatctccaataaattcaaagactagaaattttacaggccccactgatcatgatgcaaaaataaaattttaaaaatacaaataaaagtatatacctaagcaatccaaacagttgggccattagraggaaaaagagnaaccacttttgtgcagaattaaaaggcaaatactatatatgattatggactatttagcaagtaaaccataagtatgaatgcatgtgaaaaatcaataaagtaattattttccaaaactattttatgggggaatatttaaggagacaa

SEQ ID NO: 678849 - DNA, 1009 bp, Homo sapiens
  misc_feature 862: n = A,T,C or G
atggtgaaacccgatctctacaaaaaaactgcacaaattatccaggcatggtggtgcacccctgtggtcccagctacctgggaggctgaggtgggagaatggcttgagccctggaggttgaggttgcagtgagccttgatcatgccattgcactccagtttgggcgacagaaccagatcttgtctcaaaaaattaagataaaataaaataaaaataaaaaaataggagagacaagaaaggaggtgagagagaggcaagcaggatccagaacctggggtcatttaaaggagtctgcaccttgacccaaggacaagtggggaagaaataggcactaagaagtggaaatgaaatattttaaaagttttagacaaaatgttttattatgatatttgcattttagaaagatttctctggaactcctggataaaatggagttgtgattatggatgtctaatttctgcctcgcagaatacaatgaaaatgaacttcctattttaaaaaataggaaaaagcatatagttgtgccaaggactaggaggagtgttatttacaatccagcatgtaatttcaacaatgtttgggtaaataatgacatcagatctaataaaacatatatcatatctcttaatatatacagaagcatgtactttctaaatagaaatatatcttcttttgaaacatccatgctatgtttatgaaaattaatcttactctgggtaaaaagagaaatctccaataaattcaaagactagaaattttacaggccccactgatcatgatgcaaaaataaaattttaaaaatacaaataaaagtatatacctaagcaatccaaacagttgggccattaggagraaaaagagnaaccacttttgtgcagaattaaaaggcaaatactatatatgattatggactatttagcaagtaaaccataagtatgaatgcatgtgaaaaatcaataaagtaattattttccaaaactattttatgggggaatatttaaggagacaa

SEQ ID NO: 678850 - DNA, 649 bp, Homo sapiens
tggatgcctcacgcttcttcaccttctcctcagtaagtcactggatttagaatctgcagacataaatcataatcttgcccttcatgtgtatctgaggtgtcaggtaaatcttactatatttaagtttcagcttcttcatcagtagaatgggtatacttgttcctattcaatttagtcagataaaataatatattgaaaaascactttttgaaattacaaagcactgtatacattgaaagtcatgttatgaagatgattgaatacccattgtccttctcctctgatggcctaaacaataaggacaagctacaatacacagacctcttacccattcctgaccccaggagcgaatgcaactggactgtggtcttccttgtctgagtgtgactgacagtggagatgcgatgggagtagacagacacatctcagatttgttttattttgtgcatttcaccaactaatgtgatatattagtcaggatgggataactactgtaataaaattaataaatcagagttggcataatacaagcaaagactgtttcttacattacaatccaaagcatggtgggggaaaggtagagacctgggacccacatagtcattgagggacaagacttctttgtagcactgaacaggaatgtttcttg

SEQ ID NO: 678851 - DNA, 596 bp, Homo sapiens
tgcttcaattagccactctctccagattagctgagcccttgacagatgcattgctgacacccatgagagaaggcctgatgtccctggaaaggacacaagagaagtgaccagacctacagcccccgctctggcctttggcaggaggagggatactcccgaggttgtcactggagagaacacaggccagggayaggcaggtgatcccactaagggggtgaggggttaaggaagcctggtgtcttctatgttcctggcaaagtataggtcatcaacaaagggagggaagagaggggcttgggaggaaatgagtaggatggagcagctccctaggggaatgagaaagtgagcccacctgaccaggcagagggctgatggggcagtgccagagcccgctagaaaaccagtgacagaaaagctgcaaggtgcccagcttggtgaccagccagtagcagggtctgcaagatggctggctcctccttcccagcacaatgagcatttctgccacggcggggacagcacagcacagcgctgttggccaggaagggggctgaagaagagccctcccagggggaatgttggcattgttgctctgtttc

SEQ ID NO: 678852 - DNA, 596 bp, Homo sapiens
tgcttcaattagccactctctccagattagctgagcccttgacagatgcattgctgacacccatgagagaaggcctgatgtccctggaaaggacacaagagaagtgaccagacctacagcccccgctctggcctttggcaggaggagggatactcccgaggttgtcactggagagaacacaggccagggataggcagktgatcccactaagggggtgaggggttaaggaagcctggtgtcttctatgttcctggcaaagtataggtcatcaacaaagggagggaagagaggggcttgggaggaaatgagtaggatggagcagctccctaggggaatgagaaagtgagcccacctgaccaggcagagggctgatggggcagtgccagagcccgctagaaaaccagtgacagaaaagctgcaaggtgcccagcttggtgaccagccagtagcagggtctgcaagatggctggctcctccttcccagcacaatgagcatttctgccacggcggggacagcacagcacagcgctgttggccaggaagggggctgaagaagagccctcccagggggaatgttggcattgttgctctgtttc

SEQ ID NO: 678853 - DNA, 644 bp, Homo sapiens
tcattaagctttcagagcagtgtagatactgttatgcttagttaacagacaaggaaactgagcaacggagagatcaagtaacttgcctgaggctgtataggccagtccgtggaggagtgggaagtcaaatcctgagtctggactaatagccttggggcttaaccagactagactgttttcccaaaggccaaacaatttaaattcctgattrtccacttgtatgttaagggcctaattatcagtatctttcagttaactgtgagcccaaaaatatctgagaccggtctgaaatcaacttagaaagtttattttgccaaggttaaggatgcattcatgacacagcctcaagaggtcctggccacatgtgcccaaggtggtcaaggtccagcttgcttttatacattttagggagacatatcaatcagtacatctaagatgtacatttgattggttcgatctggaaaggcaggacaactcaaagcaaggcttccaggtcataggtagatttaaagattttctgattggtaattggttgaaatcaatggaaaggaatgtctgggatgtcctaaggggttgtggagaccaaaattttatcatgcagatcaagcttgtccaacccacagcccactggccgcgtgcagccc

SEQ ID NO: 678854 - DNA, 608 bp, Homo sapiens
aactaaagtaggccaggcgtagtggctcacgcctataatcccagcactttgggaggccaaggtgggtggatcatttgcgatcaggagtttgagaccagcgtggccaacatagtgaaaccctgtctctactaaaaatacaaaattagccaggcaaggtggtgggcacctgtagtcccagctacttggaggattgaggcaggagaatcgcttgaacctgggaagcagaggttgcagtgagctgagatcacaccactatactccagcctaggcaagagtaagactccatctcaaaaaaaaaataaaaataaaaawaaaataaaaacaaaaactaaagttaaaaggtctggtatactgaactggtaaactaattacaattttgctttccaacctcctcaagtatttaaaagacccaactcagcccatcttagaggccttggacaaggacagctcaccaaaggatgacgtctgggactctgtgtccattatctcgtttccggaaaaggagcaagaagatgttctccaaacgctttgaaccaaagcatgggcctagcccactggctccctggaagagatcaagccatcggagctgctagagttctgtctggact

SEQ ID NO: 678855 - DNA, 621 bp, Homo sapiens
atctcagttcactgcagccttcacctcctgggttcaagtgattcacctgcctcagcctccggagtagctgggattacaggcgtgagccaccatgcctggctgatttttgtatttttagtagagacagggtttcgccatgttgcccaggctggtctcgaactcctgacctcaggtgatccgcctgcctcggcctaccaaagtgctaggattacaagcgtgagccactgcgcccggccccgtaactcctttttgttcagacagacactaacaaaattttaattttcagaatgaacaaagataggcaaacttttcttcaacgtaccaaaaaaatgatattctagagtatttattcagaattatttaatagacatttaccatgtatcaggtgtagttggatgacccatgagtcagaggcaattcccatagactgtcagatgctctgatatgtactctatctagcagtcgtcagagccagtcgttggagggagcaaaagcttttgtggtaaaaaggaaatgaatgattaggaagkggggagtcgcagacttttaaaacgagttaagtaataatttctcttttggtggagtaaaatcaactcttgtttgtttttgttcaggggtgtt

SEQ ID NO: 678856 - DNA, 633 bp, Homo sapiens
gggaaaaagatatacctctgcatttcctcattactacctaaaaagaaaaggtataaggaaagctttccccaatcaacctacacaagaatctgctcagtgtaggcgcttatactagttagttaacgttccactatcatccactgtcatgtggcatcaaataagcaggtgcttttattaaaggacatatatactttactcattttgaacaaatttgatggcttgtatttttttgcatggcattgggttagtgctaatatctattaacggatgtcctggatttcttaggaaatcctacctttgcatatttcattttaaaaataaatgctattcacggggcgggagcgatggctyacgcctgtaatgccagcactttgggaggccgaggtgggtggatcacaaggtcaggagatagagaccatcctggctaacacggtgaaacactgtctctactaaaaacacaaaaaactagccaggcgtggtggcgggtgcctgtaatcccagctactcgggaggctgaggcaggagaatggtgtgaacccaggaagtggagcttgcagtgagctcagattgcgccactgcactccagcctgggtgacagagtgagactccatctcaaaaaaaataaaataaata

SEQ ID NO: 678857 - DNA, 631 bp, Homo sapiens
taaaaagtactatgtcagatagagaaggtttgactctgtatgggaggacagaaggggccagcgaaagctttacttttcttgacagttaagtcaggtgttaaataacatagaagttcatcattcggcaggggagtgttggagagaggggattccaggcagagggcttggagaatgcagagagccagagtgtctgggaactccaccatgggtgccttgaacatagggtttgtaaggggcagtagtcaaaggaaggctggaaagatgggagcctgttccgaaaggccatttgaaggaacctggaattcatcttgaaggtaacaggaggcctctgaaggaagctaaatatcagatagtattttaaggctctaacccatgtaagagtaaggaggatgaactgcaaacttgtccacatctatattcatccttgtcaatttccctcctgaatcaaaggaagagggttgctatggtttgaatatttgttcccttcaagactcatgttgaaacataatccctaatgtagcagtattragaggtagggcctttaagaagtgatcgattcatgaggactctgccttcatgaatggattaacccattcatagattaacaatttaaggaattaatgagttatca

SEQ ID NO: 678858 - DNA, 601 bp, Homo sapiens
catcccccaacttcttagagggacaagtggcgtgcagccacccgagattgagcaataacaggtctcttctttttatgtggctcttccacctacacgtgcctacctgccaactaaacttgcacatgtactgtagtcttccttatccccaaaatscagcttgcagatggaacgaacaactgccagtccccctcatgacaccaacacgacaaaaaagagtcatcccactaatccctttacttgtggatttaggactttctgcctccactattgcacttggaactggaatagcaggcatctcaacctctgtcacaacagtctgcagcttctctaatgactcctctgctagcattacagatatatcacaaacttaccccaaaatcttacttcagtctaatctctcccacttcaggttcctgtgccacccctaatcctgctcaaagcagccctgagaaacgtcgcccatcacccctccatactgcccccaaaatttttaccccaagttttcattactctttctcgttttatttcttcattattaacataaaaaggaacgtaaggtcctctgagctggccacaccatggtaaagccaaggcattcccc

SEQ ID NO: 678859 - DNA, 630 bp, Homo sapiens
ctgtagtacataaataaatctccatgttactggtgaggaaatggaggtgggagcagctgatgcagctttccccaagccacaccagtacgaagtggcagaacaggttgtgtcaggcttcagagcccatgcatttgttctcccttaagagaaggtcagctccacggcctagttcaactaactgttaggaatgtttctcaccactttacagcagtgtaggcrtatcagttaatcactgtcataataatgctgagtgactcccagccacaaaaccccagtgacacatgactgtaatcgctaagcgtagaagtctggatcagctggtcctgcttgggctcggctgggtcagttcaccttagggctagcaagagctctgcagcatctttgctgttcttgcctacatatctgggttcagctggctgtagattgatctagaatggcctcagctgggatgactgggacaactagctctgctccacatgtcttgcatcttccaccctgaaaatcctattctgaaggcagtaggaaggtgcaaaggcaagcaaagatggccacacggcacctttcaagcttctactgacttcaggtctgctcagaccccaccggcaaaagcagtcacatagccagccagag

SEQ ID NO: 678860 - DNA, 630 bp, Homo sapiens
ctgtagtacataaataaatctccatgttactggtgaggaaatggaggtgggagcagctgatgcagctttccccaagccacaccagtacgaagtggcagaacaggttgtgtcaggcttcagagcccatgcatttgttctcccttaagagaaggtcagctccacggcctagttcaactaactgttaggaatgtttctcaccactttacagcagtgtaggcatatcagttaatcactgtcataataatgctgagtgactcccagccacaaaaccccagtgacacatgamtgtaatcgctaagcgtagaagtctggatcagctggtcctgcttgggctcggctgggtcagttcaccttagggctagcaagagctctgcagcatctttgctgttcttgcctacatatctgggttcagctggctgtagattgatctagaatggcctcagctgggatgactgggacaactagctctgctccacatgtcttgcatcttccaccctgaaaatcctattctgaaggcagtaggaaggtgcaaaggcaagcaaagatggccacacggcacctttcaagcttctactgacttcaggtctgctcagaccccaccggcaaaagcagtcacatagccagccagag

SEQ ID NO: 678861 - DNA, 606 bp, Homo sapiens
taatttatatatatttatatatcacatataaaaattatatatctttgatatgtaatttatatatatttatatatcatatataaaaattatatatatatttcatatatatttatataaaaatcctgttgtataccttaaatatatatcttttaaaaacagagacatctaggaaccttagtgcatacataagtctgtttttcacctttcaacagcagagtgactatcacattaaatatatgatgcctaaaaagcatctctaaaataaaataaatgttgrttatctttctcaactcctagcagtattttgttaatgtatctatagatacttacagtaaaaagaagaaattgtacaaatagacatgaaaagaaaagcaatagcccatagattaataagaaaaaaaacagaaggattaaaaagcaagatagaaagaacattaaagtgctcagttttaaatgagatatgtcatgaatttcccaactttaaaaaattgggctgtgcaaagaaaaatttgtgtgtgtacgtggtgtgtgtgtgtacagagaggcagaaggagagacatataatacaataatatgtttataaatttatagatatgtgtgtatata

SEQ ID NO: 678862 - DNA, 638 bp, Homo sapiens
ggcagattgcttgaggtcaggagttcaagaccagcttggccaacacaatgaaaccccatctctattaaaaatgcaaaaattagccaggcgtggtggtgtacgactataatcccagctacttgggaggttgaggcaggagtatagcttgaacctgggaggcgaaggttgtagtgagctgagatcgtgccactgcactccagcctgggtggcagagtgagactctgtcaaaaaaaaaaaaaatcccaaacataagtcaaataaacaaaaggaaatttatctttttttccttttaactgaaagamcactggttacaataggcctatgataggactcaccgtcagatctcagcctcaaataactagcacagtctccctgagcactcccttttacctgctcctgctgcccagtcagctaaatccaaccttgacccttccaatggagcagggccaagaaggggacacagaagctggtgttctgccattgtgctgctacttggatctctagggcctaacccagcaaaccccggcaggttttttagaacagactccagccattcagtataattcttctccccaccactagtaagcaatgagatagggttgctatgggctggactccttcagccaaataagtctgca

SEQ ID NO: 678863 - DNA, 575 bp, Homo sapiens
cattggctctgcaaactttggacttgccagcttccacaatcgtgtgagcaattccttataataaacctctttttaaaaatcttctattggttccatttctctggagaaccctgaaatatagttcccttattcttgttactatctctataaatagtctcttcattgaattattttttgaagtgttttggtccttcacctgtgtctgccagaacactacatgacacataaggtttttctttcgtcttcacaatgttcaaaggtaggcaatcaggttcaatgcagaagtccacagtgttgctccttctgtctccctattttgccatccttggcaagtgactttcattaacatacttccaggatactccatgttctagaggaataaaatgtgaagggactgagagctttctcttacaaggtgttactcagaaatgtaattttatgccagcaccttgggtggctgaggtgggaggatcacttgagctcagaagtgcaagaccagcctgggcaacacagtgagacccttctctactaaaaaaaamaaaaatcagctgggtgcggtggcatgcacctgcagt

SEQ ID NO: 678864 - DNA, 1121 bp, Homo sapiens
tgtgtcatcgcttggaattcctaatcttattttattcattcaggttgaggaataatgtaagatattgctccactgtggctttatgaaattttttacttaaaaaaatccaaagcatgtaagtatttatctcatggcttaaatgttcatcactgtaaggagaagtttaagattggaatgtatctctagccttgctctctctccccctgagatctggctttatactttacagcagtaggtttgcaaatcaaaatgccagcttgacctagctgccagaaagtcctgaatatgaatcccacaacagaatttattaattttcctttacaagttggtaatttcttattttctcttaagtaatgctaatttcgggtacacccttgccatgagggaggttctaggtctccagtgttattgtcatacactggcatgtatactgtcatctctactggtattatataatgttgttgctggtacaggctttccccagaatttatagagatggagacaacacgaactaggcatcatcagtcacagcaactcagtttatagttattgaaggaattgttgaaggaactcctgagtcagtctgtaagtgaaatcacagacatgtaaaataaacacttacattttagattatatgatgatgctaaattttctttaagacattggagaattaatgtgggggcaaagaacagggcatgacaggagaaagggccaactgggtccctctccatttacaatgagtattatctattttatatttaatttttatcttttctatgaggcatagttttattaatttcagttatacaccataggcaaaaaaatgttcccagttagagatcctgccaagcatctctaatcaatgttgaagccctggtggaattaagttggttgctttgctttttaatttttttaaaaaaataaatagggtatatggrcttgttgtaaaataattcaaacagcaaaattgcaaagtagatgtcatctgatgtcatagctgttcttcccctagccatgcagtttcactgcttttgaaactccagcccccttttcctaggctagctctgttgggagcctttcagaaatcttttctctgtatacacacacgcatgtgtatgtta

SEQ ID NO: 678865 - DNA, 1719 bp, Homo sapiens
atctcccaagagggtaaaattccatttctaaagtatctggccttgctttctttaaataatggataataaggatgtggggggtggacctctgcgaaggaagaatttaaatatccagagggagagaatgcctctttagatttgtggtctccgtgataagtagagctgctcttttaattttatttcaaagwtaaatgatagtagtgagtggaataaaggcaccaatctaagaactgttttccaattctctgctttcagctctaaaacaaagagaatttatcatttgccttcatatactgtgctgtgtaggtacccagagacagcaaaattccaattaaaagagtattgattgctcataaattaatgccatccattcagaatcgatggtcacttaatgtctttcaatgatttttattgtgagtcagctcagcccttgtactttgcttattaaatgttccagtataatcgtacgcctatttaacatgggtgattcttttgctattaacatatggttttcgattttcatccagttagcactattagtcattccacatgaaagtcagtgcaatctaacaaactcgaacaacttccctcacctactctcagagataatttatgtatccctcattcctctgagcccaaagcaggtaaacatttccaattaaactgaagagagtaatagaagctctccagaatagtaaaaaaaaaaaaaaaaaaaaatccacaaaaaaaccccaaacaaacaaacaaccttccaccctaccccccgcaaaaaaaaaaacaaaaaaacccaagaacaaaaaacaaacaaaccctcctaggaaactaaagcataaaaatgtcatgggaagttataactggatccgtaggggatataatttcattgcctgtaagcaaaatcgtgatctaatggttttcggagacatggggtactggacatctgtgaggggcctgtggaatcccccagagcattgtgctaattaagtaggaaagggaagcacgttgggaagccaccagatgtcaggctgaagtctggcagtaaagggagctggctaagctcaaggaacatacatttcaggagacagatgtgatcactgtatgaggcttgggtgaaatttatcttccagttcaatggctggaccaggacgtgaggtaacctgtggccaatcaggatatccttgtgactaatgttaatccttcagactcctcagatttcatcccacttctttgcattggtgtcacagctagagtccatgaaggataagcaaccgagcagcttctgcctacttttgcacttctattctgaagagagctgttcatttatttagccagtatctacttttggcattaggagcttttgagtgaggttgagggagtggaaaagagggcagaaatccaggagaggagcgcatcaaatgggaacattcctcagggaccaggctcctcgcgttctgatcctaggtctctcacacattggttgcaggtcatttaatttctctctgtttgtttgcttatctataaagaaattgtaccaaataacacatcccttccagagctaaaatttgttctactacagggtctagaatagcatcctccaactgttttgctcatgtacttgctaaaagaattttttaaaagggtgtgtacccccacattttaaagatgacatgccataaatttaattagttacaaaagatgtagtttccagcatattgtctattg

SEQ ID NO: 678866 - DNA, 615 bp, Homo sapiens
atgcctgtaatctcagcactttgggaggctgaggtgggcggatcacctgaggtcaggagttcaagaccagcctgaccaacatgaagaaacccccctctctactaaaaatacaaaaaattagccaggcgcggtgtcaggcacctgtaatcccagctactggggaggctgaggtgggagaatcgtttgaatccaggaggcggaggttgcagtgagccragatcatgtcactgcactccagcctgggcgacagagcgagactttatctcaaataataataataatgataataataataataatcagcaaacttgaaaaggctcctcataaaacccggttaggatggtgctcatctccaatttccatcctccaagactatgagaaataagtttccattattgataagccacacagtctatagtacatttttatcattatggcattttaacaaaatcacatatctcacttgcattactttaaatatcttcctcaaatatttaagacaattatgtggctaactttgcattagactgggttgacaaattgttattctattcatacactatataaacaatgtatagcatttcatctttatataaaatttcacccaaattcaag

SEQ ID NO: 678867 - DNA, 615 bp, Homo sapiens
atgcctgtaatctcagcactttgggaggctgaggtgggcggatcacctgaggtcaggagttcaagaccagcctgaccaacatgaagaaacccccctctctactaaaaatacaaaaaattagccaggcgcggtgtcaggcacctgtaatcccagctactggggaggctgaggtgggagaatcgtttgaatccaggaggcggaggttgcagtgagccgagatcatgycactgcactccagcctgggcgacagagcgagactttatctcaaataataataataatgataataataataataatcagcaaacttgaaaaggctcctcataaaacccggttaggatggtgctcatctccaatttccatcctccaagactatgagaaataagtttccattattgataagccacacagtctatagtacatttttatcattatggcattttaacaaaatcacatatctcacttgcattactttaaatatcttcctcaaatatttaagacaattatgtggctaactttgcattagactgggttgacaaattgttattctattcatacactatataaacaatgtatagcatttcatctttatataaaatttcacccaaattcaag

SEQ ID NO: 678868 - DNA, 631 bp, Homo sapiens
gtgaatagtgccaaaataaaggacataggatggggaacatcacacaccgggactgtcgtagggtcgggggaggcgggagggatagcattaggagatatacctaatgtaaatgatgagttaatgggtgcatcacaccaacatggcacatgtatacatatgtaacaaacctgcrtgttgtgcatacgtaccctagaacttaaagtataatttaaaaaaaggaaaaagaaaacctgtctttaactgccagccacatttcatgtttctttcctctttctttaactcttaaactgactatgttcaataataaagtcaataaacaggtcaaataatataaacatccagttgatgttttctgaatgttaaatttgtaagacaaagagttctacaattctatggaacagggatatgaaagatagtgggaagtagggagaacatcaaagattcaaatgttcataggtctgtaggtctttgtcagatatttatgacatgttctcaggacactgaacaagagccagtgtttgagttcttagaataaagcaaatccaaaaacattagttttcagagcttgaatagaccttagagatcaccaaaccaaactccttattttatgaactagaaaactgcagtgcta

SEQ ID NO: 678869 - DNA, 579 bp, Homo sapiens
gtggcaggtcttttctgaactgttctcatgatagtgaatgagtcttaaaggatctgatggttttaaaaatagtagttaccctgcacaagctctctctttgcttgcttccatccgtgtaaggcgtgacttgctcctctttgccttcctccatgattttgaggcctccccatgcatgtagaactgcaagttaattaaacctctttttcttcccagtctcgggtatgtttttatcagcatcatgaaaacagaataacacaccaaattaagggcaaaatggaaatattgagcataattcaatataattattatatctacagagccttgaaacttatcagaagaagtgttctttttttatatagtagaatgtttgtgtcagcataaaggatcaaacacttttttagtcttacagaaaaaaaaaaatgtgaagcatgtatagattaactaacctgcccraagacaaatcaatttaacaagtaagaaatgcagaaattaaaattgtttcagcttgatccaagaaaagactatcttcaaccctcacaaaatgccactgctttcacacatacacacatattaaaaata

SEQ ID NO: 678870 - DNA, 598 bp, Homo sapiens
tctacgtacagtagactagattaggtgatcttgttgtgcaatatgttttgaaattactgatgtgacatacattaatctcaaaataattatgctgtgtgaaataagccggataaaaagagtgtaataattgatatggttcggctgtgtccacacccaaatctcatcttgaatcgtagctcccgtaattcccacatgttgtgggagggacctggtttggtgggaggtaattgaatcatgggggcaggtctatcctgtgctgttctcgtgatagtgaataagtctcacaagatctgatggttttaataaagaggagtttccctgcacaagttctgttcttctctcttgtctgttgccatgtaaaacatgcctttcaccttccgccatgattgtaaggcctcctcagccacgtgaggcctttttctttataattacccagtctccagtatgtctttatcagcagcgtgaaaatgggctaatacaatactttatgaatctttttctatacaattattttaaagattcaaaataaatgacaawgagtgagagaaggaggatcaatgactgcttgagaggtggtggatggtgctgctataggaag

SEQ ID NO: 678871 - DNA, 598 bp, Homo sapiens
tctacgtacagtagactagattaggtgatcttgttgtgcaatatgttttgaaattactgatgtgacatacattaatctcaaaataattatgctgtgtgaaataagccggataaaaagagtgtaataattgatatggttcggctgtgtccacacccaaatctcatcttgaatcgtagctcccgtaattcccacatgttgtgggagggacctggtttggtgggaggtaattgaatcatgggggcaggtctatcctgtgctgttctcgtgatagtgaataagtctcacaagatctgatggttttaataaagaggagtttccctgcacaagttctgttcttctctcttgtctgttgccatgtaaaacatgcctttcaccttccgccatgattgtaaggcctcctcagccacgtgaggcctttttctttataattacccagtctccagtatgtctttatcagcagcgtgaaaatgggctaatacaatactttatgaatctttttctatacaattattttaaagattcaaaataaatgacaatsagtgagagaaggaggatcaatgactgcttgagaggtggtggatggtgctgctataggaag

SEQ ID NO: 678872 - DNA, 616 bp, Homo sapiens
tgagctgaccctaacatcagctcccaccccaccaagctgctcctggctccagctgttgcagcatctgctgaggccaggctaacaaaaaaccaggatctgcttgggggagatcactcctttctgaactccaggctcataaaatttcttctaaccacaactgcataccccacatccccacttgataggagaggtgtgtgtgtgtacatgtgagttcagaaaaacatagatagatttctacagatacatttatcctacccaactcaaacttcctgtggaattaagttatacaccagcctccaagaaaagctgaaccttggtctctgcttcaacttaagctgcatgaaaacaatacatctctccaggtctctagcaacaaataaataaataaataaatgaaataaatagaattckcaaagagtagagctctgaagtctatctgttgctggaaggaattctactctgatgctccctctatctgaaccgggaggtgaagctaatgtagagagatgaaatccagcacgactcccaagcagttttcctgtaaccagctcattatgcattaacctgtaagacaatatgttttaaagagaaccacattcatcacttcagaaaagtc

SEQ ID NO: 678873 - DNA, 625 bp, Homo sapiens
ttgtatttaaaagcaaatctattttttaataggattttttttcccrttaaattggttttcatttgataaaatattcaccttaccaacacttctctcttttatatgtgtttttttttttttttttactttgaggtaatagcctaattattatgtaataattttaagtatttttatgtcaataccatgagggggaacctgtgatgagttatatcaaaatgttagtaaaataagtttatgtttatgtataaaaggactacaaatgtaaacaataattttattaggtataaaaatgtagattttaatctgttgggaaagaataagagaaaatatctgtatactttaacgttagcatcctaatgcttaaagcttggaatcatttggggagcctgtgctgaacacactttcagaatataaaaccgtaattttaacacattcatatttgaaattgagccagcacctctgattctgttatttttttgcaaattagtgtgcttatatcttagcagttgagacatgcacatttcttattcacttctagtatgaggattagagcaaattctagttgaaaatttcacataatgacaactataagaactaattatctaatacgcttttttttttcttg

SEQ ID NO: 678874 - DNA, 1106 bp, Homo sapiens
attattttcattttattgtattagtatgaacttggtttggccttgactaacggagacttaatagtgacttcaataaaattaaagcttatttctgtcataagcagcatccaggtgtggtgtgtcacttccatgaatatcagggtctctggctcccattttctttctgatgtgccatccacagaatgcagcttccacctcgtgatgcaatatgtttgttcttactgaagctgtaatttcagcattccaactaacaggagggaggaaaagcctataccctctctctttttcagacacttcatagaatttatattaagtgatttatgtgtctcccaaaccacaaataagtccaaggccacacagctaactttgagaaaggctgggtaacgtaatttattttggtacccaggtgtgaaacaaaaatcaaaagtttttacaatattggaaatattggaaacagaagtacttaaaaatcaagtaattttttagacaatttctaaagcctaaaataatgatactaatagaaatgtgtatatagatattaaactcatacattgaatcgaccaaatttggtttaatttacattcttaatattctctgtaatctttttcttatatgatttgaattgaattaaaaaaatagttttcacatgaatttaatgtttaaccaaagtttcagtctattttcccttgatttatatttgtcttgaagttgtttataaaattaaatcattaatacttcagaataggtcaatctttactcataaaatgtttcatctagtacagtgtggtgattcaggaaataagctaggtgccgtggctcatgcctgtaatcacagcattttgggaggccaagaygggagaattgcttgaggcagcatttcaagaccagccttgacaatatagcaaaatcctgtctctacaattttttttagaaaaagtaactaggtgaggtggcaagaacctgtggtgccacctgctcagaaggctgagggaggaagatcacctgagcccagaagtttgaggctgcagtggactattatcatgctactgcactgcaacctgggcaacagagtgagaccctgtttctttcttttttttttttttaca

SEQ ID NO: 678875 - DNA, 1106 bp, Homo sapiens
attattttcattttattgtattagtatgaacttggtttggccttgactaacggagacttaatagtgacttcaataaaattaaagcttatttctgtcataagcagcatccaggtgtggtgtgtcacttccatgaatatcagggtctctggctcccattttctttctgatgtgccatccacagaatgcagcttccacctcgtgatgcaatatgtttgttcttactgaagctgtaatttcagcattccaactaacaggagggaggaaaagcctataccctctctctttttcagacacttcatagaatttatattaagtgatttatgtgtctcccaaaccacaaataagtccaaggccacacagctaactttgagaaaggctgggtaacgtaatttattttggtacccaggtgtgaaacaaaaatcaaaagtttttacaatattggaaatattggaaacagaagtacttaaaaatcaagtaattttttagacaatttctaaagcctaaaataatgatactaatagaaatgtgtatatagatattaaactcatacattgaatcgaccaaatttggtttaatttacattcttaatattctctgtaatctttttcttatatgatttgaattgaattaaaaaaatagttttcacatgaatttaatgtttaaccaaagtttcagtctattttcccttgatttatatttgtcttgaagttgtttataaaattaaatcattaatacttcagaataggtcaatctttactcataaaatgtttcatctagtacagtgtggtgattcaggaaataagctaggtgccgtggctcatgcctgtaatcacagcattttgggaggccaagacgggagaattgcttgaggcagcatttcaagaccagccttgacaatatagcaaaatcctgtctctacaattttttttagaaaaaktaactaggtgaggtggcaagaacctgtggtgccacctgctcagaaggctgagggaggaagatcacctgagcccagaagtttgaggctgcagtggactattatcatgctactgcactgcaacctgggcaacagagtgagaccctgtttctttcttttttttttttttaca

SEQ ID NO: 678876 - DNA, 629 bp, Homo sapiens
gaatgataagtaccctgattatttgtgctagagataaaaatgaacttctgggcaaatatcttttgctaccgacaaattttttttctaaacagtaaaaatgagtgccttttcatagcatttctactrtgtcagaaattctcaaactttagagtgtaactgaaacacagagagggcttattaaaacaaagattgccggtctccaatctcagattctgttcaataaggctaggtagagccagaaaatttgcatttctaaaattcccaactggtgttcatgttgctggcccaggtccactatttgagaaccactgcactatgtgaaaatcactaaagaagacgcttaacttacattatcttcttgattatttttctttaagatgcaagtccatggattctattctgttaggtattttgctttctttcctttttattttttagagacaaggactcactgtgttgcccaggctggtattgaactcctgggctcaagtggtcttctcacttcagcctcccaaagtgctaggattacaggtatgagccaccatgcccagcttgcttgatatttttcaattaagctatctatctatctttgaaaatctagattcctttacaaataaatctatcttcaa

SEQ ID NO: 678877 - DNA, 602 bp, Homo sapiens
tctatgtggggttcaccctaaaaaatatattaatttatgatccacataacrtgacagtctttctactcataccacatatgttttatacatgttcatcatacatatgcaaaaataagataatttccttttacatgcttacccaaagaaaactaaaacctaacttacagatattcaaatgctttatatatgccattattcttagcttcacacagaactagttctgtctcttaaacaggctgatatttaaacataggagtgtttccagagaagctctgaaagtaagccaacatgatttttttaattattattttttatgattatagacatagttattttctatgcatatgtttctaacttaaaataaaaaagcaatccttcctgtcaccaattaacatgtatgtccttgtgtacatggatatatacagagctaattacatgtgtgtgagtttattggttattgtacatatacatattatccctttatgctgagtcttcaatcaataacaatcccagtagtaacaaacatacccagagcccagatcttggtttctacataccattttttattgaaagacagcagatacagctgtttctagggttgg

SEQ ID NO: 678878 - DNA, 1642 bp, Homo sapiens
tacattgtgatgtttccatctcccatttaatccttgggaaatcacatcatttacagatatttatggctcttttcagctttaacattcaataatttaactaaaattagaagttaacaaaagtcactgagactagaatttcttaattttatttctttatgtatgaatatttactaatatgtaaattttcttgtaagttctgaatcctaccttctttttaaggcacacagatttgtcctttgtagaagaactgcgcacaaaataaggttatcacagaaacatataagccaatagtaattatgatataaaatgctatattataaagggcttggcatgatttaatttcttatttttgtatttttcaaagagtaatataaagcatttctctaagcaacagagcatacatgcattttacaactttgtttccttttatcaaatgaaaatggattcaatatcagatttgtggcataaaatctgataaatctatgaagtctcaatgaactaaaacggcaaatcatattattttacttcattcctaaagaaaaaagactcctctatctttctcagtcttacattttatacacacacacagtcacacatacacacacatatcaaagctttattaaaaataaaacaaaatgccccctcaacttgccatgtgcaataaacaaagtttatgtcctctcaaaattcttatgttgaaatcctaatccccatagtgatggcatttgagagtggggcttttgagaggtgatcaaggctcttcttgaatggaattaatgcccctatgaaagagacctcagaaaaatcccttgtcttttccagtttgtgaagatacagagagaaaacgtctgtctatgtggaaggaggtcctctccagcgcatcatctgccagctccttgacttaggaccctccagcctctagaactgagaaataaatatctgttgtgtattaccagtctacagcatttttgttatagtagcccaaatagactgagacaccagaggttagtgcacatataacttcagtccatcctttccatgaatatatggtgtttatggtaaaaatcaatatgaagccatggttggtcactcaataaagaaaataaaagtaactgtcttttgtaaaatatgcttgctagttacaggtttggacttaaatgttctaccatcttttcaacttgatttaaaagaaaacattaacagaaagttaaccagaaaatttaattaatatcccgatttctaagtatctccatttcacaccattctcaccactctagaaagtagccacctagaaagtagtttacgtaccttttgcagccacaacygctgcctcttttcagaagtcaagactttacatatcacaattctaaattagatgctcagcaaagaagctgcacgggtgctatcctggagtttcaacctatgtctgcttctttttctttctccagatgcatggaggtttctgctattatgtactggcccaatgtgtaataatgtaagaaatagttgaacagaaagctagaggctatgggaggcaaagatgaaattaatcaaggcaaatgggaaaatcagtattgagttgaaaagacttttcataagaaagaaaacattaacagaaagttaaccagaaaatttgattaat

SEQ ID NO: 678879 - DNA, 639 bp, Homo sapiens
tgtgtataactggagggtagcagaaaacaagttccttgtgagatcagacacatgagctaaacatttaggaaaaccttacagaagcaaatctttaacggaagggtttccacactgagggccttgtgttgcttttgggaatggtgtagaaatcacgtgcttagtcttgaattatgattcacctttactgaatgtcccttctcttttctttactcactgtcgaacaggaacccaaaggatgtagtttttggcagatgtcctttgtarggttcagtatttctcactcacccctttaagacctaaagggagagttattaatagtttcagaaagttgagggaaatcatgcagaggttctcagatgttcagagaggcttcctctccccttccatgaaagttctaaggctcatgggtgaggcctaagaaaggcatgtcagttgtctatcaagttcattagtttattcagcttatttctgaagcttttgatgggccggctattcagaggtcaatgaaatagacatgagtactcttcacagaccttaccgtctaataggaatgatagcaagtgaatgtataataaataaataattaggggttgattgttacgagtgctatgaggggaatagccagggtgacatgtttga

SEQ ID NO: 678880 - DNA, 654 bp, Homo sapiens
catcttgctttagagcttccatcactctgagctccactttgctcagagctccatttactcagagctccatttgctccaagctccatctttctcagagctccaatccctccaaactccatcttgctctgagtaccctctgctcagagctccatattctcggagctgcatcttctagctccatcttgctgatatctccaatcacttccagctccattttgttctgagcatcatgtgctcgaagctccatcttactgtaagcagcatgttctctgagctccatcttgctctgagcaccatctgttctgaactccatctgaaactgaggaacatttgccccaagctccatcttgcttagagctccttcttgctcygaacttcgtttgctccaagctccatctgctccgagctccagcttgctgagagctccaattacttccagcatcattttgctctgaacaccatctgctcaagctacatcttactgtgagcaacatgttttctgagctacatcttgctcagagctgcatctgctccaagccccattgtgctcgaagctctaatcactccgaggctgatcttgctctgatcactatctgctcagagttccaatcctccagagtaaagtttttaagttccaatcatttcaagctccat

SEQ ID NO: 678881 - DNA, 1826 bp, Homo sapiens
tatccttgttaactttctgactcattgatctgcctaatgttcacagtgggatgttaaagactcccattattattgtgtgggagtcatattttggttgaagttgagtttctagtcaaagaaaaaaacacatgaagggcattcatgtttccaggaacagaagcatcctgtctggtttttcaaaggtgaagggagcagtctgaaggggccatggcatacgtgtgtctataatcaaagctcagagccaaggccctgggggagggtcaggggttccccagggggtgcaccccatccaacactgcactgccaggggccttgtctttattaaattctgggccttttcctgggcaatagttacacaaggtgggttcaatgaaccctgtgtcctgtggctgccacccatttcagggtcgcaaaggtaatgatcaccccttcaccttctgctgagggtccaggtgaccccctggtggtgtaacccaggccctcgcccctaaggggtcctgagtcttgctcaccactgagtccttggtctagggctcccgcacttgtccaggtaccatcaaatgctgtgtactgagaggcgcttgcgtagagccccttcttccccaggcagcacagccctgctcctgctgacaccatggtccaggtggtacacatctttctgcccgcaggtcccatggaggagcagcctgagaacaaagcagcacccagagcttgttttttttagagaacctggctctgtcctgtctagaagccccacagctgtggaaaccaggacctcctgcttttcagagcctagatgtgcaggacatagatgcacctcagaggtcctgggtgtgaggtggaaggttgggggacactgggcttcctactgctgtgctcccattgccacatcttctacctggtgggaccaggcagctagcaaaggtgacagattcacccagacactgtgtcctcccacatcctgacctggcacctgagccacactgctggctctgaagttcccaggagcgtgtgtgtgctgtgaccagcggacctatggcatgtgccgtcttcctccctctgtggcatggtatcagttcctctgatggtgtcatgtgaggtctcgtcctgatgggcagaactttctataaaccgtcccgtggccccggggaaaggcaagctcatccctgcaggtttagttgtttctgttaaatgcaaccctgttcttcccaggatgtcagggcctggtgcagttgtcccagcctggcaggcagtcgtccccttgatggttttgtggagcgcgcagcctgggcctagctcatgaccctggcaaagggcaggtgagccctggggctgaccacctgcactttctgtttggtggtgggagatgtggggcaatatttcttgcctttcctttagagatcatctcccagcctgcacagaccactagacccctaaaaatgggatttgtaggcagggcctggctctctgtggtgcttttctctcccctccaagcacctgtgactcccaggcctccagcccygccggtttcccccatctgtgctcctgatgcagggggaggactgtattatggcagacagcatgctggtttacacagttctgggacaaaactgtaggtatacattattttatgtcccaagtaaatgaatccaatttctggatgcttttttgacacagagggaagaaatgcattggtgagatccatgagccagagctcaggtccatgctcaggctctgggagcagctgtgcagctctggagctgttgcggggcccggggaaggcgtaggtgctgtgtctttgctcactgtgttaaaggctttatttg

SEQ ID NO: 678882 - DNA, 1826 bp, Homo sapiens
tatccttgttaactttctgactcattgatctgcctaatgttcacagtgggatgttaaagactcccattattattgtgtgggagtcatattttggttgaagttgagtttctagtcaaagaaaaaaacacatgaagggcattcatgtttccaggaacagaagcatcctgtctggtttttcaaaggtgaagggagcagtctgaaggggccatggcatacgtgtgtctataatcaaagctcagagccaaggccctgggggagggtcaggggttccccagggggtgcaccccatccaacactgcactgccaggggccttgtctttattaaattctgggccttttcctgggcaatagttacacaaggtgggttcaatgaaccctgtgtcctgtggctgccacccatttcagggtcgcaaaggtaatgatcaccccttcaccttctgctgagggtccaggtgaccccctggtggtgtaacccaggccctcgcccctaaggggtcctgagtcttgctcaccactgagtccttggtctagggctcccgcacttgtccaggtaccatcaaatgctgtgtactgagaggcgcttgcgtagagccccttcttccccaggcagcacagccctgctcctgctgacaccatggtccaggtggtacacatctttctgcccgcaggtcccatggaggagcagcctgagaacaaagcagcacccagagcttgttttttttagagaacctggctctgtcctgtctagaagccccacagctgtggaaaccaggacctcctgcttttcagagcctagatgtgcaggacatagatgcacctcagaggtcctgggtgtgaggtggaaggttgggggacactgggcttcctactgctgtgctcccattgccacatcttctacctggtgggaccaggcagctagcaaaggtgacagattcacccagacactgtgtcctcccacatcctgacctggcacctgagccacactgctggctctgaagttcccaggagcgtgtgtgtgctgtgaccagcggacctatggcatgtgccgtcttcctccctctgtggcatggtatcagttcctctgatggtgtcatgtgaggtctcgtcctgatgggcagaactttctataaaccgtcccgtggccccggggaaaggcaagctcatccctgcaggtttagttgtttctgttaaatgcaaccctgttcttcccaggatgtcagggcctggtgcagttgtcccagcctggcaggcagtcgtccccttgatggttttgtggagcgcgcagcctgggcctagctcatgaccctggcaaagggcaggtgagccctggggctgaccacctgcactttctgtttggtggtgggagatgtggggcaatatttcttgcctttcctttagagatcatctcccagcctgcacagaccactagacccctaaaaatgggatttgtaggcagggcctggctctctgtggtgcttttctctcccctccaagcacctgtgactcccaggcctccagccctgccggtttcccccatctgtgctcctgatgcagggggaggactgtattatggcagacagcatgctggtttacrcagttctgggacaaaactgtaggtatacattattttatgtcccaagtaaatgaatccaatttctggatgcttttttgacacagagggaagaaatgcattggtgagatccatgagccagagctcaggtccatgctcaggctctgggagcagctgtgcagctctggagctgttgcggggcccggggaaggcgtaggtgctgtgtctttgctcactgtgttaaaggctttatttg

SEQ ID NO: 678883 - DNA, 1826 bp, Homo sapiens
tatccttgttaactttctgactcattgatctgcctaatgttcacagtgggatgttaaagactcccattattattgtgtgggagtcatattttggttgaagttgagtttctagtcaaagaaaaaaacacatgaagggcattcatgtttccaggaacagaagcatcctgtctggtttttcaaaggtgaagggagcagtctgaaggggccatggcatacgtgtgtctataatcaaagctcagagccaaggccctgggggagggtcaggggttccccagggggtgcaccccatccaacactgcactgccaggggccttgtctttattaaattctgggccttttcctgggcaatagttacacaaggtgggttcaatgaaccctgtgtcctgtggctgccacccatttcagggtcgcaaaggtaatgatcaccccttcaccttctgctgagggtccaggtgaccccctggtggtgtaacccaggccctcgcccctaaggggtcctgagtcttgctcaccactgagtccttggtctagggctcccgcacttgtccaggtaccatcaaatgctgtgtactgagaggcgcttgcgtagagccccttcttccccaggcagcacagccctgctcctgctgacaccatggtccaggtggtacacatctttctgcccgcaggtcccatggaggagcagcctgagaacaaagcagcacccagagcttgttttttttagagaacctggctctgtcctgtctagaagccccacagctgtggaaaccaggacctcctgcttttcagagcctagatgtgcaggacatagatgcacctcagaggtcctgggtgtgaggtggaaggttgggggacactgggcttcctactgctgtgctcccattgccacatcttctacctggtgggaccaggcagctagcaaaggtgacagattcacccagacactgtgtcctcccacatcctgacctggcacctgagccacactgctggctctgaagttcccaggagcgtgtgtgtgctgtgaccagcggacctatggcatgtgccgtcttcctccctctgtggcatggtatcagttcctctgatggtgtcatgtgaggtctcgtcctgatgggcagaactttctataaaccgtcccgtggccccggggaaaggcaagctcatccctgcaggtttagttgtttctgttaaatgcaaccctgttcttcccaggatgtcagggcctggtgcagttgtcccagcctggcaggcagtcgtccccttgatggttttgtggagygcgcagcctgggcctagctcatgaccctggcaaagggcaggtgagccctggggctgaccacctgcactttctgtttggtggtgggagatgtggggcaatatttcttgcctttcctttagagatcatctcccagcctgcacagaccactagacccctaaaaatgggatttgtaggcagggcctggctctctgtggtgcttttctctcccctccaagcacctgtgactcccaggcctccagccctgccggtttcccccatctgtgctcctgatgcagggggaggactgtattatggcagacagcatgctggtttacacagttctgggacaaaactgtaggtatacattattttatgtcccaagtaaatgaatccaatttctggatgcttttttgacacagagggaagaaatgcattggtgagatccatgagccagagctcaggtccatgctcaggctctgggagcagctgtgcagctctggagctgttgcggggcccggggaaggcgtaggtgctgtgtctttgctcactgtgttaaaggctttatttg

SEQ ID NO: 678884 - DNA, 1826 bp, Homo sapiens
tatccttgttaactttctgactcattgatctgcctaatgttcacagtgggatgttaaagactcccattattattgtgtgggagtcatattttggttgaagttgagtttctagtcaaagaaaaaaacacatgaagggcattcatgtttccaggaacagaagcatcctgtctggtttttcaaaggtgaagggagcagtctgaaggggccatggcatacgtgtgtctataatcaaagctcagagccaaggccctgggggagggtcaggggttccccagggggtgcaccccatccaacactgcactgccaggggccttgtctttattaaattctgggccttttcctgggcaatagttacacaaggtgggttcaatgaaccctgtgtcctgtggctgccacccatttcagggtcgcaaaggtaatgatcaccccttcaccttctgctgagggtccaggtgaccccctggtggtgtaacccaggccctcgcccctaaggggtcctgagtcttgctcaccactgagtccttggtctagggctcccgcacttgtccaggtaccatcaaatgctgtgtactgagaggcgcttgcgtagagccccttcttccccaggcagcacagccctgctcctgctgacaccatggtccaggtggtacacatctttctgcccgcaggtcccatggaggagcagcctgagaacaaagcagcacccagagcttgttttttttagagaacctggctctgtcctgtctagaagccccacagctgtggaaaccaggacctcctgcttttcagagcctagatgtgcaggacatagatgcacctcagaggtcctgggtgtgaggtggaaggttgggggacactgggcttcctactgctgtgctcccattgccacatcttctacctggtgggaccaggcagctagcaaaggtgacagattcacccagacactgtgtcctcccacatcctgacctggcacctgagccacactgctggctctgaagttcccaggagcgtgtgtgtgctgtgaccagcggacctatggcatgtgccgtcttcctccctctgtggcatggtatcagttcctctgatggtgtcatgtgaggtctcgtcctgatgggcagaactttctataaaccgtcccgtggccccggggaaaggcaagctcatccctgcaggtttagttgtttctgttaaatgcaaccctgttcttcccaggatgtcagggcctggtgcagttgtcccagcctggcaggcagtcgtccccttgatggttttgtggagcrcgcagcctgggcctagctcatgaccctggcaaagggcaggtgagccctggggctgaccacctgcactttctgtttggtggtgggagatgtggggcaatatttcttgcctttcctttagagatcatctcccagcctgcacagaccactagacccctaaaaatgggatttgtaggcagggcctggctctctgtggtgcttttctctcccctccaagcacctgtgactcccaggcctccagccctgccggtttcccccatctgtgctcctgatgcagggggaggactgtattatggcagacagcatgctggtttacacagttctgggacaaaactgtaggtatacattattttatgtcccaagtaaatgaatccaatttctggatgcttttttgacacagagggaagaaatgcattggtgagatccatgagccagagctcaggtccatgctcaggctctgggagcagctgtgcagctctggagctgttgcggggcccggggaaggcgtaggtgctgtgtctttgctcactgtgttaaaggctttatttg

SEQ ID NO: 678885 - DNA, 632 bp, Homo sapiens
ttgccttcaaatctggcaagaaaattacagtaataaattattactataatacacatatttatttagttacaattatatatataaaaaacaattttgcagaagtttcccatctaccagcatttattattattattttttttgcatgataagtttccaaggaaccttagtgatggggactgtctcttttaaaattaaattgtgtaaataactcccagagccatgctggtaagaaacaaaacaaaaaaaaagaactagaaacttgaaacaaaygtaggatttctgctggtaaaaggatgcaaagcaggcctgcctgctgaacttccccagagctaatccttgagccaaaagagcttcctggtgaagcctcgcactctccgtaacagggtgtggggggaccgagacatgtgggctccagacttgaccatctttacctagttatgggatttcaatcatgtcttttaaattctttgagctgcagttttcacatatataaagtggaaatatttttaaaattttaatttgtattataaccttgtgtaaagataaaatagtacacttgaaagcattttagctgaagtcaaacgttcatgtgtgtgcatgcgatggcttaattattttagggcttatcctgg

SEQ ID NO: 678886 - DNA, 632 bp, Homo sapiens
ttgccttcaaatctggcaagaaaattacagtaataaattattactataatacacatatttatttagttacaattatatatataaaaaacaattttgcagaagtttcccatctaccagcatttattattattattttttttgcatgataagtttccaaggaaccttagtgatggggactgtctcttttaaaattaaattgtgtaaataactcccagagccatgctggtaagaaacaaaacaaaaaaaaagaactagaaacttgaaacaaatgtaggatttctgctggtaaaaggatgcaaagcaggcctgcctgctgmacttccccagagctaatccttgagccaaaagagcttcctggtgaagcctcgcactctccgtaacagggtgtggggggaccgagacatgtgggctccagacttgaccatctttacctagttatgggatttcaatcatgtcttttaaattctttgagctgcagttttcacatatataaagtggaaatatttttaaaattttaatttgtattataaccttgtgtaaagataaaatagtacacttgaaagcattttagctgaagtcaaacgttcatgtgtgtgcatgcgatggcttaattattttagggcttatcctgg

SEQ ID NO: 678887 - DNA, 632 bp, Homo sapiens
ttgccttcaaatctggcaagaaaattacagtaataaattattactataatacacatatttatttagttacaattatatatataaaaaacaattttgcagaagtttcccatctaccagcatttattattattattttttttgcatgataagtttccaaggaaccttagtgatggggactgtctcttttaaaattaaattgtgtaaataactcccagagccatgctggtaagaaacaaaacaaaaaaaaagaactagaaacttgaaacaaatgtaggatttctgctggtaaaaggatgcaaagcaggcctgcctgctgaacttccccagagctaatccttgagccaaaagagcttcctggtgaagcctcrcactctccgtaacagggtgtggggggaccgagacatgtgggctccagacttgaccatctttacctagttatgggatttcaatcatgtcttttaaattctttgagctgcagttttcacatatataaagtggaaatatttttaaaattttaatttgtattataaccttgtgtaaagataaaatagtacacttgaaagcattttagctgaagtcaaacgttcatgtgtgtgcatgcgatggcttaattattttagggcttatcctgg

SEQ ID NO: 678888 - DNA, 632 bp, Homo sapiens
ttgccttcaaatctggcaagaaaattacagtaataaattattactataatacacatatttatttagttacaattatatatataaaaaacaattttgcagaagtttcccatctaccagcatttattattattattttttttgcatgataagtttccaaggaaccttagtgatggggactgtctcttttaaaattaaattgtgtaaataactcccagagccatgctggtaagaaacaaaacaaaaaaaaagaactagaaacttgaaacaaatgtaggatttctgctggtaaaaggatgcaaagcaggcctgcctgctgaacttccccagagctaatccttgagccaaaagagcttcctggtgaagcctcgcactctccgtaacagggtgtggggggaccgmgacatgtgggctccagacttgaccatctttacctagttatgggatttcaatcatgtcttttaaattctttgagctgcagttttcacatatataaagtggaaatatttttaaaattttaatttgtattataaccttgtgtaaagataaaatagtacacttgaaagcattttagctgaagtcaaacgttcatgtgtgtgcatgcgatggcttaattattttagggcttatcctgg

SEQ ID NO: 678889 - DNA, 632 bp, Homo sapiens
ttgccttcaaatctggcaagaaaattacagtaataaattattactataatacacatatttatttagttacaattatatatataaaaaacaattttgcagaagtttcccatctaccagcatttattattattattttttttgcatgataagtttccaaggaaccttagtgatggggactgtctcttttaaaattaaattgtgtaaataactcccagagccatgctggtaagaaacaaaacaaaaaaaaagaactagaaacttgaaacaaatgtaggatttctgctggtaaaaggatgcaaagcaggcctgcctgctgaacttccccagagctaatccttgagccaaaagagcttcctggtgaagcctcgcactctccgtaacagggtgtggggggaccgagacatgtgggctccagacttgaccatctttacctagttatgggatttcaatcatgtcttttaaattctttgagctgcagttttcacatatataaagtggaaatatttttaaaattttaatttgtattataaccttgtgtaaasataaaatagtacacttgaaagcattttagctgaagtcaaacgttcatgtgtgtgcatgcgatggcttaattattttagggcttatcctgg

SEQ ID NO: 678890 - DNA, 3069 bp, Homo sapiens
ttaactttcccagattgttactaaataatcagttcataggactactgaaactaaattaacagaattcctatctgcattcttaataactccatggttttaagtgtgtaaaactgccatgctgattatgccaaagctctacatacttaaagagacacactggacagtccacaatacagcttcaattgataaaaaacagtttagaatttgcttaattccaattgagaaaactctgctcttaatgacttactgacctaagcacttgaatgactgaacaaagagacacaaaatcctgagagggccatcctctacttattgaaagactgctcacagcaaactactaaagaccttctgaatggcagtgaataactgatggtagaaaggaaaatatattattctgtaacctgatatgtaacctgatagatactaccaataatattcattttaatgtctcaaccacagagataaaagtcagactaggccaggaatggtggctcacacctgtaatcctagcactttgggaggctgagggggatgaattgcttgagcccaggagttcaagaccagcctgagaaacatggcaaaaaccaaatctctactaaaaaaaaataaaaataaaaataaaaataaaaagaaagaaagaaaaaaacaactgaggttgaggttggaggaccatctgagcttcgggaggtcgaggttgcagtgagctgtgatcacaccactgcactccagcctgggaaacagagtgagactcaatctaaaaaaaaaaaaaaaagtcagattaatgttattggaaaggaaagatttaaagaaatcagcacatatccaactccaactcttctagagataccttaagtttctgagatataagaatttatatattacatttatgtattcagtggttcttaagcaggagtgtatccagattttgagaaaattgttgctgttgttattgttgctgtcgtttttagagacaggggctcattatgttgacaaggctagactcgaactcctgagctcaagcaatcctcccacctcagcctccctaacagttgggactacagccatgcaccaacatgcctggcttcaaggaaacatttttaaatatacatatccaagctttattagacttactgtatcaaaatcttcaggaataagcctagacttgttgattatttaaaaattttcctcaggttactgggatgcacaattctagctgaaagctagtacaatagacaattacttcagtctcatttctcaccacccagataaccaattccctttcttatttgaagatttggccaaaaagagtaaagagtaggagagagacccatttgctgaaaacaccacataatttttcccggtaacacaacagtatctagtcaactcaaaatccaacttgatcttgttactcatttatcttccaccttcccatccagacactctagatttgaaagcagagctgaggctctaattggccacttctaccagaagaggatactaagtcagttaattacttgatattccccctgctcaagggtttccccttacattacccacctattcactgccaatctggttcctcagaggcctcctaaaattcatctctaggcagtttacaacccactaactccctctcccaaactgaaaactgtcattctctaaaatcaaagagaactttgtctcaccatacaaaggaaataaataaatgaacaacaacaacaacaccacacacacacaacctcttcatggtctcttccctctattgcctaatttccaaattggccctgatatttctgactgctctctttttccctttccacttctgcctcatgagcaatcagaaatatcttaagccttgccactgagaggtgcatcacctcgtatctattactgttttttaggaacttgccaaagaagcaggatctctattcactgagacatgtttaagttttcttggagttttcatgtaaaacctatttcagggcaaattttgccattttacattcattaggggaaaagaatcctaggagggaaaaactgaaaaatagtaagtattacmttttacaaattcagtgttttcaaaaaaaagtatttaccgcaagtgcattaaaaaaaaaaaaactgtaccctctaatgcttctttgaaagtaacaatatttaaaataaaatcttagataattaggtcatttcaaaatattttcattcaggttatgcttgagcttccaaatatggaaaactggcccttacacaggtcaatgttaacacgaatgcatttcagtattttgaagataaaattggtagatctataccttgttttttgattcgatatcagcaccgtataagagcagtgctttggccattaatttatcttcattgtagatagcatagtgtagagcggtatttccatactcatctggaatattcggatcagtgccatgttccagcaacattaacgcacattcatcttcctggcattgtacggcctgtcagtattacaccataaacaaattacaaatcctaggatttcaaaataacattccacagctttcaccaactagttatatttaaaggagaaaactcatttttatgctatgtattgaaatcaaacccacttcacgctgacatagttggctactgcatacctttgtcagagctgtcctctttttgttgtcaaggatattaagttgacatcgtctgtccagcaggagttttactacttctgaatttccattggcagaggccagatgtagagcagtcctatgagggtgagaagactttttaggaaattgtagtgcactagctacagccatatcaatgatacacataatcgcaaacactgaatagcctgctattactgtgccttcaaaacaaacatttaactttcccatgaaaaaagcacacgatttattatctctcattactcgctgtattaatgaaagagcagcctatatgaatacaaagagcatagcccttggatgacattcaacttgggctggaatcctacttgaagctctgtcactttctggctgttgcttagccttttggggtctcagtttcctcatcaataaa

SEQ ID NO: 678891 - DNA, 3069 bp, Homo sapiens
ttaactttcccagattgttactaaataatcagttcataggactactgaaactaaattaacagaattcctatctgcattcttaataactccatggttttaagtgtgtaaaactgccatgctgattatgccaaagctctacatacttaaagagacacactggacagtccacaatacagcttcaattgataaaaaacagtttagaatttgcttaattccaattgagaaaactctgctcttaatgacttactgacctaagcacttgaatgactgaacaaagagacacaaaatcctgagagggccatcctctacttattgaaagactgctcacagcaaactactaaagaccttctgaatggcagtgaataactgatggtagaaaggaaaatatattattctgtaacctgatatgtaacctgatagatactaccaataatattcattttaatgtctcaaccacagagataaaagtcagactaggccaggaatggtggctcacacctgtaatcctagcactttgggaggctgagggggatgaattgcttgagcccaggagttcaagaccagcctgagaaacatggcaaaaaccaaatctctactaaaaaaaaataaaaataaaaataaaaataaaaagaaagaaagaaaaaaacaactgaggttgaggttggaggaccatctgagcttcgggaggtcgaggttgcagtgagctgtgatcacaccactgcactccagcctgggaaacagagtgagactcaatctaaaaaaaaaaaaaaaagtcagattaatgttattggaaaggaaagatttaaagaaatcagcacatatccaactccaactcttctagagataccttaagtttctgagatataagaatttatatattacatttatgtattcagtggttcttaagcaggagtgtatccagattttgagaaaattgttgctgttgttattgttgctgtcgtttttagagacaggggctcattatgttgacaaggctagactcgaactcctgagctcaagcaatcctcccacctcagcctccctaacagttgggactacagccatgcaccaacatgcctggcttcaaggaaacatttttaaatatacatatccaagctttattagacttactgtatcaaaatcttcaggaataagcctagacttgttgattatttaaaaattttcctcaggttactgggatgcacaattctagctgaaagctagtacaatagacaattacttcagtctcatttctcaccacccagataaccaattccctttcttatttgaagatttggccaaaaagagtaaagagtaggagagagacccatttgctgaaaacaccacataatttttcccggtaacacaacagtatctagtcaactcaaaatccaacttgatcttgttactcatttatcttccaccttcccatccagacactctagatttgaaagcagagctgaggctctaattggccacttctaccagaagaggatactaagtcagttaattacttgatattccccctgctcaagggtttccccttacattacccacctattcactgccaatctggttcctcagaggcctcctaaaattcatctctaggcagtttacaacccactaactccctctcccaaactgaaaactgtcattctctaaaatcaaagagaactttgtctcaccatacaaaggaaataaataaatgaacaacaacaacaacaccacacacacacaacctcttcatggtctcttccctctattgcctaatttccaaattggccctgatatttctgactgctctctttttccctttccacttctgcctcatgagcaatcagaaatatcttaagccttgccactgagaggtgcatcacctcgtatctattactgttttttaggaacttgccaaagaagcaggatctctattcactgagacatgtttaagttttcttggagttttcatgtaaaacctatttcagggcaaattttgccattttacattcattaggggaaaagaatcctaggagggaaaaactgaaaaatagtaagtattaccttttacaaattcagtgttttcaaaaaaaagtatttaccgcaagtgcattaaaaaaaaaaaaactgtaccctctaatgcttctttgaaagtaacaatatttaaaataaaatcttagataattaggtcatttcaaaatattttcattcaggttatgcttgagcttccaaatatggaaaactggcccttacacaggtcaatgttaacacgaatgcatttcagtattttgaagataaaattggtagatctataccttgttttttgattcgatatcagcaccgtataagagcagtgctttggccattaatttatcttcattgtagatagcatagtgtagagcggtatttccatactcatctggaatattyggatcagtgccatgttccagcaacattaacgcacattcatcttcctggcattgtacggcctgtcagtattacaccataaacaaattacaaatcctaggatttcaaaataacattccacagctttcaccaactagttatatttaaaggagaaaactcatttttatgctatgtattgaaatcaaacccacttcacgctgacatagttggctactgcatacctttgtcagagctgtcctctttttgttgtcaaggatattaagttgacatcgtctgtccagcaggagttttactacttctgaatttccattggcagaggccagatgtagagcagtcctatgagggtgagaagactttttaggaaattgtagtgcactagctacagccatatcaatgatacacataatcgcaaacactgaatagcctgctattactgtgccttcaaaacaaacatttaactttcccatgaaaaaagcacacgatttattatctctcattactcgctgtattaatgaaagagcagcctatatgaatacaaagagcatagcccttggatgacattcaacttgggctggaatcctacttgaagctctgtcactttctggctgttgcttagccttttggggtctcagtttcctcatcaataaa

SEQ ID NO: 678892 - DNA, 3069 bp, Homo sapiens
ttaactttcccagattgttactaaataatcagttcataggactactgaaactaaattaacagaattcctatctgcattcttaataactccatggttttaagtgtgtaaaactgccatgctgattatgccaaagctctacatacttaaagagacacactggacagtccacaatacagcttcaattgataaaaaacagtttagaatttgcttaattccaattgagaaaactctgctcttaatgacttactgacctaagcacttgaatgactgaacaaagagacacaaaatcctgagagggccatcctctacttattgaaagactgctcacagcaaactactaaagaccttctgaatggcagtgaataactgatggtagaaaggaaaatatattattctgtaacctgatatgtaacctgatagatactaccaataatattcattttaatgtctcaaccacagagataaaagtcagactaggccaggaatggtggctcacacctgtaatcctagcactttgggaggctgagggggatgaattgcttgagcccaggagttcaagaccagcctgagaaacatggcaaaaaccaaatctctactaaaaaaaaataaaaataaaaataaaaataaaaagaaagaaagaaaaaaacaactgaggttgaggttggaggaccatctgagcttcgggaggtcgaggttgcagtgagctgtgatcacaccactgcactccagcctgggaaacagagtgagactcaatctaaaaaaaaaaaaaaaagtcagattaatgttattggaaaggaaagatttaaagaaatcagcacatatccaactccaactcttctagagataccttaagtttctgagatataagaatttatatattacatttatgtattcagtggttcttaagcaggagtgtatccagattttgagaaaattgttgctgttgttattgttgctgtcgtttttagagacaggggctcattatgttgacaaggctagactcgaactcctgagctcaagcaatcctcccacctcagcctccctaacagttgggactacagccatgcaccaacatgcctggcttcaaggaaacatttttaaatatacatatccaagctttattagacttactgtatcaaaatcttcaggaataagcctagacttgttgattatttaaaaattttcctcaggttactgggatgcacaattctagctgaaagctagtacaatagacaattacttcagtctcatttctcaccacccagataaccaattccctttcttatttgaagatttggccaaaaagagtaaagagtaggagagagacccatttgctgaaaacaccacataatttttcccggtaacacaacagtatctagtcaactcaaaatccaacttgatcttgttactcatttatcttccaccttcccatccagacactctagatttgaaagcagagctgaggctctaattggccacttctaccagaagaggatactaagtcagttaattacttgatattccccctgctcaagggtttccccttacattacccacctattcactgccaatctggttcctcagaggcctcctaaaattcatctctaggcagtttacaacccactaactccctctcccaaactgaaaactgtcattctctaaaatcaaagagaactttgtctcaccatacaaaggaaataaataaatgaacaacaacaacaacaccacacacacacaacctcttcatggtctcttccctctattgcctaatttccaaattggccctgatatttctgactgctctctttttccctttccacttctgcctcatgagcaatcagaaatatcttaagccttgccactgagaggtgcatcacctcgtatctattactgttttttaggaacttgccaaagaagcaggatctctattcactgagacatgtttaagttttcttggagttttcatgtaaaacctatttcagggcaaattttgccattttacattcattaggggaaaagaatcctaggagggaaaaactgaaaaatagtaagtattaccttttacaaattcagtgttttcaaaaaaaagtatttaccgcaagtgcattaaaaaaaaaaaaactgtaccctctaatgcttctttgaaagtaacaatatttaaaataaaatcttagataattaggtcatttcaaaatattttcattcaggttatgcttgagcttccaaatatggaaaactggcccttacacaggtcaatgttaacacgaatgcatttcagtattttgaagataaaattggtagatctataccttgttttttgattcgatatcagcaccgtataagagcagtgctttggccattaatttatcttcattgtagatagcatagtgtagagcggtatttccatactcatctggaatattcggatcagtgccatgttccagcaacattaacgcacattcatcttcctggcattgtacggcctgtcagtattacaccataaacaaattayaaatcctaggatttcaaaataacattccacagctttcaccaactagttatatttaaaggagaaaactcatttttatgctatgtattgaaatcaaacccacttcacgctgacatagttggctactgcatacctttgtcagagctgtcctctttttgttgtcaaggatattaagttgacatcgtctgtccagcaggagttttactacttctgaatttccattggcagaggccagatgtagagcagtcctatgagggtgagaagactttttaggaaattgtagtgcactagctacagccatatcaatgatacacataatcgcaaacactgaatagcctgctattactgtgccttcaaaacaaacatttaactttcccatgaaaaaagcacacgatttattatctctcattactcgctgtattaatgaaagagcagcctatatgaatacaaagagcatagcccttggatgacattcaacttgggctggaatcctacttgaagctctgtcactttctggctgttgcttagccttttggggtctcagtttcctcatcaataaa

SEQ ID NO: 678893 - DNA, 3391 bp, Homo sapiens
aacagcaatgtccaaaaggagaaagatgaggaggagcaagcaaaacagaccgtgatgaatggactagaaaggcaggagtaaaagcctgagggagtgaggtcctgaaagccaagtgaagacgccgttagggagaagatgccctccattggctcaaatattgctgacagattaaataaaatgaggtgtaagaaaaaatgcatagatttatttacagaaaaaagtagtgataaccttgagaaaaacaactctggaggagtgctgaaattgaagacttactggcattgagatcaagagtgaatggaaagaaaatttgagttcgtgagtgtagacagttacttaaaggacaacatacttaacactcacgactgagaatgatgtaattttcatccacagtcatggaaaagtgatagacaagaaatagtttccaaattttacataacaggtggaggtttcaaatgctatgtaacaattatatatttcaaaggttataaaaattatacacatgtggcattaaatgccagaccaaggttttaaaggcccctagaacatttctagatcacataagctgattatcattttgttcattcatgcttatacataaagaccaagaaatactaaaggtctcaacgagaatatttcttgcttgataaaaatcagccaattctaggacagttgacactcatcaaatatacaaagtaattgatcacagtaaaatactgagttctattaacaggaataaagagagagaaatgcagaaaataatcttattttataaatgaagtttttaaaattatatgaagtcactgtggaaaaatatggtgaggtgaatactcaaatatatccttttctcaaaggaaagataatgtcacccakgcaggacacttttacatataagagtcaatgcattagcagcaccttccttttagcacaaaggtcagcaaataagcacctgtgggccaaatccagcccactgactgtttttgtaagtcaagtatcctggaacacagccatgcttattcactttacagtccatagtgacaattagctgggtgtgatgttgcacacctgtggtcccagctagtagagaggctgaggtgggaggatcactagagcccagaaagtcgaggctgcagtgatcacacaaccatgatcacacaactgcactccagcctgggaaacagagccagaccctgtctcaagaaaataaatatatgtagtccacaaagcctaaaatatttactaattggttctttgcagaaaaagctggccaactcttggtttagtagatcaaagatctttgatgtattttaataaaagttttacccaatacactgaaatgtttatattaaatatagatccccatgtacaatcccttggcaatattcagactgagggtccaatatttcagcactcaggcactgacaacaaaaatttaataattagcaatcttgttgctaacaaggtacagtgtcaatgtagcatgtagcttccatttccaacacagcagatattacaagaattttaacaagaactcctaagatgtgtcattaaactaaatgctttaaatacattttaattgtgaaataatcagtataccctagatctaacctcatttttcaaaaacggttgcataatacattattttgggggtatggacattgagctatttcctattgataagggagtagactagctccaaatttttagtataataatgctataataaatgtccttatatgtaagtatgtatgtaacatatctacacaaatatcctttacatgtattatacatccttactccgttatatatctgtgtgtgtgtgaatatgctactaaattaatgttcaaaatgtatttaccaacagtgtatgaaatgtctttttcagtgaaaccatttcccttgcagcaacacagatggagctggaggccattatcctaagcaaactaatgcaggaacagaaaatcaaatgccacatattcttactcattagtgggaactaaacatgagaactcatggacacaaagaggagaataacagacactggggcctacttgagggtggagagtggcaggagggagacgaccaaaaaactaccattcgagtattttgcttattatgtggctgatgaaataatctgtacccaaacctccatgatacagtttacctatataataaacctgcacatgtaccctgaagctaaaataaaaggtcactgaaaagaaaagaaaatgccttttccctcacatttgccaatactggctatttttcaaataaattaatgactggaaaaaatggtaactcattgtttactgattttcatttttctgattaacaggcaaggctgaatatcctagtaaaagtataaaatttgttcatcatgaattagattcacagcatagagttatctcctgttcaatgttgccacagacttacctgtgatactgttcattctcagtgtcaggaaattgctggctttcaggtgttctgcttttccttggtggaattaatccatcatcaccattgtcagcagtggcaccgttagtcaggttttctgggaatcccatatgagtacttccgtgcttcttcatttcttcttcaaccttgaatgaaagtttgatattaaggatagttatccctttactgaatagaaagaatatttttaattgattttatcacttgaccagtttatcattattttagtcattaaaaacatttcactcttaaattggatcatatacacagaactattaccatataattttaagatgtacttatcatatcactaatatatcacagaaatttttgtaaagtttgcttcatttctgtttcaatgagtaaaacagaattttccaaaattcaaaaagggccctcctttattttgtgcttttattctcaatcactcttcagaatcttatatatgtatttacccccatttgactggtgggaacacataaataaaaagacaaagatgcaaaatgtgtcttcatccctctttaccacctagattttacattaaacagtcattttagaggatgagacaccatggggcttcaggaatagaatggaagatggcccttttctgcactaagatattcttctcccccactgcctttgagcattcttttttcattaggttcctaggatatcaaaaacacgaaggtgctcactgaaacatgggaaccaaagtttcccacaacataaggagcagagtgaaactgctgaggtacaatcatggaattccagaaaatgagttgctccccaaatttcacattcgatagccataaaattttctagctggaaaatacacagaataaaaaattatctactttagccacattttctattgataatcagactaaaaccaagaaagataaaattattgatccaaagc

SEQ ID NO: 678894 - DNA, 1170 bp, Homo sapiens
attagtaattgtgctgagggaaactgcttacatagacattgcagatcaaatatttggagttaaaatgttagtctacatagatggatgattgtaactttactgccattaaaaagatttcagattgcattcatgcttctgtgtacacataatgaaaaatggacaaataatgaagatctctccttcagtctgctctgtttaattctgctgtctgctcttctctaatgctgcatccctaattgtacacagtttagtgatatctaggagtataaagttgtcacccatcgataaaaatcacaaagttggtttaaaaaaaaagaaatagtcatagatgatggtataggtggagaggggttgctgggctttatgtaaagtgctattcaaagcttcacatataggtttcattcaaactttaagaagaaaaaaatgaacaatcagaaatgggtaagatgtggggatataaatagatattttgtacataagacttctgcatccccaaatattagcttgttgtggaattctgtcatctattcttgtttcagtcaaaacaagcaaaaaaaaaaaaaaacagtcagaacagtatgaacaacaatcatctagttccaccaaaaacttttcactcagcaagcaagcattgagtccctagctgaagatgcaaagaggagcaagaaatattctcttccattgagacggtcattgtctaaaggaaaatgtagataagcaaccagacattcagaatgacctgtgttacaagcaataataaagctgagcgctgggtactatggggcacttgggaaggctgcctaagccagagagcttcacagggagccttgatgtctgagtaagaattaaccaggtgaagcagaaggggaaataggctctaggaacagagagctttgagcgcaaaggcaggcagagtgtgaggagaggaggccttacttccttgtgactgcagcatgaaggtaaggggagggctgagagaaatgaggctccacaggtgctcctggatgtcctaattaattttgaattaacaaatcataagtatgactttttctctgtttttttttaaaaaaactttgttccttawttgcatgcaaaatgtatctgttgagataaaataatttcatacctatttctaattagttgctcaaataattgttatccttggagagc

SEQ ID NO: 678895 - DNA, 625 bp, Homo sapiens
gacagtatgtgataacaatgaaatacttcattctaggaatacatggtttatcgaataccaggaaacttattaatttaatttaactcaaaaagagaaaaactatataataatctgtatgtattttgaaaagtttaagacgatgtttagttttcatttccaatttcattaaatgaattcactagaataggaataaaatgattaaacaatatgtatttaatttgctagccaatgtcattcttaatggtgaaaagctaggaatactgctkgtaaagccagggctagaaataatgcctgcagtcacaactactacttaacattgttctgaggtcctagccttgtaagtaattagaaagaaaactaaaattaatgaagaaatatagatattaaaaagacagtcacaaaaattactataggattatataattgcatacctggaaaacagaagcagcttttttaaaaagctaaagtgtactatagttcagtaaggtgtccactgataaaaattatataaaaaggccaggcacagtggctcaagccttaatcccagcactttgggaggctgaggcaggcggatcacgaggtcaggaaatcgagatcattctggctaacagggtgaaacctcgtc

SEQ ID NO: 678896 - DNA, 625 bp, Homo sapiens
gacagtatgtgataacaatgaaatacttcattctaggaatacatggtttatcgaataccaggaaacttattaatttaatttaactcaaaaagagaaaaactatataataatctgtatgtattttgaaaagtttaagacgatgtttagttttcatttccaatttcattaaatgaattcactagaataggaataaaatgattaaacaatatgtatttaatttgctagccaatgtcattcttaatggtgaaaagctaggaatactgcttgtaaagccagggctagaaataatgcctgcagtcacaactactacttaacattgttctgaggtcctagccttgtaagtaattagaaagaaaactaaaattaatgaagaaatatagatattaaaaagacagtcacaaaaattactataggattatataattgcatacctggaaaacagaagcagcttttttaaaaagctaaagtgtactatagttcagtaaggtgtccactgataaaaattatatraaaaggccaggcacagtggctcaagccttaatcccagcactttgggaggctgaggcaggcggatcacgaggtcaggaaatcgagatcattctggctaacagggtgaaacctcgtc

SEQ ID NO: 678897 - DNA, 3008 bp, Homo sapiens
caaattaatcccaattcgtttacttttattttaagatgaaatgtaggccgagcatggtggctcacacctgtaatcccagcactttgggatgctgaggcgggcggatcatgaggtcaggagttcgagaccagcctggccaacatagggaaacctggtctctactaaaaatacaaaacaaactagccaggcatggtggcgggtgcctgtaatcccagctacttgggatgctgaggcaaggagaatcatttgaacctgggaggcggaagttgcagtgagccgaagtcgcaccactgcactccagcctgggtgacagtgcgagactccgtctaaaaaaaaaaaaaaaaaaaaaaaaaaaaaagatgaaatgtagcttagaaaccattcttccataaaaccaaaaccatatctctttaagaggatgttggaaaatcagcctttctcataaagtggtttcccccacaaatttaaacacattactccattataagtttagagagtattttaaaaaactattatgcttcagcttttcctgcacctttctctttcttgtctcttacttccttctctgtgatctggtccaacaattattgccatggcaacaaaggctctgtgacatctctagtaagctcattgtcttctgccgtattaaactttaatgggtagctggtagacaattaacactctgggagggctcaaaccacataaccaaatgtgccaagataatcctgagctcactcattgtcaggtaagacaaagtattttagcgcaatagcaaacaattaattaaacaaacaaaaacaggaagsctttcttgggccaggaagccattaattagctaagctcagagccactcattgaaactaggtcctgactgggtttctggatttgaccactgggcagaaactaggacccgaaaccaattagaatgaaatggtccccagatattgttttcatgtaaggataggtttggaagtatccagacttagtggtgggccaggcctcccctgtgagcagtacagttcaggacacctggactgccctttccctctgccttccctagggtaatgtgaatggcttagtctttcgtgttcccatctgtaacatggaggaggaagagaagagcctcattgcacatattgggtcattaagattgatcttagaaccataatttacaatattttgaagttaggtttgatttttaccattccactactcctctctcccaatatgttgtgccaaattgtaagtaatttgcaattagaacacattgaagacatatatttgagcggttagagagtctcacctacctttgaggtaactttttgtactttaggttttctcaattcagagtgttgagtccttaaatcagtgttgggtactgataaaattttgacacataaagttaattgcctaagcttagtaaatgggggacaggcttgcttatcaacagtctttgcggtgttttatgctgaaaaagccttgaggctcacactcagcccacagctctctgcattccctccacctcccttctatgtctttcatgtgtatcctttacagcaatttttttgtgtgtgagttcttttcctttttgagatctctcttaaggttaatggtgtacagtagatatccagaacttattcatcctttttagctgaaacattgtaccctttgacaaacgtctccccatatcccctgggcgcaattttcaataggtagttagggaaagcctcaatgaaaaggttgggattttgggatgctgataatattcagtttcttgaactaggtacctttacacaggagtatcagttgataacaattcattgagaaatatacttatgagcagagatatatttgactgtttggtgagacattctggagtttaagctgtcacttaaaccagttacaattttccatagggagctactctgtcacttgggtcttttcccaattaagcaaggctactttccatggaatcattatccagtatatgagattaacttggcacttgttcaatatgtgcttgctttataataggtgattgaatattttttattttatattttaaaaactgtatgtatttgtggcatacaagatgattttttgatatgtatacatggtgaaacgattaattcaaactaacatatttatcacttccacatactttcattttattgtatgagaacatttaaaatctcttctaaaaacttcaagtatacttttggccctatgtttccatgagttccacattcaggcatccaaccaactggatagaaactattaggacaaaaaacccacaaaaaatacaataaaagcagtaaaaataaaaaaaatacgttataacaactatttataaaacatttatattttattagtattataagtaatctatagatgatttaaagtgtatggaagaatatgcataggttacatgcaaatataaaattacatcattttatataagggacttgaacatcccaggatttcggtgtccttggggagtcctggaacaaatcaccccccagatattgcagatatttagggacaatggtataacacatgactattaactacagtcactatgttgtacagtagatctccaaaacttattcatcctgtttagctgaaacattgtaccttttgaccgatatctctcaattcccctgggtggaattttcaatagctagtcaggaaaggcctcactgaaaaggtgatatttggtcaaagatttgaagggagtgtgggggaaagaaacataaatatctgggaaaagagcattccaggcagaggagatggcatgtatacgggccacaaggcaggagcatgactgccatacttgagagaccgtaaggaatcttcatcttttcctcatgtctttctcacctctaatatatttaaatatggcttccccccaccacacccttaaaatggccattgcataaatcaccaataacatttgttttagtccattttacattgctataaaggaatacctgagactgagtaattta

SEQ ID NO: 678898 - DNA, 3210 bp, Homo sapiens
gatcttctgatttcatgatcctcctgcctcagcctcccaaagtgctgggattacaggtgtgagccaacgtgcctggcctggttaccagaattcttagttctgttagggtctgttgccaaggaagtgaggtcgcttctttaagtttccatcccctcggcctcctccttccagaaaactttctcagggccccagtgggctgctgactgctcaccctccccacaggtcaactccttacctgtacacagttatgtccacccaggacctgcttggacacctgcacctgatgttcaccagaggcctaggaatccacttgcagcctgggatcctacaggggcctaatgttaccctgcagattgggtagccacttggagatcaggtatcaacctggggactgtggttgacctgcaggctaatgtccacctggggactggttattcacctgaggcctgatgcgcacctggggccgaatgtccccctcagggtgaattccacctcaggcctgtatgtccacctggggcctgatgtctgccttagatctgtgtcccactggggccttgtgttcaccggggactggtatccagctgtggcctgatgatctactgcatcctgttgctcagctttggcctggtgtctacctggggcttggtgatcacctgggagctggatatcaacttggggcctgggtgtccacttaaggcctgatgtgtgcctggggcctgattgtccacccggggactgggtgtccacctggggtctgatgtccacctgaagttaggtatctacctaaggcttggtgtctacctgtggcctgatgtccacatgagtctggggttcagttggggcctgctgtacatctgggaccttggcgtctatctgaggcctgatggctacctggtgactgccatcctcctgaggcctgatatccacctgggaatggtttatccatggaaatggttatgaccgcctggggctgcatgtcgcccagcggctagatgtccacctgtggacccgtgtccacgtagtgcctgatgtccacctgggacatggttttcaccggagacccgggtgtttacatagggcctgatgtccagctggtgcctaggtgcccaccgggggccttgtgttaacctggggactggtatccagctgggtcctaatgaacacctgggttgaattattcacctagaatttggtattcatttagggcttgagtgtcagccttggacctggtgtccacctgggccttgggtatcaaactaggggtttggtgtccagttgagacatcatgtgcacctggggtctgagtgttcacatgaggccagatgaccactgggggcctgaatgtcaacctggtgtcaaattcactggaagcctaggtatccacctggggcctgatgtccacytgggaccaggtgtcaatgtgtggcctgatgtaaacctctagttcagtgtccatcttgggcctgatgtccactgggggactgatgtttacctttgatctgatgtccacctggaaaccgtgtattcacctatggcctgatggtcacctagggttgaatgtccaactgtggccagatgtgcacccggaacctgggcatccacctggggcctgatgtttagctggggcctggagttcacctgaggcatgatgtccacctgaagcttaatgttcatctgagtgctggatgttcacctggcgcctgatgtccacctggagcctgaggacccttctcaggcctgatgtccacaattggcctggtattcatctggggccttcgtgttaatgtggcctgatgtactcctgggttctagggtcctcttgggacctgatgtctaccaggatcctggtatccacctggggcctggtatccacctagggcttgatattcacctggggcctaggaatccacttgataactggtgcccatcagggtcctgatgttcaccttgggaacaggtaaccacctgaggcttgatgcccacttagggtataagtgtttatctggggtctagtgttcacatggggcctgatttcaaccttgggcctaggtattcaccagtggactagtgttcagctggggccagatgttcacttggggcctggtgtcaacttgaagcatggttgtcagcctgggacctgatgtccagtccagtgtctcccttgggcctattttctaactggggcctgtgtgtccacatagaccctggtgtcaatctggggcctgggtatttaccaggggcctggatattcattagtacattatgtctactggcgtctttgtgtcaatctgagctctgatgtccacctagagattgggtatccacctaaggcccggtgtttacatggggcctgtaacatgaggttccagatgaactcagatgtccacctgaggcctcatgtccacctgagttctgagtgttcacatagggcctgctgtcaacttgggacctaagtatttacctagggcttgggtgtccacctggggcctgacttccaactggatcttgtgtcaacatggggcctgatgtccactttgggcctaggtaacttcctgatgactaatgcccacatggctcctaaggaccatctgaggcctggtattaatttagagactggtatccatctggggtccaggtatccacttgggacctgatgttcacctggagtgtaggaattcacgtggggcctggtgtccaccttgagtgtgtgtatccaactgagtgctggtgtccacctggagtccagtgtatacctggggcctgatgtacatatgggacctgggcatccatctaggacctgatgttcagataagggctggcattctcctggcctggtgtccatatggagcctgggcatacacttggagcctgatgtcccaggtggatcgctgggccccagttgtcatcagatcctaggaaactctcaggccccaggtgcacataaagctccaagtggccacctaggccacaggttgatacacagggtccaggtggacactggttgcaagatgaacaccaggtctctggtggacaccaagccccaggtgtctacctagtcctcaagtggacaccaggcactagattgacacacaggtaccaggtggacatcaggccgcaggtgaatatcaggcctcaggtggttgggttacttatagcataggtggccatcaggtcccaggtctatatccactccccacctgaaaatcagga

SEQ ID NO: 678899 - DNA, 3210 bp, Homo sapiens
gatcttctgatttcatgatcctcctgcctcagcctcccaaagtgctgggattacaggtgtgagccaacgtgcctggcctggttaccagaattcttagttctgttagggtctgttgccaaggaagtgaggtcgcttctttaagtttccatcccctcggcctcctccttccagaaaactttctcagggccccagtgggctgctgactgctcaccctccccacaggtcaactccttacctgtacacagttatgtccacccaggacctgcttggacacctgcacctgatgttcaccagaggcctaggaatccacttgcagcctgggatcctacaggggcctaatgttaccctgcagattgggtagccacttggagatcaggtatcaacctggggactgtggttgacctgcaggctaatgtccacctggggactggttattcacctgaggcctgatgcgcacctggggccgaatgtccccctcagggtgaattccacctcaggcctgtatgtccacctggggcctgatgtctgccttagatctgtgtcccactggggccttgtgttcaccggggactggtatccagctgtggcctgatgatctactgcatcctgttgctcagctttggcctggtgtctacctggggcttggtgatcacctgggagctggatatcaacttggggcctgggtgtccacttaaggcctgatgtgtgcctggggcctgattgtccacccggggactgggtgtccacctggggtctgatgtccacctgaagttaggtatctacctaaggcttggtgtctacctgtggcctgatgtccacatgagtctggggttcagttggggcctgctgtacatctgggaccttggcgtctatctgaggcctgatggctacctggtgactgccatcctcctgaggcctgatatccacctgggaatggtttatccatggaaatggttatgaccgcctggggctgcatgtcgcccagcggctagatgtccacctgtggacccgtgtccacgtagtgcctgatgtccacctgggacatggttttcaccggagacccgggtgtttacatagggcctgatgtccagctggtgcctaggtgcccaccgggggccttgtgttaacctggggactggtatccagctgggtcctaatgaacacctgggttgaattattcacctagaatttggtattcatttagggcttgagtgtcagccttggacctggtgtccacctgggccttgggtatcaaactaggggtttggtgtccagttgagacatcatgtgcacctggggtctgagtgttcacatgaggccagatgaccactgggggcctgaatgtcaacctggtgtcaaattcactggaagcctaggtatccacctggggcctgatgtccacctgggaccaggtgtcaatgtgtggcctgatgtaaacctctagttcagtgtccatcttgggcctgatgtccactgggggactgatgtttacctttgatctgatgtccacctggaaaccgtgtattcacctatggcctgatggtcacctagggttgaatgtccaactgtggccagatgtgcacccggaacctgggcatccacctggggcctgatgtttagctggggcctggagttcacctgaggcatgatgtccacctgaagcttaatgttcatctgagtgctggatgttcacctggcgcctgatgtccacctggagcctgaggacccttctcaggcctgatgtccacaattggcctggtattcatctggggccttcgtgttaatgtggcctgatgtactcctgggttctagggtcctcttgggacctgatgtctaccaggatcctggtatccacctggggcctggtatccacctagggcttgatattcacctggggcctaggaatccacttgataactggtgcccatcagggtcctgatgttcaccttgggaacaggtaaccacctgaggcttgatgcccacttagggtataagtgtttatctggggtctagtgttcacatggggcctgatttcaaccttgggcctaggtattcaccagtggactagtgttcagctggggccagatgttcacttggggcctggtgtcaacttgaagcatggttgtcagcctgggacctgatgtccagtccagtgtctcccttgggcctattttctaactggggcctgtgtgtccacatagaccctggtgtcaatctggggcctgggtatttaccaggggcctggatattcattagtacattatgtctactggcgtctttgtgtcaatctgagctctgatgtccacctagagattgggtatccacctaaggcccggtgtttacatggggcctgtaacatgaggttccagatgaactcagatgtccacctgaggcctcatgtccacctgagttctgagtgttcacatagggcctgctgtcaacttgggacctaagtatttacctagggcytgggtgtccacctggggcctgacttccaactggatcttgtgtcaacatggggcctgatgtccactttgggcctaggtaacttcctgatgactaatgcccacatggctcctaaggaccatctgaggcctggtattaatttagagactggtatccatctggggtccaggtatccacttgggacctgatgttcacctggagtgtaggaattcacgtggggcctggtgtccaccttgagtgtgtgtatccaactgagtgctggtgtccacctggagtccagtgtatacctggggcctgatgtacatatgggacctgggcatccatctaggacctgatgttcagataagggctggcattctcctggcctggtgtccatatggagcctgggcatacacttggagcctgatgtcccaggtggatcgctgggccccagttgtcatcagatcctaggaaactctcaggccccaggtgcacataaagctccaagtggccacctaggccacaggttgatacacagggtccaggtggacactggttgcaagatgaacaccaggtctctggtggacaccaagccccaggtgtctacctagtcctcaagtggacaccaggcactagattgacacacaggtaccaggtggacatcaggccgcaggtgaatatcaggcctcaggtggttgggttacttatagcataggtggccatcaggtcccaggtctatatccactccccacctgaaaatcagga

SEQ ID NO: 678900 - DNA, 634 bp, Homo sapiens
tcgccctcctcagccggggcccgagcccggcgtgggggttgcaggctggcgccacagcctgaggacaccgcgacctctgcccccaggagcacgccgaatgcyaggtggggctgctgtcgcaggctgtggagccgcagccccgctggagggcagggtccggctgggcgtcggggtcctggcagagaccgcggtgagggcaggagcaggtgcactggccgctgcagacgcgccgccaggctcccggacaccgcgggcgcgcccctggtggcagccggctccggagccgcgggagggcggtgcccagtccccagctggcggcagcgcgaagctccttccccgcttgggggagtgggcgtggacctgcagccggagtgccttactaacgaaaaaagctgggattggagttgccacggggggaggtgtgggggcctagggggctctgcctggacattctgggtgtcctcctgcgacctcaggttcctcacctgtctcagaggactgatgggctgctgtggcagggttgtttggaggattaagccagatagtcccagtaaagccccattagcgccccctggcctctggattattattttttattatttttctggctttcttaggaaactttccggaatgc

SEQ ID NO: 678901 - DNA, 2533 bp, Homo sapiens
gggcactgcctcgctttgggacaactcggggccgcatcgacggtgaataaaatccttcctgtttgcagccctgaataatcagtgtcagagaccagttagaagggttcagtgtggaaaacgggaaatcaaaagcccctctgaatcctgcccaccgaggttctccccagccaaggcgaggtggccgcagtgcgagatacataccgcagcctcggaagacaaatgcagcattcctaatgcagacatgacacccccattgctcatgtaacaagcacctgtaatgctaatgcactgcctcaatataaaaatattaatataagatccgcaatcccctcactgccgtgcagtcctaagacagtgatcataataatcaacattgacatagtcaatacaaacgtagtaacaaacctagggttaggggttggggttaagtttagggttggggtgggggtcagagttagaggttgggagtcaacgtttagagttaggggttaagagaggttaggggttagggattaggggttagggttgggttagggtgagggttggggttagggtttagggttaggggttagggttaggggttaggggtcagggtcaggggtcaggggtcccactctgtgggttgtctatttactctgctgactgttccctttgccatgcaaaagctcgctctttagtttaattaagtcccagctatttatctttgtttttattgcatttgcatttggtttcttggtcatgaaatccttgcctatgccaatgtctagaagggtttatccagtgttatcttctagaatttttatagttcaggaattaggtttaagttattaatccatcttgagtagatttttgtataaggtgagagatgagaatccagttttattcccctatatgtggcttgccaattatcccaacatcatgtgttgaaaaggatgtcctttccccactttatgtttttgttcactttgttgaagatcagttggctgtaagtatttgggttaatttctgggttctctcatctgttccattggtctatgtgcctatttttaaacctgctgacrggagggtcccatggaagtctagccacccctcccaggttggtgctcacagcccctccctggcccactccctctacacctgaacctgctggtctctgggagaggagcatccatccatcttgtgtgcatagctttctgctccattttcatgagttttgtctccttggcagaaatgcccatttggtgatcctgagcctgtgctggctgttctctaagtgccaaagtcagtgagagggacttgaaaactcaagaattattaacattattttctgcattttatgctttcagggttgttttttccttaaaatgtgtaaaaacaaatattgaggtttctatcttttatataatttggattctgtcatcacatggacttttcattttcctaaaatttatttttatgtatgtatatcaaacattgaatttctcttttcttctttactggaattgttaactgtcttagaggccaaatcttttttaaaaaattctctctaatctctgtaaacatttctaaatacatatgtattttctatacctaatacactactttggaattccttgaggcctaattgcatcggggtgctctggttttgttgttgttatttctgaaatacattgactttggtgctctttattttgcgtatttaaaactattagatagtgtgattatatttgacaggtcttaattgatgcgctgttcagcgctttgagttcggttgagatttgggtcggagaattttcttccacaggggattgtcttggatttttctgtttctccctcaatatccaccgggaaaacatttcaattaatttatattcacttaaatatttctgtgcaaaaactgtgtacaaaagccccaaagtataatttgggcagttgagccgatattctgttgtccagcatttatggtggtttgtagtggaaaagactttttgaatatgtgaattttcaggatattaccagaagcccagatagccacactttacctttggaggaattaattctcagaatattgcacacaatcaattgcctttggaaggagcacatatccccagcaaaagctctggttttttgaagtctgtattgtgtgttatttccaggagaatacgcaatgatgaaaatgttattaaatgattcaaatatgaaatgctgttatgccaaacaatgaatctttgtgttatacattatgcctaactataaatctttgtgttatacattttaatgtcattggagagtactcctgtcttcttggcattattgataattagattctaattgctaataagtcagaaaaattaggaacaccaaattttagtcttctcaaaagcactgctcttattaaatttggatttttacctttatcacatcaaaagtaatattgttagaaaggtgtttaatgtttcccagatggatagattactgttattagttcttatttcattgttaatttttaaaaccataaagttggaagtatcaa

SEQ ID NO: 678902 - DNA, 2533 bp, Homo sapiens
gggcactgcctcgctttgggacaactcggggccgcatcgacggtgaataaaatccttcctgtttgcagccctgaataatcagtgtcagagaccagttagaagggttcagtgtggaaaacgggaaatcaaaagcccctctgaatcctgcccaccgaggttctccccagccaaggcgaggtggccgcagtgcgagatacataccgcagcctcggaagacaaatgcagcattcctaatgcagacatgacacccccattgctcatgtaacaagcacctgtaatgctaatgcactgcctcaatataaaaatattaatataagatccgcaatcccctcactgccgtgcagtcctaagacagtgatcataataatcaacattgacatagtcaatacaaacgtagtaacaaacctagggttaggggttggggttaagtttagggttggggtgggggtcagagttagaggttgggagtcaacgtttagagttaggggttaagagaggttaggggttagggattaggggttagggttgggttagggtgagggttggggttagggtttagggttaggggttagggttaggggttaggggtcagggtcaggggtcaggggtcccactctgtgggttgtctatttactctgctgactgttccctttgccatgcaaaagctcgctctttagtttaattaagtcccagctatttatctttgtttttattgcatttgcatttggtttcttggtcatgaaatccttgcctatgccaatgtctagaagggtttatccagtgttatcttctagaatttttatagttcaggaattaggtttaagttattaatccatcttgagtagatttttgtataaggtgagagatgagaatccagttttattcccctatatgtggcttgccaattatcccaacatcatgtgttgaaaaggatgtcctttccccactttatgtttttgttcactttgttgaagatcagttggctgtaagtatttgggttaatttctgggttctctcatctgttccattggtctatgtgcctatttttaaacctgctgacaggagggtcccatggaagtctagccacccctcccaggttggtgctcacagcccctccctggcccactccctctacacctgaacctgctggtctctgggagaggagcatccatccatcttgtgygcatagctttctgctccattttcatgagttttgtctccttggcagaaatgcccatttggtgatcctgagcctgtgctggctgttctctaagtgccaaagtcagtgagagggacttgaaaactcaagaattattaacattattttctgcattttatgctttcagggttgttttttccttaaaatgtgtaaaaacaaatattgaggtttctatcttttatataatttggattctgtcatcacatggacttttcattttcctaaaatttatttttatgtatgtatatcaaacattgaatttctcttttcttctttactggaattgttaactgtcttagaggccaaatcttttttaaaaaattctctctaatctctgtaaacatttctaaatacatatgtattttctatacctaatacactactttggaattccttgaggcctaattgcatcggggtgctctggttttgttgttgttatttctgaaatacattgactttggtgctctttattttgcgtatttaaaactattagatagtgtgattatatttgacaggtcttaattgatgcgctgttcagcgctttgagttcggttgagatttgggtcggagaattttcttccacaggggattgtcttggatttttctgtttctccctcaatatccaccgggaaaacatttcaattaatttatattcacttaaatatttctgtgcaaaaactgtgtacaaaagccccaaagtataatttgggcagttgagccgatattctgttgtccagcatttatggtggtttgtagtggaaaagactttttgaatatgtgaattttcaggatattaccagaagcccagatagccacactttacctttggaggaattaattctcagaatattgcacacaatcaattgcctttggaaggagcacatatccccagcaaaagctctggttttttgaagtctgtattgtgtgttatttccaggagaatacgcaatgatgaaaatgttattaaatgattcaaatatgaaatgctgttatgccaaacaatgaatctttgtgttatacattatgcctaactataaatctttgtgttatacattttaatgtcattggagagtactcctgtcttcttggcattattgataattagattctaattgctaataagtcagaaaaattaggaacaccaaattttagtcttctcaaaagcactgctcttattaaatttggatttttacctttatcacatcaaaagtaatattgttagaaaggtgtttaatgtttcccagatggatagattactgttattagttcttatttcattgttaatttttaaaaccataaagttggaagtatcaa

SEQ ID NO: 678903 - DNA, 1901 bp, Homo sapiens
atgggggaaaccaccccccatgatccagtcacttcccaccaggtgtctcccttaacacatggggattacaattcaagatgagatgtgggcacacaaagcctaaccatatctatcataaagacatagtcccaattgcctgatatctctgcttcctgacccctgtgtgagacaggctatgtttgtcccagaatggcctgtttctcttgatttgggagggcagtgtattaagcaacttaaatcctaggcacaattcacaatgccagctctcaataaatttgttactgtaatttgtttccagaaatgatatcagagcagaaacacaaagcaaaaggarccaaaagataggtaatgctgaatggttggaaagtatatttatgaaagagctatgcttcgcaaaagcatctttgctatgattcaagggagaaatcattaaacaccaactccatcatatccacataaatccagcaatctagagactgttggtcttttttcttttctgcattatgtttctgctctcagtaaagcaaggttttcattataatattgaagcattggaaatttaataccaagatattttcaaaactaagtgtttttttgttttgttttgttttttttttttgacagagtctctctctgtcacccaggctagagtgcagtggcttgatctcggcttgctgcaagctctgcttcccaggttcatgccattctcctgcctcagcctcctgagtagctgggactacaggcgcccgccaccacaactggttaattttttttttttttttttttgtatttttagaagagacgggatttcaccatgttagccaggatggtctcaacctcctggtctcgtgatctgcctgccttgacctcccaaagtgcggggattacaggcctgagccaccacgcccggccaaaactaagttttaattataataggaaaactaatgcgaggccagaaattgttgactttgttcacagaatactaattttccccagacaaaatatgcagagctatgtttcattaatatgcagagctatgttttattaccaaaacacactactgccaaatgcacaaaaggaaaaaagatatttgtaccctgtgctaaaacagattcatttgcggtatttaaatgacaaaactggaattatttcaacccggaaatcattgtttcaaatttccatggttaaaggtttgctcaagcaaatcttaaaacacaggtatgtatttcagaagatcaaccaaattcgagtttgcatcccattttgggtacattgtaaatagaaatttcaaaatcttcctcaaaaatatctgcatttgttttccagattcttgcaacccaaaacaaaacttcacagaaactctgcacaagagttggcagacagctaaaccttctccaaattgagttatggacaataaggtcttgattatagcagaattggaaggtctatttacaaacctgcacacagtgctgtgtaaattgggtgctggggcacattgattggcagggaaaggccagggaggcagttgaatccctggcatttttcaaagcttttttcctaggttcattattcctagaattttgaagcttattaagacattccctatcctatgtcatactctagagcactctagtcagaatcctgatagaatacactctttttttttgttttttaaagtgtacatttcagtgatttttaataattttttttatactttaagttctagggtacatgtgcacaacgtgaaggtttgttacatatgtatacatgggccatgtttgtgtgctgcacccattaactactcatttacattaggtatatctcctattgctatccctcccttcttcccccaccccacaacagggcctggtgtgtgatattccccttcctgtgtccaagtg

SEQ ID NO: 678904 - DNA, 1901 bp, Homo sapiens
atgggggaaaccaccccccatgatccagtcacttcccaccaggtgtctcccttaacacatggggattacaattcaagatgagatgtgggcacacaaagcctaaccatatctatcataaagacatagtcccaattgcctgatatctctgcttcctgacccctgtgtgagacaggctatgtttgtcccagaatggcctgtttctcttgatttgggagggcagtgtattaagcaacttaaatcctaggcacaattcacaatgccagctctcaataaatttgttactgtaatttgtttccagaaatgatatcagagcagaaacacaaagcaaaaggaaccaaaagataggtaatgctgaatggttggaaagtatatttatgaaagagctatgcttcgcaaaagcatctttgctatgattcaagggagaaatcattaaacaccaactccatcatatccacataaatccagyaatctagagactgttggtcttttttcttttctgcattatgtttctgctctcagtaaagcaaggttttcattataatattgaagcattggaaatttaataccaagatattttcaaaactaagtgtttttttgttttgttttgttttttttttttgacagagtctctctctgtcacccaggctagagtgcagtggcttgatctcggcttgctgcaagctctgcttcccaggttcatgccattctcctgcctcagcctcctgagtagctgggactacaggcgcccgccaccacaactggttaattttttttttttttttttttgtatttttagaagagacgggatttcaccatgttagccaggatggtctcaacctcctggtctcgtgatctgcctgccttgacctcccaaagtgcggggattacaggcctgagccaccacgcccggccaaaactaagttttaattataataggaaaactaatgcgaggccagaaattgttgactttgttcacagaatactaattttccccagacaaaatatgcagagctatgtttcattaatatgcagagctatgttttattaccaaaacacactactgccaaatgcacaaaaggaaaaaagatatttgtaccctgtgctaaaacagattcatttgcggtatttaaatgacaaaactggaattatttcaacccggaaatcattgtttcaaatttccatggttaaaggtttgctcaagcaaatcttaaaacacaggtatgtatttcagaagatcaaccaaattcgagtttgcatcccattttgggtacattgtaaatagaaatttcaaaatcttcctcaaaaatatctgcatttgttttccagattcttgcaacccaaaacaaaacttcacagaaactctgcacaagagttggcagacagctaaaccttctccaaattgagttatggacaataaggtcttgattatagcagaattggaaggtctatttacaaacctgcacacagtgctgtgtaaattgggtgctggggcacattgattggcagggaaaggccagggaggcagttgaatccctggcatttttcaaagcttttttcctaggttcattattcctagaattttgaagcttattaagacattccctatcctatgtcatactctagagcactctagtcagaatcctgatagaatacactctttttttttgttttttaaagtgtacatttcagtgatttttaataattttttttatactttaagttctagggtacatgtgcacaacgtgaaggtttgttacatatgtatacatgggccatgtttgtgtgctgcacccattaactactcatttacattaggtatatctcctattgctatccctcccttcttcccccaccccacaacagggcctggtgtgtgatattccccttcctgtgtccaagtg

SEQ ID NO: 678905 - DNA, 661 bp, Homo sapiens
cctggctaattttttttaatttttatttttgtagagatagggtctcactatgttgtccaggctagtcttgaactcctggactcaagcgatcttcctgtctcagcctcccaaagtgcaggaattataggcatgagccactttgccaggcaaggatttttttctttttaagttacatttctgcctgccaccacagcagctctttctcctgctctctctctctctctgtgctttaagatgatagtcccttcttttttttcaaataaccacaacrggaaggactgaccactcttgtaagctgcaactgatgttttcagactcctaaagtgacatctagacataagtccatatatgtcagaatatcatgcagggaatgctcaaatagttgggaagagattgctgcactgtgttttgcacgcccaaagcccacataggtactcagtttaaaaatcttaatagaattgaatcctgctcttatcataggaaaggaagagcatctgatagaaacacaaaatgaaaaggtcaagaactggctgggcacagtggctctcgcctgtaatcccagcactttgggaggctgaggcgggaggatcatgaggtcaggagttcgagaccagcctggtcaatatggtgaaaccccgtctctactaaaaatacaaaaaat

SEQ ID NO: 678906 - DNA, 624 bp, Homo sapiens
tggtggtgcatgcctgtaatcccagctacttcagggggctgagccaggagaatcactcgaacctgggagacggagattgcagtgagccgacatcgtgccactgcattccagcctaggcaacagagtgagactctgtctcgggggcaaaaaaaaaacaaaacaagtggccatttgccaagggttttgtttattttgaatttctaaatgccatgaatgcctaactgcagatcatcttttgggagaaaacgcaagcccccaccccacagtccgtaacctctggggccaacactggtgcacatcgcttgtccttccacaaaggacacctgtgttaggagtaagagcacaggaagtgaggaccctgggcaggaaggggtggcaacgacttctgggggattatttttttttaattaatttttttttaaatatgctgcccaggctggagtgcagtggctatttayaggcacgatgccactactgatcaacatgggagttttgacctgctttgttttcaacttaggcctgttcacccctctttaggcaacctggtggtcccctgctcctgggaggtcaccatattgatgcctaacttagtgtggacaactgaactgcatagcacattacagc

SEQ ID NO: 678907 - DNA, 587 bp, Homo sapiens
tgtcatcccagcacttttggaagccagggcaggaggatcacttgagcccaggagttcgagaccagcccaggcaagatagtgagaccctgtctctaccaaaggaaaaaaaaaaaaaaatagccgggcacggtggcacatgcctgtggtcccagctactccagaggctgaaactggaggattgcttaagccggggaggtcgaggctatggtgagccgtgatggtgcccctgcactccagcctgggcaacagaccgagaccgtgtccaaaaaaagaaacatcagtacttgatatgagaaatggccactaaacactggtaagcttgttaaaaacatggacccatgggcaccaaggagtctctgcgggcaggggccgtggggtgsgggcagctgcagattcacctcacccagacccacatgtccccagggtctaggaccatggtccccaaagagcagtgcacaagccagggccctgccagcgctgtccaggaaggaccagccgcagcctgctgtggccccaagctggtcccagaaggttccaggaaggaatctcatctattcaggcgcaaggcccccagaatgacaagaatg

SEQ ID NO: 678908 - DNA, 607 bp, Homo sapiens
tattgatccaggtagtaggatgccctttaagggcctgattcagaagttgtacatatcactgccactcacatcccattggttggctcttagtaacatagccctacctagaggtaggtgaggctgggaaatgtagtctttacgtgggtgtctgggaaaccaactaaaatctctattaattattagaagttttaaaaagataaatgtttcatgcatgtgtgagaaaacggcattctctaattgtcgaatgcagaattctatatatggtcgttagttcaagcttgtaatttgtgtggctgttttgtctgcctgacccatcaataatagagacctatcaataattgaaatctctctcgacggtagtggatttgtcaatttctccatgtatttctatccattttttgttttatatattttgaggttaattaggtgcattcatatttggcattgtcatgtatttagcattccccatrtatttctatcaattttttggttttttgtattttgaggtttgttcattagatgcattcatatttagctttgtcgtgtcttcttcgagaacgaacccttttctctgcatccagtgatcctctctagccctaaatatgct

SEQ ID NO: 678909 - DNA, 644 bp, Homo sapiens
tataattgctttagaaaatgttattttcagttagggattcattgaacaaacatttgttgagttcctataatataaaacattcttattatagagaatgagactaccttctgtcattctagccagccaccacactgtctatgaatgggcctcatcaccttctctcccttcccaaagagagggaagccagggatatatgtrtttctctttgtgtgtcacatgggtagtattatcccacaagaataaaacttatttcagagtaaacctcgttcttttatgaatgtctaaattgcactcaaggggtataaggctcaggaaagctgtaaagctgtcaaggccatctctaatcatgggaatgtgactaggactgggatttattgtcatttaccaatatttgccctcagctttggggactctaccaaatttgtgacttatgtgaaaagcacctgtaaaattattttacataaagataaaagaaagctcattatataagctcaataatgagaaagtgacatgagtaactacactcctatatgaaataccctggatattcacaaataaagaatcatggtgaatataaccatactgtcacagaataaatgattttctacagagcttttcttctagatcaggagttgaaaaatgat

SEQ ID NO: 678910 - DNA, 1206 bp, Homo sapiens
gcatatttcatctctgttatagaaaacacattgatctaagccatgggcccacatctataattaagccatagcccttgacacaaagtgttcgcattctagtgggtaagaaaaatgtatatggatagctgtgacactgtctgacaagtgcaataaatataatatttccaaagctcaatccaaacccttctcaaaatcattttttctttattttttctttatttctcaaaatcattttccttttatcacagggcagcattattaactcaagtcccatcactcacccaagactcaaatttcaggatcttgcttctccttcatgcttgcaatcaatccaatttcccttaaatgtgtaccacatctatctccatttatggtaccactgtttatattcagcaaccacctaagaattattgcactaaccagttgactggcttctgtatccttcatcttttttaactcctttatgtttttatacctgttaccacagtcataaaagtttttttctttaaaatctgtttttgtttcccaacatctaccagataaaacctaactccttaaggtgactgatgtgttagtgagagttcttcagggaaacagaatgaatggagtagttataaataaagagatttattatgagaggttaacttatgcctgtaaggargctgagaagctccatgatctgctctctgcaagttggagggacaggaaaatcagtggtatagttccagcccaagtccaaaggcctgacacctggggaaaaaaagatgtaagtccatgtccaagtcgaaaggccagagaaccaagagctccagaggataaaagaagagagatggtccagctcagcaaaggaagtgaatttgcctttcctctgcctgtttgttctattcaggccctcaacagattggatcatgcccacccatgctggggcaaaccatcttctttactcagtctatggattcaaatactaacatgcttccaggcacaccttcatcgacacacccagaaagtaatgttttaccatctttatgggcatctcttagacctgtcaagttgacaaataaaattaaccatcacatctgataaggcctataacccaaactaggtgcccacagcataagtgccagccaccgtgggcaactgggagttcccggaatgtgtcatgctctttcagggcccctccggaatgtgtcatgctctttcagggcc

SEQ ID NO: 678911 - DNA, 1206 bp, Homo sapiens
gcatatttcatctctgttatagaaaacacattgatctaagccatgggcccacatctataattaagccatagcccttgacacaaagtgttcgcattctagtgggtaagaaaaatgtatatggatagctgtgacactgtctgacaagtgcaataaatataatatttccaaagctcaatccaaacccttctcaaaatcattttttctttattttttctttatttctcaaaatcattttccttttatcacagggcagcattattaactcaagtcccatcactcacccaagactcaaatttcaggatcttgcttctccttcatgcttgcaatcaatccaatttcccttaaatgtgtaccacatctatctccatttatggtaccactgtttatattcagcaaccacctaagaattattgcactaaccagttgactggcttctgtatccttcatcttttttaactcctttatgtttttatacctgttaccacagtcataaaagtttttttctttaaaatctgtttttgtttcccaacatctaccagataaaacctaactccttaaggtgactgatgtgttagtgagagttcttcagggaaacagaatgaatggagtagttataaataaagagatttattatgagaggttaacttatgcctgtaaggaagctgagaagctccatgatctgctctctgcaagttggagggacaggaaaatcagtggtatagttccagcccaagtccaaaggcctgacaccyggggaaaaaaagatgtaagtccatgtccaagtcgaaaggccagagaaccaagagctccagaggataaaagaagagagatggtccagctcagcaaaggaagtgaatttgcctttcctctgcctgtttgttctattcaggccctcaacagattggatcatgcccacccatgctggggcaaaccatcttctttactcagtctatggattcaaatactaacatgcttccaggcacaccttcatcgacacacccagaaagtaatgttttaccatctttatgggcatctcttagacctgtcaagttgacaaataaaattaaccatcacatctgataaggcctataacccaaactaggtgcccacagcataagtgccagccaccgtgggcaactgggagttcccggaatgtgtcatgctctttcagggcccctccggaatgtgtcatgctctttcagggcc

SEQ ID NO: 678912 - DNA, 640 bp, Homo sapiens
ccatatgtcatctctatgatttgaagtggactatacttctcccttctattggtttaagaattacacacactgtatattcttctaccacgtaataacttagaaggatttattgaaaagttcaaaatatgctgtttttgtttttattccattgatgaaataaatgcatgaatgggagtaacagaatatattaacacatctagagaaaaatattgttgcttatccctgcatagctgctggtacatcacagatagcaacaacaaaaatccataaccagtactatgatttggatgtcttctccataactcatgttgaaatttaactgccattgtgatgatcttggcaagtggaacctctaagtggtgattaagtggcagagtcttcataaatcctgttatttcatgagtggtttagactcctgggaatgagttccccaggataccctttctctgtctcacaggctcctttgttctctctcatcatgtgatrtcttccaccatgttttcacacagcaaggggatccttatcagatgcaaaccctctatctggaatttccagactccatagctaagaactgataaaaatttctattgtctataatttgcccagtgtgtagtattctgttacagcaatagaaaatgga

SEQ ID NO: 678913 - DNA, 692 bp, Homo sapiens
tgaaatgtttaagtagattctcccaaccgtttcagggaacataatccaaaaaaaaaaaaaaaaagcaaagaaaatgactggtttaatgatttaaatgataagtggaacaatgagtaagtaatcatgtcactgcatatgttttaaatatttcactscatgcttttcttgcatgcatggcttctgacaaggagtctattgtaattcttgtcccagtttctctatagataaggtatttttcccctggctttttcttttctaaagatttcacatcatttttgtttatctgaagtatgaatatgatatgcctaggtataataatctttttgttttattctaaaatgctgcttggtgttctctgagcttcctgagtatgtggtttggtgtttatcattaaaatttgaaagttctccatcattactgcctcaaaaccttatttcttctccttttgacattcaagttaagagtatattatatgttttgaattgttccatagttttggatgtcctcttctgtgtttttgtgtttgttgttgttgtttttctgtttttttaatctttgcatttcagtttggggcgtttctattggcttagcttcaagttcactgattctgcgcttcaccatgactagtctactaatgagaccattaaaataattattcgtttatgttgcagtaatttttatttctagtttaa

SEQ ID NO: 678914 - DNA, 1209 bp, Homo sapiens
ctactaaaaatacaaaaattagccgggcatggtggcaggggcctgtagtcccagctactcaggaggccgaggcaagagaatcgcctgaacccaggaggcggaggttgcagtgagcccagatcgcacctctgcactccagcctgggtaacagcgaaagtctgtctcaaaaaaaaaaagatattaagttagaggtctcacttccaactggaataaggtacatgaattgtttcataaaagtgaactggacttcagcaggaatttctcacagggatgcttatataaatacctcaaataagatagtgaataattattctaatgagtatgaaagcccagacatttgtataccttcactaaggaaccagccttctgtatctgaaaagaacgacctcctccaccaaacatccagtttcatgaggcagaccccaaagagtgagaaaaggagatacctgtcattcctgcaggatcaattaaagcagctttagtaactagtaaaatgacagacattacaagcaatttcacctaacagtgtttttttggttacttttatattgatatttctaagggaaataggactacacacacacacacacacacacacacacacacacacacasacagtcaaaaaatatttctaggatgggcgtggtggctcacacctataatcccagcactttgggaggccgaggcaggtggatcacctgaggtcaggagttcgagaccagcctggccaacatggcgaaaccccgtctctactaaaaatacaaaaattagctgggcatggtggcacacgcctgtaatcccagctactcgggaggttgaggcaggagaatcgcttgaactcaggaggtggaggttacagtaagccaagatcacaccactgcactccagcctgggtgacagaacaagactctgtctcaaaaaaaaaacattatttctgatcacctaatatattacagtcagataacagataccctagaacaccagacaaatataactcccacgaatcttctttcacattaaaattattcctttctctctctttctccctccctgtctcaccagatgtcacaagcaaacttctgtcaaatgctgagttgcaaccaactcagtggtgagtgagtaaatgccagtcttctgtgttgtgagtagaagaaaacacacatgtcttaggccccagacatgcagatggcaggactgcaagtgctggga

SEQ ID NO: 678915 - DNA, 658 bp, Homo sapiens
tattaaacagagaaaaagagttggtcatcctcacaggattactgcacagaactaataccttaaaacatattgggaagcactttgggaaggaagggaatacataaatacaacagaactaagtaagattacaaccatattaaacacgctgaacagaagtagctacagggcataatacattaggccaattgttaactctaatactgtttaaatggtcagcaatttcacgatgtttctctagtgcgtgttaaaacaacaaaccactgcaccagctcatatgtgcaggctgagtgagctgcatggagctgtctgcatggtttacgtactcttgggcaacagtgtgtgatggtcattccctagagagtcacaggacagacacctaataaataaggctgtccccrgaaggcaagtgttttgcaaaataaataaaatctctctaggaaaacagcatgactcagaggaataggcagagaacaaaagaaggagaccacagtatctttaagatgaagcatcttgaaggtgtctcaacactcatagattctagattcagtgaaagacaccactctaggtcagcctcatgtcagcctcattctgaaggcaggaccattcatctttcctctccaaataccccctctctagggataaacacatattgtagagc

SEQ ID NO: 678916 - DNA, 658 bp, Homo sapiens
tattaaacagagaaaaagagttggtcatcctcacaggattactgcacagaactaataccttaaaacatattgggaagcactttgggaaggaagggaatacataaatacaacagaactaagtaagattacaaccatattaaacacgctgaacagaagtagctacagggcataatacattaggccaattgttaactctaatactgtttaaatggtcagcaatttcacgatgtttctctagtgcgtgttaaaacaacaaaccactgcaccagctcatatgtgcaggctgagtgagctgcatggagctgtctgcatggtttacgtactcttgggcaacagtgtgtgatggtcattccctagagagtcacaggacagacacctaataaataaggctgtccccggaaggcaagtgttttgcaaaataaataaaatctctctaggaaaacagcatgactcagaggaataggcagagaacaaaagaaggagaccacagtatctttaagatgaagcatcttgaaggtgtctcaacactcatagattctagattcagtgaaagayaccactctaggtcagcctcatgtcagcctcattctgaaggcaggaccattcatctttcctctccaaataccccctctctagggataaacacatattgtagagc

SEQ ID NO: 678917 - DNA, 604 bp, Homo sapiens
taattctagttttgcaggttaggctgcagaatttgattttattaagttcctggaattatttttgaacaagctggggttgtgatgccatttataagtgtaataccatttcaaaacaacactcaggtgtaagaaaaacaatatgaaacaggcagcctcattgtaagattccattcagtattgctaatcttttgtcaaagtctgcctactttacatatttgtggtgaaaagttatccttggcaaccaggatcattggtttgctatataaaaggagaccccggactgttctatttttatttttatataattttttctttttcttttttttatcagacaaaggttaaagcgtgacccagactgttctaacacctaaagattcagctgcttgaccctgagtttgcttttcgttcccaatgataataaggacacagatggcaagacacaacagcgaaagtgtawgggccgcagcatttgaataaaaaggtggaatgtgctttaggccatgtgcgtggtgtcttcccttcccagctctctcttcgtgtctttcaagagtctctttttggcaaggctgcccaacaaaaggaaatctgacattccttatgacac

SEQ ID NO: 678918 - DNA, 580 bp, Homo sapiens
ttttatgactgctatctccttgctttyactgttttttttttaagccacaccattctgaaattaaaagcatgcagttagccagatacagaaaaatctacaatgctttaaaagttgctaaaatcatgcctgtctttaacctacgatgataaaggtatagtggtttcctttaaaggaaagatattgacaaggtagggacaggaaggagccttccagaatggtgctacaccttaatctggatgatggttagatatatctaaacataagtaaaagattatcagtatgcagacttgagatttgtgcacttcaagttataccacaataaaaatttttatttctgcctgttaagtgtattcctgctcaaaattaggcaaatcaataccacatcaagttatagtagtaataacctatagattaataagttaataagaattaataaaattattgtattttacaagtcatgagatcagccaggcatggtggctgatgcctataatcacagtgctttgggaggccaaggcagggggatcacttgaggccaggagttggcgatcagcctgggcaacatagtgagaccttgtct

SEQ ID NO: 678919 - DNA, 580 bp, Homo sapiens
ttttatgactgctatctccttgcttttactgttttttttttaagccacaccattctgaaattaaaagcatgcagttagccagatacagaaaaatctacaatgctttaaaagttgctaaaatcatgcctgtctttaacctacgatgataaaggtatagtggtttcctttaaaggaaagatattgacaaggtagggacaggaaggagccttccrgaatggtgctacaccttaatctggatgatggttagatatatctaaacataagtaaaagattatcagtatgcagacttgagatttgtgcacttcaagttataccacaataaaaatttttatttctgcctgttaagtgtattcctgctcaaaattaggcaaatcaataccacatcaagttatagtagtaataacctatagattaataagttaataagaattaataaaattattgtattttacaagtcatgagatcagccaggcatggtggctgatgcctataatcacagtgctttgggaggccaaggcagggggatcacttgaggccaggagttggcgatcagcctgggcaacatagtgagaccttgtct

SEQ ID NO: 678920 - DNA, 646 bp, Homo sapiens
agagcaactccatcttaaataggagctgggtaaaatgaagctgaaacctaccagctgcattcccagatggttaagccattctaagtcactggatgaaataggaggtcagcacaaaatacaggtcataaagaccttgctgataaaacaggtttcagtgaaggagccggccaaaacccaccaaaaccaaaacggccatgagagtgacctctgatcgtcctcactgctacactcccaccagcaccatgacagtttacaaatgtcaggaagttaccctatgtggtctaaaaaggggaagcatgaataatccacccctagcttagcataycatcaagaaataaccataaaaatgagcaaccagctgccctccgagctgttctgtctaaggagtagccattcttttattctttcactttcataataaatttgctttcactttacaaaaaaaaaaaaatgataaaataaccacctattcaggaagttttgaagattttttttttttaagacggagttttgctcttgttgcccaggctagagtgcagtggcgtgatcttggctcactgcaacctccgcctcccgggttcaagcgattctcctgcctcagcctcctgggtagctgggattacaggcacccaccaccatgccaggc

SEQ ID NO: 678921 - DNA, 526 bp, Homo sapiens
cacctcagcctcccaaagtgctgggattacaggcrtgagccaccatgcccggcccccattcttttcccacctcttcaactagctggttttggctggtagagtagtaaaatatattttaatagaggtccattaaaagccaaaaatcttcaaacccttaggaattaggttaatggtaggatttgagaaaagataacaggtggtgaaaaggaaatctccccatcacagctcaactctcataaaagggactggggaaacgctcatggaagaatcatgtttttcactcgtcagtgaatagagcttagggagagtgagtttatcagaccttcccagtatgataactgagagctacttctgatggggggcaataggaaaaatgtgttctgaagttgggaagacaactgtgtggatgactctggtctgcctgggtagattgatggcactgggaaactgaacagagggaggatgatggtttgagtgaaggccaggtccccaaatggcactgaagacaaacttcacttagttcata

SEQ ID NO: 678922 - DNA, 606 bp, Homo sapiens
ggttcacaatatagacagccaataaataggctcaatagaaaaataaaatttgattaaaactaactctatccccagggaactggctttcttcaggacgtttctagtaagactaggacagaatatagctgaacaagctaacagatatctggcatactctcccaatcacatgtccttcttaaaattaaaaattgaatatgaaaatctagaaatrgattttctagaaacatgctgaaaaatgttacatgctgaagcattctacaagatttagtaacaattctacgtatgaagaattcaaagaaatctttatgattaacaatgagggagaatcatatttaagtaccatgcacaagttcactatccaatggaaaaagatagaatttgagttaaatctgtatcatgtatttttgaggatttccatgtaagacaggctacaagggtctggaagaactaaactatctcatacctctaacaaaatttaaattcgctagtgagattgtgaagtgaaagtaagtagcttgtcgtaatatttaaattaagcagaagaaaaacattatacattacaggtgataaatatctatgatttaaataacatcttatcttataaag

SEQ ID NO: 678923 - DNA, 606 bp, Homo sapiens
ggttcacaatatagacagccaataaataggctcaatagaaaaataaaatttgattaaaactaactctatccccagggaactggctttcttcaggacgtttctagtaagactaggacagaatatagctgaacaagctaacagatatctggcatactctcccaatcacatgtccttcttaaaattaaaaattgaatatgaaaatctagaaatagattttctagaaacatgctgaaaaatgttacatgctgaagcattctacaagatttagtaacaattctacgtatgaagaattcaaagaaatctttatgattaacaatgagggagaatcatatttaagtaccatgcacaagttcactatccaatggaaaaagatagaatttgagttaaatctgtatcatgtatttttgaggatttccatgtaagacaggctacaagggtctggaagaactaaactatctcatacctctaacaaaatttaaattcrctagtgagattgtgaagtgaaagtaagtagcttgtcgtaatatttaaattaagcagaagaaaaacattatacattacaggtgataaatatctatgatttaaataacatcttatcttataaag

SEQ ID NO: 678924 - DNA, 695 bp, Homo sapiens
tcaagcaatcaacctgcctcagcctctcaacatgctgggattacaagcatgagccaccacgccccaccaagagttttaatcattacattcatgctctacagagcacaaacatgctcatgcttttattctaatgctcatgtgccctttgtcactatcagtgttgccartctcatgtatgtatgagaaggaacagagaatgccttgccacagtgtatcgttaccaaatacaccactaacactcactgtgtataataatgttaaagcagttagctatttttttaaattctctatttcatctattttctgtttcttttccaggacatccataaaaattcatcagagagcattttactactgagctgcaaaggtaggaaaaataaattttttttggttagaaaatatacttctttcatctgcgtttcaataatttattccccttgttagatatacatggaattgatattgcttattctgactaagtgaaaagtgttatttctacttactgctcaattagaaacatgtagtgtttaattgtcagtttgaatttttctttcatactattacagtttatattttactataggcagaatttcctctttatcctaaattttgatattctccataatttcatcgtgccttgacattgctgtatataatttctatacatcaggaaggcaattctgtgtgcatgtgtg

SEQ ID NO: 678925 - DNA, 695 bp, Homo sapiens
tcaagcaatcaacctgcctcagcctctcaacatgctgggattacaagcatgagccaccacgccccaccaagagttttaatcattacattcatgctctacagagcacaaacatgctcatgcttttattctaatgctcatgtgccctttgtcactatcagtgttgccagtctcatgtatgtatgagaaggaacagagaatgccttgccacagtgtatcgttaccaaatacaccactaacactcactgtgtataataawgttaaagcagttagctatttttttaaattctctatttcatctattttctgtttcttttccaggacatccataaaaattcatcagagagcattttactactgagctgcaaaggtaggaaaaataaattttttttggttagaaaatatacttctttcatctgcgtttcaataatttattccccttgttagatatacatggaattgatattgcttattctgactaagtgaaaagtgttatttctacttactgctcaattagaaacatgtagtgtttaattgtcagtttgaatttttctttcatactattacagtttatattttactataggcagaatttcctctttatcctaaattttgatattctccataatttcatcgtgccttgacattgctgtatataatttctatacatcaggaaggcaattctgtgtgcatgtgtg

SEQ ID NO: 678926 - DNA, 695 bp, Homo sapiens
tcaagcaatcaacctgcctcagcctctcaacatgctgggattacaagcatgagccaccacgccccaccaagagttttaatcattacattcatgctctacagagcacaaacatgctcatgcttttattctaatgctcatgtgccctttgtcactatcagtgttgccagtctcatgtatgtatgagaaggaacagagaatgccttgccacagtgtatcgttaccaaatacaccactaacactcactgtgtataataatgttmaagcagttagctatttttttaaattctctatttcatctattttctgtttcttttccaggacatccataaaaattcatcagagagcattttactactgagctgcaaaggtaggaaaaataaattttttttggttagaaaatatacttctttcatctgcgtttcaataatttattccccttgttagatatacatggaattgatattgcttattctgactaagtgaaaagtgttatttctacttactgctcaattagaaacatgtagtgtttaattgtcagtttgaatttttctttcatactattacagtttatattttactataggcagaatttcctctttatcctaaattttgatattctccataatttcatcgtgccttgacattgctgtatataatttctatacatcaggaaggcaattctgtgtgcatgtgtg

SEQ ID NO: 678927 - DNA, 593 bp, Homo sapiens
aatatttcacatatggcrtgcagattatactgtttctttcaatgaaaacatttaggctgggcgcggtggctcatgcctgttatcccaggactttgggaggccgaggcgggtggatcgcgaggtcaggagatcaagaccatcctggctaacacggtgaaaccccatctctactaaaaacacaaaaaattagccgggcgcggtggcgggcgcctttagtcccagctactcgggaggctgaggcaggagaacggcgtgaacccgggaggcggagcttgcagtgagccgagatagcgccactgcactccagcctgggcgacacagcgagactccgtctcaaacaaacaaacaaacaaataaaaccaaaaacatttaaacattcattttgatcaaatgaaaactctctaaattaataagtcaatcagtagttaagaaacaaaaatcaataatgcttttgttagggtagtaataaatataaaatgcaacagagggaattgcactcactgtaaaaactaaaaaatactaggaaatgatgaaaactacatcgttagtatggtaaggaagctaaaacatttattaaaagaaaaatataattg

SEQ ID NO: 678928 - DNA, 3281 bp, Homo sapiens
aaaaaattataagacagttgactcaatttgaattttgggtaatgttattatttgtataaatatcttccaatacttgcttaaacacattacacataaatatgcaaatattgcttagctatactaaaatgttattcattgctcatcccaattttaaactttactgtgttccttatattttctttcagtaaatctgacacattcattttaaaagtatcataggatttacaataacatagtacagatgtgaggaaaaaagaataaaataaaaatccttagaggtcatatgggttggtaagagtataaaagaaaactgagtcccatatgatacattaaaaacataaatcaggatgtacatctcagctctcaccaggagacgtggcaaccagaatgtccttgggctgagggtgaagtccctgaccactctcagagacagacaatgcaaatcaagttcattctaactgtgcttgattaaccttcaaaattgtgtaagtccctaagcatatatataatcatgagtagttgtggggaaaataacaccattaaatgtaccaaaacaaaagaccgatcacaaacactgccgatgtttagatcagatgtgtgaagcaaagaaagagagtataataaaaaataatttaaagaaaatagagcttgataaatctgtttcttcatcttcataataatgtcaaatttgttgagattttttttaaatggcacgatttgtctacagatctttgtactctggcttaaattaaatgtatatacaacttatataataaaatactgggctgttttattattatattgacaatttcttagtcaccactactttgatcatattctataaatggcactgtgagacctatcactggttatcaacaacataaagtgtttatgacaatttcatgtgacagatgaaggaagtttggttagtgcagtggcaatagttggcaaccgagaaactgagctcacaattttagaaaagtattattctttctaactagatatttccatgaaaagaaccttgtgaaatgcagaaatgccaaaagaataattataagataataaccaaataactaaaatacatctcaatttctctgacaatctaacttaatgcagggtacagccagaatcatgatgtttacaaacatagacatttacgatctcgagacatttaattattagctggttgaggaaaacagtagtagaactgttattgcagagataaaagacagaaaacagtggaagggcttgatcacaagtcatatgttccagttttggaaacctctaaaaatcctgcctggtgataggtttttcttatctcattattgaagaatatatgagcaggcagggcacggtggctcaaacctgtaatcccagcactttgggaggccagtgttggaggatcacttgaggccaggagctcaagactagcctgggcaacataggaagaccctgtctctacaatttttttaaactagccgactgtggcggcatatgcctgtagtcccagccactagggaggatgaggtgggagaatggcttgaccttaggtgtttgaatctggagtgatctgtgattgtgccactgcactccagcaagaatgacagagctagatcctgcgtacaaatatacacatattgtatatattgtcaatgaccagtcacaggtcttacaatgctgtttatacaacatggtaaaaataatgttgacaaagaaattatcacaataataataataaaagccctgtgtgttattatttaacttgttcataaatttaatgtaaatgaggtagagtaataaagatctgtagacaaatcatgtcatttattttttttaatctcaacataatataactttttttttttttttaaaacagagtctcactctgtcacccaggctggaatgctgtggctagatctcggctcactgcaacctccaccaccctggttcaagcgattcctctgcctcagcctcccaagtaacggggattacaggttcctgccaccgtgcctggctaatttctgtatttttagtagagagggggtttcaccatcttgactaggctggtcttaaactcctgacctcgtgatccaccggctcggcctcccaaagtgctgggattacagaagtgagccaccgcgcccagccaacgtttcttttttaaagtgtgcaagctctttgaccatcatgtctctgtgcatcactgcaataagataaccagagcaactgtttccaccgtggagttgggaggagataaagacacatcctttgtgctttgggcgctcttatcaggatcagggaggcccctgccctctgattttctctctcttaaatgtacaaagtacagagatttttatcatgaataattttaagagaaattaaaaattctatattgttcaaggacatgcaggttttctattgatcatgtttcctcttgatattattaggccctggccagccgcaaatgaacaatctctatcatcaacattgtgttcctttgcgttttaacctttcctgattccattctctctaccttttattttgaagaagcatagacaccagaaaaccctatccctaccaaatgccaaaaaaaaaamccctaaaattgtaaatattaacatttacaagtcacatttgggaatatataatttaattagaaaattacaattttaaactttcagaggaagtggtagtaatataaaacagaggacatttttataataaggaactcttatattttgcaaattattattctctcatcaccaaatagtgctacctaaagtaatatacaaccaatttaataagtttagttttaaaaaacacaaaattacaaaacaattaatacaatatttgaaattatgatgcatattgccagcctcccttcaggtaaaattctattaactctacaaaaattttctaaatggcagatgttacatttccagaaagctttgtggtaaccaaaaaagaattgatttattagcaatttttatatcacactgagacaaaatattatttgtgataaatattgttatgtatttaaaacatctcatgtattaagaaatcatactttagatggggccaagctggcctattagaagcagctgtggcctgcggctctcacggagagcagtaaaaactgcgagtgaattctgcaccttcagttgaggtatccaggttcttgcattgggactgactaggcagacagctcgacccacagagagcgaggaaaacaagtggggcgatggcccacccaggtgtggcacggagctaggggcgccccc

SEQ ID NO: 678929 - DNA, 3281 bp, Homo sapiens
aaaaaattataagacagttgactcaatttgaattttgggtaatgttattatttgtataaatatcttccaatacttgcttaaacacattacacataaatatgcaaatattgcttagctatactaaaatgttattcattgctcatcccaattttaaactttactgtgttccttatattttctttcagtaaatctgacacattcattttaaaagtatcataggatttacaataacatagtacagatgtgaggaaaaaagaataaaataaaaatccttagaggtcatatgggttggtaagagtataaaagaaaactgagtcccatatgatacattaaaaacataaatcaggatgtacatctcagctctcaccaggagacgtggcaaccagaatgtccttgggctgagggtgaagtccctgaccactctcagagacagacaatgcaaatcaagttcattctaactgtgcttgattaaccttcaaaattgtgtaagtccctaagcatatatataatcatgagtagttgtggggaaaataacaccattaaatgtaccaaaacaaaagaccgatcacaaacactgccgatgtttagatcagatgtgtgaagcaaagaaagagagtataataaaaaataatttaaagaaaatagagcttgataaatctgtttcttcatcttcataataatgtcaaatttgttgagattttttttaaatggcacgatttgtctacagatctttgtactctggcttaaattaaatgtatatacaacttatataataaaatactgggctgttttattattatattgacaatttcttagtcaccactactttgatcatattctataaatggcactgtgagacctatcactggttatcaacaacataaagtgtttatgacaatttcatgtgacagatgaaggaagtttggttagtgcagtggcaatagttggcaaccgagaaactgagctcacaattttagaaaagtattattctttctaactagatatttccatgaaaagaaccttgtgaaatgcagaaatgccaaaagaataattataagataataaccaaataactaaaatacatctcaatttctctgacaatctaacttaatgcagggtacagccagaatcatgatgtttacaaacatagacatttacgatctcgagacatttaattattagctggttgaggaaaacagtagtagaactgttattgcagagataaaagacagaaaacagtggaagggcttgatcacaagtcatatgttccagttttggaaacctctaaaaatcctgcctggtgataggtttttcttatctcattattgaagaatatatgagcaggcagggcacggtggctcaaacctgtaatcccagcactttgggaggccagtgttggaggatcacttgaggccaggagctcaagactagcctgggcaacataggaagaccctgtctctacaatttttttaaactagccgactgtggcggcatatgcctgtagtcccagccactagggaggatgaggtgggagaatggcttgaccttaggtgtttgaatctggagtgatctgtgattgtgccactgcactccagcaagaatgacagagctagatcctgcgtacaaatatacacatattgtatatattgtcaatgaccagtcacaggtcttacaatgctgtttatacaacatggtaaaaataatgttgacaaagaaattatcacaataataataataaaagccctgtgtgttattatttaacttgttcataaatttaatgtaaatgaggtagagtaataaagatctgtagacaaatcatgtcatttattttttttaatctcaacataatataactttttttttttttttaaaacagagtctcactctgtcacccaggctggaatgctgtggctagatctcggctcactgcaacctccaccaccctggttcaagcgattcctctgcctcagcctcccaagtaacggggattacaggttcctgccaccgtgcctggctaatttctgtatttttagtagagagggggtttcaccatcttgactaggctggtcttaaactcctgacctcgtgatccaccggctcggcctcccaaagtgctgggattacagaagtgagccaccgcgcccagccaacgtttcttttttaaagtgtgcaagctctttgaccatcatgtctctgtgcatcactgcaataagataaccagagcaactgtttccaccgtggagttgggaggagataaagacacatcctttgtgctttgggcgctcttatcaggatcagggaggcccctgccctctgattttctctctcttaaatgtacaaagtacagagatttttatcatgaataattttaagagaaattaaaaattctatattgttcaaggacatgcaggttttctattgatcatgtttcctcttgatattattaggccctggccagccgcaaatgaacaatctctatcatcaacattgtgttcctttgcgttttaacctttcctgattccattctctctaccttttattttgaagaagcatagacaccagaaaaccctatccctaccaaatgccaaaaaaaaaaaccctaaaattgtaaatattaacatttacaagtcacatttgkgaatatataatttaattagaaaattacaattttaaactttcagaggaagtggtagtaatataaaacagaggacatttttataataaggaactcttatattttgcaaattattattctctcatcaccaaatagtgctacctaaagtaatatacaaccaatttaataagtttagttttaaaaaacacaaaattacaaaacaattaatacaatatttgaaattatgatgcatattgccagcctcccttcaggtaaaattctattaactctacaaaaattttctaaatggcagatgttacatttccagaaagctttgtggtaaccaaaaaagaattgatttattagcaatttttatatcacactgagacaaaatattatttgtgataaatattgttatgtatttaaaacatctcatgtattaagaaatcatactttagatggggccaagctggcctattagaagcagctgtggcctgcggctctcacggagagcagtaaaaactgcgagtgaattctgcaccttcagttgaggtatccaggttcttgcattgggactgactaggcagacagctcgacccacagagagcgaggaaaacaagtggggcgatggcccacccaggtgtggcacggagctaggggcgccccc

SEQ ID NO: 678930 - DNA, 585 bp, Homo sapiens
aggatcactggagccgaggacttcgaaaccagcctgggcaacatggtgaaaccacatctctacaaaaaatacaaaaactagctgggcatggtggcacacgcctatggtcccagctagttgagggctgaggtgggagaattgcttgagcccgggaggcagaggttgcagtgagtcaagatcatgccgctgccctccagcctgggtgacagagcgagaccctgtctccaaaaaaaaaaaaatgtagaaaagtagaaaaaattattaaaatatatagcaactatgcatgtgggtggtagaagggaaactagagcagaatggaggacctctatgtggggctgtggtaatagataaggtagctggcaatatgggacaagattacgagagcctgagtgccaggattaaaagactagtctcaattaggtggggttttctatcttcttaaaattactattcctcacaaagaagaaaaataatattgaaatgtccgtgtagacygggtgcagtggctcatgcctgcaatcccagcactttgggaagccaaggcgggtgaatcacttgaggtcaggagttcgagaccagcctggc

SEQ ID NO: 678931 - DNA, 887 bp, Homo sapiens
gaattcactagtgaagctatgtgagccagggctagactgatgaagagttttcattagtctaatctgtttacttgctgtatragtacgcatatattctctttcttcttgatttaattttacactttgtgtatagcagggaatctgtgtctaatttgtagtatttcatgcttctaggttttcatggcagttgagatgtaagaataacaataatgttgggagaaggaagttgtggacaatccatgaatatcccaacatctgttgtaggaaggttaagattactttttttttttttgctgtactgaactgaatactcttatttataatgtcagacaaatgtaatgttgtatataaatagaactaggaaaatgtgccatttgtcttagtatttaatcaagatggaagtctgggcctacctcctctcttttattaatatgtagacaggacaccaacacaaattagaatgaagacaaacaaaatgttagcaaatgaagaatggtatcaattggttaaaatgtgatgaaatagagtggtgaatatttacatagaatccatgatgtgttaggtgctatttcaagctatttgcacatatagttttaataccaatgacgttaaaatgtataacacaaagattcatataaataaaaattacaacattgtaaataatattaggtgacactaaaactgtcatagaaatacacatttatataaaacataaagtaacatgaagtattaaattttagaaactttgattactaatcagatgaacaactgattagcctttttatccagtaaaaaaggcatacatattattttcaaattccagagacaaatattttaaatattgaagttgaagacctaaaaatgtgtcactgacctcatggaagtag

SEQ ID NO: 678932 - DNA, 650 bp, Homo sapiens
agattaaaccctggaagggtctgattcattataaactagaactttcaagttattagattttgatagtagttttataacacatggttagttgggtgagaacaactaaggaacaagtaagacaattggctgttcaatttaacaaacactaattgaataacccacatacgtttggcattgacttagaaaacctctcccacctaaattggaagcagttctggtgctagattagagaatggagacttttcggtaacagtgactgctaaagcctaaaataagtggagacattgtggaatatagaaaataataacattaaacaggcattcaggtacacactctcaactcccatccttgmactaaagggaatacctagggggaaaatccagaaaaccagtcggtgacactcacctttgaagaaagccttatttcgtcttgtacagtgatggtacttcaacattacaaggaaaacagcctggcatatgaaaatttgacattatcatggcacagacctctcatatacttgattgagcttctcaaacaaacttttaaaactgcagtaacttatttgtattactttattaaactgcttcaattattttatagctaagctagtgaaagtttgcatttctgaatttcagcatccaattcctcca

SEQ ID NO: 678933 - DNA, 607 bp, Homo sapiens
ctgttgggaatattccaattctactttactagttattttgaaatgtgccataaattattgttaactataatcaccttattgtgctaccaaacactagatcttattccttctaactctacctctgtacgcattaaccaactcttcattatcccsccttctccagcaactcttcatcagcactcccatgcttattgcagcactattcacaatagcccagatgtggatgcagcataagtgtccatccacagatgaatggataaagaaaccgtgatatatatatacacaatggaatacaattgagccataaaaaaatgaaattttttcatttgcaatagcatggatggagctggaggatattatgttaaatgaaatatgccaggcacagaaagacaaatatttcatcttctcactcgtgtgcttaaaaaattgatctcttggaggtggaaaatagaatggtggttgtaattattattcttttaaatactagtgtaactgatgtgctacctgagcactggcttcccagacggataatgttgtcgaacagggagtgtcatgaagtgccttcaaaggctttgtacatcatgagcttcccttgtgagactgggct

SEQ ID NO: 678934 - DNA, 603 bp, Homo sapiens
ggcctgctgccgtagggcctgcctgcaaacgcactgtcaccaccccccgccgctgcagccccccaggagttacgcttttgcagaagacccagctgcctaagtaaaattaaacaccctcaagctgtttgaggctcttaaaaacattttctcagcactgaacttctctgaagayctgagactattagcacaaaaccaagagttctctctaaactgcttttctctttcccctgaatgcaaatgaacttcccctgctggtttccattcatctgacaggtcataattgtgacgttggtaaaatagagaaagttcccttttgaaaattgagctatgagaactttttttgttaaaaaaaaaaaaatagaatatttgcttattttaaaaatagagtgacacagtgataatggtgtcatcatttaaactctaccctataaactctagtttggacatgtcttggcttattggaaataatgaaagtattaacgctgtggattttttgttatagtgggtgtcactgttaggaattgtgagtcacagacatctggtcatcgtgccttcaacccacaagcagttattgcctcacattagaaacaagtttggccgggc

SEQ ID NO: 678935 - DNA, 1652 bp, Homo sapiens
ctctcttgcccaggccggagcacagtggcaggatcgtaactcactgcaacctcaaattcctgggctcaaacagtcctcccaccccagcctcccaagtagctaggattacaggtgcacaccaccaagcacagctaatttcagttttgttgtttgtttctttgctcgctttttgtagagccgggggggtctcactaggttgcccaggctggtcttgaactcctggcctcaagcaatcctcccaccttggcctccctaagattacaggtgtgaacccctgtgctcggccactattttgaaacatccaaatccgtactagaaggcaagtaatggcaacagttattaaatctagtttctttgcgtctaagtttaaatatttcacacatccaaggaggatttgacctcaggaaattccccattgccccgttggtacaaactgagtttgctgtttcctgctttgctgctgtgaggaggstcagacagtggtcatagcttctgatcctgtacttgtggcatacttggagccagctcagattggaattttccatttaattgctaccaatcactggaacatctgaagtgatcagaagctgccatttgtggaaaattttagtgttgagtagttcagattaagaactgttagttttcaccaaaatatagaggttggcctctgaattccatgaaaattaccaaccttaaaacctgtactgtattatatgcttaaaaatgtggtaagagggtagctctcatgttaagtatttttaccacaataaaatgcaaatcaaacaaaaaccctggcccctcatacactgtgtgggcagttctgcactgcagtgcctgctacacagccagtctgtgccctccgcagtgtctgtgagcggtgtttggtgtctcatgcacctgatgggcttagaattgctgtgtggcatttgcctttgtcactcatggtggttaaacagcaagtgtggtgagaaccctgtagaagcggtggcccctccatcaggctgctgaggacccagcaggttgaggcaccctgcctctcccatcgccggttctccttggctggaacccttgcagagggagaccagcagatggtgaaagaagtatcagagcaagagacaggaggaaagtgttctggggtttacagtggcgttgtcagtaaggcacaaggctaagtgcttgcacatatcattcctgaaggaggtgggtcggccagtgtcagcagagggaacgcagaaggagaaggcccgtcaacaggagaggctgcccgaggaccctgggtgcatccagggctgcttcaggactgagctaggcaagtggagagaatggtgagtgacagtgtccagatccacgtgtgctttccctgaatccttcagacaaggaaagccagaggaaaggaggaagggcaggagagggtgtgggggaagcaaggcaagaagccaaatgattttgaaccatttattctccctaggtccttctgggttttcacattttgttacaaaggctataataaacaccgcccccactgcagagtgcttcattaaaacaactgtataactaaagtaatgaagtagaagaaacagatgtaatttatttatttttaattttatttttttgagatggaggttttttttttttttttttttttttttttt

SEQ ID NO: 678936 - DNA, 954 bp, Homo sapiens
tatccatccagtggaacactaccatggagctataaaactaccctctaggcactaagaagaggctcccttttttatgagtgggttgaaattcacaggatatactgttatgtgaaaaaaattccagggagcacagtacatacagcatgctacttattgtgttaaaaaacggtgaggrtaagaaaatctactaagtttgcttgcttatgcctaaagaaactcaaggatacatgagacttttgtaccatgtgaactggctacctattcaaaaatcaaattaaaaaggcaaaacaaaatgctaagatagttgtgttttatgttttgctttaccagaggatctgtaagatgtggtttcttttgttatctcattgcttgatctggagaaatcataaggaaatatgacctttctttgatcccaatggtaagtggccacggggatctatccttgcagagtgagaatgggagacctcctccccagcacactgagccctcctccacactccgctctgtaactacagaccccactcttcctctgcaggaaggctgtgacctcggccttggcttggtttttgctgttctagaggcacgtgacagctcaaggaaggtcgatctgtatctgacaagagatgtctgtgggctcctcaacaatatgagatgttacaactttctatccaggtgtcttaatttgggctacaacaaaatactatagattggtggcttcaacaccacctgaggaagccctgtgaggagaggctgtgatgatgggagggaagttcttgcatcctcacgtggcctttcctaggtgtgtgtgtggaaggagaaagagctcttatgtttcttccttttcttacaagggcataatcgtgtctgggggcttcaccctcatggccacatctgaacctaaatgcctcctgaaggccccacttcctactaccctcattggggattagggcttca

SEQ ID NO: 678937 - DNA, 954 bp, Homo sapiens
tatccatccagtggaacactaccatggagctataaaactaccctctaggcactaagaagaggctcccttttttatgagtgggttgaaattcacaggatatactgttatgtgaaaaaaattccagggagcacagtacatacagcatgctacttattgtgttaaaaaacggtgagggtaagaaaatctactaagtttgcttgcttatgcctaaagaaactcaaggatacatgagacttttgtaccatgtgaactggctacctattcaaaaatcaaattaaaaaggcaaaasaaaatgctaagatagttgtgttttatgttttgctttaccagaggatctgtaagatgtggtttcttttgttatctcattgcttgatctggagaaatcataaggaaatatgacctttctttgatcccaatggtaagtggccacggggatctatccttgcagagtgagaatgggagacctcctccccagcacactgagccctcctccacactccgctctgtaactacagaccccactcttcctctgcaggaaggctgtgacctcggccttggcttggtttttgctgttctagaggcacgtgacagctcaaggaaggtcgatctgtatctgacaagagatgtctgtgggctcctcaacaatatgagatgttacaactttctatccaggtgtcttaatttgggctacaacaaaatactatagattggtggcttcaacaccacctgaggaagccctgtgaggagaggctgtgatgatgggagggaagttcttgcatcctcacgtggcctttcctaggtgtgtgtgtggaaggagaaagagctcttatgtttcttccttttcttacaagggcataatcgtgtctgggggcttcaccctcatggccacatctgaacctaaatgcctcctgaaggccccacttcctactaccctcattggggattagggcttca

SEQ ID NO: 678938 - DNA, 652 bp, Homo sapiens
ttagctcaaatactttctgaagagactatgtcagaacagtacttccccaatatttggctaaatccaaagctttcaaaagtggttttatcatacctagcctgtccacttcagtcttctttttttcaatgtgaatagatttatacagaatcatgcatctcttaaacacacacacacatgcatgcgtacgtgcatgcacataagcaccagtaagagtctgagtgtgcaagaaggcaggcaaaagttggggatgccatctccttaatgtagctatttctctgcaaagaaccaagtgagcacagtgttgcaacttggtcacagtagattctcagaacccagattctraggttcaaaatggtgcagataagtcacatgatttgcctcatagaatcaggaattgttccattctagcaatgctctggggttccatttgattttgccttccttactaccagagagacaaaaaaggaactaggaggaaattagaaataggtgaatgattgaatgaccagagagactgattcatgaatgaagactgagggaaacagaacatctctcgacatcagcaaatactgatgactataacagctcactgtggaggggtctgtggtagctgtctacagatgctggacagataagtaagccttaggaagag

SEQ ID NO: 678939 - DNA, 667 bp, Homo sapiens
gagtagaatgaaggtgtggcttgctcaagtttaagtccagattgattcaataactggaggaatrgctgataaaaaaaaataggggcagaagggtgggtaatgggggtagcagtgactattaaactagatatgtgtctgttacgttggtagccaggtgaggcacaactagacaagatggatttctttctgggagtgctgtgccaagcatagaagtgatgaaaagttcttcctcaggaaaacaatgttccttcatattagagacagagcttgaagactggtgtgaatgagaaagtatgatgtaggaaagagggaggaatgagaaaggattggaagagaaaatgggagagtctgttgacagtgggagaaatcagtggacactggagcccctgtggctgaagattctgaagaagacaaaagagaatgtgaaggaagtcagtgtggaaactgagacctggaacagcttctccaacacctctgtgtgtgttttgctgaatttgcatgtgggacactttatgtaaacattttctttatatgcggaaagaagataagggtgtctacctgtccgagctgtggtaagggctgactgagataatgcatctgcagtgctctgcgtatagtaagcattcaataaatagtagttactattataagctgtgtttaaaagggg

SEQ ID NO: 678940 - DNA, 667 bp, Homo sapiens
gagtagaatgaaggtgtggcttgctcaagtttaagtccagattgattcaataactggaggaatagctgataaaaaaaaataggggcagaagggtgggtaatgggggtagcagtgactattaaactagatatgtgtctgttacgttggtagccaggtgaggcacaactagacaagatggatttctttctgggagtgctgtgccaagcatagaagtgatgaaaagttcttcctcaggaaaacaatgttccttcatattagagacagagcttgaagactggtgtgaatgagaaagtatgatgtaggaaagagggaggaatgagaaaggattggaagagaaaatgggagagtctgttgacagtgggagaaatcagtggacactggagcccctgtggctgaagattctgaagaagacaaaagagaatgtgaaggaagtcagtgtggaaactgagacctggaacagcttctccaacacctctgtgtgtgttttgctgaatttgcatgtgggacactttatgtaaacattttctttatatgcggaaagaagataagggtgtctacctgtccgagctgtggtaagggctgactgagataatgcatctgcagtgctctrcgtatagtaagcattcaataaatagtagttactattataagctgtgtttaaaagggg

SEQ ID NO: 678941 - DNA, 2000 bp, Homo sapiens
agattatataaatttataatgataacactgcatatcccaaatctgatctaaaacttccacaatgattataacacatatgattattatagacatattataatacatatgcatagttattatgtaatatatgaaatgagaattaacaaatatcttctcagaacttggagttatgaagaaaatgatattagagaatgcattctctttccattgttagtgaatatctaaattgatattgagatattcttctccaccattcaaacaacttgttttatcaggcagatgcataaaaataattgcaggaacccttgtacttccatctgagaagatgtcttctattggagaaacaaccaatgcaaatttagtgcttataaggatggtaatgatgctggtatttctactgagaaatttgccacctcagtctctttgcagtatcagataaaaggccaccaagaaacgagacagctctatcaggcaattccattttacagaaaaccataaaaacaattatctatgtcattagagactctttaaaaagagcttcaaaacatccaatttgctgttccaggcctgagacataatcctgactgtccatgctaaagagtaataacatccaattgagaacagttattatcagacatcctaaaatcagtgaaatcaaatacagatggagccaaagaggagaagcgcctgtatttcttggtcaaacttaattcacgtggatcatcactgaggtagttcacaagaaatgattatggagggtccagatgtccccacaccttcacttattagaaaatatctaagttgacatcttctttaccactcaatcaacttccctttatcaacgagacacattcaaatcattgcactgatctgagtgcctcctccaagaacaagtttccactgacatcaggaagaaaggactgtaactgamtataaatttaaaaatgaagagagaccattcgatttcaccaatacctactgagtacctggagctaaagaaaaatctctgccctcctaacatgtagacagattctccccagatctctgccctaccaaaatgcatacagattctctgactggagaaaaattcaattttcaattaaaaaaatagaaataagccagcaatggaagctttcttgtgaatgagaaattcttcaaaactaagttataaatgatgttgccaatagaaaaccaccaatatctatctttatacttcagaataatttcctacagtggtccaaatgaaaaattatcattcgtgtttctttaattagcatgcacacctaatcaaactctcgcttatctacttggtgcttaactgaagagctcagaattaaaaaccaactgcactttgattttcccagcactgaatagagacagtgaaaatgagaggagtacgaattattttccaaattacaagacaatagaatattcattggttaaaaaaaaaaaaaaactgtttaccttagactgtgctaaaattgaaagggaacaaaggggcaggccagatggtatatcagggaaagtattaacaacgtggaagtgttcattcttaagggggagaaattatcccaaaaagcataaagaatcccaagtccaagttaattgaaaatgaccaaaacacaaccatcaccctgagcagcatgactctcattgctcggtggggtaaggtcttagtccagcacacactgattctctcgtatcccaagaagctcctgcagtcagcacaggcaagctcttctcatcacggagtctcacattttgaagttatatttacaatttaaagttaaatcaatcttaataaaaccatacctgctaaataaaatgttaaagactgagctgcaattttccctcataaattcgtgggattttttcacattatattttaaacgactctttcatttgaggatttactgagcacctacagaagtgctgagcagtgttctaaaagttgggtctatggcagtgaacaaaatggataaaaatcctgttgccatgaa

SEQ ID NO: 678942 - DNA, 456 bp, Homo sapiens
gtctcatttttctgctaggtcaacattctggatgcttggagggcctctggcactgtgttttgtgaacctgtgaayactctgtgagtgaactgcattctaagctgaaaatggtcagggcatggtgtggccatgtccccagccggctccacgttggggtgggccacagagacacacactcaaccattattcaattcattggtaggaatttagctacatttgtttctctaaaattaaatgcagttagcttgagagttttagtaaatgttaagtatgtataattaatagcaaatattttgctcagaggttcccaacagatcatttgtgattgatcagctgattctgaaagttagtcaagtaaaagacttagtagccacatttgcctagataagaccctcaaactcacaatcacagagacacacacacatacacagacatgtacacacacacacatacacg

SEQ ID NO: 678943 - DNA, 641 bp, Homo sapiens
ggaaacactggggcaaacagatcatcacccgctttctgctctccactctataagcagctcctcctttctctctctcataataccagggcttaagaaagaggtgttctgttacttaaagaagttgaaatagcattgttttaatctatctaataccaagaagacatgaaagcttattgtagaatatttaaacagggaaacctgctcatgacctgttactaaattttaaatgtggtaacaaagaagtatgaacattataagccctttttgtaaatatactcagacacaaaaagaaaaagatgaatgaatgtttaacaaataatattgagagctgaatactaggggstacagataatttttattttattatttttgcttctcagcatattttggttttgttttaaaatgattctagattaacagaaaattgtaaaaatagtgtgaagaggtcctactttcctttcacccaattcctccaatggtaacatcaatagtaacacaatcatagcacaatatccaaagcaaaaaattagcattcatacaaatcacagattttattcagtcctcccatttcacatgcacttatgtgtgtgtgtttatgtgtgtgtgcatgcatgtgcacatagttctatgcaatgttatct

SEQ ID NO: 678944 - DNA, 641 bp, Homo sapiens
ggaaacactggggcaaacagatcatcacccgctttctgctctccactctataagcagctcctcctttctctctctcataataccagggcttaagaaagaggtgttctgttacttaaagaagttgaaatagcattgttttaatctatctaataccaagaagacatgaaagcttattgtagaatatttaaacagggaaacctgctcatgacctgttactaaattttaaatgtggtaacaaagaagtatgaacattataagccctttttgtaaatatactcagacacaaaaagaaaaagatgaatgaatgtttaacaaataatattgagagctgaatactagggggtacagataatttttattttattatttttgcttctcagcatattttggttttgttttaaaatgattctagattaacagaaaattgtaaaaatagtgtgaagaggtcctactttcctttcacccarttcctccaatggtaacatcaatagtaacacaatcatagcacaatatccaaagcaaaaaattagcattcatacaaatcacagattttattcagtcctcccatttcacatgcacttatgtgtgtgtgtttatgtgtgtgtgcatgcatgtgcacatagttctatgcaatgttatct

SEQ ID NO: 678945 - DNA, 1732 bp, Homo sapiens
aatgagccatgatcataaggtgcttatacttaattttacatttcttttatttgagtagcaatgtgataaaaaatatatttaaaatcaatgctgagagtgtccctttgttttgtgaaagtgtctgaattttccaactcaggttggagaagtattgctcaagcctggtctcatggtgctggattttgggctcaatttgggcacacccatttatctgtttgatatcctcttcttagtttccaactcctgatagtcttttgtatcctgttacgccatccagtagattgctttccttccagcctcatggctttggtaaagtttgaaaagcatgctgccagtcaacggttcttagtcggaagcaacaaagccaactctggctgctataagcagagaagaaattgattgcaaatattttgagtggttcattggtgcactggaaaggtcacagaactttgggtggaacagggagaaggtagcctgagcagcagaagggatggcatcacaaaccactckacagagcccagctgcagaggatgttgctgctcctggcgcctggatggcattgcctgctcagtgtctggccctggaccatggacatagatgctacagtggtgccagtggtgacctggaaacccagagcttctgccaccagaaggaatttgtctcagtcactattctgagttcctatcctctgttcaaagtgggtggagggcggtgagcctgagtggttgtgtcacctatccacactccagctgcacggaggcctgggacccaaatatctggcactttttttttttgagatggaatgtcactctgttgccaggctggagtgcagtggcacgatctcagctcactgcaacctccgactccctggttcaagcgattctcctgcctcagcctcccgagcatctgggattacaggcacgcaccaccatgcccagctaatttttgtatttttagtagagacggggtttcatcaacgtcacaatctcctcacgttgtgatctgccccccttggcctcccaaagtgttgggattacaggcgtgagccaccgcgcccaaccagtgtctgacactttcagaatctatttttggaggtaagctctgcttcccatcagggcttattatgtaagcaattctccaaacacaagaagaaggttcagatgagagaggtcggggggagaattgatactctccatgccttttatgtctttatctgagtaattgtttaacatgtcaaataggaactcaggatggggacagctaggagctggcaggaagccttcctcctgtcactctgcccatctggatggctggcgagacaagtccacgtggtggaaccaggcagcatctgaagtttgcccctgctttctgcctcatccacaagtcatatttcctcccaaaacccacattcatgaagggaagaggagggaggagacaggaggagaatcatgttaattcttgttttgtttgtgttctttcatctggctagatgcattttcagaaccatgtaaatcaatggatttttttcattactgcaataaaatttgcctttgtacccaactccccaaggaatcggaacataaacagagcttccacaattcacacttcacctcactcaggcgcgatgtctttgttagactctctttgatcatttcacttttgatctgcctgtttgcttggaaagagctattcaaatctgcagagggcccttctacagcaaaccctccgagga

SEQ ID NO: 678946 - DNA, 1732 bp, Homo sapiens
aatgagccatgatcataaggtgcttatacttaattttacatttcttttatttgagtagcaatgtgataaaaaatatatttaaaatcaatgctgagagtgtccctttgttttgtgaaagtgtctgaattttccaactcaggttggagaagtattgctcaagcctggtctcatggtgctggattttgggctcaatttgggcacacccatttatctgtttgatatcctcttcttagtttccaactcctgatagtcttttgtatcctgttacgccatccagtagattgctttccttccagcctcatggctttggtaaagtttgaaaagcatgctgccagtcaacggttcttagtcggaagcaacaaagccaactctggctgctataagcagagaagaaattgattgcaaatattttgagtggttcattggtgcactggaaaggtcacagaactttgggtggaacagggagaaggtagcctgagcagcagaagggatggcatcacaaaccactcgacagagcccagctgcagaggatgttgctgctcctggcgcctggatggcattgcctgctcagtgtctggccctggaccatggacatagatgctacagtggtgccagtggtgacctggaaacccagagcttctgccaccagaaggaatttgtctcagtcactattctgagttcctatcctctgttcaaagtgggtggagggcggtgagyctgagtggttgtgtcacctatccacactccagctgcacggaggcctgggacccaaatatctggcactttttttttttgagatggaatgtcactctgttgccaggctggagtgcagtggcacgatctcagctcactgcaacctccgactccctggttcaagcgattctcctgcctcagcctcccgagcatctgggattacaggcacgcaccaccatgcccagctaatttttgtatttttagtagagacggggtttcatcaacgtcacaatctcctcacgttgtgatctgccccccttggcctcccaaagtgttgggattacaggcgtgagccaccgcgcccaaccagtgtctgacactttcagaatctatttttggaggtaagctctgcttcccatcagggcttattatgtaagcaattctccaaacacaagaagaaggttcagatgagagaggtcggggggagaattgatactctccatgccttttatgtctttatctgagtaattgtttaacatgtcaaataggaactcaggatggggacagctaggagctggcaggaagccttcctcctgtcactctgcccatctggatggctggcgagacaagtccacgtggtggaaccaggcagcatctgaagtttgcccctgctttctgcctcatccacaagtcatatttcctcccaaaacccacattcatgaagggaagaggagggaggagacaggaggagaatcatgttaattcttgttttgtttgtgttctttcatctggctagatgcattttcagaaccatgtaaatcaatggatttttttcattactgcaataaaatttgcctttgtacccaactccccaaggaatcggaacataaacagagcttccacaattcacacttcacctcactcaggcgcgatgtctttgttagactctctttgatcatttcacttttgatctgcctgtttgcttggaaagagctattcaaatctgcagagggcccttctacagcaaaccctccgagga

SEQ ID NO: 678947 - DNA, 640 bp, Homo sapiens
tgcctgtaatcccagctactcgggaggctgaggtgggagaatcgcttgaacccaggaggtggaggttgcagtgagctgagattgcgccactgcactccagcctggtgacatagtgagactccgtctcaataaaaaagccatgtgtgcatttagtcattacacttttaaaggatctgtaaagaaaatgtatctgagaaggccgggtgcagtggctcacgcctgtaatcccagcactttgggcggcctaggcaggcggatcacaaggtcaggagatcgagaccatcctggctaacacagtgaaaccccatctctactaaagataccaaaaaattagccaggcctggtagcaggtgcctgtagtcccagctactcaggaggctgaggcaggagaatggcgtgaacccaggaggcggagcttgcagtgagccaagatcatgccattgcactccagcctrggcgaaacagtgagactccatctcataaaaaaaaaaaaaaaaatgtatctgagaaacagaggagggtttttcagaaccttctgcagattccttccatgatgaggagacacttaagagctgtggccttttattaccttttaaaatagaattataattaaatacagagctacattatcagcatcaca

SEQ ID NO: 678948 - DNA, 2916 bp, Homo sapiens
tttccttctgagcaacaagttccacacccgaatgagagtggcactcctcattgrcattattaatttttgatatgaagtctatctaaacgtggtcagtacaccaataattggtatggtaaaccgcctgactgtaatgaggctgtggcaccaacgctttctgctcccgagaatggtgacatggtcagtcactcggccactctctggagcaggttctttcccagtccccatggcacctccacgctctgcttcaacccctcctgttttcctaatacattcagtcacattttaatggctgaaatggctttgaagctttccccacggaaccaattttcaccctcagcgaagggcagctcctgtccttcagcaaggagtgtgcttcagtgataagttttcacaggagcccagaactcaaatgtgttttgactgttgccctgatggcagcgtgttaacattagcaccagaagtagatctgtcatggagcttttctgatgagacaggctctccaaattaattgaggctgatggcagattttgtcattgagatgagatgttgcccacagctagttagactgctggaatatttggtgctaatgacagggtttcattgagagacatgcttaggagagtcacagctaatatgattctagattcttccaggaaaatggtgaacttataaactacaggacattgatataaaggtagctattttgcactagccacaaattcatgacttagattcattaataaatgctttggggcaggggggataaaaattggccaaccaagctgttcaactgcaatatcaaaagcttgaaaatctttaaaagtccttggatatattatacgtatctccagaattctgaacaaaaccgacatcagttaaagttgcttctgttgattgtaatccagcagaaatatcataactcttggctttgccccgggcaaacttttcactgaagtcattcattttgctttttgttatggttacctaacctcagtcagaatgcagcaggctaccaaaaaatgtgaggcagccatctggaaacttccagtttctaacatttctctgctttggaaatgggatggagtctaccgactttttccaaattcgatctttattttaaagataaaaaaaagcatgactaggcatgggaagggactcaaatgccagcatgagagaaggacagtgggtctcacaacccacaaacatgcctgggatcgctaatttggccagttgcctggaaatattagtaccaccggctacccctctcattttctcagaggaaagccctaggacatggagtctaagcaataactcctgctcccaactggaaacgccccaagtcttccggttccagaatgaaagggttatattgttttaaactttacagggcacactataattacgtggctcttttagatgttttaaactttagtatatttggtccagaaatcaccctttctgagagctcacttaccataggtagtttcactcttaactggtaactcagacccatgacaaggactcatgaggactcatgaggaatcaatcctctttgcttattttgtttccatgggcaaatccttctatagctcactttgggggctcatttgttcacatagaaaaatacatattctgcctttataggtgcctggcatggtgctgggaagtgagtcactgagaaagataatgtcttgtcttctgacttggagttagttgtgcagacaaataatggtaaagtgggatgatctatatgcacagatttgtatggagacttacaggaacataggggagggggaaataattgtcggaagaggttaagaaggtgatactggattaggacccggaaaatgagaagatgttttctaggaagagaagtggaaagatatttcaagcaaaggtcatagcttatgtggcagagaaaatttgtgcatagaaattgtcaatgtgctcctctgtattttttagatttcttgtacttgaattggatccttgtgattgaatagggttgaattggatccttagtgaatagggttgtgagcagaaatgatgcatgacttagtatcctaggcactcaagcattggcatgcttcatccatttctcccttctcctgctgccacatacttggtagaaatgtgttgagccaactgagtcacaagaaacagggaacctggatccctaagtcactggaaagaagagagccctccttgacctgcatggtactttgtgtgaaagagtaatagaattttattgtgttgtgtgtgtctattgtggccgttttcattaattactctgatacagcatgtgaaatatttgaagacataggagagtgtggcgtacctgtggaatgttcaacacctcaatagagctggaggctagcatatgcaggaaagaatttacagcttggttggaaccaaataggaattctctaagccgtggtaaagagattgcattttattcttgaaacaactggaaggcatgggaagtttttatgcagggtagtcaggtaatcagaattaaattttggagataaaactatgatggagtgcatagaatgagttggagtggggacaccctgaggccagggataaatttgaagttactgcaataggctgggtaagagatagtgagggcctaggttatggaaatattctttgtatttttgcatcagtgaaatttcttaggtaaagaaggaaagttgcctcacccagcaggtgaggatggcaaactcctgctcacctgtttttgtaaataaaactctattgcaatgaagctgcacccttttgcttatgtgtcatctacggctgctttcacaagacatggacagagtcaaataattgcaacaggagctatgtgacccccaaagcctaaaatatttactaatgtgtccttttaagaaaaagtttgccaaattg

SEQ ID NO: 678949 - DNA, 1356 bp, Homo sapiens
atggtccctcgaacaggatatccttattctgaggcattgaatctggttcctggaactcccagcatcagaattctatatgaaattctgggtcttataaatgtaatctaggaaacgtctcttccagcaatagcagaccagattattttgaactgtgattcctactgaggtcaattagagatactgaacaaaatattaaaagtagaagtataagaaaacattaaagaacatccaagatagtaacaatctggggagccaatatcttggagaaagtaacacccagaaagatgaactcagttgttagcattgcttttctcctctagccatttccttattccgaaagctacagtgagtggacaaggaagctgaacggtattttctgcaggcttgcagtgacaaaaattgtaattcagccacttccaaggtgtcatttttgaaaataatctgtcattattttctgactatttgattgttttcagttgaattgaaatcaagtaaaattgtgcagtttcataaagtttcttcttgtttaatcctgtattaagaaatagcagagagagccaaactgtttccatataaactcccacactacaacctctttctgagactgagcaagcctatttctgctaatgttttcactcttctgttgttaactagttttttttcttcacttaattcccactgtaattaatgggaattaacatctgacctaatactctcacaatattcataaatttcttaactaaatttcagtaaatgttaagctaatggaggcctgtgatttttgttgtagtgttttctttaatgggcctggtgacttgtacaaggctgagtaccacgtaagtcatcagtaaatgtttctttaatttttcattagttgaccctatacaacttattgtctatgctatttatttcagcataagatcrcatagttgcttaaattttcttattcaacccacatttcttgagctcctactgcatttcaggcactgtgccatgatctggatgtacaaaacacaaaagagaaacagtcttcaaaaagctcatagcctagggaagaaagaaaacatacaaatatcacataggcatacttaaattacttaaattaccctaaagcaaatgagtataaaaatgcctgtaatatatagtaaggtagttcttttagaaacagaacattaaaattagaaaatggaaaacattagtggcagacacatggtatttataacagatgcaaacagcaaaaattatcaaatcaccaaaatcatgttattttgaatgtgctgttctttaaattgttaaaaatgattgaatattgtggaacctagaaatactgtttactcccacccaccaccctcaaaa

SEQ ID NO: 678950 - DNA, 1356 bp, Homo sapiens
atggtccctcgaacaggatatccttattctgaggcattgaatctggttcctggaactcccagcatcagaattctatatgaaattctgggtcttataaatgtaatctaggaaacgtctcttccagcaatagcagaccagattattttgaactgtgattcctactgaggtcaattagagatactgaacaaaatattaaaagtagaagtataagaaaacattaaagaacatccaagatagtaacaatctggggagccaatatcttggagaaagtaacacccagaaagatgaactcagttgttagcattgcttttctcctctagccatttccttattccgaaagctacagtgagtggacaaggaagctgaacggtattttctgcaggcttgcagtgacaaaaattgtaattcagccacttccaaggtgtcatttttgaaaataatctgtcattattttctgactatttgattgttttcagttgaattgaaatcaagtaaaattgtgcagtttcataaagtttcttcttgtttaatcctgtattaagaaatagcagagagagccaaactgtttccatataaactcccacactacaacctctttctgagactgagcaagcctatttctgctaatgttttcactcttctgttgttaactagttttttttcttcacttaattcccactgtaattaatgggaattaacatctgacctaatactctcacaatattcataaatttcttaactaaatttcagtaaatgttaagctaatggaggcctgtgatttttgttgtagtgttttctttaatgggcctggtgacttgtacaaggctgagtaccacgtaagtcatcagtaaatgtttctttaatttttcattagttgaccctatacaacttattgtctatgctatttatttcagcataagatcgcatagttgcttaaattttcttattcaacccacatttcttgagctcctactgcatttcaggcactgtgccatgatctggatgtacaaaacacaaaagagaaacagtcttcaaaaagctcatagcctagggaagaaagaaaacatacaaatatcacataggcatacttaaattacttaaattaccctaaagcaaatgagtataaaaatgcctgtaawatatagtaaggtagttcttttagaaacagaacattaaaattagaaaatggaaaacattagtggcagacacatggtatttataacagatgcaaacagcaaaaattatcaaatcaccaaaatcatgttattttgaatgtgctgttctttaaattgttaaaaatgattgaatattgtggaacctagaaatactgtttactcccacccaccaccctcaaaa

SEQ ID NO: 678951 - DNA, 648 bp, Homo sapiens
tttaaacaaataattagtcttgagaataaaagtgtacacaaaagtacaattaatgaattcactaattgttcttccctgctgtggacatagctcaaagttgaattttaagctcttgcataaatataaactactgtacaagccacaaaacgggatgactcaccatcagtcattaatgttgccttaaagacaaactcgagctctcggagaaaatgcattcacctaggcagacataattttgaaaataaagcaagttttagatgataaactggtctttgagtctttgggaaaaaaacacacacacgagagatttgcaagttttaatgccctatgtaaatatcagacaggcaacatttaccttactcaaaattccccattagctgaataggaatgaatttggtctgtcctgaccatgtagtcaaatgtgtctacccttcctctctatccyaccctttgctgaaatggaagtaaaatgtgaattgcagtgccttttgtctgtgatattctctatatgtgatgaaggcagcttcttccttttcctccctgtcctccttttcttcatcttcatcttttcttcctgctttaattcccacataagtagtgttttgtggatttgcctagaaggctacaatgtatggattgtaaaataga

SEQ ID NO: 678952 - DNA, 648 bp, Homo sapiens
tttaaacaaataattagtcttgagaataaaagtgtacacaaaagtacaattaatgaattcactaattgttcttccctgctgtggacatagctcaaagttgaattttaagctcttgcataaatataaactactgtacaagccacaaaacgggatgactcaccatcagtcattaatgttgccttaaagacaaactcgagctctcggagaaaatgcattcacctaggcagacataattttgaaaataaagcaagttttagatgataaactggtctttgagtctttgggaaaaaaacacacacacgagagatttgcaagttttaatgccctatgtaaatatcagacaggcaacatttaccttactcaaaattccccattagctgaataggaatgaatttggtctgtcctgaccatgtagtcaaatgtgtctacccttcctctctatcccaccctttgctgaaatggaagtaaaatgtgaattgcagtgccttttgtctgtgatattctctatatgtgatgaaggcagcttcttccttttcctccctrtcctccttttcttcatcttcatcttttcttcctgctttaattcccacataagtagtgttttgtggatttgcctagaaggctacaatgtatggattgtaaaataga

SEQ ID NO: 678953 - DNA, 583 bp, Homo sapiens
caaatcacattgrtaagtggaaaccatacatagtgggagggattgcccctcaaaaatcagtaaacattactaatctgagcttttctttgcaccccaaagagattgttaaaccttgaggtgcaaactactctttcagactctacattttaaattgcttttgagttttattaacaatacccactactgtaaacttcacattcttgagtttttgactttcagttatagtacaaattcatgattcatatatacaatgtacatgctatatattcaaataattcaagaaggatatttgagaaatatatttcctgagcccttgtgctatatatgaatgactactaagctggataaagaattgtgcctttcaaatccctgtacttacctgtgacacttctcctgaaacaatgctatgaagaagtctgaagccaccttgattcttactccattgtaggtaacctgtgttttttttactgcatccttgtagaatttttctctttattcttaaaggtaaaaatggtgtcagaaacagtctaaatgtgggtctttcccattaattttacccggaatgtggtaggtgcttgtcacc

SEQ ID NO: 678954 - DNA, 609 bp, Homo sapiens
ttttgagatggggtcttgctctgtcacccaggctggagtacagtggcgcgatctcggctcactgcaagctccgcctcctgggttcatgccattctcctgcctcagcctccccagcagctgggacaacaggcgcacaccgccacacccggctaattttttgtatttttagtagagacagggtttcaccatgttagccaggatggtctcgatctcctgacctcgtgatccgcccgcctccgcctcccaaagtgctgggattacaggcatgagccaccgckcctggctagatatagtcactttttattttccagttttttttaattatatgtttcccttagggtgagtcagatgtcatttattttcgagatccattcagaatgataaattggatacaattgtgaggttaattatttcaatgttttgaagatagctcagtcctttttttgtcatctgaggttttgggccctctgaaaaactaccagttggcaagccctctgctatagcatcacaaatgcaaccattgccattgtacttgtcattcttgccctattttgtgttaaaaaaaatatatatatataaacaccatttaggattaacatttatcttaac

SEQ ID NO: 678955 - DNA, 609 bp, Homo sapiens
ttttgagatggggtcttgctctgtcacccaggctggagtacagtggcgcgatctcggctcactgcaagctccgcctcctgggttcatgccattctcctgcctcagcctccccagcagctgggacaacaggcgcacaccgccacacccggctaattttttgtatttttagtagagacagggtttcaccatgttagccaggatggtctcgatctcctgacctcgtgatccgcccgcctccgcctcccaaagtgctgggattacaggcatgagccaccgcgcctggctagatatartcactttttattttccagttttttttaattatatgtttcccttagggtgagtcagatgtcatttattttcgagatccattcagaatgataaattggatacaattgtgaggttaattatttcaatgttttgaagatagctcagtcctttttttgtcatctgaggttttgggccctctgaaaaactaccagttggcaagccctctgctatagcatcacaaatgcaaccattgccattgtacttgtcattcttgccctattttgtgttaaaaaaaatatatatatataaacaccatttaggattaacatttatcttaac

SEQ ID NO: 678956 - DNA, 664 bp, Homo sapiens
gtcttctggtgcctttttttcccctagattgactcagggtcaccaaaaaaacttaacattcagcccaaatgacttgtcagtaataatttccacataaacatataaaagatattctatggtatatgggtttttttaagkgcctttttttttttttgtattttttgtgacatttcttaacacctaccaggcattctgtgtgacatgttcatgccaggagtgacaaatccccaaactctgctatccccaggatagtaataacaagggatagctaaaatggcagtccctacattttagctcgcaggctcattaaatatagatggagagtggcacacagagtgtgtaatgtgtggggctggcccacaggaactggtgtttaggtgtggtgggcagtaaaaactaaaccagagaaaggggcaggaaagcacagggtgtgctggggggacactgagtccaccactttgcatggacctgcgtgcccatatagactaggagcagtgggagagattgctagaaagatgcgtgggagcctggtcgcacagagccttgggtggcaggcaggggaggccagcctttatccaggaatcagagggagccgtcggagacagcgagtaacatgatgagagccacatgctgaggcttccagaagggatgtgctgaaaatgtt

SEQ ID NO: 678957 - DNA, 540 bp, Homo sapiens
attatattttatgttttctgattgaattttccttctgtttctctataaaaaataaaatggatagcaattaaatatttaaatataatcacagtaaaatataatggtctgaaaagcccaatcagtaaatgaaagcattgtgaagtaatgtgaagagacagtaagaatcaagttttcatttaccgattattttttctggcattagtaacatttaaattttcttcatgaatggatctttartgtatcaaatgcagtatataatatatgtaatgattattttactgattaaaagcagctaaatccaatataattcagagctatcaaatgctttgtgtaattaattcattatgtgttgtcttattcatcacatacaaaatggtgatattgatccctgaccttcctattgtctaggcttgctatgtagactaaaattaaaacatgcatttgatagcctgttacaagtgtatgctgctgattttattaaaccctttgcatttaatttaaatattttcagattgtttttcttagtttggagaatcaaga

SEQ ID NO: 678958 - DNA, 540 bp, Homo sapiens
attatattttatgttttctgattgaattttccttctgtttctctataaaaaataaaatggatagcaattaaatatttaaatataatcacagtaaaatataatggtctgaaaagcccaatcagtaaatgaaagcattgtgaagtaatgtgaagagacagtaagaatcaagttttcatttaccgattattttttctggcattagtaacatttaaattttcttcatgaatggatctttagtgtatcaaatgcagtatataatatatgtaatgattattttactgattaaaagcagctaaatccaatataattcagagctatcaaatgctttgtgtaattaattcattatgtgttgtcttattcatcacatacaaaatggtgatattgatccctgaccttcctattgtctaggcttgctatgtagactaaaattaaaacatgcatttgatagcctgttacaagtgtatgctgctgattttattaaaccctttgcakttaatttaaatattttcagattgtttttcttagtttggagaatcaaga

SEQ ID NO: 678959 - DNA, 610 bp, Homo sapiens
atgggttttaagaaatactgtacaaaagatatatttgaatgaactggaacaataaacatttctgaaagatttatttattcctaagttagttacaatgtgttttcctgattagccaaaatagaaatgttcattcccaaaatcacctgtcttataatgaagtatctaactattgataagttatagttcctatttcattaggaggagaaaaactctgatcataatctttgttccaaaggaaaataaacactaataaagaaaacttactcacatagagatacttttataaaggtttatactctttcttggtaagtatatcatttgtctttggtatggatmctattaacatacattttaaggaatgggtgccaactggaattcaaaggtttaaataaactttcctccttgcatatcatacaatgtttgaagaagaatgaatgttaattcagtgcaataatatatttacatttaataataatcctttaaacctctattttctaaaccacttttttcttattttgtgtttcttacaagtgattctaactgcatggtatgagagttgctgagaacagtgagtgctggagttagaaagtggctaaataataacggtgca

SEQ ID NO: 678960 - DNA, 583 bp, Homo sapiens
caaaaaataggtgtgtgtgtgtgtgtgtgtgtgtgtgctgtttttgttattatttatcttaaactctctggacatataaaacctgttttgctttagtaattaaaggcaactttttttctaaaacttagtgctaagtgctcaatacctaaggagagaattagatcaaacaatgtggttttaatatactttttgtcttcactaatataaggagataacctattgggggtttcatattttctccataatgttcataaggtgtgctatcggcatttcagcaatatagcctccttgtgggctatagcatttcaatcattacaggaaatttcacttctctggactccatctgcaaaagatcagtagcgctcttcctcccccacattgaattacataaaaaactgctttcatctgtwtataacatgtgattctaaacatcccttaggtttaagtggctatagtatgtattagcataatattgaagtttaaggaaagtaagagtttaaacattcaatgtagacattgctaaatgttttcttccaatttgaagggttacagcatgttactttttttcttgagtgttatcaaa

SEQ ID NO: 678961 - DNA, 583 bp, Homo sapiens
caaaaaataggtgtgtgtgtgtgtgtgtgtgtgtgtgctgtttttgttattatttatcttaaactctctggacatataaaacctgttttgctttagtaattaaaggcaactttttttctaaaacttagtgctaagtgctcaatacctaaggagagaattagatcaaacaatgtggttttaatatactttttgtcttcactaatataaggagataacctattgggggtttcatattttctccataatgttcataaggtgtgctatcggcatttcagcaatatagcctccttgtgggctatagcatttcaatcattacaggaaatttcacttctctggactccatctgcaaaagatcagtagcgctcttcctcccccacattgaattacataaaaaactgctttcatctgtatataacatgtgattctaaacatcccttaggtttaagtggctatagtatgtattagcataatattgaagtttaaggaaaktaagagtttaaacattcaatgtagacattgctaaatgttttcttccaatttgaagggttacagcatgttactttttttcttgagtgttatcaaa

SEQ ID NO: 678962 - DNA, 583 bp, Homo sapiens
caaaaaataggtgtgtgtgtgtgtgtgtgtgtgtgtgctgtttttgttattatttatcttaaactctctggacatataaaacctgttttgctttagtaattaaaggcaactttttttctaaaacttagtgctaagtgctcaatacctaaggagagaattagatcaaacaatgtggttttaatatactttttgtcttcactaatataaggagataacctattgggggtttcatattttctccataatgttcataaggtgtgctatcggcatttcagcaatatagcctccttgtgggctatagcatttcaatcattacaggaaatttcacttctctggactccatctgcaaaagatcagtagcgctcttcctcccccacattgaattacataaaaaactgctttcatctgtatataacatgtgattctaaacatcccttaggtttaagtggctatagtatgtattagcataatattgaagtttaaggaaagtaagagtttaaacattcaatgtagacattgctaaatgttytcttccaatttgaagggttacagcatgttactttttttcttgagtgttatcaaa

SEQ ID NO: 678963 - DNA, 662 bp, Homo sapiens
tataaattaaaattgattctgatttccaattaacccacaacttgatgaattcacagcctgaggaaatatccagcatattaatttgttctcatttccttttattaatgaaacagtgttcatctataacacgaatctctggaactgattaaagtattgagtaactgaagacatgatatgggttttttgttggtttcagatggagaacaatgaacaaaatgatggagttgagcaatctccttttttttttagtatttaactggaacaaaataaaacattatctactwaggtcattatattgacttgaccaagtttaatttaacttacgaggaccataatcaaatgtatcattagaaaatattaaaataccatgtaagtatgaggagatatttaaaaagctcttcttaaaaatatatcagtaactaatcaaataaatattatagtatattattgatgtattaaaaattaactctcaaaatttaagtcaaatgtacattagatgtctgaacccatgaattactctcagaaaacataataatcatatatatgtcatattagaaatacttagagaaagaaaattctattcaaattgaagtcatctaagcctcttcattttaatgttttaaatttcttgaaacaaagtagaaaatttaagaaaacacaca

SEQ ID NO: 678964 - DNA, 662 bp, Homo sapiens
tataaattaaaattgattctgatttccaattaacccacaacttgatgaattcacagcctgaggaaatatccagcatattaatttgttctcatttccttttattaatgaaacagtgttcatctataacacgaatctctggaactgattaaagtattgagtaactgaagacatgatatgggttttttgttggtttcagatggagaacaatgaacaaaatgatggagttgagcaatctccttttttttttagtatttaactggaacaaaataaaacattatctactaaggtcattatattgacttgaccaagtttaatttaacttacgaggaccataatcaaatgtatcattagaaaatattaaaataccatgtaagtatgaggagatatttaaaaagctcttcttaaaaakatatcagtaactaatcaaataaatattatagtatattattgatgtattaaaaattaactctcaaaatttaagtcaaatgtacattagatgtctgaacccatgaattactctcagaaaacataataatcatatatatgtcatattagaaatacttagagaaagaaaattctattcaaattgaagtcatctaagcctcttcattttaatgttttaaatttcttgaaacaaagtagaaaatttaagaaaacacaca

SEQ ID NO: 678965 - DNA, 1269 bp, Homo sapiens
taaaactttttaaggtggaagtaataaaaaaatgattgttttgaagccctattgctatattggagactatgattttggctaagtaaacagaaataatgaaattttcaagaaccttcagggaagttagcatgctaggtacactgaatcacacattcaacaaatattggcttaagtcctacaatccaaagatatggccgaggtactgcagaagagaaaaaatgaattagattctctctccaggtttggcagcggcattgctatgaattaactacatgatttccacttcctaggcatacagggagactacatttttcagcctctacctcaattattttggggtcaaatgaccaaacatagactaatacttgtaagtgaaatgatacaagccacttccagggttggatgttaaagaatactctgcattgctatctactttctccttcttttatgtcaaaaacaagtcccttaagttttccagaaggtgaagatgcaagagggaagcatcctggattttcaggacaaagcttggaggacagctgcttaggggagctgtgggatgagcaagaaataaaacctcttacatttagcatagcctcctattgtgtacaattactgatagatattccaatgccacatagaaatttatgtgcaaaaattcagtgcagagtcagtgctggcaaattgggatagggaaattgctcttcaagatgagaatcagataaggaaacagaaaagatgtcatttaggactttatttgacagatttggacacatagtgaaagtatcagaattgtggtttgtaaaaataatcttataccctgaggacgagctacataatttgtgcaacccagtggaaaatgaaaattcaaagattattaaaaatttaaggatgcctacagcaaagtattatattaagtgtggggtccttctaagaacaggcccctttgggactgcacagggcacatgctcatggagaagcaagaggaaatggaaatataatgtgtttacatggagttgcagctaagagtaatgtgtgtagttagaaactgcttacaattttcagaaaacaaacagtttttattaataagaaattcattgataagccagtyagcatggaggatatggctaccaatatggaaaccagtacttatacataaatgtttacgtaatactggtgcaaaacatgtggttttgactcatacatgtactttctccctacagtgggaataaaatccatggatttaatatgatgaaaataagaaaaaacaca

SEQ ID NO: 678966 - DNA, 616 bp, Homo sapiens
ccaaataactgtatctctgcctgatttttctgttttaagctatgtgtctgactaacctgaggaaacaactcagatgtcccatggttacaccaaatttgctcctaagccttccctttcttcagtatccctaggaaaattattatgatatcaagttttgcaagaaaaaaagacatatggacatcatttttaattaattctagtctttattctccatatccaatcaataatttggttctgttgatcccatctcctacatatgtctttaatgtatcaatttctctctatcatcattctttctaccctaataggarcctatattctcttctagagtgaacctaacctaagggacctatcttctcttctagagtgaacctgacctaagcaggtctgcagagggatgttcctgtaaaatcaaactttccttcatccaatctcacagcacatatgcagcaatgtatcagttttataaatcaattatatttattaggtaagactgcagtcatgcagtttcaggagaatcagattttactggatggagagtagcgaggagaatatatggccctcttgaaaatggtgaaaaaacattactttggtgacatcttctggagttcagcat

SEQ ID NO: 678967 - DNA, 910 bp, Homo sapiens
aaaagtacgagataccatcttacaccactctgaatggctaytatgaaaaactcaaaaataacagatgctggtaaggttgaagggaaaaagatacacttacactgtcggtgagagtataaattagtatttacattagttcatttatgtcatcattgtggaaagcagtaaggcaatttctcaaagagctgaaaacaggactaccattcaacccagcagtcccactactgggtatatacacaaatgaatacaaataattctatcataatgacacatgcattttcactcatgcacacatgaatatacataccataaaggtacacgaatgctcattgcagcactattcacaatagcaaagacatggaaccaacctcactgctctttagtgacagactggataagaaatgtggtacacatataccatgaaatattatgcagtctgattttaacttaaccatcacatgaacacaggctatttcttattactttcctgtgtgtttgcagtcaaacctgtacaatattttcatgtttttctaaaatgtgttttttctcttaatgttcttatgacaagatatactacagaaaaataaaacactgttttacttctaatatctaaacaggtattctactattcctttgattatttcagaagataaactcacataaacctgtctttatttttagttttcatgtacaattaaaaagcactgtaaacactctcaatagccaaaatccattcactgggaggaggtacataaaattggtctcacagttgaacaaacgaccaaccgttgaatacaaacattaaaaaatttatgtcaacatgttgttactcagcagccacataatttggtgccataattgtcaagtgaaataaagaaacggaacacatacaatataatttctttaattg

SEQ ID NO: 678968 - DNA, 910 bp, Homo sapiens
aaaagtacgagataccatcttacaccactctgaatggctattatgaaaaactcaaaaataacagatgctggtraggttgaagggaaaaagatacacttacactgtcggtgagagtataaattagtatttacattagttcatttatgtcatcattgtggaaagcagtaaggcaatttctcaaagagctgaaaacaggactaccattcaacccagcagtcccactactgggtatatacacaaatgaatacaaataattctatcataatgacacatgcattttcactcatgcacacatgaatatacataccataaaggtacacgaatgctcattgcagcactattcacaatagcaaagacatggaaccaacctcactgctctttagtgacagactggataagaaatgtggtacacatataccatgaaatattatgcagtctgattttaacttaaccatcacatgaacacaggctatttcttattactttcctgtgtgtttgcagtcaaacctgtacaatattttcatgtttttctaaaatgtgttttttctcttaatgttcttatgacaagatatactacagaaaaataaaacactgttttacttctaatatctaaacaggtattctactattcctttgattatttcagaagataaactcacataaacctgtctttatttttagttttcatgtacaattaaaaagcactgtaaacactctcaatagccaaaatccattcactgggaggaggtacataaaattggtctcacagttgaacaaacgaccaaccgttgaatacaaacattaaaaaatttatgtcaacatgttgttactcagcagccacataatttggtgccataattgtcaagtgaaataaagaaacggaacacatacaatataatttctttaattg

SEQ ID NO: 678969 - DNA, 910 bp, Homo sapiens
aaaagtacgagataccatcttacaccactctgaatggctattatgaaaaactcaaaaataacagatgctggtaaggttgaagggaaaaagatacacttacactgtcggtgagagtataaattagtatttacattagttcatttatgtcatcattgtggaaagcagtaaggcaatttctcaaagagctgaaaacaggactaccattcaacccagcagtcccactactgggtatatacacaaatgaatacaaataattctatcataatgacacatgcattttcactcatgcacacatgaatatacataccataaaggtacacgaatgctcattgcagcactattcacaatagcaaagacatggaaccaacctcactgctctttagtgacagactggataagaaatgtggtacacatataccatgaaatattatgcagtctgattttaacttaaccatcacatgaacacaggctatttcttattactttcctgtgtgtttgcagtcaaacctgtacaatattttcatgtttttctaaaatgtgttttttctcttaatgttcttatgacaagatatactacagaaaaataaaacactgttttacttctaatatctaaacaggtattctactattcctttgattatttcagaagataaactcacataaacctgtctttatttttagttttcatgtacaattaaaaagcactgtaaacactctcaatagccaaaatccattcactgggaggaggtacataaaattggtctcacagttgaacaaacgaccaaccgttgaatacaaacattaaaaaatttatgtcaacatgytgttactcagcagccacataatttggtgccataattgtcaagtgaaataaagaaacggaacacatacaatataatttctttaattg

SEQ ID NO: 678970 - DNA, 1828 bp, Homo sapiens
gtgtgtatgaaaataatgacaatatccaggagagaaagatctcaggatttcaaaaagcacacatttttctccattttaaagwtctaatataaatctcagcctaatttataattttaggttgcatatactgatgattatgaacaatttcacagaatgtcaagaaaaatatacagctttctttgatatatttttccaatcaacattttattgaagtgttttcccttgtaatgtcaaacgttaaaatagcaattaaatttaaaatggacatttaatcttattgtgattaagtactcacactattttagccttgaataatgttgttccctcaccagattcagaatccagtgagaaaataagagttttttcacaaacatatctctgtttatcattattacaagagcaatttaaaaagttgaacatggctctgcaaatcagagcaggagaaagatgcatacctttgaacaagagagttctgcagatgcttcttataaaggaaacattttaactaaaatctccagggtatgcaggaagtagacattaaaaatatgtgtacttaagcgtggtggcccacccctgtaatcccagcacttcagtaggcctaggtgggtggatcacctgaggtcaagagtttgagaccagcctgaccaacatggtgaaaccccatctctactaaaaatacaaaaattagccgggcatggtggtgcccacctgtagtcagagctgctcaggaggctgaggcaggagaatcgcttgaaccaaggaggcagagatttcagtgagccaaaattgcagcactgcactccagcctgggaaacagagcaaaactctgtctcgaaaataaataaataaataaataaataaataaataaataaataaataaaataaaataaaagttttttaaaatcatatgtgttcttgaagggtggtaagggacgagaaagatgtaggtataagaaacaaacattctaggctaatgtaaattgacataaaattactctgacttgggaaaaagttggacattttaaagaagctgataaagggcaggataagaatataatgaactcactagggagtggcattcaatgaagtgaacatggccagaaaggtagggggggagaccagatgctatttttgcttttaattcaaaacagaaagacagtaaagcttataagatagatcatggcagtgtgagaaagaaacaaaagagaaagcatggagatatgtttggaggctattaataattgggaaatgagagttgtgaatgatgtgaaatgagagtgtcttggattagaaagaggcagcagaattacggggtaataggcgagctaataaaaccatgttcttcaaaaacaaagccacagaatatttgttcaacattaatgattgtggttaaatgaaacaacattttctattaatcaaattgtgttaacctttacattcaaaataagatgttttctgtgtactgattctagcacgacattttcccctacttggaacttatcttttatttccatttcctgtcacatataagagtattagttattcaactcatcaaaaccagactgacttagatgaatataattacacatcttgcttaaatatgttttaaattattttatctggatatcaagtccacaaagtatgtcttataattgtgcagttctttttcacttcagtttcatttagaatgttctaaatcagatacactcttgagaagtttacagtatttaacattcaggtaatgaaataaattatttttgtaagtatttattacttcacatggcattattctgttttagaatggcaaatatttttatttacatgtgc

SEQ ID NO: 678971 - DNA, 1828 bp, Homo sapiens
gtgtgtatgaaaataatgacaatatccaggagagaaagatctcaggatttcaaaaagcacacatttttctccattttaaagttctaatataaatctcagcctaatttataattttaggttgcatatactgatgattatgaacaatttcacagaatgtcaagaaaaatatacagctttctttgatatatttttccaatcaacattttattgaagtgttttcccttgtaatgtcaaacgttaaaatagcaattaaatttaaaatggacatttaatcttattgtgattaagtactcacactattttagccttgaataatgttgttccctcaccagattcagaatccagtgagaaaataagagttttttcacaaacatatctctgtttatcattattacaagagcaatttaaaaagttgaacatggctctgcaaatcagagcaggagaaagatgcatacctttgaacaagagagttctgcagatgcttcttataaaggaaacattttaactaaaatctccagggtatgcaggaagtagacattaaaaatatgtgtacttaagcgtggtggcccacccctgtaatcccagcacttcagtaggcctaggtgggtggatcacctgaggtcaagagtttgagaccagcctgaccaacatggtgaaaccccatctctactaaaaatacaaaaattagccgggcatggtggtgcccacctgtagtcagagctgctcaggaggctgaggcaggagaatcgcttgaaccaaggaggcagagatttcagtgagccaaaattgcagcactgcactccagcctgggaaacagagcaaaactctgtctcgaaaataaataaataaataaataaataaataaataaataaataaataaaataaaataaaagttttttaaaatcatatgtgttcttgaagggtggtaagggacgagaaagatgtaggtataagaaacaaacattcyaggctaatgtaaattgacataaaattactctgacttgggaaaaagttggacattttaaagaagctgataaagggcaggataagaatataatgaactcactagggagtggcattcaatgaagtgaacatggccagaaaggtagggggggagaccagatgctatttttgcttttaattcaaaacagaaagacagtaaagcttataagatagatcatggcagtgtgagaaagaaacaaaagagaaagcatggagatatgtttggaggctattaataattgggaaatgagagttgtgaatgatgtgaaatgagagtgtcttggattagaaagaggcagcagaattacggggtaataggcgagctaataaaaccatgttcttcaaaaacaaagccacagaatatttgttcaacattaatgattgtggttaaatgaaacaacattttctattaatcaaattgtgttaacctttacattcaaaataagatgttttctgtgtactgattctagcacgacattttcccctacttggaacttatcttttatttccatttcctgtcacatataagagtattagttattcaactcatcaaaaccagactgacttagatgaatataattacacatcttgcttaaatatgttttaaattattttatctggatatcaagtccacaaagtatgtcttataattgtgcagttctttttcacttcagtttcatttagaatgttctaaatcagatacactcttgagaagtttacagtatttaacattcaggtaatgaaataaattatttttgtaagtatttattacttcacatggcattattctgttttagaatggcaaatatttttatttacatgtgc

SEQ ID NO: 678972 - DNA, 642 bp, Homo sapiens
agaaatttcttccatgctcacagaatttactcatgaagagaaacagtgtggcctgctcaagacaaagccatcatcacctctgggaaaccaaatcacagagcctaagctgttcctgtgtttctcacacctgttccttctttccattctgggaagaaaagtttagtgacctgtcacagcttgtttcagtaggcttctaatattctccgtgtctctagtctcttcccatcctaataatcytacacatgaaggccaggggcagctctattcatgccatcttcatcgatggccctgaagttaaaacccaatatctttgtatttaaagccttctgtgttcgatccctggttttccttcctatcttgactcctcatcctctttatcatttaatattgcactcagattgcataacccattagccctcaaattttctccatgtttctcacctttgtgtttgttcttctgatgttacccctggatggaacaccctctcaccaattatctcaaaatgtttttcattacatggcattgttcaagtgtcaccagttttcaactgggcacagtggcttacacctgtaatcccagaactttaggaagctgaggcgggaagattgtttgagctcaggagttcaggaccagctggggca

SEQ ID NO: 678973 - DNA, 642 bp, Homo sapiens
agaaatttcttccatgctcacagaatttactcatgaagagaaacagtgtggcctgctcaagacaaagccatcatcacctctgggaaaccaaatcacagagcctaagctgttcctgtgtttctcacacctgttccttctttccattctgggaagaaaagtttagtgacctgtcacagcttgtttcagtaggcttctaatattctccgtgtctctagtctcttcccatcctaataatcctacacatgaaggccaggggcagctctattcatgccatcttcatcgatggccctgaagttaaaacccaatatctttgtatttaaagccttctgtgttcgatccctggttttccttcctatcttgactcctcatcctctttatcatttaatattgcactcagattgcataacccattagccctcaaattttctccatgtttctcacctttgtgtttgttcttctgatgttacccctggatggaacaccctctcaccaattatctcaaaatktttttcattacatggcattgttcaagtgtcaccagttttcaactgggcacagtggcttacacctgtaatcccagaactttaggaagctgaggcgggaagattgtttgagctcaggagttcaggaccagctggggca

SEQ ID NO: 678974 - DNA, 587 bp, Homo sapiens
tgaattatagatggttgtcacgaatatcacaatgccaggttcctataaatgagttaaaaatattgatgtatgaagtaagttggggatggcaagtggagattcagcatccttattatccaattgggccactggatttgtactttgtagtaaaagagctctaagatctacatgtgatgcaactctccaatttaagtaggttgggatctttcttattattggatgcacagattcaaattaaactacaaaaaaaaagtrttttacacatcctgtgtcccagcactatgctagacactagagatgaacagatatataaacaccaggcctgctattgaggtgttcataatcctgtgagggaactctaatctgtagacagaactctcttgcaatgtaatgaataccatagacaggtccgagaggtatgagaggtgcatgcctagagtcaggacacatggggacagaagacatgtggtggatgtggtgagtaagagcacctggtctttgatgacagacatatagggttaaatcctggatctgccataattcatgggaggaacagattactgaatgaattaatacatagcttttat

SEQ ID NO: 678975 - DNA, 587 bp, Homo sapiens
tgaattatagatggttgtcacgaatatcacaatgccaggttcctataaatgagttaaaaatattgatgtatgaagtaagttggggatggcaagtggagattcagcatccttattatccaattgggccactggatttgtactttgtagtaaaagagctctaagatctacatgtgatgcaactctccaatttaagtaggttgggatctttcttattattggatgcacagattcaaattaaactacaaaaaaaaagtattttrcacatcctgtgtcccagcactatgctagacactagagatgaacagatatataaacaccaggcctgctattgaggtgttcataatcctgtgagggaactctaatctgtagacagaactctcttgcaatgtaatgaataccatagacaggtccgagaggtatgagaggtgcatgcctagagtcaggacacatggggacagaagacatgtggtggatgtggtgagtaagagcacctggtctttgatgacagacatatagggttaaatcctggatctgccataattcatgggaggaacagattactgaatgaattaatacatagcttttat

SEQ ID NO: 678976 - DNA, 607 bp, Homo sapiens
tggctgagaacaggccttctttatttctgtatctcttccacaaacatcattttgacatccagagggcacacagcaagtgcttgctgaacccagtgacccttcgagggcatggactgtgtcttattcacctgggcacccaggatctagagtggtggttcccaataatgtttgcaggggcctgagcaattgcatcgtagaggaggcatggatgccccttgtctctgctgccgtatcttggtgagggagtcgtgcttcctgccatggtaaggaatatmggaacactgggtgcttgcttactttataacaggggctggggccatcgctggctacgtgggaggtgttcctctgagtacttgttctgaaatgtagttctctaccttgactcctgacaacctaccttctctggttacaaggaccctctatgggtgtggccaggagagaagagcctgaaagctgggaaggtgcatgtgtaagtctgtgtgtgtgtgtgttggggagcatgtgtatgtgcctctgtgtgtgctctgtatgtctgtgtgcattttatctgcctctttgtgtttgctggtgtgtctgtgtctgtgtgtgtctatagtctcattgtgtg

SEQ ID NO: 678977 - DNA, 1227 bp, Homo sapiens
ttcgtagagacaaggttttgccatgttgcctaagctggtctcaaactcctaggctcaagcaatttgcctgcccagccttccaaagtgctgggattacaggcatgagccactgtgcccagcccagtttcttcatactctctctctctttttttttgagatggagtctcactctgttgcccaggctggagtacagtggcacaatcttggctcactgcaacctctgcctcccgggttcaaacaattctcctacctcagcctcctgaatagctgggactacaggcacgtgccaccacacctggctaatttttgtatttctagtggagacggggtttcattgtgttggccaggctggtctcgaactcccgacctcaggtgatccgctaacctcggcctccctatgtgctggaattacaggagtgagccacccagcctggcccatactttcttataaaaggccaagcttaaccttacttgggctcttgttaatttccaacattcaaaggatttgtcagtctatttaaattgtaacttgtttgctggagctaccttgggtccctcatcttctcttatttaagaaagcaataggcactgggtttagtagttggttacatgttaaacagagttctctggcttttcacatatgtaaataattataagttccatcaatgaaggtaccatgctgtgtgcttttgtgtgtagatcctcgtgtgacacactacaatgcattgtttagcacataatagtttcagaaaataccattgaattgattgcatctaaataattctcatggaactatttaatctgttaatacagaacaccaaagctaccaggattgtggaatttaaaatagcccttcagttcctttcctgaatctggtaaactttctaaatcatcatttcccttttttccacttcaggtacgtggtcaggtgaaagtaatttgacaccataatatcttaaataaaatgagagtatagacttagatgagagcagaataagacagtagacttagataaaagtcgtttaaatccattcatatttgcaatgaaaagaaacattttcatattattactgccatttaaaaaattactttttgggtctctgaacaaaggttattaaaaatatagaaaactttttcacacctcctcctactccaccatctagaaaaaaaaaaaaaawatatatatatatatatatttttttacctttctgaacagatccagggaaa

SEQ ID NO: 678978 - DNA, 613 bp, Homo sapiens
ggaccctaatgtgtgtgttatcagattaaaacacctgaaaatttagaatttatgcataattagccatttcaaagacttcacagmatgaaaataatctactgggcaaaacataatatatatatatatgaaatcaaacattgaatgaacacatgctttgtgtcaggcattgctctaaatactttaaatatattctcatttaacctttcaaattctttatgggttgagtactattatcatttctatgttatagtttgtaaatagcttccagaaggtaaggtctaaagtcacattgctagtttttggttgaaagggactctgaacccaggcaagccaactccagggtttgcacactaatgtatagctatacttttaagaaaactatgattactagatatttcaattatatttcaaaggtcttaggtaagttaattgtagaattgggataatgtcttgggttcttggagtacactgcaatcaccatgttcagctctttaggataatatgacaaattctagcctgtgcacaactgtttctctgccgggtacattttcagctgtttctctccttaacctctgcaatagtaatccaatcaccctgagattcctcataggta

SEQ ID NO: 678979 - DNA, 632 bp, Homo sapiens
cccaaaaccgtggtaaaaaattgccctatcaatagttttgctgccttcatcagccaggcttatatcattgtaaatttttgctagtttgataaaagataattagtattttgttttaattttaagtgcaacattttaaaacccagtttcttcttaccccaatgaaatagttactaatttgatgtcatttcattaaaacaagtcacattttgctgtgaatctttttccaaattattttcctagaattaatataatatttgtcaggtttatttcctcttrgaagatatagagattgcagcacagattttaatttttaatttgctaaataattctttataaagtctaagttgtgacccttttcccagatatttttaattcaataactatcaaatttatgaaaatgaagttggttttattaaagtttctactgacatcatcttactgcattggatgttgatctcagtgattgcgactattctaagttgttaaaagccatgtaatcattattggctcacaagcaagcaaatgaggtaattgtattcaaattggaaaatttgcttctaggtaaagtgtatgcacagaaaatatagacaaagtattggccattatacttgacagactttgaagtgttgcca

SEQ ID NO: 678980 - DNA, 1460 bp, Homo sapiens
ggtgagccttcaaaaggctcttcctagagaagaacctcaaagcataagagagattacatgatgaagattctgcattgctggctttgaagatggaggggccacatgagaaggaatgggaccagtctgtagaattcaataatgaccctcagctgctagcctgcaagtaactggaaacctcaattctacaactgcaaggaactgaatttggccaatgatctgaatgagctggagaaaaaataattcctttgagtcttcaaaaataaataatatctggtggacaacttgattttagccttgtaagactgtcatcaaagaactcagctgtacttttctttagacatctggttcgcagaactcatcctaataaatggatgttgttttaagccatgtaagcctccacgtttgtgaaatttgttagaaagcaatggaaaactaatacaactagtatttttacactggatcttgttaaccygaaattaatttcaaatttcattatatgcttattgggcatgctaagaagatgatcatgtcgttaaatattctagtgaatagatgtcgctctttcctgttttctcaaatcacattttaaaattatcataatcacattaatgagaattttgcaagaaaatttagacacactacctcatgtagctggattaggcagaagtgaacaaccgttattttgcttttgtgcctaaatattagtgccttacataaaaaattgacatcttgtattttaaagctccacagagaacaaatgtcaccatttttaggtgacttaaatatggttgtgacattgtataagaaagggttcataaagtaaggactgtgaaaactgctacatatatatttataagctacactaaagacatcttggaaatggatatgtggttattagtctaacgtatggaatcacagacattttcagaagtttacttcataaaaatacatttacttatgttttaatcaactattatttaaatctattagagcagtatatatttagctaaataaataactatgtcaaccatatataagcatcaaccattttattctggagcaggtttttcttttaatttttatgtttttagcatttcttttatttttatatatttttattattttaacctttgttttcggttcaggggtacatgttccaagtttattatataggtgaacttgtgtcatgtgggttggttgtacagctgatgtcatcacccaggtactaagcctagtggtgttagtttgttttctgcagtctctccctcttcccatcctccaccttctgataggccccagtgtgttttccccttctatgtgtccatgtgttctcctcatttagcctggagcagattcagatgacactctaaatgctcttgtaaaaataaaaagattagtcattttaaactctcattatattttagtattgatctgtcaggaacttcttaagtgagctctaa

SEQ ID NO: 678981 - DNA, 1090 bp, Homo sapiens
ggactccacggcttcgcaaagcccggcccagggtctgctggcaggcactgttttccttgggaagttttttccccggactgcctcaacgtctcctttaaaacctggcctcctgttcccttcccccgggggtcttcttgccgctttctggtgcccctagtgggggcgacacacaccctgggtgtaagccagggactccacggccccccgcggcttctgtccttgtttatggtaaaagtagggaactctgcttatgcacatcaacggaatcattattatacgcagaggccttggactggggcattttgtaccccattggctcacctttcgttttaccagagaaggctttcttactgagttttggtcacactccttccccgcccgttgcccctcgttgtgcctgaagattcgctcwtgaacgcctgaggaagaaagtggtctgccttacgaccaaaagcctgtggcaaattttgagtgctttccatcagggccgttgcctggtgtgcatgcactcacccctaaagtccctccctttatccacctttctctctggggcaaaagtcctccccgaggcccatacaccacggtagtacacagaatcttaccacaatcactccgggtacttgcgcgcacttggcagagtggagcaagggacttgcgctggacagacaaggcagcatctcttatagagtgggaggggcctgcctcactcatccgcctctccccatccaaggacctcttcaggaagcactggcaaacaccgtggtggctgttgtagcagagggcatggggttggcacaacccgccaccgtttgtctcgggcacgtgggggcaatctggagcactcctggatcaccacaaaggcccaggtggtgccaaccctctcgtatcccagaaagggcagcatgatgttttgtagggacagtcccccatggccgcagagaggtgccgggtccacccccaaggcaacaaccacaggaagccagagcaaaggtgcctgctgtgtcagaggaccccaccaatcttctcaaagccatgaggcacaaggcatgagggcagcgaggtcatgccaaattccctgccccatgcctcc

SEQ ID NO: 678982 - DNA, 626 bp, Homo sapiens
tccccccacaagccctgcacgcccgagctctgactcacaagtgacgcgccagagctccagatggcagggcagcccatgactgggaaaccraaaccatgagtggaagtcttttgaaggcccaaaacgcagcacctcctccccaacttcacagaaaccgttccccaacgtgtctctgcataggctgcaacagagtcaaaagacaacttgggagtttgaagatgcatctcagaaggagaaagaagaaacgggacttggtcgcggatcggttaggacacagggagatacagaatgaggagagtcttctagaatccagacaaagacagacagaggaagggagggagaaaggaaatggagaaaagagacagacagaggaagggaaggagggagggaaaggagcagcgagggaggaagtgaggaaggaaatgagaaacagagagagacagaattttaaaaatctagagaaagaagtataaagaaagagagaaagagacatagaaagggaagaaagatgaaagagataaagaataaggaaagaaatagaggaaagccaggaggaaaaaacaaaggaaagaaaaaagaaagaagaaaaaagaaaaagaataaaaggcagaaagaagaaaggaaag

SEQ ID NO: 678983 - DNA, 2828 bp, Homo sapiens
tgagaggaagatgagttgatatgttttcccctcaactaagcagcctatgttttctttttgatatgaattaggatctggaataatatgacagtaattataatacgcagaagagattatgccagtcaaatgaagattcattttccccttctttctttattctttttgttgttgttgttattgctgccccattggagaagaggagaaaaatctcaacagagaggctttgacaggtacagtataacttatcaggctttaaaggaactagctgaggttagccttagttcagatatgtcagagctgtcagaggccagccccgaaatctgtaagacattacagactgaaaactcagcgaggacggctgaagggctcagcgggaattccaacacacacatgagcctggagtatctccatgcctcgacctgaccctggataatacttggagtttgcttcttgttgttgttgttgttgcaggattactaagttcttcgggttttggttctttggctcctgaaattggtccatcacacttgggggacaattcatcattgcgtagggggagtgaggatggcctctgtggacagtccaccccgggcagcttgagtgttagggcttagcaagcagagccaatgcaatcctctgggttagcaagggaggggatgaatgtgggcacgcagagatagcgtctgcagatgctttaaatggttaagatggtgtcagagatgtcaatgcaagtaaactcttgggaacaaaacagagctttttgaaatatggcttctttctctatctcgcccaccccagggtgagtgagagcatggaatacccactaaagaggcagaaaaaaaataccttagtggaaagaaatgggatttggaataggaactgtgtgccaaatttaccagaaaccacttaacccctttgacccctggttttcctatatgtatgcatatttttgtcttggcttggcgtggtggctcatgcctataatttcagcactttgagaggctgaggtgggaggattgcttgagcctgggagtttgagaccagtcttggcaacatagggagactccatctctacaaaaaatttttaaaaagtctctacaaaaaatttaaaaattagccaggtatggtggcgtgcacctgtattctcagctgttagggaggctgaggcaggaggatcacttgaacctgggaggtggaggctgcagtgtgccctggtcatgccattgcactccagcccaggcaacagagcaaggccttgccacaaaaaagaaaaaaaaattgtcttaaaaaaaaaaagaaaatcctatggtgcaacgtgatggatttatttcctgtctgtataatcttggctttctcacagttggtctatttctaactaacaccccagttcatgtaacttctcttagagagagagctcacattgcatgagaccatgcttttattattattttttaatttaaaatctaataatctttgtttctgtctctctctctttctctgtctctctttttgattgttgttcttttattcttgtttatccaaaagtcaaatttaagattccaaagtgctgcttccaggctggccctgagaactcactgctggttttgtaaggaatacagcagaggtcaggagataggaagggtgaagtggaaggaatttgctcagatctactcttgttttattttccatggagtttcactgcagtttgtgttttgaatacagtcagttacacaaagccccatgaagtgaggatataggttggttggcttgcttgtttatgtctaggaagccatacattttgtactttaagataaaaatctccccttttttggatgaatgtgcgctttcagtaatacatccaggctacagaggacgtgtgaactacacataaaataaaaccaatttgctttccttttaaaagtcaattagttcattcttccatttgtcccccgtccaaaaatgcactgacatttccttctttgcatcatagaaggcccagcttctttctatctaccctagtcccactatccttcacagtcctagctccatgaagccatcttgctcccaaccaactcatggagctcttgttataatacctggcacatagtaaacacggcagaaagctcagctgttactctatgactaagtattgcaaaggactcacaacttactcctgtaccattcactggcataggaaacacttttattaatgttgtgttatttactttccccctagaaagtctcattgagttggtaagtagtagggtcactgctttaaaaaataaaatctccatacaattctcatgtgtagtcagggttactaagcactgatttttttttttttttttttkgaaacagagtgtcactctgttgcccaggctggaatgcagtggcacgatctcgtctcactgcaacctccgcctcctgggttcaagtgattcttctgcctcagcctcccaagtagctgggattacaggcatgtgccgccacaaccggctaatttttgtatttttagtagagacagggtttcaccatgttggccaggctggtctcgatctcctgacctcaagtgatctgcccacctcggcctcccaaagtgctgggattacaggcgtgagccatggcgcccggccagcactgatttttaaaagtactcatgtggttcttctcacttccaattatgaatgtcttccctcctccattcactttaaaatacccaaaggcagagaggtacattgtttacgcttccctgtgtcttccccaaagccctgcgtctggaggccactgtcaagctgaaaggacaaggtgagtgttctgtggagtcacct

SEQ ID NO: 678984 - DNA, 2828 bp, Homo sapiens
tgagaggaagatgagttgatatgttttcccctcaactaagcagcctatgttttctttttgatatgaattaggatctggaataatatgacagtaattataatacgcagaagagattatgccagtcaaatgaagattcattttccccttctttctttattctttttgttgttgttgttattgctgccccattggagaagaggagaaaaatctcaacagagaggctttgacaggtacagtataacttatcaggctttaaaggaactagctgaggttagccttagttcagatatgtcagagctgtcagaggccagccccgaaatctgtaagacattacagactgaaaactcagcgaggacggctgaagggctcagcgggaattccaacacacacatgagcctggagtatctccatgcctcgacctgaccctggataatacttggagtttgcttcttgttgttgttgttgttgcaggattactaagttcttcgggttttggttctttggctcctgaaattggtccatcacacttgggggacaattcatcattgcgtagggggagtgaggatggcctctgtggacagtccaccccgggcagcttgagtgttagggcttagcaagcagagccaatgcaatcctctgggttagcaagggaggggatgaatgtgggcacgcagagatagcgtctgcagatgctttaaatggttaagatggtgtcagagatgtcaatgcaagtaaactcttgggaacaaaacagagctttttgaaatatggcttctttctctatctcgcccaccccagggtgagtgagagcatggaatacccactaaagaggcagaaaaaaaataccttagtggaaagaaatgggatttggaataggaactgtgtgccaaatttaccagaaaccacttaacccctttgacccctggttttcctatatgtatgcatatttttgtcttggcttggcgtggtggctcatgcctataatttcagcactttgagaggctgaggtgggaggattgcttgagcctgggagtttgagaccagtcttggcaacatagggagactccatctctacaaaaaatttttaaaaagtctctacaaaaaatttaaaaattagccaggtatggtggcgtgcacctgtattctcagctgttagggaggctgaggcaggaggatcacttgaacctgggaggtggaggctgcagtgtgccctggtcatgccattgcactccagcccaggcaacagagcaaggccttgccacaaaaaagaaaaaaaaattgtcttaaaaaaaaaaagaaaatcctatggtgcaacgtgatggatttatttcctgtctgtataatcttggctttctcacagttggtctatttctaactaacaccccagttcatgtaacttctcttagagagagagctcacattgcatgagaccatgcttttattattattttttaatttaaaatctaataatctttgtttctgtctctctctctttctctgtctctctttttgattgttgttcttttattcttgtttatccaaaagtcaaatttaagattccaaagtgctgcttccaggctggccctgagaactcactgctggttttgtaaggaatacagcagaggtcaggagataggaagggtgaagtggaaggaatttgctcagatctactcttgttttattttccatggagtttcactgcagtttgtgttttgaatacagtcagttacacaaagccccatgaagtgaggatataggttggttggcttgcttgtttatgtctaggaagccatacattttgtactttaagataaaaatctccccttttttggatgaatgtgcgctttcagtaatacatccaggctacagaggacgtgtgaactacacataaaataaaaccaatttgctttccttttaaaagtcaattagttcattcttccatttgtcccccgtccaaaaatgcactgacatttccttctttgcatcatagaaggcccagcttctttctatctaccctagtcccactatccttcacagtcctagctccatgaagccatcttgctcccaaccaactcatggagctcttgttataatacctggcacatagtaaacacggcagaaagctcagctgttactctatgactaagtattgcaaaggactcacaacttactcctgtaccattcactggcataggaaacacttttattaatgttgtgttatttactttccccctagaaagtctcattgagttggtaagtagtagggtcactgctttaaaaaataaaatctccatacaattctcatgtgtagtcagggttactaagcactgatttttttttttttttttttggaracagagtgtcactctgttgcccaggctggaatgcagtggcacgatctcgtctcactgcaacctccgcctcctgggttcaagtgattcttctgcctcagcctcccaagtagctgggattacaggcatgtgccgccacaaccggctaatttttgtatttttagtagagacagggtttcaccatgttggccaggctggtctcgatctcctgacctcaagtgatctgcccacctcggcctcccaaagtgctgggattacaggcgtgagccatggcgcccggccagcactgatttttaaaagtactcatgtggttcttctcacttccaattatgaatgtcttccctcctccattcactttaaaatacccaaaggcagagaggtacattgtttacgcttccctgtgtcttccccaaagccctgcgtctggaggccactgtcaagctgaaaggacaaggtgagtgttctgtggagtcacct

SEQ ID NO: 678985 - DNA, 2828 bp, Homo sapiens
tgagaggaagatgagttgatatgttttcccctcaactaagcagcctatgttttctttttgatatgaattaggatctggaataatatgacagtaattataatacgcagaagagattatgccagtcaaatgaagattcattttccccttctttctttattctttttgttgttgttgttattgctgccccattggagaagaggagaaaaatctcaacagagaggctttgacaggtacagtataacttatcaggctttaaaggaactagctgaggttagccttagttcagatatgtcagagctgtcagaggccagccccgaaatctgtaagacattacagactgaaaactcagcgaggacggctgaagggctcagcgggaattccaacacacacatgagcctggagtatctccatgcctcgacctgaccctggataatacttggagtttgcttcttgttgttgttgttgttgcaggattactaagttcttcgggttttggttctttggctcctgaaattggtccatcacacttgggggacaattcatcattgcgtagggggagtgaggatggcctctgtggacagtccaccccgggcagcttgagtgttagggcttagcaagcagagccaatgcaatcctctgggttagcaagggaggggatgaatgtgggcacgcagagatagcgtctgcagatgctttaaatggttaagatggtgtcagagatgtcaatgcaagtaaactcttgggaacaaaacagagctttttgaaatatggcttctttctctatctcgcccaccccagggtgagtgagagcatggaatacccactaaagaggcagaaaaaaaataccttagtggaaagaaatgggatttggaataggaactgtgtgccaaatttaccagaaaccacttaacccctttgacccctggttttcctatatgtatgcatatttttgtcttggcttggcgtggtggctcatgcctataatttcagcactttgagaggctgaggtgggaggattgcttgagcctgggagtttgagaccagtcttggcaacatagggagactccatctctacaaaaaatttttaaaaagtctctacaaaaaatttaaaaattagccaggtatggtggcgtgcacctgtattctcagctgttagggaggctgaggcaggaggatcacttgaacctgggaggtggaggctgcagtgtgccctggtcatgccattgcactccagcccaggcaacagagcaaggccttgccacaaaaaagaaaaaaaaattgtcttaaaaaaaaaaagaaaatcctatggtgcaacgtgatggatttatttcctgtctgtataatcttggctttctcacagttggtctatttctaactaacaccccagttcatgtaacttctcttagagagagagctcacattgcatgagaccatgcttttattattattttttaatttaaaatctaataatctttgtttctgtctctctctctttctctgtctctctttttgattgttgttcttttattcttgtttatccaaaagtcaaatttaagattccaaagtgctgcttccaggctggccctgagaactcactgctggttttgtaaggaatacagcagaggtcaggagataggaagggtgaagtggaaggaatttgctcagatctactcttgttttattttccatggagtttcactgcagtttgtgttttgaatacagtcagttacacaaagccccatgaagtgaggatataggttggttggcttgcttgtttatgtctaggaagccatacattttgtactttaagataaaaatctccccttttttggatgaatgtgcgctttcagtaatacatccaggctacagaggacgtgtgaactacacataaaataaaaccaatttgctttccttttaaaagtcaattagttcattcttccatttgtcccccgtccaaaaatgcactgacatttccttctttgcatcatagaaggcccagcttctttctatctaccctagtcccactatccttcacagtcctagctccatgaagccatcttgctcccaaccaactcatggagctcttgttataatacctggcacatagtaaacacggcagaaagctcagctgttactctatgactaagtattgcaaaggactcacaacttactcctgtaccattcactggcataggaaacacttttattaatgttgtgttatttactttccccctagaaagtctcattgagttggtaagtagtagggtcactgctttaaaaaataaaatctccatacaattctcatgtgtagtcagggttactaagcactgatttttttttttttttttttggaaacagagtgtcactctgttgcccaggctggaatgcagtggcacgatctcgtctcactgcaacctccrcctcctgggttcaagtgattcttctgcctcagcctcccaagtagctgggattacaggcatgtgccgccacaaccggctaatttttgtatttttagtagagacagggtttcaccatgttggccaggctggtctcgatctcctgacctcaagtgatctgcccacctcggcctcccaaagtgctgggattacaggcgtgagccatggcgcccggccagcactgatttttaaaagtactcatgtggttcttctcacttccaattatgaatgtcttccctcctccattcactttaaaatacccaaaggcagagaggtacattgtttacgcttccctgtgtcttccccaaagccctgcgtctggaggccactgtcaagctgaaaggacaaggtgagtgttctgtggagtcacct

SEQ ID NO: 678986 - DNA, 2026 bp, Homo sapiens
aattggagaaaacttggaatacttaagggcttgcatttaatacagctttttatagtagtgattataacttgcatgggtagaaaaataacattaatgatggaaagaataaaataggaaaagattatagaaatattgggtaatacttgtttcttagtagttaaggtttgagatcctcctatattagcagctttatttgatgctttacagaaagactctcacaactcctgaagaaattatttgaaacccaagaatctggtgacctcaatgaagaattagttaaggctgctgccaatggagatgttgctaaagtggaagatttgcttaaaagaccagatgtggatgtgagcattttaaaaattattttgaagcatacaaaaagtagaatagtataatgaaccttatcctcaacaattactaagattttgccagatgtgcttcatttatttcttctttcttgtttttgtgaagtattttaaagcagacatcagacattcttcagtgtgcatttctaaaaaaaccagacatttttgtatttaacattatgaccttttttatgatttacacacttacattttggtttttaaagactagtatccttttgggaaattcagcgattttttttttcctcatgtaaacatcattttatgacatcttctaagtatattttagtgaattttataagcaattttctttttatttttaatttttgtgagtacatatcagatgtgtatataagcaattttcaatccttcttttcaaaatatttaatgtaactcctctccaccccagtgatagttgactatttcacaatttataaggcagatgaattaaaggccatatattttataactcttcctaggttatgttgtgtttttgccattcattcaagctatcttttaagtgggcagttttgattctagtcattgtgctttggctttggcattgataccttgctggcaccagtattacgttcggtgtcagccaagaagttgtagttggagtgacaatttgaatcattctcactgtgttgtaagggtttttgttgccatacctttctttggatgtttgtttgtttttaagtatgctagacagtttgaagatgagatctataattgtaaagtattaatgtcttatttctcctataagctcgacatgttagctttattatagagaaatcaattgtagcaatacagcacagcaatttgttgattggttatgagctatgtaaaaataatttgcttcaaatgttgaagtaccaagtattttttgtgtttgaaagatagtcggatttcctttgtattccagtcaagcagatttaggttttactgtacttaagttttttcttcatttacttactaaattattttaaaattattttttaagaacattatagtactaaaaatttaaaggaaaatacagttctataagatttgttatgaaaaataacatctcctctttctcacccctattttcctgttctacagaggcagctattcttagctggctgatagccttcatatttacctctacattttccagtaacataccagtatacctctgttataatgtcttaattttctttcttcctttcctttaccttttcctttcctggatcttttgatacctcacagtggaaggtgaggatttagctttatttcaccacttccatcccatgcccacaagacacacacatactgtttctagcttcatcatgtagttatattgtaattttgtttggattaaaattagttgtgtatgttatataaatgacattcatagccatgctgtggagtatattagattatgttttcctgcctaactttttgttttaattggagttcacagttgtcatttttaaaaarctgaagtataatttccatacagtgaaatatgtggatcagccagttttgacaaatgcataccacccacgtagtccacacctctattaagatgtagaatatttccttcattcctaaaagttacttgtggtctttcccagtccctctttaccttacatgtaattttt

SEQ ID NO: 678987 - DNA, 1077 bp, Homo sapiens
taaataccatcctatagcaatctattctctacagttgttcaagttttcctgtctagggatgagatgcaggcagctagtgttctgtccttgagtttgagtagtgggcttggagtgtggccattgcacatcagacttatacctgaggctccccttgttacctatgatgtgcttgtgtttgtaggctttgagtttgtctgggattccctgtgctctttacactgtggcttcctgttctctctaaagtcagataatgcttttccatttgttttctctctttcacaaatgtgttactttttcttgttttctaatgttctccctttatctttatggatttttaccttttaaattattttattgtcattttagtgtggtttcaggaaagatagtatataaacatgtggccaagctaccatctttaactatctttaatgattttgtggatgggatgtaaaaggggtagaattaaagaattgcacttggccttgggtatgtccatgggttagttatacatgtccacaacatctgaagtgaaggaaaggttggaaattactgctttataatagttgtatataactaccttgctaacttatttatatatccttatttattgtccttgcagtttgcctgcaagttgatgtttggtatttttgttgaattgaatttatttatccctagcarctaatatcttttctaaaagttttcttttcacttcagtgctttttttcattgaaccatggactcagagattaatctaaaaagaaatatatatacaaaaccaacttaacttacttcctttctttctcccttctttcaactttgcagattgcctaacagttatttcgtaactctttggacaatgaaacttttgttttttaaaacaatgcttgcttcccttctcaaaattaagaagtctgtagttatctgaactatgatatatggaacaccaacctaaattattctcgtggaatcatacagtatactagacttaaacctacaccgtatgtatatattgcctgtttctgattattcattcattctttcattcttttttttaaaaaatgtaggtaaatgggcaat

SEQ ID NO: 678988 - DNA, 1297 bp, Homo sapiens
ggatgaaaatatcacatgtatcccaaaatatgtacacctcttgtgtatcaataaaaacaaaaaataagagatgaccctggagatatgcaccaaaggagttttaatgtaaaacccttcctattcagggtagactgatatagtccaatacgaacacagaacttttaagctgtattcagacctaatagtgatataatgtattctcctcttgaaggaaaaatagtgtacagaacactgtatcataaacatcctcatataattcacatacacacacaagacacacacacacacacacacacacacacacacacgtaattcttatcatttgtttctctccaccttaccaatatatattctggatttttacttaccatctaaaagctagctttaatgagtatttggttgtatcactttatttgctttctctaagacttttctctatattagttttatttgtcattgtcaaaaattgagagatatcacccacctattgccacttggatactgtactacaatgtcatgatcttcatcaatgccacaaacagttccagttgtagttaaagtctcaaacattccatcagtccatcctccatgaccatgctgcaaagactgtacaatttcgaggtcgagatctatatttaccaggtcaccaatctgcaatccaccaggattcctgttgccattctgctcacctgtaatttcagaggcaattgaataaagggagaaaaaaacctcacaacaacaggcagctgcattatctttaaataacatgtagatattttagtttcaggtaccatctagttttaaaaggtcttgagaattccctataagtataaaattttagaactagaaagctttttttaaaaaaagaaaaaagccaaacagactcaaaaattgaaataatatgagttataacaaagactgagtaaaagtagagtctataaaagactattcaaccttgtatcagaacacaaagttccaggtgttgaaaatactcacttttatgcctggataacttactatcactgcattagaaccacaataactaactagagaatatgaatgaaagccctggaattattttttccattaagtgcttagtactatcttattttaacaaatggttcctgtgattcttgccctaaagagctttttaaaatatgtcaaagcttattccctagattatyttcaaaagctagttctgagatgaattcatgatcatgaaacactatactgagatccaaaatatgcatgttgattttgcatttttcttatgaaagcaaaacacaaaacaagaaag

SEQ ID NO: 678989 - DNA, 663 bp, Homo sapiens
aaagattttgacatgcatttctctggaggagagcctatagctttccaaagaagcctgttatccccaaacagtgattgttactcagttacagccatggaaggggctctgtaagctgtgattctcagtatactttgggttcataaacctgtttaaaaagtctaataaaaggccgggcgcagtggctcacgcctgtaatcccagcactttaggaggccgaggcgggtggatcacaaggtcaggagatctagaccatcctggctaacacggtgaaaccccatctctactgaaaatacaaaaaattagccgggcrtggtggcaggcgcctatagtcccagctactcgggaggctgaggcaggagaatgacatgaacccaggaggcagagcttgcagtgagctgagatcgtgccactgcactccagcctggtcgacagagcgagactccgtctcaggaaaacaaacagacaaacaaaagtctaataaaagtttccaaatgatttaagtgtaattttagaggttcttcaatcctccacaacccattctcagacttcttgaacttagttctgctcttcggtggttggagtttaaatctttaattctcttttgtataactttctcttttttgctttgaaaatactttattactgatttttaaattttaaata

SEQ ID NO: 678990 - DNA, 663 bp, Homo sapiens
aaagattttgacatgcatttctctggaggagagcctatagctttccaaagaagcctgttatccccaaacagtgattgttactcagttacagccatggaaggggctctgtaagctgtgattctcagtatactttgggttcataaacctgtttaaaaagtctaataaaaggccgggcgcagtggctcacgcctgtaatcccagcactttaggaggccgaggcgggtggatcacaaggtcaggagatctagaccatcctggctaacacggtgaaaccccatctctactgaaaatacaaaaaattagccgggcatggtggcaggcgcctatagtcccagctactcgggaggctgaggcaggagaatgacatgaacccaggaggcagagcttgcagtgagctgagatcgtgccactgcactccagcctggtcgacagagcgagactccgtctcaggaaaacaaacagacaaacaaaagtctaataaaagtttccaaatgatttaagtgtaattttagaggttcttcaatcctccacaacccattctcagacttcttgaacttagttctgctcttcggtggttggagtttaaatctttaattctcttttgtataactttctcttttttgctttgraaatactttattactgatttttaaattttaaata

SEQ ID NO: 678991 - DNA, 663 bp, Homo sapiens
aaagctaaaacccagccatagtaatatttccagtgacgtaagataggatactgagaacataaagcaagaatcaatggctacagtaggatgaataatgaccttccaaagataatggcattccaatccccggaacctgtgaatatgttaagttacatggcaaaagggactttgcagatgtgattaacgttacagatgttgagatggggaaagtatcctgcgttgttcagtagacaatctgaccccatgagcttttaaaatcagctgaagttagtgagagaggcctgagacatgagaagactcaactgctcttcctagctttaaagacaaaggggtcatgagccaaggcatgtaggtagctgtgagaagatgagagctatacccagcaaggaagcaggacctcagtcctgcaaccrcatgaaactgaatcctgtcaacaacctgcatgagcctgaaggcagcttctcccccagagcctctagcaggaacacagccggcaacaccttgactttaacacaacgagccctgacctctgacctgcagaactgtgagatgatacatttgtgccactaagattgtgacaatttgttacggcagcaataaaaatactaatacagtattcaagaaaatttgtcaaaataaacaaagagtggcagagaatggatc

SEQ ID NO: 678992 - DNA, 1484 bp, Homo sapiens
ataatatataaatacataataaatgtaaacaggataattttagttttagaataatgattgatatatctatagtttatatttttgtattttatatttatccatttttttatatttaaaatataattttctacttttgaaagcattcttttkgttaaacttctagaaaacatgtaaggtgttaattgtttctgtatcttctacccacaaaatatgcccatctaccagctccacaaagttttttgccttgtctcacatatatgaaaggttatttttctctctttgcctctatctttcgttatcttgtagaagtccctagcagcagtgaaaacacagttgagaaataatggtaacaggcaacaaggaacctatcaccattaagattcttgaaattgtatgagaagggtttaaggttgcttgcagcctggatgtaagaggtggagacacaagaggtcacatttgcctttgtgcaaatctaaaatccattgggttgatcctggagttgttaaatcttctctccaagtagaagctgagcctctgtatttttacttgtcaaaaagaactatccaaacagttctactttgccctcatagcagttcctaggtaagtgaagtctactcttatctactagaaatataacactaaatttgagattatagaggtggcatagcaatactaaattaaaaaaaaaaagaacacaccatctcaaaaattagtttaggatagatcaataaattaaatctgatagtcaaattttaaacattttagaagaaaataaagacaaatctttttatgactcaggataggtataacgtattttctaaatagcactcaaaatgctaaattataaaagaaaagtcaacagattcaattgcattaaacttaaatttcttgtccataacaaactctcttttaacaagagaataaaaggcaattcataaacagagaggagatgtttgtaacttatgtatgtaaaatgtgtatctagaatatataaatgacttttgcaaataaacaaaaaaggaccaaaaaaaaatccaatagagagaaaccaacagaaaagaaatgacaaataacaagcaaacttattaaagaccaaatgttttaaaaaggcaaaggccccatgatatggtttggctttgtgtccccatccaaaccttatctggaattgtaatccataggtgttaagggagggagttgtaatacccacgtgtcaagggaaggacgtgattggatcatgagggcagttttctccaagctgttcttgtaatagtgagtgaattcctaggagatctgatggttttataagcttctggcatttcccctgcttgcactcccttctgcctccttgtgaagcaggtgccagcttccccttcaccttccaccatgatttcaagtttcctcaggcctcctagccatgcttcctgttaagcctatgaaactgagtcaattaaacttatttccttataattactcagtttcaggta

SEQ ID NO: 678993 - DNA, 1331 bp, Homo sapiens
ccaccagggagaaaagtttgattactggctgatggagctgaatctcttggcggggaaggggaaggctccagccgttcatggcggaaaatgccagccagctgccccgggatccttgagccgtgcctcccattccggcagggagttgggggtggaggggagacactgctcaccagttggtcccaaaaaaggaaggaaaaggtcaagcaacagtgagaggttttgagtctccatttcactcaccgcttctggtgcccccacattgcgcgccaaaaatgttgcaggactttttcttagttcagctgaagataaagttcttgtccgtcccacggccatgaaaattyaggctcgcagatgatttaaagggtgagtaaggcagggttttattgggtaaaaaggggaaaaaaggggggacacaggtattccctcacaaggtcagactcccctgctagagcacttcccgcctgccgttcgaatcccaagttccacacaggaaggggaggggccaggctcctcaatgctgcaaacctggcgaacttcccgaggcttcacctcagtggagaggctggttagaatttctccagggaccctctgtcacttggctgtctcaaagggatttctttctaattgacaaattaagacagcaactttgcatatagcccagatgtctacattaagaaaaaattagattggtctattgtcaaatgtaatctcattttcctaaataataacatggtgaccctcctgaattaaaaagacaagacctaaagtattacataaaaactttaaaactttgttttcctccaaatgaagtgaaaattagacaccagggaggtaactgagtttcaaacctgattgtaacattgaatatttcagctttgtctaatataagcctaaagcataagaacaagaaatgaaacaatgctgattcaaagtggagtgtcaacttgaccactaaaagtgaaccactccataaaagtaggaacccaaagaggtccactgattcacaaaagaagatgctgagaaaacgtgcctgtcttgaacttggcattgggtagaaggaaaaaatatattttacatatgtgtcatatgtgacatatatgtgtcatatagacatatgggtaatctgtgaaataatatatgacaagacaaaaatacgacatatatcacacacgacacatatatatcacttatgatacaaataagccacaatgacatatagatgtatgtcatatgtggcatatatttgtcatatgccatgtgtgacatgcattagtcatacagcatatgaaatgtatgtcgtttcatatgccaaatatgtgacatgtgtcaaa

SEQ ID NO: 678994 - DNA, 637 bp, Homo sapiens
tttgtgtccccttctgattatctacgaagggatttacatggcacaaattaaatctatccactcaccctgaagttctgtccttccttcaagcaggagccccagcagagtggcccagggccagctgtttttaagcagcctctgagagcaacacagcaggtcccacccaggagaccacagagctatggtgggggaagccacttrcctcctgtatgagttccctggggttgctgtgacaaaggacactgagagagtgtctcagataatggacattcattgtcacacagttctgaggctggaagtccaagatcaaggtgctagcagggttggttccttctgacagcaatgaagaagaatctgttcctggcctcttttctggcttctggtagccttgggcattccttggcttgaaggtggtcatcttcttcctatgtcttgaaatcatcttccctccatgtgtctggctctgtgtccaaatttcctctttttgtaaggatagtggtaatattggattagatcccaccctaatggtcttatcttaaattgatcatttgcaaagactatttccaaacaagatcttattcacaggtactggagattagggcttcaacatcttttgggggtcacgattcagcccatc

SEQ ID NO: 678995 - DNA, 623 bp, Homo sapiens
gggggagatctctcttcagctatttttttgtaatttgcgggtggcagagtcatctttagcgggtctctatctgcaggaattctgtacagcgtaggttgaagacatgtctctccatgaagatttcgtatttacttctgccaggtttcccagattatcactagcccatgaccatttttctgtattaatttctcagccttagagttcctggcacacactgttgtgtgtatggggtggggactcgggtaatgacaggctcagttccaattctctgctttgtggaagctcaagatttcattccttgcccctagttgacctttaaaacccaaatctctgcattatagcaacctaggacaaccaggtgtcaacataagaatgtgctgctctgctctattctcacttttttccttattttagtccctaaggagttcattgcctttcttcccagttcagctgtgcatttaaaaggatrttaaactccatgcagcaattccaggtgttttgcaaaaggaatgtttctcaggtccttttatagtaacctctctattttactagaaccaagagccctctctgcatactttttacctatttactttgaatagttttcatttttaatgcagccatca

SEQ ID NO: 678996 - DNA, 855 bp, Homo sapiens
gtatacacattgtggcattcaagtctgtgaggaccaagtatctagctgtgctttaattctaaaaggcgaaggctttgttaagtagctcaaactgcaggggaaattatgatctgagttcaagctaatatatcacgaaaaagcctagacacagcatctgtcaacttgggtgatcttgcttctatctgggcagccacctggtaaatttgtattttgcaacagcagctgcagagactgtgtttaccctgtgtagatagtcagagaaatatgaagaaactgggggttcttcctcttctatttgtgctagcggtaggctgacttagttgaacacattctggcagttttgtaaaagagtacaatgccttagaattttgagctgctaagtcggtcccctcaacagccaggggagagacagggcagacatcttgactgatgtgtgacatcatttgttgccaggaggaaaaagcaggactggctccaagatgaagcagtcagacctacaggagagtagccacagctactggttttcaaaaggtaggacagagactcttaaaaaggctaggaagattcggacaaggtgaatggagagagccaacagcagagccgtgctcatgaagagcatagacaatcatggagagcatagacactcgacattcacagcagagaattactrgtgaagatcaatgtagtaaaactgaggaaagaggaaaaacatgttttatagtcttttctttaacattttgcttattttgtgttatttgattcattaatattttaggcacagtaattcctgatttattagtatgtctgcttaaatgagtaaaacatggagtaataaaattttaggttcttagtttt

SEQ ID NO: 678997 - DNA, 907 bp, Homo sapiens
tgaattcctatgttcacgaataaaatgaaagctctcagccttatatttgtggtttagatttttatttaaaataacaacaataaaatatgtccctaaaattgcaatgctcaaaattggtttttatgacaaaagtttgaaacctagaaatgcctgatttatggcaaattattgtttttataatgcaaaccatcatacattttctccctaagtgtmatcttttatcagttcaactgaagagctttttctatctcctttcacatttgttatttgactagaagcagcttagactgagcaacctgtaaaaccaaccacctttgtgcagaaatatcatccaactggctctagattgttgaaggagcaaagtcaagtccaagttgcccagtctaacaggcttgcttaccttctagttcagctccttttctctgaattgagtctgccatctgaatttgacctccagatgaccatgactttttcaaatcaaatgtgcagtttgctataaataagaccacatagctgcacaggctataaataactagaaattatatgtttttttccttgtctgtttgtactagcactgcaaaacccttcacttgctgtgattgaatagtctctgtaggcagacaagaaaatatagctgcccaaagcacttcatcctcctagaatggaaaggtgtcaggatcccaaatacactgcaagtagatggagaaaattactgggaaggagaaaattacaaaagagactttcagtatctgtttggaacagtggatgatgaaagtggtagttacgtgtacagcatgaaaataaatttatcagacaatgatgcttgtttccatcagttattaaaaatggaaaaatagaattcttataaatgctaaaatgaaacaagagaaaaataatcactgtttta

SEQ ID NO: 678998 - DNA, 2089 bp, Homo sapiens
gagcataagaagtatataacacaactttgctactagtggttccacagtactttgaaattaatatagagcaaagggctacatgagctgtattaattctcttctagccaattaggcaatgacatatacataatatatggagtcaaatttaactctttggcaaatcttatctgtatttaatattatatatattttgtatataatttttattatataagtaatatgtatttatatttaatacaaattatgtacccctatttatacttcttgatgtatataactgttgtatgtgtgtattcagataagtaatggcagacatgattgaccacaaacatatcctgtagttgttgatacctagtcattctgttagtaagagcaaagctctttatgtagaaagaatggacagggagggaagggtagcaggtgatatgaaaacattatgtatcaatataattcaaaactatacattaatgaaatttaatgattaccattaagatagagtatatttgaagaaattctaatttttgaactctacagctatatttacttcactaagagatgagtgaagttcaatatgaagaaattaaacagaaaaagctattgtcagtatcgggagcraaatgagcataactaaggatatgggaaatccaatctttcatgtagtaattcattgttttgagtatagactgcctgtaagcagtagtagaaaataggattgggcaattgtagacagatgagaatattgtgtcattagacactagaagtatctcaaaaacagtatttactgtcaaacagttaataaagaaatgatataatcattctagtaaaagcacatatttgaaaactggactacaattgtaggtcaaaatttccaacagcatggacatgttttaggtttatttcttgtaattgggcctagaaccatctcttccctcctgagtatcatcctcttgggagctctagtctgagcaaaccaactctaggatataaattagaatctttctggtactcaatggcttcaaattcaattaatatatttacaagagtgagctatgtcagatgcattaattcgtagggagaatgttgattgttaggaattatcttttattttctttatcagataaagcctttaatgcttaagttcagtaacattttaactactttgtactggatccctggtgagtctaaaagcagaaatttttacacacaatcattataaaacaaacattacattcaataagacagcatattttagatggctcccacatcataacgaatgaacaataagtaagatctacactaattatagacaaggacacataatcttatgaattctgaactccctgacactgaggtaaacctattaactaccacttggattctgctgatgtgttcatttttctaaagcctatagagagttctgaagtaacattctgcatattaattcagtaatttgctatgtagatgccttcaatatctattcatccacaattgacaacaccagtaacaaacttattgaaattatttacaataatatgactaaggagtgtttctgggtatcttccattttaaatcaagaaatttcctttaacacaacaattatttaggttggaattcagatactgacaaacaatcccattggctatcatgacaataagtgccttttttaatgcaatcagagtagtggttagtctgctggaacaatccaataagcacagtttatctactcagaacactgataaatatgctcatgttgtcattttacaaaactacaacatttcagtccagttggctcatttaagtctaaaagaagtcatgtattaactcgattcaagaggcttggtcatcacactgagacatgagaagtagcttacttatgtcatagaaaatggttctgatattgcaggcacctgggttggctaaaacagaactattttatatgaagtatagaattattctacagtttccactgttataatccagcaaatatcctttaggtactctgcctgaggaaatatgttattgaataccttcaaagaagctgtgatacttgaagttcatttaaggccaagtgaaaggaaaatgagacagg

SEQ ID NO: 678999 - DNA, 1758 bp, Homo sapiens
aaatgttggcaagggacacaagacatttcttgaaaataaaaatttccttttgtcctggaagtatatatccaaaaaagaaaaacaattaggagtaggaaaacgagtcttttttttttgtctttaaataaatgccaagtttgacaaatatcatttctgttggtaaccttacctgaaagaagatacttttagacttattcgaaacatgattatagaaaataccaaaataatatgtgcgtaacatttaaatataagttatggaaagtaacatgacgaggaattttgagccctttaccaaggtaaagaccaggacattgccatatgttagctaactatacagcatcctgtagccacagagtccttcaccccgaaataatcataattctgaattcatgtgtgttattctcttgtttttcctaatagtttgattctacatgtgtttctttttgcaatatatcgactggtctttcctggttttctaagttttaactttatgcaagcgttatatgttttcttctataatttgtctttatcatgaattccttatcagtatatttgaaaaattaacctgtactgattatttttttcaatatttagtagaattggtactatattgattcataaagaattgaacatcttttcaaagctgtatttttttgtttttgaaatatttattttccttttttttgttttttttgtgaggccttttgttttaattcctgttgatttataggagatgattatttcaatgcctgaataggataaagtatgaaagcaggctcaattgaaacatggatctcattcaacataaacattaccaataattcatggggttcaagaaggaccagggtcagcaagggagacagatatgatacagcttccaaatcatgttcatttttctcatgcaatgatgtctttttattttctagtgacaagtgaaggtccgatactggttgtgaaatgctgtgttcagaggaatattgttcagtttggggggcttcctagttctagactacattagtcaacagatagaaaatatcttcgtgactaatgtctattgtctataaagctataaattctagttttttaaagcaataggtaatctgatcagaacatgcaggtttctttttacaaaatggatttttaaaaactttttctcatgtgacatcattctattaataagtgtcacttttgcatgtctgcaataatgtcttttccagacgcatcattctcccaaagtcccatgaaagaaagagtgtatcaccagctggaagttctctctttcctccttcttcataaattgggttataaatagggagttcacttaggagaayagaagtcttacccttaagtagttgatgttttcaatcttttattatttcctcttttgtattttgtgagcctgatttaactcctatgtattcttgaaatcatgaatccacctgcagtcagcttttgcatatcctcacaaaagagcaagagggcgggtgtctggagtgttcctggaagcagcatgaggagaaaggagaacatgaggtgtatgtgagatgtgaggccaggtgcacagggactgggtgcaagctctcttgtcaccaggtgtcctagcagtcagaccactgtagacctgatgacgcggcctccatcacgaaatccataatggtgcctgaatgccattccttcagcagagagagaagtctcctttttggtgtccacaagactatgatttgcctctcctttggagggtcttcagtaacaacaaag

SEQ ID NO: 679000 - DNA, 1758 bp, Homo sapiens
aaatgttggcaagggacacaagacatttcttgaaaataaaaatttccttttgtcctggaagtatatatccaaaaaagaaaaacaattaggagtaggaaaacgagtcttttttttttgtctttaaataaatgccaagtttgacaaatatcatttctgttggtaaccttacctgaaagaagatacttttagacttattcgaaacatgattatagaaaataccaaaataatatgtgcgtaacatttaaatataagttatggaaagtaacatgacgaggaattttgagccctttaccaaggtaaagaccaggacattgccatatgttagctaactatacagcatcctgtagccacagagtccttcaccccgaaataatcataattctgaattcatgtgtgttattctcttgtttttcctaatagtttgattctacatgtgtttctttttgcaatatatcgactggtctttcctggttttctaagttttaactttatgcaagcgttatatgttttcttctataatttgtctttatcatgaattccttatcagtatatttgaaaaattaacctgtactgattatttttttcaatatttagtagaattggtactatattgattcataaagaattgaacatcttttcaaagctgtatttttttgtttttgaaatatttattttccttttttttgttttttttgtgaggccttttgttttaattcctgttgatttataggagatgattatttcaatgcctgaataggataaagtatgaaagcaggctcaattgaaacatggatctcattcaacataaacattaccaataattcatggggttcaagaaggaccagggtcagcaagggagacagatatgatacagcttccaaatcatgttcatttttctcatgcaatgatgtctttttattttctagtgacaagtgaaggtccgatactggttgtgaaatgctgtgttcagaggaatattgttcagtttggggggcttcctagttctagactacattagtcaacagatagaaaatatcttcgtgactaatgtctattgtctataaagctataaattctagttttttaaagcaataggtaatctgatcagaacatgcaggtttctttttacaaaatggatttttaaaaactttttctcatgtgacatcattctattaataagtgtcacttttgcatgtctgcaataatgtcttttccagacgcatcattctcccaaagtcccatgaaagaaagagtgtatcaccagctggaagttctctctttcctccttcttcataaattgggttataaatagggagttcacttaggagaacagaagtcttacccttaagtagttgatgttttcaatcttttattatttcctcttttgtattttgtgagcctgatttaactcctatgtattcttgaaatcatgaatccacctgcagtcagcttttgcatatcctcacaaaagagcaagagggcgggtgtctggagtgttcctggaagcagcatgaggagaaaggagaacatgaggtgtatgtgagatgtgaggccaggtgcacagggactgggtgcaagctctcttgtcaccaggtgtcctagcagtcagaccactgtagacctgatgacscggcctccatcacgaaatccataatggtgcctgaatgccattccttcagcagagagagaagtctcctttttggtgtccacaagactatgatttgcctctcctttggagggtcttcagtaacaacaaag

SEQ ID NO: 679001 - DNA, 1149 bp, Homo sapiens
aaaaaaaaaaaaaaaaaaaagccagtcttaaaaaatcacgtgttatgtgattccagttatatgaaatgtccagaatggcaaacttaaagagtcartgacaagtgtcagcctagagttggagtgagagtggaggtaatggagagagacggctaatggatatggaatttcttttgcggttaatgacaatattctgaaactgattgtggtaatggtagtataaatctgtgaatacactaaaagcattgaattacacaatttaaatggatgaattatttgatatgtgaactctgtctcaaaaaagctgcttaagaaatggagaaacatggaaggttttcacagtccagaggttactgaagaatttgataaaattataaaggatacttagtacaagagaactgtgaccatacagaattcgcttctacattcataaattaatgggggtggtggtaggaaaataagtaacgtttataaatattactgtctttaaaaacattgtatgcccttaaatgccaaccataacattttcacaacaactttcttcatccttcagaaaaagcttggaggtatatctccaaggtggcgttagtcatttgtgtcactgaagccttgattcttttccttgaactgattccctcattactgcaacatgtatttattcagcacataagtcctaagtaacaaactggaggtggaagataaaatagtgagcgaatgcagatatgttccttgcctcttggagtgtcccatcaagcactgatgacaaacattgttcattcaatgatattgacaaaagtatcattgaaaaatgaatttagagtttatgtggaaaaacatgccgtttagggactgtacttcataggagcacatttctaaagaaaaatgtgttcattggagaattactggctatttcaggaggtgaaagtgggtgtctgctgaactgtgagcggagccgtccaggcagaggcaagagtcagtgaaaggattctgtgcctagcaggagcaggacatgttcagggaactgcagtaagaccactgaagctcagtatagcaagcagagaggcaaggaacaagaggagtctagcaaactaggcaaagatgaggtcattcaatgcttagtcatatatgcttaaaaatgtctttattttgaga

SEQ ID NO: 679002 - DNA, 1149 bp, Homo sapiens
aaaaaaaaaaaaaaaaaaaagccagtcttaaaaaatcacgtgttatgtgattccagttatatgaaatgtccagaatggcaaacttaaagagtcaatgacaagtgtcagcctagagttggagtgagagtggaggtaatggagagagacggctaatggatatggaatttcttttgcggttaatgacaatattctgaaactgattgtggtaatggtagtataaatctgtgaatacactaaaagcattgaattacacaatttaaatggatgaattatttgatatgtgaactctgtctcaaaaaagctgcttaagaaatggagaaacatggaaggttttcacagtccagaggttactgaagaatttgataaaattataaaggatacttagtacaagagaactgtgaccatacagaattcgcttctacattcataaattaatgggggtggtggtaggaaaataagtaacgtttataaatattactgtctttaaaaacattgtatgcccttaaatgccaaccataacattttcacaacaactttcttcatccttcagaaaaagcttggaggtatatctccaaggtggcgttagtcatttgtgtcactgaagccttgattcttttccttgaactgattccctcattactgcaacatgtatttattcagcacataagtcctaagtaacaaactggaggtggaagataaaatagtgagcgaatgcagatatgttccttgcctcttggagtgtcccatcaagcactgatgacaaacattgttcattcaatgatattgacaaaagtatcattgaaaaatgaatttagagtttatgtggaaaaacatgcygtttagggactgtacttcataggagcacatttctaaagaaaaatgtgttcattggagaattactggctatttcaggaggtgaaagtgggtgtctgctgaactgtgagcggagccgtccaggcagaggcaagagtcagtgaaaggattctgtgcctagcaggagcaggacatgttcagggaactgcagtaagaccactgaagctcagtatagcaagcagagaggcaaggaacaagaggagtctagcaaactaggcaaagatgaggtcattcaatgcttagtcatatatgcttaaaaatgtctttattttgaga

SEQ ID NO: 679003 - DNA, 1721 bp, Homo sapiens
agaatttcctctgttttctttatttttttccaaagaactgctcaatccaaagaatccagcagactcaggtgcaatttttttcattaaggtcaaatgttgataaaatgtcatctttaaagtataaaagaaagraaacaacaacaaagaaacaatgttcaatctaaaatttattccaagagaaaacataatttaaagttaaaaaactcatcaaattttaaaaattacataaatcattgctagcatattcatactataagaaatactaagctatatgtttttacatataaaggagaaataataacagttaggaatttggattacataaggcaataaaagtgatttgaatgataaataaatacttattcttaaattttaattacttaaaaagaattttacccaatctaactataataaataattttaactatttatattaaaaagtattgtaatggttttggaagtttatcgcatacatagaagtaaaatatactacaataaaagcacaaatgaagaggtataacttgaatgcagactgtgttagacatgcacattgtaaaatacatagttaagtgatcagtggatattaaaacagaataataaaaaaatttccaaattcagacataaataaatagaagagaaaagaaatagaatcatatgggacaaatgtcagaccaaaaaagacacatctttaagtcaaatgtttttataattatattaaatttaaattgttgacacataccaaataaaaggtggcaattatcagattgtaaaacaatataacatccctctgctctgtagaaggaactattttacatataaaaatgtatcactttcagatagtttaaatttaaaatagtggaaaacatatatatcataaaaacaaatttttaaaaactgtaatgacatattaaaattatgttaaatggaattcatatatgaagcatgtgcagagatacaagatatgtttcataatgataaaaatataaattcaccaataagtcatacaatcgtatatatgtatgcatctaataacagtctcaaaatatgtgaggttaaaattatttttaaaactagactgtgagagacaaattcaaaatacttggaggtttcaagatatttctgtgtacaatacatgtattcagtattcaggttacaaaaattatgtttcttatgtaagtcttacatcatcactatataatatgtaatatattcagcaaacaattcctgtatgctgaattatataattctcctatgctgagtaccaaaaacattattgagaggaattaaggaagatctagtaaacatagaaatgtgcctgtttcatgatgtgaaagatttaatataatattaattttccatttgtctgtaaatttagtgcaaccataataaatattccagcaaatatttttacagaaattgataagtgaatttaaaaattcacttatgagaatcaaaggaccaaaaaagccaaaataacttggtgagagttttacattggctgtcttaacctagctgaattcaaaattaactttaaacctgaagaaatgcagactatttgaaattggtataaggataaacttacaaacaaaatacaagaatggagattccaaagtagctccacacatatctgttcagtggattttcaacaaagggaccaaagcgaattcaatgggaaatcagttgttttctcaagacatgtcttggaaaagttggatgttcat

SEQ ID NO: 679004 - DNA, 652 bp, Homo sapiens
gaagattttggttctgaagataaggcagtgtcttagaaaagtgggacctcaggactagaaagtccccagtgtcttctctcctttgagaggggagacccagcagagtatctgtcccacagcagggmcacgctctgatgagggaaaggcccaaggccacagctggtctggcccagctggtatagagccctcatctcctctcccctgggccctgcacagcactctgcccttcacacagaatctgagtctttcacacacactacgcttctaacagcctcttctcttctggagtcagccggtaaacagaagccacccaggggcaattcctaagcatgtctcagagatttggaggaagggaagagcaagcaagcagcacactgcatagaaaactggtaacattctgtctccttaaccttttccacacagagcccatctgaatggaagccaagctttattacatgacccgagtgtagaaggcagttcagatattcagtctgagagtcaaaattgtcaaagtaagttatttcacagaaagaaattatactaggcccgaaacagaaatcatggggaaggaaagatgggaataaggtgcttaaaaaatttaaaaatacacctcctctggccagagggaacagcatgcgtgaaggcccagagc

SEQ ID NO: 679005 - DNA, 652 bp, Homo sapiens
gaagattttggttctgaagataaggcagtgtcttagaaaagtgggacctcaggactagaaagtccccagtgtcttctctcctttgagaggggagacccagcagagtatctgtcccacagcagggccacgctctgatgagggaaaggcccaaggccacagctggtctggcccagctggtatagagccctcatctcctctcccctgggccctgcacagcactctgcccttcacacagaatctgagtctttcacacacactacgcttctaacagcctcttctcttctggagtcagcyggtaaacagaagccacccaggggcaattcctaagcatgtctcagagatttggaggaagggaagagcaagcaagcagcacactgcatagaaaactggtaacattctgtctccttaaccttttccacacagagcccatctgaatggaagccaagctttattacatgacccgagtgtagaaggcagttcagatattcagtctgagagtcaaaattgtcaaagtaagttatttcacagaaagaaattatactaggcccgaaacagaaatcatggggaaggaaagatgggaataaggtgcttaaaaaatttaaaaatacacctcctctggccagagggaacagcatgcgtgaaggcccagagc

SEQ ID NO: 679006 - DNA, 652 bp, Homo sapiens
gaagattttggttctgaagataaggcagtgtcttagaaaagtgggacctcaggactagaaagtccccagtgtcttctctcctttgagaggggagacccagcagagtatctgtcccacagcagggccacgctctgatgagggaaaggcccaaggccacagctggtctggcccagctggtatagagccctcatctcctctcccctgggccctgcacagcactctgcccttcacacagaatctgagtctttcacacacactacgcttctaacagcctcttctcttctggagtcagccggtaaacagaagccacccaggggsaattcctaagcatgtctcagagatttggaggaagggaagagcaagcaagcagcacactgcatagaaaactggtaacattctgtctccttaaccttttccacacagagcccatctgaatggaagccaagctttattacatgacccgagtgtagaaggcagttcagatattcagtctgagagtcaaaattgtcaaagtaagttatttcacagaaagaaattatactaggcccgaaacagaaatcatggggaaggaaagatgggaataaggtgcttaaaaaatttaaaaatacacctcctctggccagagggaacagcatgcgtgaaggcccagagc

SEQ ID NO: 679007 - DNA, 652 bp, Homo sapiens
gaagattttggttctgaagataaggcagtgtcttagaaaagtgggacctcaggactagaaagtccccagtgtcttctctcctttgagaggggagacccagcagagtatctgtcccacagcagggccacgctctgatgagggaaaggcccaaggccacagctggtctggcccagctggtatagagccctcatctcctctcccctgggccctgcacagcactctgcccttcacacagaatctgagtctttcacacacactacgcttctaacagcctcttctcttctggagtcagccggtaaacagaagccacccaggggcaattcctaagcatgtctcagagatttggaggaagggaagagcaagcaagcagcacactgcawagaaaactggtaacattctgtctccttaaccttttccacacagagcccatctgaatggaagccaagctttattacatgacccgagtgtagaaggcagttcagatattcagtctgagagtcaaaattgtcaaagtaagttatttcacagaaagaaattatactaggcccgaaacagaaatcatggggaaggaaagatgggaataaggtgcttaaaaaatttaaaaatacacctcctctggccagagggaacagcatgcgtgaaggcccagagc

SEQ ID NO: 679008 - DNA, 604 bp, Homo sapiens
tgtgtgataaagaaaaactcatatatgggtggcggtarttattgttactattatattattaatccagaaggatggaagaaatttcagagacctggggtaagattccagctctgacactgctatcttgctgtgaccaaaatcaagtccttcctatttaagggttccttgaattacatgggggacagactaccccctaatgtgcctaactcccagtgctgtggatcaaataagatgaaaggtgggcaaatactgtaggagagatttggtcactgtgcaccggaagcctgctcttcctaaacctgagggcctgggaccctgacatccgatgcccgggtatcctggaaataatttgttatactaaatgtccagaatggcaaactcataggaacaaatgttaggtggtggctgccagggacttgacaagcattctcttctcttctctccagagacacaatgggcagaacagccacagagaccccacagcaggagaagttgcttttagtctcctgatccacagcttccttaagcctcctctctaacctataaattccaggccctcttgcctcccacactaggtgtctttggccctgtggcacagccccac

SEQ ID NO: 679009 - DNA, 616 bp, Homo sapiens
tgctctgcccacctgaaaagatggtgtgagaatcatctgagacaacatgtaaaaccagaatgtagactagaaagggctttgtatctgtagtgggctattattcattaacayctatgaatatttggacatagcacctaggtcataattttaaaatatatttttcttactaaaatttattttaaaatgtggaaagtaagatacataaaaaaggggaaattacgcatgaacttatgacactttgatgaaactaaccccacatattttatgcatactttaaaattataaaaatactcatatgtttcttctatactctgtattgctcatttaacatctcatggacatgtcttatttgtcatgacatattactaaacaatgattttgacaaatatccttatagacaaaatctttggacatatccttgatcatttccataggaaaagttcttggaagtgtgttgtctgagtcaaaggctattcttgcagatttttttttaaaggatgaaatgagatcacatatgtaatgtgtttagtacagtgcagtgtctgagatatatgtgtgtgcatgagtgtgtgtatgtgtgttgaaggcccaataaatggtagtcattattaacttg

SEQ ID NO: 679010 - DNA, 926 bp, Homo sapiens
ctgggattacaggcgtgagccaccgcactcagcctgaattattatttttcttttggaaatgcaccactacaacttcaaaatgtctggtcatatgttactggagaaggagtcagattttatgaatttttaagctctacttttgccttgttttaagaaatatacctcaatatgtaaatggctgctctcacaattagataaattaagaagattgttatttacatgacagaagattgactatggtttttatttcagggctggctctaccaagtgacagtgtatgcaaaacttcactgtatkcttagtttttcttgaatgtatctcatgtaaggacaggtacatccgtctatccaagttgtggaaggctttgcgaagtacgttaattcttcgaggccactcaaatgctgtttatctgttgtatcttttagactggcactattgtggcagagccagtgtgtgtctttatcacaaacacatttctcagtcacattttctccttaatgacttctttgggttgtttgttgaatgtttccacacaacctgaaagagctaatgtagcttccagatgcccccttgcacatatgaaaatgatatccacctgtgaagtgcggtctgtaacgtgaatatggtcgtgacaactttttgatttctggagagattgtttctgaaccttgaatggagtccctttgaattcttctgattcactgtattctactcaccaaaattgaacctgtttatctttttggaagttgagtcttagtctgagagtatatgtgatttaagatatgctctctcctgactaccattttcaactggaaacctaactaatagttcttatagttagagagcccagtggatcggtgatggaaagcatggaaatgttttgggacttgccctatgttaagactgaggaagaggctgtgtgttag

SEQ ID NO: 679011 - DNA, 926 bp, Homo sapiens
ctgggattacaggcgtgagccaccgcactcagcctgaattattatttttcttttggaaatgcaccactacaacttcaaaatgtctggtcatatgttactggagaaggagtcagattttatgaatttttaagctctacttttgccttgttttaagaaatatacctcaatatgtaaatggctgctctcacaattagataaattaagaagattgttatttacatgacagaagattgactatggtttttatttcagggctggctctaccaagtgacagtgtatgcaaaacttcactgtatgcttagtttttcttgaatgtatctcatgtaaggacaggtacatccgtctatccaagttgtggaaggctttgcgaagtacgttaattcttcgaggccactcaaatgctgtttatctgttgtatcttttagactggcactattgtggcagagccagtgtgtgtctttatcacaaacacatttctcagtcacattttctccttaatgacttctttgggttgtttgttgaatgtttccacacaacctgaaagagctaatgtagcttccagatgcccccttgcacatatgaaaatgatatccacctgtgaagtgcggtctgtaacgtgaatatggtcgtgacaactttttgatttctggagagattgtttctgaaccttgaatggagtccctttgaattcttctgattcactgtattctactcaccaaaattgaacctgtttatctttttggaagttgagtcttagtctgagagtatatgtgatttaagatatgctctctcctgactamcattttcaactggaaacctaactaatagttcttatagttagagagcccagtggatcggtgatggaaagcatggaaatgttttgggacttgccctatgttaagactgaggaagaggctgtgtgttag

SEQ ID NO: 679012 - DNA, 633 bp, Homo sapiens
ataagtgtatataagtatatataattatatataaaatactgtatattattgtatatattatgtaatacatattatatgtattgtatataaaatagagaaaatatatacattgtaaatagttatatatttatataaaatagatatttatgtctattatatatactattttacatgtaaaatatatatttatctattttttcctcttaattcagtactttaggaaaacaggtttttttactttatgatggaatgcaccactcacattacttgttgcttgttacttttggaatactgtccaggccataattcaccctagcttgcctaagcttttgttggggctgataaacttgtcagcttctagaagcttctgaaggccagttgaactcagatccattctttttaccaaaataccttctaaggtaactgagttgtgtgtccctaaatcagggcagggttgagagcattgaatcagctagaaaatgactatagtcagccatgtgctccagatattaatatctcagtaatatgtttatttaccccrtgtgccggaagttttatatataatatctcactcagtttagagtaatcttttaaggtagctcctcatttttataaaagatgaatcagaaatgc

SEQ ID NO: 679013 - DNA, 640 bp, Homo sapiens
gtgaacagcaagattattttcttttaactttttaattcacatacttgtgtagtcattaattgtgggaaggggaggactcttactgaaacatatattatttcctacctctcttttcctctrctaatgagagataaaatctgaggtcctttaatcaaatattttcataaaaaattatttaaatcaaaatattttaatattaaaatttttattcaagtatttattaaaatgactagaaattattgaatcttagaagaggtacagattagacgcagaagaaaaaagaatgaggaagcaaagaaaactgagatgctctcagagcaactcagtatatttgatgtcaccaaacaaaacagatcagataagtaaagatgtcttaaggctcattcggtgcacatggggaggaaagattcacaaaacggtctgtctttctcagcatgtcccctaaactagaagtagtttcctggtaccctctggccgctaaaattaactttccctttgcaaaatcagtttgccacgtatgaaattttaaaaggcaatgtaaagttgttgtggactttaaaaaatgtataacatatttgaatgatgacaccgtatagaataaattcaagtggatgtgatgtttctggtttgatgttagaaa

SEQ ID NO: 679014 - DNA, 657 bp, Homo sapiens
tttgaaaacagagacattttcattagctttgttaagcaatctatccaatgaatagaatcaaatgagaacccttagatttttaatttagcctttagttccaaagaaattttgtatttatgacttactttatataaaaaagttttaaacataaccaaaaggcatttatgcttaaaatattaccaatcccgtatataatctattatttaatgtcttcaattttttcacttgctctcataattttrtttctttttttctgcagtttattttttttagttaagttccaaaatatggcccatgctttgcatctcttggatattctctgaagtctttttaatttatacacttcctcttccttttttttttatccttgcaaattgtttgccaaataaacaggctcatttgatctgtagagttttcttatattctggactttgctgactgcatcttgcaaagtcgttaatatgtggtgtttttgtgtgttttctgaaaatttctagcaagatatagatgcttgctcagattcagctccccagtttgtgataagaatcctcctccataggtggtcatgtgtcttctattgggaagtatatagtgttaggttgtttctcttttgtgacattaggagcaattaataatcattgtctagttgcgttattt

SEQ ID NO: 679015 - DNA, 801 bp, Homo sapiens
tctagcatatcagttcaatgtatcaactaaaaaatctcaagagaaaagacagtttacctacaacagaatgagtattaatttatattattaatctcatctacagtagctcaaaatagaasaaaatggagctttaattttctgaggggagttgttttcaacctataattttatacctatcaatcaatgaaaataactgggaaatgaaggtattttaagaactcaaaactttcagctcacttcatccagtttaaggatttaatggtgaatttgtttgtaaagataagcaggaaaaaagaaaacatgaggaggggacaacggattcaatgaagtagaaaagcaaagggaagacccagaaggacatttgtgctgagaacctaaattgcaacaaatctagactagaacaggaaatagccatagagaaaagcgtctttcatgggatggtacaaagaatattttagatattattgaaagtatgacaatgtaattgtttaagaaaaataaaggtcatcactaactctaaagaaaacaagctacaagaggatgtgaagcctatacaaagaaaattaaaagaagtcatagtatacatacgtaactaacctgcatgttgtgcacatgtaccctaaaacttcaagtataataaaaaagaaaaaagaagtcataatgttgagctattgctggaaaattcatagaaatatatttccaaatattctcctttaactgacaaagaacttgtaaatttgaaactacagaaaacaaaccctcgaattctgtaatgaattatatttctctaaccacaatatt

SEQ ID NO: 679016 - DNA, 626 bp, Homo sapiens
ctacaatcttttaaagatgacttctgagataaagcacacaacacattccctggtgcatcactggacaccgaagatgatccctgggaagatttcaaatctatggaaggtgaatagacaggaacctggctatccatcgacaatgaccgtctgaggagactcttaacaagtgggccactcctgtcaatgctttggtttccagaaccagatccactggatgggatcactaagcctaactttgaatagtacaacaagtttctatcttcaccttgaccatttcctttgttagtttcttttaatagatagggagtctctgatgagctacaaacagacaaaacaggtggccgtggtctcttcaaagccagctctagagcttttccttttggaagctgaccactcacacctggtttatcatccatagcttctctgtcttgcagaggctttgaaggcaacactgcatttcttttcaccaaactgattctattaggatcatccaaagatccagaatgctcaagagactktgcatataccacagaactatctttcggccaactcttttcagttaatgacaaattatgaagtggttctattggttttgggacatgtggcttattggtattggccttgac

SEQ ID NO: 679017 - DNA, 1257 bp, Homo sapiens
tgaaagttctgttggagcaatgggggtcaaggttttttctttgccacattgctgacatccttaagtttgaattaataatgattttattttaatgtcaactgaataactgatatttattttttaaaatattttttaagaaaacatctgaaatcacaagcaggttcatcatgaaaatataaaaaaaaattattgttagtcatgatctatgaaagaagcaaaatatcatttttttccaagtatttatgattgctgtctttaaggtttttttttctattattcatagtgatgatagttttgacccaaatatgatttcaagtcttatttgcaaatattttaaggcacaaccaggcctgaatgtattttctactgcccaatatagaagcaaattttgattaaatctaaaaacttttaataatgctggaaatgattatatgccttgcatgtaggaatttattatatgctatgtaatcagtatattggaaccctcattcaaataattatgcaaaactgaactttatttaaataaataaataagtaaacttttaaggtgaggtttcacttagttccagaattatacttactgaaatattactatattttaaaatttgctatatattataatattacttatactgatgatactgatggttatgaaaataaataaaatatatttatggatatgtcagtgtgactccagtgatttatagttgtgtttgtgttttttttttctaaaggatttgaacaacttgcaaatacaccatgctggacacactaagataagcaaaatcaagtaagaccatatgcaaaattgtataatttttaattgygaagtttattgcatttaaagcactgaaataactttttaaaaaacattttatttcacatactttttcatattcttattaaaaacatgatctattcatttcaaacagacttatcctgaaactgaatatatagacgtactttatctggagagactcttgcaagtgatattgagcactatggtaaaataactttccaatattttatgtaattttaattgaaggaggatatacatacaaaaactttaaagaagttattgcaaatgtacaaattgatggattttcattaaatgaattatccttatagccatcagctatatcaagaaataaagcatcactagcccccagaagctaccctcagcttccctccaagtcactaaaattctccaagttgataatctttctgatgttcaacactaaatactttgtatatttg

SEQ ID NO: 679018 - DNA, 640 bp, Homo sapiens
tttctcttatgttatatttcagaagttttacatttttggttttacatttagatctatgttccattttgagctcatttttgtgaagcgtttccagattattatgtttttcatgtggatgcccagttgtgccagcaccacttgttgaaaagattattttttcttcattgaattatctttgctccttyatcaaagatgagttgactatgtttatgtgggtcagtttatagattaatattctgttctattgatgtagttgcctaataaaaaaaaagagccatcacaatatggcacaatttagcctttacttacgggcacagtttgtgtttttgcagaatggactctccatagcaaaacttaaagcgttttttttttcttttggcgggttgtttttgagttattaagtgtagatatggtgtgttcattaataatgaactaaatgactctcaggtttccccgcctccttgggaattgacactttttgtgtaaacaatttaaaaatgaactgggacaggtgcagtggctcatgcctgtaatcccagcactttgagaggccaaggtgggaggattgcgttagtacagaagttcgagactatccagggcaagagtgtgtgagacttcatctcctccaaaaataaaaaca

SEQ ID NO: 679019 - DNA, 640 bp, Homo sapiens
tttctcttatgttatatttcagaagttttacatttttggttttacatttagatctatgttccattttgagctcatttttgtgaagcgtttccagattattatgtttttcatgtggatgcccagttgtgccagcaccacttgttgaaaagattattttttcttcattgaattatctttgctcctttatcaaagatgagttgactatgtttatgtgggtcagtttatagattaatattctgttctattgatgtagttgcctaatwaaaaaaaagagccatcacaatatggcacaatttagcctttacttacgggcacagtttgtgtttttgcagaatggactctccatagcaaaacttaaagcgttttttttttcttttggcgggttgtttttgagttattaagtgtagatatggtgtgttcattaataatgaactaaatgactctcaggtttccccgcctccttgggaattgacactttttgtgtaaacaatttaaaaatgaactgggacaggtgcagtggctcatgcctgtaatcccagcactttgagaggccaaggtgggaggattgcgttagtacagaagttcgagactatccagggcaagagtgtgtgagacttcatctcctccaaaaataaaaaca

SEQ ID NO: 679020 - DNA, 640 bp, Homo sapiens
tttctcttatgttatatttcagaagttttacatttttggttttacatttagatctatgttccattttgagctcatttttgtgaagcgtttccagattattatgtttttcatgtggatgcccagttgtgccagcaccacttgttgaaaagattattttttcttcattgaattatctttgctcctttatcaaagatgagttgactatgtttatgtgggtcagtttatagattaatattctgttctattgatgtagttgcctaataaaaaaaaagagccatcacaatatggcacaatttagcctttacttaygggcacagtttgtgtttttgcagaatggactctccatagcaaaacttaaagcgttttttttttcttttggcgggttgtttttgagttattaagtgtagatatggtgtgttcattaataatgaactaaatgactctcaggtttccccgcctccttgggaattgacactttttgtgtaaacaatttaaaaatgaactgggacaggtgcagtggctcatgcctgtaatcccagcactttgagaggccaaggtgggaggattgcgttagtacagaagttcgagactatccagggcaagagtgtgtgagacttcatctcctccaaaaataaaaaca

SEQ ID NO: 679021 - DNA, 1489 bp, Homo sapiens
ttttcaaaaacactacatctctgactctacctttgctgttccttctgcccagaattaactatataaatgcgtggaacagaaggctctgaagattcacttcaacctgacttaatttcaacagaatacaatatttttcatataggaatattttaacaatactctggaggaactgattacatacttatgtagaatagaataggaaaaatggtaatatgatgaaaagactagaatttgcattcctatattagcacttattagccatgcatttttatttttaaaacaaattacttgctaccagaataaataaagcaccatcttccacagtgataaaacttcagaaccttacaggctatatggaggatttatctgagaacccatattttttttcctagtgtggaaatgggaattcaacttcarctcaaatgcattctgcttgtctccaggaagccttgccctacacactctcagcatcctacctaccaggacaaacattttcttgtaaaaccacctgcccaaaaacttcacttcatatttctgtttctacctgtacaacttcaggcaggggtcttttaggcatattggcctcttcctccaaaggactgctcctttcatttccctctaacattgcttagttactcttcctccatatctcagctcaaccatctccaaagcaaaatcctttgatcttcttaattatatcaactctacttactgtgtcctttacaatcattaatgccccaccgaaaagttgttttctgatacaaattactatttttttcactcaggtcatctgtatatgctggaacactcttccatctatatcattcttatcttttattttgggactaaatggtatcttcccagttattgcctctgagaacctcttacttgtctttgttagtaacataaaataataatagatcattattttattttttatttaataatattaaccacactagtatataatctgcacacagacaggctctgtcttattggttactgtatacccagttcaatgacagctgcacaatagattagcaaatgaatgatttagtgaatgtatcagctgacatgctatggcaagggttgtctctttctttagcttatactgagcccatcacctctcagagttttttgttttttttttttcctagtgcataacacagtacatcatcctagatatcctgtgaacaatttagtatttgcacatgaaccttgcttctcttgcatggtttcatatctctttattcatccaatttatctgccttattcatagaaattttcatttccttgaacatgtttcatcacctgtggaataaaatcattatgaggctttgattacattagacctatacgaaatgttgtcaaatgtaaggcattctgcagatgatttgtactaatagtacctatagacagtgaaaatgaccgtaaccaaaatcttgaaaatttttatcactggacagtataatttaagaaccttaacgaa

SEQ ID NO: 679022 - DNA, 662 bp, Homo sapiens
caaaactattaattctcaaatgttataagtttcttggccgggctcggtggctcacacctgtaatcccagcactttcgaaggccgaggcgggcagatcacgaggtcagaagatcgagaccatcctggctaacacggtgaaaccccgtctctactaaaaatacaaaaaattagccgggtgtggtggcgggtgcctgtagtcccagccactcgggaggctgaggcaggagaatggcgtgaacccgggaggcggagcttgcagtgagccgagatcgcgccactgcactccagcgtgggcgacagagcgagactccgcctyaaaaaaaaaaaaagaaaaaaaaaagttatatgtttctcattacaatgagatgtagaacaaaacttcaaatagctgactgttttgtcgcactccagttgaactttcaacaccttaataaaatatctgaaatgtctgaaaataggtcagtgacagaaatattaaagcgccaagtgtggagttatgagggtcagtcaattctgagtgttgtctatggtgaagcaggggaacttcatcctagaagcaccaaagcagatttttaaaaaataggcagaattttaaggttagttttgaaagatataaacagtattttcaaaattagttatcttaaaaactaaactcttatttt

SEQ ID NO: 679023 - DNA, 662 bp, Homo sapiens
caaaactattaattctcaaatgttataagtttcttggccgggctcggtggctcacacctgtaatcccagcactttcgaaggccgaggcgggcagatcacgaggtcagaagatcgagaccatcctggctaacacggtgaaaccccgtctctactaaaaatacaaaaaattagccgggtgtggtggcgggtgcctgtagtcccagccactcgggaggctgaggcaggagaatggcgtgaacccgggaggcggagcttgcagtgagccgagatcgcgccactgcactccagcgtgggcgacagagcgagactccgccttaaaaaaaaaaaaagaaaaaaaaaagttatatgtttctcattacaatgagatgtagaacaaaacttcaaatagctgactgttttgtcgcactccagttgaactttcarcaccttaataaaatatctgaaatgtctgaaaataggtcagtgacagaaatattaaagcgccaagtgtggagttatgagggtcagtcaattctgagtgttgtctatggtgaagcaggggaacttcatcctagaagcaccaaagcagatttttaaaaaataggcagaattttaaggttagttttgaaagatataaacagtattttcaaaattagttatcttaaaaactaaactcttatttt

SEQ ID NO: 679024 - DNA, 663 bp, Homo sapiens
accagaggaactagtgttgcttactctcctagggtatcaagtgtttcacagtataatgcatccaaaaggtaatgattcataaaatatcaatactaattaagaaatacggcaaagtgaagatttattctacctcaatttcaagtatttgaagggactgagagtcaagatcatttatagtgcttctctatggtgacattattttaatggtgtcatttaaatccatttttggtgcaatacagtaattcctaaatgataaattacactatttaatatttcaacagagacatttgttagatatagaggtccaattttttaaatgaagagtttaaagatttgcttgcatcttaaactgaaatcctgcattaaattagtaatttgtaaacttaccatttgatttgtaagaaatatcatatattgattgtaaaacaaatgttatatgttgttttttagatccacttaactttcagtgttcagcaactccacgaagaatccacaacttgaaaacaaaagatgaaaaatgmtgagttcacgtacatagctgtactcttagtcccaaaccaataaatcttttgccctctttctaatttatcacatgtttgtaaaagagatttgcttctggggagaacgtgttaaatagggaagttcatatttgaaacatttaca

SEQ ID NO: 679025 - DNA, 626 bp, Homo sapiens
gaagattacttgcaaaggactagaaagtaaaacagcatggagcttccgaacagagagaccaaatttcaagatcataaaacaatgcattcaaaattctaaacaaatttgcttctaaggggaagacaaaaggaaattaaattgatatcattcttgtggtctatcaaatagagagctatcttccaataatgagggatggattcatgaaaagtatatagaacactaataaattaagtaacaaaagtatttactccaggaaataacaaaagttgtataggaaaggaaaattaccataacctagctctaaaaasttttcatgctcataaacatgtgctcataacagtggaaaacttgaacattgattgttttaactaaagcagtactggagctatattggaaagtaggtagaaagacatgcatgtgaaagggagaatgaggaatctaacaaatgcaagtgtgcctttttactttaggatgtagagaaaatataaatttaaaaatgaagaaaacaaattataatcaggccatttccaaatacaaaggtatattgagaaaaacgggggcaaatctcaagaggtttcaattggttgctcttcgaacttcaggtcatggctcatttcactgcaatg

SEQ ID NO: 679026 - DNA, 668 bp, Homo sapiens
tgtcttttgaaaatattttcacccagtctatgggttgtcctctcattgtctcgacactatgttttgaagagcagatgtttttaatttcaatgcagtttagcttaacaatttctgttagggattattcctttggcatggtatttttaaagccgttactttaaccaaagtcatctagatattcttctatactatcttctattatgttagtttttataagaagctgccaattgctttcaaagtggctatcctacatgagagttcaagttgacctgcactctcaccaggacttgaaattctcttttcttttttttaaattagtttcaataggtatatagtaatatcatattaatgatttctgttctactattgactaatgatgttaaagttttctgctcctcagggtctctrctttgtagttcctctagacaggaacgcaggtacacttttttttttttttggaacgaagtctcactctgtcacccaggctggagtgcagtggtgcgatcttggctcactgcaagctctgccttctgggttcacgccattctcctgcctcagcctccctagtagctggaactacaggtatccaccatcacgcccgcctaatgttttgtatttttagtagagacagggtttcaccatgttagccaggatggtctcgatctcct

SEQ ID NO: 679027 - DNA, 583 bp, Homo sapiens
tgttttgatataggcatacaatgatataggcatacatcagggtaattggggtatccctcacctaaagcctttatcatttctttgcttttgtttcagtttacttatcactttgagtttaatcactaaacaattttgtcaataayatttaattaggcataataatctatgatggtgatatggttttgctgtgtccccacccaaatctcatcttgaattgtagctcccataattctcatgtgtcatgagagagacctggtgggaagtaattgaatcgtggaggtggtttttgtgtgtgtgtgctgttctcgtgatagtgaataagtggttttataaaggggagttcccctgcacacactctcttccttgccaccatgtaagatgtcccttggctcttccttcatcttccactacgattgtgaggccttcccaggcatgtggaactgagtccattaaatctctttcctttataaattacctagtcttgggtatgtctttattagcagcatgagaacagattaacagatgaatatttttaataaataaaatataatttgaaagtcagatagtttccataatctttgtc

SEQ ID NO: 679028 - DNA, 648 bp, Homo sapiens
aaaaacactcagaaataatgatttaccagctctctgagtatcccttagcccagacaagttggcacattaaattaaccatcataccaataaaaacaaatttttgtagatttcatttcataatcatctaaaatttcacccactkttctctatttcacaagttaatccaaataaccaaaatcatttgtctggattatgataattgcagttattactggtttccctaaatgaaccatgcttctcctagccccacattatgaatatttattgagtaaaaatgtattctaatcattcttgtgctttttatactaagagggcttccaaccactttaaataaataatttccaaaataatctattacttggctatggttttatataatgatgttcccatgtaacttcccaacatgttttctcgtgagaaaatatggattgcaatccctagccaggctttacatactattttaaaaattctttccatagttttattttggctaaatctaatttgtcatttaagtagttgcttaaatgtgactttataaataaatcatttaatgaccactaagattgattgagtagccagagtagatggtctcatagtgtgatggttaatattgaataacaacttgattggattgaaggatgcaaagta

SEQ ID NO: 679029 - DNA, 1978 bp, Homo sapiens
atttttgtatgttgaatcattattactattattattcagaaagacacctattaacatttcacttttgtgtatcgaaggattatttgtagtgtgctagtagatttgcacatgcttttctcagtcctttattaaatttccctagaaatcaatgcttagataagagtgagaatgacagagatagaagtacttttgtaaccagtaaaccaaccatcttcaaatggtttgatagcaatcataagtaggaacagattattcttaatttaataagattcctgggacattaggaatatcctacatatgcccaatctctcccatgtgtttttcactttctgcaagatatgtgaaattttgtaggaaaagcctgcccatttagaatccatattttatggttttgaaatgtatagacaacataaaatagaaaattattaaatggttactaaagtaatttagtttgtggggacaagatgaaaggtaaataattgtgtgctggaaaggggaaggagggaaagtttgaaaacaagggaaaaggacaattaataaaagaggctgcagatcctaaagaagaccctctttgttgtccraagtgatatcaacctgagttgtcttagcaaattcatctctcactagctaaatttccaaacagttgtacaataaatttcctgagatgatagatacaaaatactaacaataaatctaaataatggagatagacttttctgccaatgatcttagaataaagtgaaaaaattagaaaaagaacaaaaaatttctcgcaaaactaatgaagtgttgtgctggaataagtgaattcattgaaatgaagtagcattaaacacaaacaaggaaggaggagtaagaagaaattaatagagaaaaatattcctgaccttgaaattttagataattctttttatcttgagatcatcctttataattctacttatttttctaaagtggtatgctgctatcattattaattattctaataaaattttttaaaagtttataatttttattttatttgtaaggatttttgcatggggacaagattttactttactttttataattttttaatggaacatatgttcctatgaacagatttagtagctaaatcattgtcactttaaaattacaaaagatgacttttgatacttttaaatgccaattactaagtcatttgctttctcagcaggctttcttttccttttttgttaaatctcaactaattatgacacactgtgatcttctcactaacactttagagacatatcattagcacattatttattgctttttatctaattgcctcttggaaaagatgaacactctactatatattctgctgtagcaaccaaagattgttaagcatgcatcttttgacttattttaggatattaatttatctggggggcaaacactatatcaaatttgttatgtatctatatgaaacttatgacttgaggcattctgggatatacttttaaaatgtatacatatacacaaaaatgtatataatgtaatatatattttacatattctcctttaatgaattatctttatatatatacacacacataaacaaacacatatactttataatgaatcattttaataaataaatgtatatggcttcgttttacaaaaaatattcctaagaaaatggaaagtttcgggaaaatttgaatgacttttataaacacttgtctgtcttcgttataaatacagcatgcctttaattttatagaaaataagatgccataaagtccaattttacttaaatttaagggcatatatagaactaacttttaacttaatattgtataataaagcatgaagacagtagaatttttttttttttttttttttttttttttttttttttttttagacaagatctggctttgttgcccaggctgtagtgcagtggtgcagtctcagctcactgcagcctgaacctaccaggctcgagcaatct

SEQ ID NO: 679030 - DNA, 447 bp, Homo sapiens
ttgtatcttaaatgagcacattatccttggttttgtcctgtgagtaaagtcctctgtttggaatgtgttctgttattggacctaaaggcatattttcttaattgctccatttctattataacatatttctgtttctttggtccacaggatatatttacatgtcctgaattactgtaattactcagccactatccagctaaccttttatatgcacactctgcacctggatagtttatttgcattttaggtacacctttccctcccctgctgctgtaattgggacaaataggacttrgtatcaccaaggaaaacagtcattctctttttccccacattaaatactgttcccttaaacacttcagtggaaaccctgtctctagagaaatgatatttttcacaattatttgaaaaatgtgtttttctgtggttggcaccattatttgcttg

SEQ ID NO: 679031 - DNA, 644 bp, Homo sapiens
attttgagacagtgtgttctcacatattagaaaccatttacttataaaaaaatgacttcatctgggcgcagtggctcaagcctgtaatcccagcactttgggaggccaaggcgggtggatcacaaggtcaggagtttaagaccagcctggccagtatggtgaaactccatctctactaaaaatacaaaaattagctgggtgtggtggtgcatgcctgtagtcccagctactcaggtggctgaggcagaagaattgcttgaacccaggaggtggaggttgcagtgagccgagatcgtgccactgcactccagcctggccacagagcaaatctctgtctcaaaaaaaataaaaaataacttatatgatacaaaggcataacagagatcctgttttatttaatggttcattcaatttttgattaacttaggcagactttcctaataggctaatttgcatccactcaaaattcrtagtttcaagctctaatgcccaaggtgatcgtatttgaggaaaagccttttgggaggtaattggggtggggctctcgtaatagaattagtctccttataacaagaggccagagaaatttctcactttctctctttcttttgtgtacatgctaaacacagaaagatggcatgtga

SEQ ID NO: 679032 - DNA, 607 bp, Homo sapiens
taatttcctctagtgttttggtttgstttgtctgttcattttaatattactcttatcagcttctaacttttctcatgtctgggaagagttccgaatgcctgacttttggcaaaatgctgacaactgaaatagaattgtagctgaacactctttcctcagtatttcccaatccattgcatatgatatgcctctgcttgtttaaacttccttgatgaagtgtttaacatcactctcttcttaggaatccttatgggttcactatggccaaataaatcatactgtaactctctgccattgaattgaggatcctctaggatctattctcagacctaacagtagagacttaacttcatatttccctatccataatttatctcccataaaaagatatcagagcttttaatgttgttctagtcaaattgttcatgtttttaaaagtacaatgtaaaaaccatgtgaaatcgttagtattaggtaagagtcactgttccttgccatacagtttcctcattaggtgtaacaatttatgttaatgaagcttgatagagtgaccataaataattgtaaatacttaggcggtcaaattttgctcaagccatgggaatca

SEQ ID NO: 679033 - DNA, 607 bp, Homo sapiens
taatttcctctagtgttttggtttgctttgtctgttcattttaatattactcttatcagcttctaacttttctcatgtctgggaagagttcygaatgcctgacttttggcaaaatgctgacaactgaaatagaattgtagctgaacactctttcctcagtatttcccaatccattgcatatgatatgcctctgcttgtttaaacttccttgatgaagtgtttaacatcactctcttcttaggaatccttatgggttcactatggccaaataaatcatactgtaactctctgccattgaattgaggatcctctaggatctattctcagacctaacagtagagacttaacttcatatttccctatccataatttatctcccataaaaagatatcagagcttttaatgttgttctagtcaaattgttcatgtttttaaaagtacaatgtaaaaaccatgtgaaatcgttagtattaggtaagagtcactgttccttgccatacagtttcctcattaggtgtaacaatttatgttaatgaagcttgatagagtgaccataaataattgtaaatacttaggcggtcaaattttgctcaagccatgggaatca

SEQ ID NO: 679034 - DNA, 607 bp, Homo sapiens
taatttcctctagtgttttggtttgctttgtctgttcattttaatattactcttatcagcttctaacttttctcatgtctgggaagagttccgaatgcctgacttttggcaaaatgctgacaactgaaatagaattgtagctgaacactctttcctcagtatttcccaatccattgcatatgatatgcctctgcttgtttaaacttccttgatgaagtgtttaacatcactctcttcttaggaatccttatgggttcactatggccaaataaatcatactgtaactctctgccattgaattgaggatcctctaggatctattctcagacctaacagtagagacttaacttcatatttccctatccataatttatctcccataaaaagatatcagagcttttaatgttgttctagtcaaattgttcatgtttttaaaagtacaatgtaaaaaccatgtgaaatcgttagtattaggtaagagtcactgttccttgcmatacagtttcctcattaggtgtaacaatttatgttaatgaagcttgatagagtgaccataaataattgtaaatacttaggcggtcaaattttgctcaagccatgggaatca

SEQ ID NO: 679035 - DNA, 647 bp, Homo sapiens
gataaaggacagcataaatgtttgccaggtttccactacttgttcttttaaaacagtattccatttagcatatttttaaaatagcatttcactaatttttttaggcagacaataatttacatttggaaatgaacttgtttctctgacagcagatgtatgtttgaaatacttcttccttgaataaaacttgtgaacagattaggaatctaacttacattcagataacaaagggcatgagtgaaakaatacattcaaataaaatataaaggcatgttcaataactacctgtaatgtgataaatagaagtcattaggaaactatgaagctacaatgtgcttagggtttctaggcataaagggaaggagtcatttgatttctaaaactcaaatagaaaagtgcttttaataaaagagatgatgataaatatattctcctctgaaaaaactaacaatcactgagcgagaaataaagtaccatttattttaatcaaaacaaggtttcctgagaatctgataagcaactatagtttgggataaaacactggataaatgtatgagtgtcatgctctatttatgtaataaataccttttggaaaatgcacatccactaaagtgattttggatgaatcatagtttacatacacaaag

SEQ ID NO: 679036 - DNA, 625 bp, Homo sapiens
ctgatggtccctcataggacaggcttagaatttcatcagtaagtatgctgttaaaaacacacatgctgaattatttttccagaccagtagcgtgtgcataataggctgcataggaaatgggtctccctaactaastgcagtctctggagctaagattgtgtaggagttgtggatggggttggcccatgattgaaaaaactgagcaagggaacccccaaagccttcattgtgatgagggtcacctcttgaaatagaataaaataagagtatagcaatagatcaaaagccagatgatagcaaatcaaaagttggagagctgttgaggattacagcattcacctgctgggagtgagggaaaagacaaaatgaacacgttgctaaaattctagcttactaaacttaataaaagggaatgtcttgaaccaaaataacatgataagaagtgctctttaagagatgttgatgaggatgagcttactttctgagcatataaaatagaacattttcctctaagtcagtcaggataccatagttaaacacatgctgcattcacattgagaatgttgcggagaatttaatattcagactatttacaatgtgtcggaatgtttagagaagccacaga

SEQ ID NO: 679037 - DNA, 625 bp, Homo sapiens
ctgatggtccctcataggacaggcttagaatttcatcagtaagtatgctgttaaaaacacacatgctgaattatttttccagaccagtagcgtgtgcataataggctgcataggaaatgggtctccctaactaactgcagtctctggagctaagattgtgtaggagttgtggatggggttggcccatgattgaaaaaactgagcaagggaacccccaaagccttcattgtgatgagggtcacctcttgaaatagaataaaataagagtatagcaatagatcaaaagccagatgatagcaaatcaaaagttggagagctgttgaggattacagcattcacctgctgggagtgagggaaaagacaaaatgaacacgttgctaaaattctagcttactaaacttaataaaagggaatgtcttgaaccaaaataacatgataagaagtgctctttaaragatgttgatgaggatgagcttactttctgagcatataaaatagaacattttcctctaagtcagtcaggataccatagttaaacacatgctgcattcacattgagaatgttgcggagaatttaatattcagactatttacaatgtgtcggaatgtttagagaagccacaga

SEQ ID NO: 679038 - DNA, 607 bp, Homo sapiens
taacataccagggcatttccaggttttatagtagcttaatcatgtcaggaaaccacacttctttcatcttctactcctctatccctataggcctttgcctatcatgtgaaaaagagtgttaaccagtgggaaaaataaaaaagaaaaaagggaagrgtaattcatatcatttgaattaaataacctagaatttgcacacatcatttctgcttctatccttttaaccaaaataggaagttacggaacacctactgaaggagctgggcatagagttttgctgggtagccaggcaggttattcttcccacaaatgaaaaacactcatttttaatgcaataacacagggatctgtgttacagggtaacacgcagatctattcattcactatcgcaaggtaaatcccacaattttttttttttgataagtaattccactaggggtttttattttggttttttttttttttttttttttttttttttttttttggacagagtctcgcttttcactctgtcacccaggctggagtgcagtggcatgatctcggctcactgcaacctcgtcctcccaggttgaagcaattctctggcctcagcctcccgagtagc

SEQ ID NO: 679039 - DNA, 607 bp, Homo sapiens
taacataccagggcatttccaggttttatagtagcttaatcatgtcaggaaaccacacttctttcatcttctactcctctatccctataggcctttgcctatcatgtgaaaaagagtgttaaccagtgggaaaaataaaaaagaaaaaagggaagagtaattcatatcatttgaattaaataacctagaatttgcacacatcatttctgcttctatccttttaaccaaaataggaagttacggaacacctactgaaggagctgggcatagagttttgctgggtagccaggcaggttattcttcccacaaatgaaaaacactcatttttaatgcaataacacagggatctgtgttacagggtaacacgcagatctattcattcactatcgcaaggtaaatyccacaattttttttttttgataagtaattccactaggggtttttattttggttttttttttttttttttttttttttttttttttttggacagagtctcgcttttcactctgtcacccaggctggagtgcagtggcatgatctcggctcactgcaacctcgtcctcccaggttgaagcaattctctggcctcagcctcccgagtagc

SEQ ID NO: 679040 - DNA, 1508 bp, Homo sapiens
aaattaaattaattcacaagggttggctgggtttttatgaagtattatgaagaattccattgttattacctattttaagataattgttaagaagtagatatcccttgttaaattaacagattaatttgaaaaatcatagctaatataatagttacccacccagttatatcctttagttactctatggaaaaaattactaatatcagggccaccagcaacaagaattaatcaaagtgccctcattatgaaaagaaaaacaatttactttttttcagttttttacagtgcactcagaaatacaattattaagcttttagcacttgactaatattacaattttgtaatgaacagatgtataccatttcaatttttcaatatgatattattaatattaaacatattattcccggtggtggaaaacaaattttgaatatattcattcttataactttaagaatatagttgttattgttcttgtcattctttatgactcattgatttccctcaaaaattaaaaataaaaaagtcaacagtttttattactgttcaagaaatggcacaaactggatgctaattattgaaggcttaagaatgggtttcagatatttttaattctaactacatattctgagccaggggttcttaacgtccagttcgcagactggtactagtccatggcctgttaggaaacaggtggcacatcaggcacatcaggaggtgagccgcaggtgagtacgcattacccactgagctctgagctccacctcctgtcagatcagcgggggcattagattctcattggaggaggaaccctattgtgagctgcacatgtgagggatccaggtcgcatgctccttatgagaatctaattaatgcctgatgatctgaggtggaacagtttcatcccaaaaccatccctcacccacgtctgtctgtggaaaaactgccttccatgaaaccagttcctggtaccaaaaaggttggggaccactgttctaagcaatctgtggtataatacactttctgaaggcaaacattttaggaggcatttgctttccacttgtagactgaatgtttatgtatccctgcccccacttcctatgttgaagccctaatccccaatgtgatgatatttggaggtggggcctttgggaggtaatcacatttatctgaggacatatgagcagggggcctcatgatgrgattagtgtccttataaaaggaggaagagagatcagggctccctcgctttagccacatgagatcacaggagaagacagccatctgcaagccaggaagaggacactcaccaggaacctgagcatgctgcaccccaaacttggacttcctgcctccagaactatgagaaaaaattgtctgttgtttgcaaacaccgcatgttctcactcataagtgggagttgaacaatgagaacacatggacacagggaggggaacatcatacacgggggcccatcgtgggggtggggggctaggggaacaatagca

SEQ ID NO: 679041 - DNA, 597 bp, Homo sapiens
ggttgcagacagctgcttctttctttctgtgtctttctttggcctttccttggtatttgtccttccctagtgtctcttcttcctataaagacatcactcatagtggattaggaccccaccattaggttctggtttaaccttaattacttctttaaaggtgctatttccaaatgcagtcatattgagtgttagggcttcaacatataaattggttgggggcagagaggtgcacttcagctcttaacaatgacttttgaagctaggttataacagattgcacgacctccaattttaatgctggaaaatttaatttcatagccttgagttgtcatttaaaatattaaagtaccttgagactacatgctgtgaaaaaacaaaagttgtctgtggggggcaatgcagagagcagccattccatgttttaaatgagacttgaagtatacatacagatacatagataggttccatggatgtgaatatgttgcatcatcaagttattgactttttactttctaccccttgggactatagttgcagtgtctggatcagagaataatgtaatattgaatttgaaagtgaatgtaygaagaaatgaac

SEQ ID NO: 679042 - DNA, 627 bp, Homo sapiens
tgtgccacattttctttatccagtctatcactgatgggcatttgggttgttatcaagtctttgatattgtgaacagtgccrcagtaaacatatgtgtgcatgtgtctttataatagaattatttattttaatttgagatggagtcttgctctgctgcccaggctggagcacagtggcatgatctcagctcactgcaacttttgcttcccaggttcaaataattctcctgcctcagccttccaaatagctaggattacaggtgcccaccaccaaagccagctaattttttgtatttttagtagagacagaacttcaccatgttggccaggctggtctcgaacttccagcctcaggtgatccacccacctcggcctcccaaagttatgattacaggcatgagccactgtgcctggcctcaattcactctcttaaccagaaaaatcagtcaaatattagattattccacagttaaattataattaaaataatctgagcaacttaatcatcaacattcttttatttcttaatatatatattttaaatttcctaactaaaatgtattgatttagtattttttaaaaaagtgtttttagtattcatattttgtacaagtgcatggcacatacg

SEQ ID NO: 679043 - DNA, 627 bp, Homo sapiens
tgtgccacattttctttatccagtctatcactgatgggcatttgggttgttatcaagtctttgatattgtgaacagtgccacagtaaacatatgtgtgcatgtgtctttataatagaattatttattttaatttgagatggagtcttgctctgctgcccaggctggagcacagtggcatgatctcagctcactgcaacttttgcttcccaggttcaaataattctcctgcctcagccttccaaatagctaggattacaggtgcccaccaccaaagccagctaattttttgtatttttagtagagacagaacttcaccatgttggccaggctggtctcgaacttccagcctcaggtgatccacccacctcggcctcccaaagttatgattacaggcatgagccactgtgcctggcctcaattcactctcttaaccagaaaaatcagtcaaataktagattattccacagttaaattataattaaaataatctgagcaacttaatcatcaacattcttttatttcttaatatatatattttaaatttcctaactaaaatgtattgatttagtattttttaaaaaagtgtttttagtattcatattttgtacaagtgcatggcacatacg

SEQ ID NO: 679044 - DNA, 605 bp, Homo sapiens
tcttcttcttcacctctccttgggctatgttaaatatctcttctcgttacccatgttgtagggaaaggagagaggccacagtaggyagggggcaaagagcatttcaataactatgaataattctattattaaagacaccttgtaatgctaatgacttataaccctaacactagcagaaacagttttaccatttcttaccatattccagccaagtatactggtctcgctttatgaaaagtgagtgctctgcatttactgtattgttcatgtctttgggttctagaggcactgagacactaagaatctcattttaacaatataatgtgtaccacaacctagttctttccagcaaccctctctgcttgttagtttgctatacaactctaggttctgacatctctgctcccatgccctttccttcacttggaatagagagcacaaaggtaggattttttttctttttagttctgatgtattccttgtatctggaccaacacttactatactcacagtgactgaatataaattgacttcctcaaagaaaagaagggggcttcactcaattgtcttttagttaatcttgttctaacctctgactcatgtct

SEQ ID NO: 679045 - DNA, 605 bp, Homo sapiens
tcttcttcttcacctctccttgggctatgttaaatatctcttctcgttacccatgttgtagggaaaggagagaggccacagtaggcagggggcaaagagcatttcaataactatgaataattctattattaaagacaccttgtaatgctaatgacttataaccctaacactagcagaaacagttttaccatttcttaccatattccagccaagtatwctggtctcgctttatgaaaagtgagtgctctgcatttactgtattgttcatgtctttgggttctagaggcactgagacactaagaatctcattttaacaatataatgtgtaccacaacctagttctttccagcaaccctctctgcttgttagtttgctatacaactctaggttctgacatctctgctcccatgccctttccttcacttggaatagagagcacaaaggtaggattttttttctttttagttctgatgtattccttgtatctggaccaacacttactatactcacagtgactgaatataaattgacttcctcaaagaaaagaagggggcttcactcaattgtcttttagttaatcttgttctaacctctgactcatgtct

SEQ ID NO: 679046 - DNA, 605 bp, Homo sapiens
tcttcttcttcacctctccttgggctatgttaaatatctcttctcgttacccatgttgtagggaaaggagagaggccacagtaggcagggggcaaagagcatttcaataactatgaataattctattattaaagacaccttgtaatgctaatgacttataaccctaacactagcagaaacagttttaccatttcttaccatattccagccaagtatactggtctcgctttatgaaaagtgagtgctctgcrtttactgtattgttcatgtctttgggttctagaggcactgagacactaagaatctcattttaacaatataatgtgtaccacaacctagttctttccagcaaccctctctgcttgttagtttgctatacaactctaggttctgacatctctgctcccatgccctttccttcacttggaatagagagcacaaaggtaggattttttttctttttagttctgatgtattccttgtatctggaccaacacttactatactcacagtgactgaatataaattgacttcctcaaagaaaagaagggggcttcactcaattgtcttttagttaatcttgttctaacctctgactcatgtct

SEQ ID NO: 679047 - DNA, 605 bp, Homo sapiens
tcttcttcttcacctctccttgggctatgttaaatatctcttctcgttacccatgttgtagggaaaggagagaggccacagtaggcagggggcaaagagcatttcaataactatgaataattctattattaaagacaccttgtaatgctaatgacttataaccctaacactagcagaaacagttttaccatttcttaccatattccagccaagtatactggtctcgctttatgaaaagtgagtgctctgcatttactgtattgttcatgtctttgggttctagaggcactgagacactaagaatctcattttaacaatataatgtgtaccacaacctagttctttccagcaaccctctctgcttgttagtttgctatacaactctaggttctgacatctctgctcccatgccctttccttcacttggaatagagagcacaaaggtaggatttttttyctttttagttctgatgtattccttgtatctggaccaacacttactatactcacagtgactgaatataaattgacttcctcaaagaaaagaagggggcttcactcaattgtcttttagttaatcttgttctaacctctgactcatgtct

SEQ ID NO: 679048 - DNA, 657 bp, Homo sapiens
taaaacatatacatttccttcctaatttattgatttgtatttttaaataagtgatcaaaccgaaaggattttatatctaattttcagtccaagggaaacttgctataaacagaacaccttgttaaatgagtattttatataacraattgtttaatcaggagaggattcgaaatattaaatccttatacatacctagtgctctatagtctctaaaggtcattcacatgtagtatttctctaaaccttttatagccttgtaatgcagatattaattttatttacaggtgaaaataaaactcaaaaattgtgatctcatgcatacacaattcacacatttttcccttagaacaccttaagccctgtctttatccaacaaactcttcctcatgcttcaaaatccagttttactctatcttcctcttaattcatctcctgactcccattgctataaaaagaatgttcatggcaccctaaaattcatatgttgaaaccctaacctgcaatatggtggtattaggaggtagggcccctggaaagtgattaggattagatgagctaaagaggatgaacctttcatgaatgggattagtgcccttatgagagtccttagagagcttgcctctttctactctcctccatgtgaggatacaatgagaa

SEQ ID NO: 679049 - DNA, 657 bp, Homo sapiens
taaaacatatacatttccttcctaatttattgatttgtatttttaaataagtgatcaaaccgaaaggattttatatctaattttcagtccaagggaaacttgctataaacagaacaccttgttaaatgagtattttatataacaaattgtttaatcaggagaggattcgaaatattaaatccttatacatacctagtgctctatagtctctaaaggtcattcacaygtagtatttctctaaaccttttatagccttgtaatgcagatattaattttatttacaggtgaaaataaaactcaaaaattgtgatctcatgcatacacaattcacacatttttcccttagaacaccttaagccctgtctttatccaacaaactcttcctcatgcttcaaaatccagttttactctatcttcctcttaattcatctcctgactcccattgctataaaaagaatgttcatggcaccctaaaattcatatgttgaaaccctaacctgcaatatggtggtattaggaggtagggcccctggaaagtgattaggattagatgagctaaagaggatgaacctttcatgaatgggattagtgcccttatgagagtccttagagagcttgcctctttctactctcctccatgtgaggatacaatgagaa

SEQ ID NO: 679050 - DNA, 593 bp, Homo sapiens
acctaaaccaactgggggatttagaatacatgtgggatattcccagctaattattttcattaaaaaatttttttacaaagatcaactgtgtttcaaatacttacagtgatagtcatcttggaaattacaaactggattctgggttatactttttaattatgatcagtgagacaatggacattgagattttgctttagagcacataatgccattataactgtatataactcaaagttatttatataactcaaggttttatatatataactaaagttttattttccttaaagagttatataaataccaaaatagccatgaaatcccatgtagttgttttacttataaggaagaatttttataggaaaaactgtgagccctgctcaaattattaaaattgggccggacacagtggctcatgctataatcccaacactttgggtggtcgaggcaggcaaatcacttcaggccaggaattcgagaccagcctggccagcatggtgaaaccccatctctactaaaaacacaaaaattacccagacwtgttggcttgcgcctgtaatcccagctctgagatcacgccactgcactttagc

SEQ ID NO: 679051 - DNA, 634 bp, Homo sapiens
gtctctttctcagaaaggtcctgggaatttagtattctttctttagagatagaaaacccgaaagcaaaaggagaaggcttaatcaaggtcacctagcagggctttgcacgggctttctgcctctcccttggctcattattcactggtcccttcgggggaaatgtacactataaatcagaaaagactatcatctgtactctgctaaatgtgtaaaggttaaatttagtcaggcaggtgatttatacttgcttatttcctttaaaacctcatggagaattaagggagttttcagctaggatgacaaggaaggaaatctaatatttcagagttctgctgttattcttcttggagtatgaaactatcatttgtttaaaaattccatgtatccaggaaggcttgcatcagaatacatttttgtagacattaactcatcataatttgattaaacaaaattttggtgttgcatctgttaggaatatcctgagtcacatcatccactcaaggcagagaaactggtctgcaaaagcaagggtcgagaagtctcatgaggaatgtagtagaccgactgggagaaagtttctaaraaatgatatgaaagggtttggtttggttatggagatcataaagtgacaga

SEQ ID NO: 679052 - DNA, 625 bp, Homo sapiens
agggtccaccagcatccaaagcagtgatttttatgatccttcacagcttaatcatgggtgtgtgtgtgtgcttgttgaaaatgcagagtcctgggtctccagagatgatctcagtaggcccagaatgggatctggaaaactgcaatgtttggcyaggctcataggtgattctgatgtaggtgaattctttgagaaacagagatgtgaaggacagtgcttctcttacctacaggactcaggtaggagaaaaatgagacagtcatggctgggaagccaagggacttttgggaaaatatatgtaaaatgtactaaaagcacattatgatgatataacaagatgttctccaccacagctgtgtattagaatcatctggggcactttaaaaatataccagtgtgcagatttcctcataatggtggtaaatgtccctctttcagcatgactaagagataagagaagctgcaattttccaattatctgtgcatagaagaaaaaaaaatccaacagagtgcccactgtgggcctgcagcaagcagccaccacaaacctatgggtgcagaaatcaggggagaggagtctcaagagattggggaaaagggtggagggaagcagagaacttagaga

SEQ ID NO: 679053 - DNA, 625 bp, Homo sapiens
agggtccaccagcatccaaagcagtgatttttatgatccttcacagcttaatcatgggtgtgtgtgtgtgcttgttgaaaatgcagagtcctgggtctccagagatgatctcagtaggcccagaatgggatctggaaaactgcaatgtttggccaggctcataggtgattctgatrtaggtgaattctttgagaaacagagatgtgaaggacagtgcttctcttacctacaggactcaggtaggagaaaaatgagacagtcatggctgggaagccaagggacttttgggaaaatatatgtaaaatgtactaaaagcacattatgatgatataacaagatgttctccaccacagctgtgtattagaatcatctggggcactttaaaaatataccagtgtgcagatttcctcataatggtggtaaatgtccctctttcagcatgactaagagataagagaagctgcaattttccaattatctgtgcatagaagaaaaaaaaatccaacagagtgcccactgtgggcctgcagcaagcagccaccacaaacctatgggtgcagaaatcaggggagaggagtctcaagagattggggaaaagggtggagggaagcagagaacttagaga

SEQ ID NO: 679054 - DNA, 993 bp, Homo sapiens
ttaaaacaaattaagacctatataaatcattgccttatcattgaaaatgctatttgataccgacccagcaatgttgtcatttgagatggctataatttaggaaaggagacaaggaggatcatttatatatgagtgaaatataaacttgttagcgttcatgtgaaactttaatcttgaaacatggcagagctttccgagtgccatgcttattataacttaaaaaaaaagtgtctctaaaaaaaaaaaaagtgtctctccattttcctaatttcaaaaatagttaaaactcctaacgcattctacattcaaatatttatcctaaccattaagtccaagatagaggagccatttataacaagaaaatacagtttgtgatcctccagtgtaataccagactctcttaaaaacaaaataacaacaaaagaaaaaacaaaggcattctccccctaatatgcccttgtattacaattttatagtcagtgcaatcatagttggtggagaacactatcaatgcatcrcatggacataaggtaataaaaatataatctatgatgtgtttactctagtcaagctacatttcttttttatgtccatggacacatactgacatgggaattttttcaaatatatgaactgaatgtgaaggaacgaatgctggcattatttttttattaacatctattctctattcagcacatcacactaaaacttaaaagcaacctcaagtttgaatctaaaaaatatatgtgaagcaatagcaataactggcgtccagaatgggttaaccttaggttattgttttttgtcaatttgtcagaagctattcttgacttcgttaatggaggcacataaagaaataacctgtcatagctgctcaacactcaatagatgagttcgaaaagtcaaaatcttcaatattgtccagtttcatataaactgtagcagtaaaaggagatggtacagttaacctctatggaggtcttaaggataaag

SEQ ID NO: 679055 - DNA, 993 bp, Homo sapiens
ttaaaacaaattaagacctatataaatcattgccttatcattgaaaatgctatttgataccgacccagcaatgttgtcatttgagatggctataatttaggaaaggagacaaggaggatcatttatatatgagtgaaatataaacttgttagcgttcatgtgaaactttaatcttgaaacatggcagagctttccgagtgccatgcttattataacttaaaaaaaaagtgtctctaaaaaaaaaaaaagtgtctctccattttcctaatttcaaaaatagttaaaactcctaacgcattctacattcaaatatttatcctaaccattaagtccaagatagaggagccatttataacaagaaaatacagtttgtgatcctccagtgtaataccagactctcttaaaaacaaaataacaacaaaagaaaaaacaaaggcattctccccctaatatgcccttgtattacaattttatagtcagtgcaatcatagttggtggagaacactatcaatgcatcacatggacataaggtaataaaaatataatctatgatgtgtttactctagtcaagctacatttcttttttatgtccatggacacatactgacatgggaattttttcaaatatatgaactgaatgtgaaggaacgaatgctggcattatttttttattaacatctattctctattcagcacawcacactaaaacttaaaagcaacctcaagtttgaatctaaaaaatatatgtgaagcaatagcaataactggcgtccagaatgggttaaccttaggttattgttttttgtcaatttgtcagaagctattcttgacttcgttaatggaggcacataaagaaataacctgtcatagctgctcaacactcaatagatgagttcgaaaagtcaaaatcttcaatattgtccagtttcatataaactgtagcagtaaaaggagatggtacagttaacctctatggaggtcttaaggataaag

SEQ ID NO: 679056 - DNA, 993 bp, Homo sapiens
ttaaaacaaattaagacctatataaatcattgccttatcattgaaaatgctatttgataccgacccagcaatgttgtcatttgagatggctataatttaggaaaggagacaaggaggatcatttatatatgagtgaaatataaacttgttagcgttcatgtgaaactttaatcttgaaacatggcagagctttccgagtgccatgcttattataacttaaaaaaaaagtgtctctaaaaaaaaaaaaagtgtctctccattttcctaatttcaaaaatagttaaaactcctaacgcattctacattcaaatatttatcctaaccattaagtccaagatagaggagccatttataacaagaaaatacagtttgtgatcctccagtgtaataccagactctcttaaaaacaaaataacaacaaaagaaaaaacaaaggcattctccccctaatatgcccttgtattacaattttatagtcagtgcaatcatagttggtggagaacactatcaatgcatcacatggacataaggtaataaaaatataatctatgatgtgtttactctagtcaagctacatttcttttttatgtccatggacacatactgacatgggaattttttcaaatatatgaactgaatgtgaaggaacgaatgctggcattatttttttattaacatctattctctattcagcacatcacactaaaacttaaaagcaacctcaagtttgaatctaaaaaatatatgtgaagcaatagcaataactggcrtccagaatgggttaaccttaggttattgttttttgtcaatttgtcagaagctattcttgacttcgttaatggaggcacataaagaaataacctgtcatagctgctcaacactcaatagatgagttcgaaaagtcaaaatcttcaatattgtccagtttcatataaactgtagcagtaaaaggagatggtacagttaacctctatggaggtcttaaggataaag

SEQ ID NO: 679057 - DNA, 993 bp, Homo sapiens
ttaaaacaaattaagacctatataaatcattgccttatcattgaaaatgctatttgataccgacccagcaatgttgtcatttgagatggctataatttaggaaaggagacaaggaggatcatttatatatgagtgaaatataaacttgttagcgttcatgtgaaactttaatcttgaaacatggcagagctttccgagtgccatgcttattataacttaaaaaaaaagtgtctctaaaaaaaaaaaaagtgtctctccattttcctaatttcaaaaatagttaaaactcctaacgcattctacattcaaatatttatcctaaccattaagtccaagatagaggagccatttataacaagaaaatacagtttgtgatcctccagtgtaataccagactctcttaaaaacaaaataacaacaaaagaaaaaacaaaggcattctccccctaatatgcccttgtattacaattttatagtcagtgcaatcatagttggtggagaacactatcaatgcatcacatggacataaggtaataaaaatataatctatgatgtgtttactctagtcaagctacatttcttttttatgtccatggacacatactgacatgggaattttttcaaatatatgaactgaatgtgaaggaacgaatgctggcattatttttttattaacatctattctctattcagcacatcacactaaaacttaaaagcaacctcaagtttgaatctaaaaaatatatgtgaagcaatagcaataactggcgtccagaatgggttaaccttaggttattgttttttgtcaatttgtcagaagctattcttgacttcrttaatggaggcacataaagaaataacctgtcatagctgctcaacactcaatagatgagttcgaaaagtcaaaatcttcaatattgtccagtttcatataaactgtagcagtaaaaggagatggtacagttaacctctatggaggtcttaaggataaag

SEQ ID NO: 679058 - DNA, 601 bp, Homo sapiens
accatgcccagctaattttttgtatttttagtacagaaggggtttcaccatgttagccaggatggtctcaatctcctgacctcatgatccacctgccttggcctcccaaagtgctgggattacaggcatgagccaccacgcccagccttcatgccacattttcttaatccagtctatcattgatggacatttgggttggttccaagtctttgctattgtggataggatggcacctatatttcaacttcacttttgtagctcatgtgtcctttgaggcagcttgatttttaagaatcaggtgakattagctagaacctcttcccactgggggtaaaagattgggagggggagcagcacaggcaggaaacacagataaaagtgtggcttgcattttttctaatcttttctggcttggagtctttaattttgccaacaaaatgcaggaaatgacatatttagccattttgagaattcttatctttttcctcacctagttgctcccagtgagaactatcaaggacacaaggcatttgtgtaagttgtcaatattaccgaagacatagggtaatagaaagggaggttactgctcagctttatagca

SEQ ID NO: 679059 - DNA, 601 bp, Homo sapiens
accatgcccagctaattttttgtatttttagtacagaaggggtttcaccatgttagccaggatggtctcaatctcctgacctcatgatccacctgccttggcctcccaaagtgctgggattacaggcatgagccaccacgcccagccttcatgccacattttcttaatccagtctatcattgatggacatttgggttggttccaagtctttgctattgtggataggatggcacctatatttcaacttcacttttgtagctcatgtgtcctttgaggcagcttgatttttaagaatcaggtgatattagctagaacctcttcccactgggggtaaaagattgggagggggagcagcacaggcaggaaacacagataaaagtgtggcttgcattttttctaatcttttctggcttggagtctttaattttgccaacaaaatgcaggaaatgacatatttagccattttgagaattcttatctttttcctcacctagttgctcccagtgrgaactatcaaggacacaaggcatttgtgtaagttgtcaatattaccgaagacatagggtaatagaaagggaggttactgctcagctttatagca

SEQ ID NO: 679060 - DNA, 1237 bp, Homo sapiens
ctgcctccaaggctgatgcagaaagagaagaaagagagagagatagtagagaaggcacastctcccttgcttgcctcttcctagaagtagcatacttctggtccattggcagaaatatagtccatatggcagtaatagccctatggccccacccagatgtaaagatggtagtgggaagctgaaaactacaaaccagtagtgagccaagaagaagaaagagggggaaacatctagccagtctctgctgattgccattttatctcacagatcccaccaaatgggaaaagtctaagaatgaagttgaacagagatgagaaagggagaaggcaggaggaagtaaaaaagagaggagagaaaaaggggagataaatcatcacaatcctcgaatccaataatgttaataaaattcttacttttgtttaagtaagtgtaatcagggattttgtcacctaaaacagaaataacctggttaacatactactttgtcctggccatgttatgtctagcccctagctcagtcctttgcatatatattagataatctaagtatttttggtatcaacgagcataagaatgaatacttaatattaagacattgagttaaaactgtgtatagttattggtgcgatcgatgttaactaacaagcttatctcttacattattcctaaaagttgtagtctcaggtaactaataagtgtgcaacatttattctattattgtagttcctgtttttctgttctgtcacttacctatgaatgtcacttacctgctggtctatgtaaaaattgtcagtgccttttatctgggtgggtatactaaatataaaatgtttacattcgtaattaatcaaaaccaagacttccattgtaattctattattctaagcttgcctagtcttactaaataccgtaattatctgtaaaatcctggaatgtaaggacattaaccttcctccagtgtttattctgaagaaatgtttggctagccttcctcatctcactgcgtgaccttgcagtatagaaaaataccaatcatcgtggctcttaaacagttagaactaactgcctagctgaacatcataacaaaattcttctaccaaacgacaaggcatggaaggagaacactccccgtgtgctaactttctttatggtcgagcacaccctgccaaaacaagcagccaaaaggcctgactttatgtcctagcctaggcactgtatgggatcctggggaagttat

SEQ ID NO: 679061 - DNA, 603 bp, Homo sapiens
taatatctctacatatctctcaagatatttatcaatcatattagaaagtctcaaaataagtgaaaactagatgttcttaaaggtagtttatgatatttttactggggcaatgttgagataagttaatcaaaataaagatcaacaaaggaccttcttcctttagctcaacccctggtaagaacccaaattctttttcaccagagagggtaaaatggtttgggggtagaaaaaaaaagattcctgggaccagaacataaaatataaaagttgataggattatgaaagttaacatatttaaacacactttgtataaagtagttgtatctccatcacctaaatgttttctgggaataaatattgtatatgattagaggatgttccccctagggcatggtaagcgctgtagttaagggggcctctagcaggcacctgttacttaggtcacggcaagtgctatggttaagggggcctcttctatgtgggcaccccatgttgtgatgttcccttggaggagccttatcaaatttggtgtctcagcttttcctcatgggtcttatagatgctaataaaayattaagttagttaaaaaaacaaatggagaca

SEQ ID NO: 679062 - DNA, 664 bp, Homo sapiens
tgcaaagatttgtacatgcgccttgggctatggttgagtgttttaaagctgcttgtggtggtgctaagagtttgtctgtaaaatgagacatgaatgatatctggcagagctgaagctcaaagaacaatctgaggccgcttgtgtttacacttgcacaatgatagttgtaagcagatctttttaaacaaggcagaacaatttagaaggattaagagatctaaactaagcagagtgtgtgccacaattttcttcctttctaaagcttcttgaaattaagctccccatgstgataaacctagaagaaagggattttgagagttccttttaagaaatttgctccctatgggatcttgttgcttgttccttgagtttataatgtcacttcttttgttccatggggctaatccattttggttattttccatgaggtagcaaatagtttcaatgaggtggctccctgaggctaaggtaaaagggcacatagattttcagtctcattctttgtttacatatgttcagaatataatggaaaatgtccttcagttcataaatcatccttgttttgtctccattccaagataaatttagtttaggagaagttgcaataccattctctgtcacttttgatttatgttagaatgaaagaaaaactccaatggtggat

SEQ ID NO: 679063 - DNA, 592 bp, Homo sapiens
agtgtttactggatgtctactctggttagaatattgtcatagtagaagaaaaaaaatctcttattagaaatcaacttagagcctaagaacattggatctttaaacaattggtttaagcaagttctttaggagaaaaacagtgtctttcatctacaaatgttaatttcaattccacctttatatgatctgagggaacagataatggcaacattaaaagagaatgttctttaggttttacttaagcaaatgctgatagaaaagatttaagtaaataggaaatgacttgaccattagcatgattgtattttaaatagccgttagttttagagagcactcaccaataaatagcaaaacgtacccctgtaatttataaattctctgtctttcctctggtgaagtataaaactcacttttgttcccttatttcagtgctttacagagttaataaaataatgaccttccccacccttcattttaagatcataactagtgtagaagtttccattgaaattgttagatttttcttttttttcagttcactggatatgmtctttggcctggttttgatgttactcatttgtttttggatcaa

SEQ ID NO: 679064 - DNA, 1529 bp, Homo sapiens
tggcagttccaaatctagacttttaacagcattgcccatttatgcatacccctcttgcatttctgccatcgtaattagaagaatatgccttggcaaatccrttgatccaaggaagattagagacacatgtaatacagccccagtcttcagcttgattccaagggtagccaaattcagctccttaatcagccagcttccagctgacctgcaagcacacgaacttgaacaagtgattgttgtaagccactagtttttagggagtttttctcttccaagacattattgctgcaattggtggtttatgtacatacgttcaagaaatgccttcaaaactcttgtatgttagacactaacctagatgttgattaaatagtagatgaaagaatagtgatatatgttctcataaactaccatttagagagtgatagagacaagttgatggataataaaatataatatgggtaaatgttttgatcagagcatggtgttgtgggaatatatgagcctggtgcctcatttatacctgtgggtttgccttaactctccataagaagtcatgactatgtcaacagtgggactggtaaaaactgtataaaggaatgacatttactccaaatagagttagcagtgtgagtgatcagagggcatagagtactcgatgagctggaaggagatgagattggctatagtgaatgttggaggaagagtggagggagaagcttgtaatgtatgtgctttagctaatgcaacaccatggtaactattatagtgtttggacttgactcaagagcaatggtactggtggtgttgttaggagggaattctagttttcctttactacacctgttattatttagttgtctttcccatgagaagatgagaatatcggtatcctcagtgccagacaaattgctttttcctggagcatacatttaatgcattcaatgtgtaaaatggcatttaacacactgaatgcattacagatttatatgtgccagtttcagtttctgggaggcaaatggggatgtgaacaaaacaaatggttagtcatgtttcatataagtttaggatcaacttattagatcatcttgaatgcctttccctgccaattcaggatgaattaaactctggcctagccatttcccagtggtttgtctagcctaattttaaaataatcaaacgaagggacttaaattagctggggaaattattccatgctttaatagattttgatgctaggaatgtttttctgacagtctaaccaaattttccttccacgattttatcccattacttttagttccgatttaaaaccatctgaatactctcttttccttttaagtagtcacacaatcacctaatgttaatatcagtggttttctttccttcatttgccagacccttgttttttcacacatattgaagttacatttttttctctagatttattagcttacatattttggtccattttactctatttttcatccgggctttaacacttatatcctgtttatatcatcttcccc

SEQ ID NO: 679065 - DNA, 1529 bp, Homo sapiens
tggcagttccaaatctagacttttaacagcattgcccatttatgcatacccctcttgcatttctgccatcgtaattagaagaatatgccttggcaaatccgttgatccaaggaagattagagacacatgtaatacagccccagtcttcagcttgattccaagggtagccaaattcagctccttaatcagccagcttccagctgacctgcaagcacacgaacttgaacaagtgattgttgtaagccactagtttttagggagtttttctcttccaagacattattgctgcaattggtggtttatgtacatacgttcaagaaatgccttcaaaactcttgtatgttagacactaacctagatgttgattaaatagtagatgaaagaatagtgatatatgttctcataaactaccatttagagagtgatagagacaagttgatggataataaaatataatatgggtaaatgttttgatcagagcatggtgttgtgggaatatatgagcctggtgcctcatttatacctgtgggtttgccttaactctccataagaagtcatgactatgtcaacagtgggactggtaaaaactgtataaaggaatgacatttactccaaatagagttagcagtgtgagtgatcagagggcatagagtactcgatgagctggaaggagatgagattggctatagtgaatgttggaggaagagtggagggagaagcttgtaatgtatgtgctttagctaatgcaacaccatggtaactattatagtgtttggacttgactcaagagcaatggtactggtggtgttgttaggagggaattctagttttcctttactacacctgttattatttagttgtctttcccatgagaagatgagaatatcggtatcctcagtgccagacaaattgctttttcctggagcatacatttaatgcattcaatgtgtaaaatggcatttaacacactgaatgcattacagatttatatgtgccagtttcagtttctgggaggcaaatggggatgtgaacaaaacaaatggttagtcatgtttcatataagtttaggatcaacttattagatcatcttgaatgcctttccctgccaattcaggatgaattaaactctggcctagccatttcccagtggtttgtctagcctaattttaaaataatcaaacgaagggacttaaattagctggggaaattattccatgctttaatagattttgatgctaggaatgtttttctgacagtctaaccaaattttccttccacgattttatcccattacttttagttccgatttaaaaccatctgaatactctcttttccttttaagtagtcacacaatcacctaatgttaatatcagtggttttctttccttcatttgccagacccttgttttttcacacatattgaagttacatttttttctctagatttattagcttacatattttggtccattttactctatttttcatccgggctttaacacttatatcctgtttwtatcatcttcccc

SEQ ID NO: 679066 - DNA, 1529 bp, Homo sapiens
tggcagttccaaatctagacttttaacagcattgcccatttatgcatacccctcttgcatttctgccatcgtaattagaagaatatgccttggcaaatccgttgatccaaggaagattagagacacatgtaatacagccccagtcttcagcttgattccaagggtagccaaattcagctccttaatcagccagcttccagctgacctgcaagcacacgaacttgaacaagtgattgttgtaagccactagtttttagggagtttttctcttccaagacattattgctgcaattggtggtttatgtacatacgttcaagaaatgccttcaaaactcttgtatgttagacactaacctagatgttgattaaatagtagatgaaagaatagtgatatatgttctcataaactaccatttagagagtgatagagacaagttgatggataataaaatataatatgggtaaatgttttgatcagagcatggtgttgtgggaatatatgagcctggtgcctcatttatacctgtgggtttgccttaactctccataagaagtcatgactatgtcaacagtgggactggtaaaaactgtataaaggaatgacatttactccaaatagagttagcagtgtgagtgatcagagggcatagagtactcgatgagctggaaggagatgagattggctatagtgaatgttggaggaagagtggagggagaagcttgtaatgtatgtgctttagctaatgcaacaccatggtaactattatagtgtttggacttgactcaagagcaatggtactggtggtgttgttaggagggaattctagttttcctttactacacctgttattatttagttgtctttcccatgagaagatgagaatatcggtatcctcagtgccagacaaattgctttttcctggagcatacatttaatgcattcaatgtgtaaaatggcatttaacacactgaatgcattacagatttatatgtgccagtttcagtttctgggaggcaaatggggatgtgaacaaaacaaatggttagtcatgtttcatataagtttaggatcaacttattagatcatcttgaatgcctttccctgccaattcaggatgaattaaactctggcctagccatttcccagtggtttgtctagcctaattttaaaataatcaaacgaagggacttaaattagctggggaaattattccatgctttaatagattttgatgctaggaatgtttttctgacagtctaaccaaattttccttccacgattttatcccattacttttagttccgatttaaaaccatctgaatactctcttttccttttaagtagtcacacaatcacctaatgttaatatcagtggttttctttccttcatttgccagacccttgttttttcacacatattgaagttacatttttttctctagatttattagcttacatattttggtccattttactctatttttcatccgggctttaacayttatatcctgtttatatcatcttcccc

SEQ ID NO: 679067 - DNA, 663 bp, Homo sapiens
tgtcacatggggtgactgatctctgctggcaaaagcaaagggctggtgtgacagtgtttctcagtacctgtgctatgtgggttctgagctattgtctggcatccaagaagaatgaggtcacatggacggttgaaggatggtgaaggtggagaattttactgaacaattaaaatggctctcagtggagagggttgctggagaggagactggaagggcaggtagtcttccccatagttaagttgtctcttccctgaagtagggttgtttccccatctactgactgagtctggggtctttataggcacagtctggggagtgcatgctgattggtttgtgagtatgcaaaataggttaaagcaaacacaccactcaaaggtgggcataacagtgtagaaaaccaattaggaaagagtaggtatatgtaaaataggtaaagggtgggaatcaatcagagaaaagcaygccaaatgggagaacaagttctaaatctggtctgaggattaaacttgtagcttggctttcaggctttggcttggaggtgggctgttgctgtgtactcgcccctatctgcctaggcacttggctgcctcctgtcactgtcaatgggttacaattatgccattttccacttgattcttggactacttttgaaattgtatgttt

SEQ ID NO: 679068 - DNA, 663 bp, Homo sapiens
tgtcacatggggtgactgatctctgctggcaaaagcaaagggctggtgtgacagtgtttctcagtacctgtgctatgtgggttctgagctattgtctggcatccaagaagaatgaggtcacatggacggttgaaggatggtgaaggtggagaattttactgaacaattaaaatggctctcagtggagagggttgctggagaggagactggaagggcaggtagtcttccccatagttaagttgtctcttccctgaagtagggttgtttccccatctactgactgagtctggggtctttataggcacagtctggggagtgcatgctgattggtttgtgagtatgcaaaataggttaaagcaaacacaccactcaaaggtgggcataacagtgtagaaaaccaattaggaaagagtaggtatatgtaaaataggtaaagggtgggaatcaatcagagaaaagcacgccaaatgggagaacaagttctaaatctggtctgaggattaaacttgtagcttggctttcaggctttggcttggaggtgggctgttgctgtgtactygcccctatctgcctaggcacttggctgcctcctgtcactgtcaatgggttacaattatgccattttccacttgattcttggactacttttgaaattgtatgttt

SEQ ID NO: 679069 - DNA, 661 bp, Homo sapiens
agtcaagtatgtctttatttgcatgaaaacagactaataacagactgattcatctgactcagaaatatttgaataggacatctaaaaagggccttgcaaggtatgtattatgtgtattgatgaagatggatggagttttcatgaaagttacacgcaaatgcacagaccagccaaggtgaataatgaaagaaataaaaattagcagagatggacagaatagaaaccaaacacgactcatttatttacttctctttaaagtgccaaagcacatacttaatttttttttttttttttgaactggagtctcactctgtcacccaggctgcagtgcagtggcgcagtctaggctcactgcaacctccacctccccggttcaagmaattctcctgcctcagcctcccaagtagctgggattcaagcaattctcctgcctcagcctcccaagtagctgggattcaagcaattctcctgccaaagcctcccaagtagctggcaccagccaccacacctggttaaatttttttgtatttttagtaaagacggggttttaccatattggccatgctggtcttgaactcctgaccttgtgatctgcctgccttggcctcccgaagtgttgggactacaggcatgagccaccatgcccaaccacataattaat

SEQ ID NO: 679070 - DNA, 586 bp, Homo sapiens
ggcctcccgggaggagccttctgctctgtgagcatcctctgtggatgaggaggagccccctgctctgtgaacatcctctgtggatggggaggagcctcctgctctgtgagcatcctctgtggatggggaggagccccctgctctgtgagcatcctctgtggatggggaggagcccctgctctgtgagcatcctctgtggatggggaggagcccctgctctgtgagcatcctctgtggatggggaggagcctcctgctctgtgagcatcctctgtggatggggaggagccccctgctctgtgagcatcctctgtggatggggaggagcctcctgctctgtgtacatcctctgtggatggggaggagccccctgctctgtgagcatcctctgtggatggggaggagcccctgctctgtgagcatcctctgtggatggggaggagccccctgctctgtgagcatcctctgtggatggggaggagcccctgctctgtgagcatcctctgtggatggggaggagccycctgctctgtgaacatcctctgtggatggggaggagccccctgctctgtgagcatcctctgtgg

SEQ ID NO: 679071 - DNA, 646 bp, Homo sapiens
tggatggttggcctagagcctcttatagtgtaaactgtactttgtgattcaaagatgaagaaatgacccatttatcctatgagtagaaaccatgttctaactaatttctagaataatgaagatgagcttgtgtgggtacatccacttcttttagttaatagtaaaaatttgtagtaggttatttttagcrgctgtggtagcataactgtctgggacttgggttgcagatgcctgtgcctagggtcagggctaagcctttgaaaccttacaaaattactggagaagtgtgttagtcagagttctctaaagggacgggactaagaggttagatatttgaaacagcgtttattaaggagtattgactcacacaatcacaaggcaaagtcccacaataggctgtctgcaagctgaggagcaaggaagccaatccgagtcccaaatccatagggaagccaacagtatagccttcagtctgtggccaaaggcccaagagcccctggcaaaccactggtgtgagtccaagagtccaaaagctgaaaaacttggagtccaatatttcagggcagaaagcatccagcactggagaaagatggaggccagaagactgagcaagtctggtcgttccccattcctctatctgatttta

SEQ ID NO: 679072 - DNA, 612 bp, Homo sapiens
gtgcagggtcagtatggataacaaactctttagctagaaacattttaaaaaatgaaaaacagaatatcttttgacattggctttggaatttgaattttaggagggatgtcacttaccaaataccatgtagaattgtgctctaaagttagcagagaggccgggagaagtggctcacgcctgtaatccctgggaggccaaggtgggataatcatctgaggggcaaaggtgggataattacttgagtccaggagttcaagacaagcctgggcaacatgaggagaccccatctttacaaraaatgaaaaagtcagccaggcatggtggaatgtgcgtgtcacaggtcccagctactcgggaggctgaggtggaagtgagaggtgacagcgtgctggcagtcctcagagccctggcttgctcttggcacctcctctgcctgggctcccactttggcggcatttgaggaacccttcagcccaccactgcactgtgggagcccctttctgggctggccaaggctggagcccactccctcagcttgcagggaggtgtggagggagaggcgctagcgggaacccgggttgcgtgcggcgctcgcgggccagctggagttcc

SEQ ID NO: 679073 - DNA, 606 bp, Homo sapiens
aaatgcctcttacccaaagaaatagaataaaatatatttttcataaccctcaggaaaccttacattattaagagaatacaaaagaaggaaaataataagaactagaatagagtagaatattgagggaatataaaacaaagatattctgttaaagaggtgatcaatagcatcaaaagaatgggaagatcatcagtataaaatattataaaaggttaaaagatraaaactcaaagttccttgaatgtgttcttttaaaccatgggaatctttaaaagaagattatattatgttccatttcatcctaaagcaaaatcagttccatcagtctcccttctacctcctctgggtcacagtataatctgggataagtgcattctggggtaagaaaaaaaaacgtggggctaatatttttaaagaatttgggcattaatgagaaccttgtctcattttatgaagaatgcagataaaattgccagataaatttcagtgcaaattacaaaataatttttttattcaaaagtatttcaaacatcatctctagtaaaagttagaatataaaaataaagagagaatttccattttaatggaaatatttccatattcttt

SEQ ID NO: 679074 - DNA, 1516 bp, Homo sapiens
ttttgtattgttagtagagacggggtttcgccatgttagccaggatggtctccatctcctgacctcgtgatcctcccgcctttgcctctcagagtgctgggattacaggcgtgagccaccgtgccyggtctcattgaagggtttatagtttatatttatatagaccgccccccccccggctaaaaatgatttctaagcagagaagtaacaaaatttgctcttctctagagggatttggcaactatgaagagtagattggagtaggaagaggttggatagggagacatgataaagttatttgaaaagttggcaggagataaatggatcttaaataaaattctagttatttggaaggagaggagaggagaaatgtgagagaaaattcaggaaaggaatcaattcaatgtaataatatactgtggaggatggggagcagttcaaaataattttatggttactatatttgaactagagtagacaagaagaatagaacaagaatagaaaaaaaacagaaggttgagatagtttgagggaaaaataaatatagttatgaatatgttgagtttcagtaatgtatggtacaggcaggttgagatgtctggtagatgtagataaaataatacaactatttcttatacaaaaataacataaaaacttataatgctgattcaaaagttgcagcaacaattcctgacagaaaattcaacagagaagatactgatagccactatgaatgataatcatctctgattattttgtctgctcttcagtagcttccaagtatactatcttgtggggcttggcatcagtttctgtttgcagttaaaaattctttctttaaggacagtctcccctaatttgtgcatagagtaggcatgagggagtgttggggaaaattaattgaatcctctttctccaaagttgaagaattagattcatggtttggatattgtttgtttatgtctatcaaaactcatgttgaaatttgatccctaacgtggcagtgtagggatgtagggcctaaagagacgtgttttagtcatggggctagaccccatatgagtagattaatgccctcctgctgaggtaagtgtgagttttcacttttgcaagaatggattaatttcccagggagtgggttgttagaaagagtcttgcttccttggatttgctcttttgcttcttctctctcatatgatctctttgcacagactcacctcccttccactttcctccatgagaagaagcagcctgaggccctcaccagatacagctgccaaatcttggacttatcagtctccagaatcataagcaaataaacctcttttctttataaattacccattttcaggtgttttgttttagcaatacaaagtggactaagacatccttaacatttgcttagtaaaaactatttataaatgtctttattttccaattagtccccttttactgattatttttattttaaaccttgggttattacatatctgtatgtcagtcacttaaataaaca

SEQ ID NO: 679075 - DNA, 1516 bp, Homo sapiens
ttttgtattgttagtagagacggggtttcgccatgttagccaggatggtctccatctcctgacctcgtgatcctcccgcctttgcctctcagagtgctgggattacaggcgtgagccaccgtgcccggtctcattgaagggtttatagtttatatttatatagaccgccccccccccsgctaaaaatgatttctaagcagagaagtaacaaaatttgctcttctctagagggatttggcaactatgaagagtagattggagtaggaagaggttggatagggagacatgataaagttatttgaaaagttggcaggagataaatggatcttaaataaaattctagttatttggaaggagaggagaggagaaatgtgagagaaaattcaggaaaggaatcaattcaatgtaataatatactgtggaggatggggagcagttcaaaataattttatggttactatatttgaactagagtagacaagaagaatagaacaagaatagaaaaaaaacagaaggttgagatagtttgagggaaaaataaatatagttatgaatatgttgagtttcagtaatgtatggtacaggcaggttgagatgtctggtagatgtagataaaataatacaactatttcttatacaaaaataacataaaaacttataatgctgattcaaaagttgcagcaacaattcctgacagaaaattcaacagagaagatactgatagccactatgaatgataatcatctctgattattttgtctgctcttcagtagcttccaagtatactatcttgtggggcttggcatcagtttctgtttgcagttaaaaattctttctttaaggacagtctcccctaatttgtgcatagagtaggcatgagggagtgttggggaaaattaattgaatcctctttctccaaagttgaagaattagattcatggtttggatattgtttgtttatgtctatcaaaactcatgttgaaatttgatccctaacgtggcagtgtagggatgtagggcctaaagagacgtgttttagtcatggggctagaccccatatgagtagattaatgccctcctgctgaggtaagtgtgagttttcacttttgcaagaatggattaatttcccagggagtgggttgttagaaagagtcttgcttccttggatttgctcttttgcttcttctctctcatatgatctctttgcacagactcacctcccttccactttcctccatgagaagaagcagcctgaggccctcaccagatacagctgccaaatcttggacttatcagtctccagaatcataagcaaataaacctcttttctttataaattacccattttcaggtgttttgttttagcaatacaaagtggactaagacatccttaacatttgcttagtaaaaactatttataaatgtctttattttccaattagtccccttttactgattatttttattttaaaccttgggttattacatatctgtatgtcagtcacttaaataaaca

SEQ ID NO: 679076 - DNA, 668 bp, Homo sapiens
atattgaaagtgatggatatccagaatacactggcttgatctttacaaattatatgaatatattaaattatcacacgtaccctgaaactatgtacatctattatgcatcagtttaaaaaaaawtttttttaaagacactcttatcattcaggaaatccaagggtttgaggagctctgtgacagaatcaggaagatcaatatatttagtataataccacactatttaatacattgttatgaccctgataccctttatagagcttccttcctaaagcattagagtatgtatcatattaccaagtacataaacctaaatagtgctttattctaattagatgtacacacttagattttccttgaatcacaattatagttatcacgagtcttagacatcacctagtttaaatatcttaatttaaatgaaaaaaaaataaagcccagaaacagaaatggacatgtccaatatcactcagcttaccagtcgtagtccaggggtttttattttgttttcccttcctgttccaaaattttcagcctctaagcctttggttctgttgtttttgtttcataaatgtattccctcccattcctttctaaatcccatttttcaagacaaaatttcatttcgtatattttcatttttttttttttttttgagacagggtctt

SEQ ID NO: 679077 - DNA, 668 bp, Homo sapiens
atattgaaagtgatggatatccagaatacactggcttgatctttacaaattatatgaatatattaaattatcacacgtaccctgaaactatgtacatctattatgcatcagtttaaaaaaaattttttttaaagacactcttatcattcaggaaatccaagggtttgaggagctctgtgacagaatcaggaagatcaatatatttagtataataccacactatttaatacattgttatgaccctgataccctttatagagcttccttcctaaagcattagagtatgtatcatattaccaagtacataaacctaaatagtgctttattctaattagatgtacacacttagattttccttgaatcacaattatagttatcacgagtcttagacatcacctagtttaaatatcttaatttaaatgaaaaaaaaataaagcccagaaacagaaatggacatgtccaatatcactcagcttacyagtcgtagtccaggggtttttattttgttttcccttcctgttccaaaattttcagcctctaagcctttggttctgttgtttttgtttcataaatgtattccctcccattcctttctaaatcccatttttcaagacaaaatttcatttcgtatattttcatttttttttttttttttgagacagggtctt

SEQ ID NO: 679078 - DNA, 608 bp, Homo sapiens
tttggggctttggttcccaggtatctggagatcaagcatccaataaggtacccaagattctggttaccactttccccagttcttccagggacccttgaatggccctgggcaagtcacttaacctccccgtttctccagctgtatctctacatcacagttatcaggggaagaatgcaacaggggatggaaaagcaccttctgaagtgtaaagcagtctcccactgtgggagagcattgccgggaatcaaagccttgaacttaagaatgtagctttccaaagaggattggggcatccgctaatgggtaggagaattctttggaggcagggtggacaggagggctctgcgggcctctgggaaccatgccctagggatccatctatggaaaggctagccctggagaaagtgctgctggatgcatgactgctcaaagttgacactccaaattgccatcacctgtggagacttgtttagcagggctgggcagagccagataatattcacttctttcctattgtccagaacaaaacctgtcatcaacctgttctctccactgtcacttattgcttgttatttgctgtcacacacaagyacacacatgtgcacaca

SEQ ID NO: 679079 - DNA, 1724 bp, Homo sapiens
gcatattaatgcaataataacctctcttcatgctgttgccagtaactgtttaatagggcaacagagtatcattgggaattacatacaaatgaaggtttcctgtatcttaaaagaaatggtacctcagctctttctcccccaggcatatcagttacctcttcctccatgagatcatatacaagaacatttattagggttattttaaaacagaaaactctaagtgggaaataaaaacggcccataatccttttacctgataacccatgttgacattttgtaacaaatgaaagtaacacatgcacatgatcagaaaattcagataataatggaaggtataaaactgaatgtgtctagaataggcaaattcatagggacagaaagcagaacacaggttaccagggtctggggagagataggagtgaagagtcattgtttaagggatagagaggttcagtctgggaagatgaaaaagttccagagatagacagtgggatgattacacaacatcatgaatgtacattacgtcactgaaaaaaaaggcaacttttttcactttttaaaaattttttatttccacaggtttttggggaacagttggtatttggttacatgagtaaagttctttagtggtgatttgtgagaatttggtgcacccatcatctgagcaatatacactgaacccaatttgtagtcttttatcccttttattcctcaccccctcccaccattttccccaagtccctaaagtccattatatcaatcatatgcctttgcatcttcacagcttagctcccccttatgagtgagaacatgtgatgtttgactttccatgcctgagtttcttcacttaggataatggtctccagttccatccaggttgctgcgaatggcattcatttgttcctgttatggctgagtagtattccatcatatatatatgtatataccacaatttcctcaaccactggttgattgataggcatttgggctggttccatatttttgcaattgtcaattttgctgctataaacatgcctgtgcaagtatctttttcatataatgacttcttttcctctgggcagatacctggaagtggggttgctggatcaaatggtagttctccttttagttccttaaggatctccacactgttttccacagtgattacactagtttacattcccatcagcagtgaagaactgttcaaaaaaaggcaacttatattttaaaattggggataaaagtttccctcctctagtctttacctttcccgaaaaaacaatcactaagattgtttgacaagtatcatttgagaaaaaattacatgcatatagtcccttatatataaatatgtagcatatatatatwttttatttgcatgaatcagatgatagcttatacaaagatgtggattttgcttctttttcacttagtaatatttcttgaccatcaacaaatggagccataccttattattttttcatctgtataactgctcattatataaattattataatttatttaatctactctagtctcctggatatttagatcaattccttatccatatgtccatatgatataggacaaatgatagatatttccaagggacacttgtggaaatttttaaataataatgagactaagatgaaggtaatagtcccaccttaataatgttgatgtggaattgacattgtttatgactgtgaagatatgacctaat

SEQ ID NO: 679080 - DNA, 666 bp, Homo sapiens
tgttgtaacaatgctgtcttctcacaaactactcatgtgccctataagaagataacccacaatccctgattctgctttattcaatgactagctactgcacagaccgtgtaaatggacaggacagccagagaggtgagtgggaagtttagtacagatgtgactgaaaacacttgrtattacttctccccaagacttctcgaaaggagctagcacagagtattggtgaacagacttctgagcacctttttctatgtggcctccaagaagaaaccaatggactatttacttttctacttagcaaggtttcaagagactctctaataacataagtcttctgattactccctttcttgatcatgagaactagggagaagatggctaaactgaagcaacttggagctagaagataggctgcatctgctcagttcacctgcgcagaccaaaaacagtgcacgctgtaggcggcccagtccagctgaatttcatcagatgggcatgtgtttccttccccaactgctggcctcagcttctcagaaggtaatgtattgagccaaggtgagccctgcaggtgatcacctggacacctctgcccatctgtgagagtgaacagcatgcttactactgtggtaggctgcagtgccacagcaagctgattcacacgtaaag

SEQ ID NO: 679081 - DNA, 666 bp, Homo sapiens
tgttgtaacaatgctgtcttctcacaaactactcatgtgccctataagaagataacccacaatccctgattctgctttattcaatgactagctactgcacagaccgtgtaaatggacaggacagccagagaggtgagtgggaagtttagtacagatgtgactgaaaacacttggtattacttctccccaagacttctcgaaaggagctagcacagagtattggtgaacagacttctgagcacctttttctatgtggcctccaagaagaaaccaatggactatttacttttctacttagcaaggtttcaagagactctctaataacataagtcttctgattactccctttcttgatcatgagaactagggagaagatggctaaactgaagcaacttggagctagaagataggctgcatctgctcagtycacctgcgcagaccaaaaacagtgcacgctgtaggcggcccagtccagctgaatttcatcagatgggcatgtgtttccttccccaactgctggcctcagcttctcagaaggtaatgtattgagccaaggtgagccctgcaggtgatcacctggacacctctgcccatctgtgagagtgaacagcatgcttactactgtggtaggctgcagtgccacagcaagctgattcacacgtaaag

SEQ ID NO: 679082 - DNA, 666 bp, Homo sapiens
tgttgtaacaatgctgtcttctcacaaactactcatgtgccctataagaagataacccacaatccctgattctgctttattcaatgactagctactgcacagaccgtgtaaatggacaggacagccagagaggtgagtgggaagtttagtacagatgtgactgaaaacacttggtattacttctccccaagacttctcgaaaggagctagcacagagtattggtgaacagacttctgagcacctttttctatgtggcctccaagaagaaaccaatggactatttacttttctacttagcaaggtttcaagagactctctaataacataagtcttctgattactccctttcttgatcatgagaactagggagaagatggctaaactgaagcaacttggagctagaagataggctgcatctgctcagttcacctgcgcagaccaaaaacagtgcacgytgtaggcggcccagtccagctgaatttcatcagatgggcatgtgtttccttccccaactgctggcctcagcttctcagaaggtaatgtattgagccaaggtgagccctgcaggtgatcacctggacacctctgcccatctgtgagagtgaacagcatgcttactactgtggtaggctgcagtgccacagcaagctgattcacacgtaaag

SEQ ID NO: 679083 - DNA, 604 bp, Homo sapiens
gctcaagggcacactgctgggagaggacggagctgtgaaccagattctattgaggtatatcacgcattcaagtttgaatgagatggaaaaatgtgttaaacagaaggaggagtcaccaaattccttttgaggtgacacattgaaggctgtacactttatatacttgctgaagtaagaaacttgtcagccactgtattagtccattttcacactgctgatgaagacatacccaagactgggtaatttataaggaaaaagagwtttaatgaactcacagttccacgtggctgaagaggcctcacaatcatggtggaaggcaaaaggcacatcttacatggcagcagacaagaaaatgagagccaagcgaaagggttttcctcttataaaaccatcaggtctcatgagacttattcactacaatgggaacagtatgggggaaactgcccccgtgattcaattatctttcaccaggtccttcccacaacacgtgggaattatgagagctacaattcaagatgagttctgggtggggacacagccaaaccatatcagccacactttgagtatatgtcaccttgctttggctggcattattctacagaga

SEQ ID NO: 679084 - DNA, 668 bp, Homo sapiens
acccaacaatcccattactgggtatatacccaaaggattataaatcattctactataaagacacatgcacacgtgtgtttattgcagcactgttcacaatagcaaagtcttggaaccaacccaaatgtccatcgatgatagactggattaagaaaatgtggcacatatacaccatggaatactatgcagccataaaaaaggatgagttcatatccttttcggggacatgtatgaaactggaaatcatcattctcagcaacgtaacagaagaagagaaaaccaaacactgcatgttctcactcataagtggtagttgaacaatgagaacacatggacacagggagggaacgtcacacaccagagcctgtcggggagtggggggctggaggagggatagcattaggagaaatacctaatgtaaatgacgagttcataggtgcagcaaacccacatggcacatgtatacctatgtaacaacctgcacattgtgcacatataccccagaacttaaagtataataatttaaaaaaaaataaaaagaaagatttggagggatcagaayatccaaatctatcattcttcccctggtcccccgaatttcatgtctttctcacattgcaaaatacagtcatctcttcctcatagcctccaagtcttacctcattcca

SEQ ID NO: 679085 - DNA, 668 bp, Homo sapiens
acccaacaatcccattactgggtatatacccaaaggattataaatcattctactataaagacacatgcacacgtgtgtttattgcagcactgttcacaatagcaaagtcttggaaccaacccaaatgtccatcgatgatagactggattaagaaaatgtggcacatatacaccatggaatactatgcagccataaaaaaggatgagttcatatccttttcggggacatgtatgaaactggaaatcatcattctcagcaacgtaacagaagaagagaaaaccaaacactgcatgttctcactcataagtggtagttgaacaatgagaacacatggacacagggagggaacgtcacacaccagagcctgtcggggagtggggggctggaggagggatagcattaggagaaatacctaatgtaaatgacgagttcataggtgcagcaaacccacatggcacatgtatacctatgtaacaacctgcacattgtgcacatataccccagaacttaaagtataataatttaaaaaaaaataaaaagaaagatttggagggatcagaatatccaaatctatcattcttcccctggtcccccraatttcatgtctttctcacattgcaaaatacagtcatctcttcctcatagcctccaagtcttacctcattcca

SEQ ID NO: 679086 - DNA, 687 bp, Homo sapiens
gagattaattatttgaaatgacagaaactaatttacattgtttataatctaggaccatacattttaaagcaaaatcaagtcttatgaagaagttgaaaaatatgcaaagtacactgatgtcaacttttgttctattcctcatgttttttttgattaattaacttgtaaaagaaccatcattagttacacaataggtattaattctcacttccaggtcaaatgtgtaccttggaagagatagaaaaatctctgtggtatgaaataatacaaggcacagaatataattataaatataagagaaaaataacacacttctcattttatccccagagttttctggaaagtagtgtagtcagataaaattgagaatactcacctattactcattgatcgtagtcataatagtaaaaatgggaggcctgctagattacactttacactgattcaatagagggactctaggacaaagtaagctcatgagttcaacaggcagggaacaccactgtgggctccttggtttccaatttaactctcatcaatgggatctgagacacacaatgcctgactacattctcactgcctttgaaagasagaagagcatgtcattctgtagggaaaggagcaggtgcttttacagagagcagttttatttctgaaatgagggaaattgacaaggagctgtgcttt

SEQ ID NO: 679087 - DNA, 1006 bp, Homo sapiens
cacttatgtagtattcttattcaaaagtataacttgaatctaattacaagaaaacattggaggagtctaaattgagagactctttgcaaactaattggtcatactttttacaatttgtctgtcataatagacaaatgtcaagagtcaggcaagatcgaagataactaaaaggaagtgatgatcacatggaatccgtaaaccagaatcggatyctggagcaggaaaaaatgcttaaaggacattttgagggcaaacagtgaaatttgaatgtggactctatattaatcaaacaaattatataataacataatatttattattttagtgcttgtcactcaaagttatcttggagtttgatattatattgttacagtaataatgtcatgcttgcttcttttgtttttgtggtttgacatcctggtcctcaatgtttaaacctgtaatctttctaaagaagactatacaattgcccacacttctcttttttgttgttgattttgttttgggacagtctcactctgtcgcccaggctggagtgcagtggtgcaatctcagctcactgcaacctctgcctcctgggttcaagcaattctcatgactcagcttcccaagtagctgggactacaggcacccgccaccacgcttagctaatttttagtagaggtggggttttgtcatgttggtgaggctggcctggaactcctggcctcatgtgatctgcctgcctcaccctcccaaagtgctgggatttcaggcgcgagccattgtgcccggccgcccacacttttcaatcctctcctcccaagttagggagcctacaaagcaatgacagaatctgaaccctagcctctttctctctggagtctcaataggaaatcctgaccatttcaccctcctctacctctgcttccatcttttgcccacgattacaagctgctgccagagatgttaaccatacaatctttggttttcttgtggtataacacaaagactgaagcatttattt

SEQ ID NO: 679088 - DNA, 1311 bp, Homo sapiens
ttcattgttagtgtatagtgagcaataactattttggtgtgtcacctaatatatgacattactaaattactttatctcctgtctctatattagtagcagataagtgatttgaactaaattcaaatggaaactaaattcagaataaatgataacttccaagttgaatttaaatgctacatttgaacttaatttttgttcattaaactaaggtttaaacttgtctaagcaaactaattcgaaactatagtcctggaagaataccagattatcaaaataaccatttgaaacaattaagtttgagctcttaaaagattgtgattatgatatttctggggtataatttataacttctagctcttattgtgccttgtagatagttctctagttgcgttgcatttcttttctttctttctttcttttgtttttttttttttagaccgggtctcactctgtcatctaggcaggggctcaatcatagctcactgtagccttgaactcctggactccagtgatcctcttgcctgagtagctaggactataggcatatacmacttattgatcgttctctagaagttgctggttatataatagtattgaatgtttttcacatttagggtgtgggatatacaattgaggagagattgtagattatatatttttgctgttttttttttttaatttacaggccacagaaacactattcagaatgggtgtagcaagaggaaccatcacaacattaagaaatggagaagtaagatgagaattttgatatagttattagttgttaatttatagtttgcgattttaaaatataaaatgtgatgaaatctatgatgctttgtctaagaaatagagagatatctgatgtatataatattgagtgtacctgatgaacaaatccattttaattcatagtcatgttggaaccagatcttagattgaaaacaaattactgtctttttacctttagttatcaaatatctttactcttaaaaaatgacattttattagtaacttctacaaatgtttttaatgaaaaaagagttccttagcttttgctttctttctattttgtgttatacagaactgatacttatttcttaagataaaataatcggaaatgttgaacatttactacacgtggagagaagggaaggaagagggagagggagagggagaaaaaagctggagaggattttgtctgcagatgctaagttttgactttttaaaatgctcctgtcaatcctttagaagatttttctatcatctcacatacattttcatgttaaaattattaccagcttgattacc

SEQ ID NO: 679089 - DNA, 1311 bp, Homo sapiens
ttcattgttagtgtatagtgagcaataactattttggtgtgtcacctaatatatgacattactaaattactttatctcctgtctctatattagtagcagataagtgatttgaactaaattcaaatggaaactaaattcagaataaatgataacttccaagttgaatttaaatgctacatttgaacttaatttttgttcattaaactaaggtttaaacttgtctaagcaaactaattcgaaactatagtcctggaagaataccagattatcaaaataaccatttgaaacaattaagtttgagctcttaaaagattgtgattatgatatttctggggtataatttataacttctagctcttattgtgccttgtagatagttctctagttgcgttgcatttcttttctttctttctttcttttgtttttttttttttagaccgggtctcactctgtcatctaggcaggggctcaatcatagctcactgtagccttgaactcctggactccagtgatcctcttgcctgagtagctaggactataggcatataccacttattgatcgttctctagaagttgctggwtatataatagtattgaatgtttttcacatttagggtgtgggatatacaattgaggagagattgtagattatatatttttgctgttttttttttttaatttacaggccacagaaacactattcagaatgggtgtagcaagaggaaccatcacaacattaagaaatggagaagtaagatgagaattttgatatagttattagttgttaatttatagtttgcgattttaaaatataaaatgtgatgaaatctatgatgctttgtctaagaaatagagagatatctgatgtatataatattgagtgtacctgatgaacaaatccattttaattcatagtcatgttggaaccagatcttagattgaaaacaaattactgtctttttacctttagttatcaaatatctttactcttaaaaaatgacattttattagtaacttctacaaatgtttttaatgaaaaaagagttccttagcttttgctttctttctattttgtgttatacagaactgatacttatttcttaagataaaataatcggaaatgttgaacatttactacacgtggagagaagggaaggaagagggagagggagagggagaaaaaagctggagaggattttgtctgcagatgctaagttttgactttttaaaatgctcctgtcaatcctttagaagatttttctatcatctcacatacattttcatgttaaaattattaccagcttgattacc

SEQ ID NO: 679090 - DNA, 1613 bp, Homo sapiens
aacaagccattcgttcaccaaatacttattaagcgtctaccatgtgtctggcaagggatatgtaacagtgagaaaaactaggtgtggtccaggccctccaggggctcaggggctcgtggaagaagtggacattgaagtacttatcacacaaatgagtataaaagtacaatagtgatatctgccacgaaggcgagcagacagagctagcggggcttccaggaggagttttgatcttgcagggacaggaaggaggagttagctcctggggggcgggattgggggtggtggtgatatagacgtggggtcagagtggaaaacaacaaaaatataattattttagttcaaagttattgtgtcttgagttgaaaggcagggcagttagcaacacagttcagatttcagtactgcccctgaaatctgaactgtgttcaaagtctaaaacgtttaccttagcaaatccctcataaaactccatttggaagagtcccgagagctaattttttaagtatacttgcagaaggtagatgaggagacagattaaatcttattacctctttcagatgagaggcacttgagccctgctcagctgtgagaataagagaggggaattaattctaattgaatacacgtgttctctcacagctgttgttccccaccagaaccaaatgagcgcaagatctgacaaagaaaaaaaaaaggttcatcttttattcccccaaacactttcatttaaatcaagagggtgggatgtggttattgctgtgtttttagacagaatcaacagtttctgggtctgagatgttgcatacaccctctcagtccctgtatcctgagatggagtcacctgagaatccacagcaagtcctaaccagggatgggtctgggtggttaaggaaggttggcttcagaactgggccagaggcactgctttgcttttgctgttttgatcagctctctgcctgcaggagacaaggaaaaccaacgggaacaggttagttacgatcataaatcctgggcttattttattaactcacataatagctattaattgcctttcctccaaggagcaaaaggacatatacggtcaatgctataaaaagtaacactgtattatgttatactaaaatattaataaatctaggttggttgagtgtttcctgattccatagattggaagcggattgaggaaggaccctagcagaccacagagctgagccatgcacagagaagaaatcttttcttcttttgtatttttttragacggagtttcgctctctttttgcccaggctggagtgcaatggcgcgatctcggctcactgcaacctccacctcccgggttcaagcgattctcctgcctcagcctcccgagtagctgggattacaggcgtgagccaccatgccgggccatttttgtatttttagtggagacagggtttgaacacgttggccaggctggtctcaaattcctgacctcaggtgatccgcccgcctctgccttccaaagtgctgggattacaggcgtgaaccaccgcgcccagccagaagaaatctttatcttggtgtgcgggctctgatgagggacaaatgtcatctatcttggatctgaatctgg

SEQ ID NO: 679091 - DNA, 1613 bp, Homo sapiens
aacaagccattcgttcaccaaatacttattaagcgtctaccatgtgtctggcaagggatatgtaacagtgagaaaaactaggtgtggtccaggccctccaggggctcaggggctcgtggaagaagtggacattgaagtacttatcacacaaatgagtataaaagtacaatagtgatatctgccacgaaggcgagcagacagagctagcggggcttccaggaggagttttgatcttgcagggacaggaaggaggagttagctcctggggggcgggattgggggtggtggtgatatagacgtggggtcagagtggaaaacaacaaaaatataattattttagttcaaagttattgtgtcttgagttgaaaggcagggcagttagcaacacagttcagatttcagtactgcccctgaaatctgaactgtgttcaaagtctaaaacgtttaccttagcaaatccctcataaaactccatttggaagagtcccgagagctaattttttaagtatacttgcagaaggtagatgaggagacagattaaatcttattacctctttcagatgagaggcacttgagccctgctcagctgtgagaataagagaggggaattaattctaattgaatacacgtgttctctcacagctgttgttccccaccagaaccaaatgagcgcaagatctgacaaagaaaaaaaaaaggttcatcttttattcccccaaacactttcatttaaatcaagagggtgggatgtggttattgctgtgtttttagacagaatcaacagtttctgggtctgagatgttgcatacaccctctcagtccctgtatcctgagatggagtcacctgagaatccacagcaagtcctaaccagggatgggtctgggtggttaaggaaggttggcttcagaactgggccagaggcactgctttgcttttgctgttttgatcagctctctgcctgcaggagacaaggaaaaccaacgggaacaggttagttacgatcataaatcctgggcttattttattaactcacataatagctattaattgcctttcctccaaggagcaaaaggacatatacggtcaatgctataaaaagtaacactgtattatgttatactaaaatattaataaatctaggttggttgagtgtttcctgattccatagattggaagcggattgaggaaggaccctagcagaccacagagctgagccatgcacagagaagaaatcttttcttcttttgtatttttttgagacggagtttcgctctctttttgcccaggctggagtgcaatggcgcgatctcggctcactgcaacctccacctcccgggttcaagcgattctcctgcctcagcctcccgagtagctgggattacaggcgtgagccaccatgccgggccatttttgtatttttagtggagacagggtttgaacacgttggccaggctggtctcaaattcctgacctcaggtgatccgcccgcctctgccttccaaagtrctgggattacaggcgtgaaccaccgcgcccagccagaagaaatctttatcttggtgtgcgggctctgatgagggacaaatgtcatctatcttggatctgaatctgg

SEQ ID NO: 679092 - DNA, 1613 bp, Homo sapiens
aacaagccattcgttcaccaaatacttattaagcgtctaccatgtgtctggcaagggatatgtaacagtgagaaaaactaggtgtggtccaggccctccaggggctcaggggctcgtggaagaagtggacattgaagtacttatcacacaaatgagtataaaagtacaatagtgatatctgccacgaaggcgagcagacagagctagcggggcttccaggaggagttttgatcttgcagggacaggaaggaggagttagctcctggggggcgggattgggggtggtggtgatatagacgtggggtcagagtggaaaacaacaaaaatataattattttagttcaaagttattgtgtcttgagttgaaaggcagggcagttagcaacacagttcagatttcagtactgcccctgaaatctgaactgtgttcaaagtctaaaacgtttaccttagcaaatccctcataaaactccatttggaagagtcccgagagctaattttttaagtatacttgcagaaggtagatgaggagacagattaaatcttattacctctttcagatgagaggcacttgagccctgctcagctgtgagaataagagaggggaattaattctaattgaatacacgtgttctctcacagctgttgttccccaccagaaccaaatgagcgcaagatctgacaaagaaaaaaaaaaggttcatcttttattcccccaaacactttcatttaaatcaagagggtgggatgtggttattgctgtgtttttagacagaatcaacagtttctgggtctgagatgttgcatacaccctctcagtccctgtatcctgagatggagtcacctgagaatccacagcaagtcctaaccagggatgggtctgggtggttaaggaaggttggcttcagaactgggccagaggcactgctttgcttttgctgttttgatcagctctctgcctgcaggagacaaggaaaaccaacgggaacaggttagttacgatcataaatcctgggcttattttattaactcacataatagctattaattgcctttcctccaaggagcaaaaggacatatacggtcaatgctataaaaagtaacactgtattatgttatactaaaatattaataaatctaggttggttgagtgtttcctgattccatagattggaagcggattgaggaaggaccctagcagaccacagagctgagccatgcacagagaagaaatcttttcttcttttgtatttttttgagacggagtttcgctctctttttgcccaggctggagtgcaatggcgcgatctcggctcactgcaacctccacctcccgggttcaagcgattctcctgcctcagcctcccgagtagctgggattacaggcgtgagccaccatgccgggccatttttgtatttttagtggagacagggtttgaacacgttggccaggctggtctcaaattcctgacctcaggtgatccgcccgcctctgccttccaaagtgctgggattacaggcgtgaaccaccgcgcccrgccagaagaaatctttatcttggtgtgcgggctctgatgagggacaaatgtcatctatcttggatctgaatctgg

SEQ ID NO: 679093 - DNA, 1613 bp, Homo sapiens
aacaagccattcgttcaccaaatacttattaagcgtctaccatgtgtctggcaagggatatgtaacagtgagaaaaactaggtgtggtccaggccctccaggggctcaggggctcgtggaagaagtggacattgaagtacttatcacacaaatgagtataaaagtacaatagtgatatctgccacgaaggcgagcagacagagctagcggggcttccaggaggagttttgatcttgcagggacaggaaggaggagttagctcctggggggcgggattgggggtggtggtgatatagacgtggggtcagagtggaaaacaacaaaaatataattattttagttcaaagttattgtgtcttgagttgaaaggcagggcagttagcaacacagttcagatttcagtactgcccctgaaatctgaactgtgttcaaagtctaaaacgtttaccttagcaaatccctcataaaactccatttggaagagtcccgagagctaattttttaagtatacttgcagaaggtagatgaggagacagattaaatcttattacctctttcagatgagaggcacttgagccctgctcagctgtgagaataagagaggggaattaattctaattgaatacacgtgttctctcacagctgttgttccccaccagaaccaaatgagcgcaagatctgacaaagaaaaaaaaaaggttcatcttttattcccccaaacactttcatttaaatcaagagggtgggatgtggttattgctgtgtttttagacagaatcaacagtttctgggtctgagatgttgcatacaccctctcagtccctgtatcctgagatggagtcacctgagaatccacagcaagtcctaaccagggatgggtctgggtggttaaggaaggttggcttcagaactgggccagaggcactgctttgcttttgctgttttgatcagctctctgcctgcaggagacaaggaaaaccaacgggaacaggttagttacgatcataaatcctgggcttattttattaactcacataatagctattaattgcctttcctccaaggagcaaaaggacatatacggtcaatgctataaaaagtaacactgtattatgttatactaaaatattaataaatctaggttggttgagtgtttcctgattccatagattggaagcggattgaggaaggaccctagcagaccacagagctgagccatgcacagagaagaaatcttttcttcttttgtatttttttgagacggagtttcgctctctttttgcccaggctggagtgcaatggcgcgatctcggctcactgcaacctccacctcccgggttcaagcgattctcctgcctcagcctcccgagtagctgggattacaggcgtgagccaccatgccgggccatttttgtatttttagtggagacagggtttgaacacgttggccaggctggtctcaaattcctgacctcaggtgatccgcccgcctctgccttccaaagtgctgggattacaggcgtgaaccaccgcgcccagccagaagaaatctttatcttggtgtgcgggctcygatgagggacaaatgtcatctatcttggatctgaatctgg

SEQ ID NO: 679094 - DNA, 2613 bp, Homo sapiens
agccaaggtctctgaaatatctttgaggccctttcttcattgtcttctattagcatctgctttccttttagttactcaaatttctgcagcctgcttgaatttcagacaataccagtggtcttacaagcactacatgacccctataacacttcctgacttcatttctgcaatatattttatttttttacatcaggatgaacattgaaactttttatatctattcaccttccatttgttttcaagtccagtttatctccaaagaattttagaatgtagataagactctagtttgtctggtttcttgctgtatcccttgactgcgaatgctttctagtacatataatacactcaaaagtacttatgaataaaaaaaaggaattaatcttcacatttttccttcaaaatagccttaactctttggtttccaaatttatgtgagggtttttagtagtagtctcaaaaatccaatcaaattgaacagggagtgtctccagaatgaagtttttgattagattcagtgtctgtgcaatcaggacatgtctcttggaatgtagtggtgattaggtttattaattatttttttcatatataaggggaagccaatcagaggatgcattttcccagagaaggagcatctgaagagtttaagaccttggggaaagagagtcttgctgcttgcttgtgagacttgccttggaaggtagataagttcactgcatcctccagctttttatttctggtgagttctccaagcactgagatgtgaactggcctcattcccttacaatgatactgttaccagtagaagagattccagttactggcagcatatctgcatgggtccataagcaacttcagtccttgcctcctcagaagaaagaattcgactgaagggcatacagcggaaaaagagactgagcagtaagtttcagagcaggagtggaagtttatttaaaaaggctttagaacaggaaggagaggaaaattctcttggaagagacccgagcagatgcctgaaggtccaagaaagaaaagagaagagcctttaaccttgatcctgcgacgggtttgcctctttcccatgattcttcctttagggagagtttccagcatgcacagtgctttccttaccctttgaaattgagcatgcacggtgtgtttagggagttatatgcatgtccatctgaagctttctttccttttccggtggagtgtgcccccagattatgctttgccatttttgtctcttcacatgcatgcccaagaagttgcttcttcctggggtctgcatttaattcacatttttgatgttaacaggtgtagaccatcaggaaatggcctctctctggtgctgcctaattatcatttttagagaggcaatgtgataactgacaggccatcacctgacatttctagtgggtaggggaagagccctctcctgccctgctcaagctcttctacctgtaacaagacaagccttgtatatcattagacatttgtcccatcaaggcagcatctcattattacattttattgtgtgaattgttacttcccattctcatattctgtgttcactatttgtgtgccttttccatttctgttttgaccatatctcattattttaactgcctcctccaagattctagatctgcattggccaatatagtaactactagtcacatgtgactataaactgtaatttaattataattaaataactaaatggcatatccttagtagtaatagccaaagtcgtggccaaactagaaattctgtaactgcatatgtgtggtagttactgcattggacaatgcagatatagagaatttctttcatcacagaaaatcgtgtcgggcatgttggctaccacttatttttaaattctatttgtgtggtttatagttaaattatattcttcttctctatattcatttcccttcagattttctcaagcaatttttaaatttcattcatttaccttattgaggtaagtacttagattatttttttaaaataatgtacagcaaataatttttccatggatattgttttagctttattgtattggtacttttacgtactatattcaggtattattgkttttcataacgtactttaaaaattgcgccaagtttatttaaaatagatttctcccttgattttcagatgttagattctgtcttctattgctgtattttaatttaattttattttattgtatgtaaatatgttgcatattcctttttttaaaatgtgagatttttcttctctcctgttacacaaactttgtatgcagtgttcattatgaactttaaaaataaatattttgtttcagggcatggtgctttcacacataaaaccttagaataattttaaattccattccactttcaccattcctgaactgctttcaatatattggatgttggaagccatgagaggcttgcaatcctgtcaagataataggattttccatttatagtgtaatctgacttgcaatcccgtcaagataataggattttccatttatagtgtaatctgatatatattcgttttggtttcatactttaaaaaaatctattctcttttactctgtggtgatctttgcttttc

SEQ ID NO: 679095 - DNA, 631 bp, Homo sapiens
tctagattttttaagagctccccatttgttcttgagtattcaggaaaccaattttaaaacagatgcttcctgtctttggaaaaatgaggttcaaatttcacaatccaaagactggaaactgagcaaagaaatgcttctggtatatatatagctgatgactttgagaaatactaggatacacagcagcttcaaacaattatccatcatccatctatccatccatccatccttttgacacatttatgagtacctgctatatgccagacccacgctcatggcttagaaaaagcatatgatgaataagttatttctcacactcaagraactcatgatttggtgtaggaaaatggtaggtaaattaataatttcaggtgataaatgctataatagagataatcattcatttactttcccattcaacaaatactttttgaatacctactatgtactaggtgctctgctagacactgaagatacagaaataaaaagtcaagttctctaccaaaaaaaagtaaaatgcagagtgataaaaggatctagtggaggcatggctgggaacaatgggaacttgtggagggtaagcttacttctgcctggttgagtcagaaaatgctccaggaggaggtaactg

SEQ ID NO: 679096 - DNA, 1565 bp, Homo sapiens
caggagatcgagaccatcccggctaaaacggtgaaaccccgtctctactaaaaatacaaaaaattagccgggcgtagtggcgggcgcctgtagtcccagctactcgggaggctgaggcaggagaatggcgtgaacccaggaggcggagcatgcagtgagcggagatcgcaccactgcactccagcctgggtgacagagcgagactccgtctcaaaaaaaaaaaaataaataaaataaataaataaataaataaagttactcaaggtgggctgactagatatggaaaaatcagagagatgcccctttggtggaagggtaacttgtagatacagagacaggaattaaacttcaccaaagctgttaccatcactaccatgctgtcaggtaaactgtgtacgagactactcacttcagaaacagaatttgactgaaattataccmatctctgtaccttaaattccccatagcttctttcataaggatgagaagatttaactgagaatggcccaaccaattcaatagaatgcactacaggcagtttcctaaacagttacctttaaacatgaatatcagcatgagttcaaggaagtagtaaagatgaagttcaagccaagtctatcagatacccacgttcattgttttccttttttttttatctttgagacagagtcttgttctgtcacctgcctcagcctcctgagtaggtgggactataggcgcgtgccaccacacccagctaatttttgtatttttagtagagagggggtttcaccatgctggccaggatgatctcgatttcttgacctcatgatccacccgcctcagcctctcaaagtgccgggattacaggcatgagccaccacgcctggcccattgtttttcaactacatcttccccattgtcaccatttgcttctcatggtgttttagaggtggtgtctgtttttcttaacttcctacccattcttccacacctggctcccagaggacttccctgaccactggagtcctcaccttcactttccgcatcctcactccagagacagttcagttctgcttgttgttagagcctggcctgtgttgtttcctagtgtgggaatattcaggtccgtcatctctaccataaactccggtggtggttttaaaatatgttcacaaatccttgtctctttaaaaagtggagcctaattctcctccttttgaatgtgggctgtacttagtgatttgattctaacaattagaatgtggcggcagtgacagcatatatgactcctgagagtaggtcataaaaacatggtgcttcctatcttcccgcccccctctctctgtgtgatcttttactctgggagaaggtaaccgccatgtcatgaggacactcagcccaatggagaggcccatatggtgaggaaccgaagcctcctgccaatgaatagcccttgaggtctgccaacaactgcgtgaatcacttactatagaatgaaagaaatgtcagacattttaaaatgctaagtcctaaacctttttttccatcttgaaagtagatcctccagccgcaggcaagcctcc

SEQ ID NO: 679097 - DNA, 1565 bp, Homo sapiens
caggagatcgagaccatcccggctaaaacggtgaaaccccgtctctactaaaaatacaaaaaattagccgggcgtagtggcgggcgcctgtagtcccagctactcgggaggctgaggcaggagaatggcgtgaacccaggaggcggagcatgcagtgagcggagatcgcaccactgcactccagcctgggtgacagagcgagactccgtctcaaaaaaaaaaaaataaataaaataaataaataaataaataaagttactcaaggtgggctgactagatatggaaaaatcagagagatgcccctttggtggaagggtaacttgtagatacagagacaggaattaaacttcaccaaagctgttaccatcactaccatgctgtcaggtaaactgtgtacgagactactcacttcagaaacagaatttgactgaaattatacccatctctgtaccttaaattcccmatagcttctttcataaggatgagaagatttaactgagaatggcccaaccaattcaatagaatgcactacaggcagtttcctaaacagttacctttaaacatgaatatcagcatgagttcaaggaagtagtaaagatgaagttcaagccaagtctatcagatacccacgttcattgttttccttttttttttatctttgagacagagtcttgttctgtcacctgcctcagcctcctgagtaggtgggactataggcgcgtgccaccacacccagctaatttttgtatttttagtagagagggggtttcaccatgctggccaggatgatctcgatttcttgacctcatgatccacccgcctcagcctctcaaagtgccgggattacaggcatgagccaccacgcctggcccattgtttttcaactacatcttccccattgtcaccatttgcttctcatggtgttttagaggtggtgtctgtttttcttaacttcctacccattcttccacacctggctcccagaggacttccctgaccactggagtcctcaccttcactttccgcatcctcactccagagacagttcagttctgcttgttgttagagcctggcctgtgttgtttcctagtgtgggaatattcaggtccgtcatctctaccataaactccggtggtggttttaaaatatgttcacaaatccttgtctctttaaaaagtggagcctaattctcctccttttgaatgtgggctgtacttagtgatttgattctaacaattagaatgtggcggcagtgacagcatatatgactcctgagagtaggtcataaaaacatggtgcttcctatcttcccgcccccctctctctgtgtgatcttttactctgggagaaggtaaccgccatgtcatgaggacactcagcccaatggagaggcccatatggtgaggaaccgaagcctcctgccaatgaatagcccttgaggtctgccaacaactgcgtgaatcacttactatagaatgaaagaaatgtcagacattttaaaatgctaagtcctaaacctttttttccatcttgaaagtagatcctccagccgcaggcaagcctcc

SEQ ID NO: 679098 - DNA, 627 bp, Homo sapiens
ggtggtgataaccaaagcatttgatgtgtgttttattacaagtttatactgactcttaacatttctgaataccaaaggagggaaaagaaacatttattgaatgtttggtrtgtacagaagaacgtcagagacttttcagataaaagagaggctcagaggagtcaattaacttgggtgagatgacaaaactagaagagctggaactatattataaatggatggggaaaatgctttgtaagctaaagtagctttgtaagctatcagttactacaaaagaaaaaaattgtcttctctttcagagttcttcactaccacaaccaaggagggatatgataggcggccagtggatataactcctttagaacaaaggaaattaacttttgatacccatgcattggttcaggacttggaaactcatggtgagaaacatggatacctcctgaaagaagaaaattaatagcactcataatgcctagttaagacaatatcactattatgaacaatcaaaagtaactaaatagatgtaccatccatacaatgaaatattttatagtcactaaaaatgatactgtttgagaaatatttactgatatggggaatgttcaagatatgttaattgaaaaaagc

SEQ ID NO: 679099 - DNA, 2931 bp, Homo sapiens
ccatcctctgagacaggcatgatagtttcttcctgaccatgtctgcattgttcccttggactgtcagtgtcccaagggtggggactgtgtctctgcacctctccttgatcaggccctggacacagtaggctctcagagaatgtgcacttgaatggatgagtgacaccccctatgcctaaacccatatccttgtaggcttcctagcagccccagaaaccatgagttgatttattcgagaccctctttggtgttccacacgaagactacaatactaaatacgctattttccaaactttttgttacctagattatgtcacctagattagagaaactgtgattcagtttctctaatcagaagcactagtctagtgctagaaccgagttgcatggggaaagagccatagcaggaggcaagaattatcttgtacagatcagagctaaactgacttggctgtggagccgagaactggggcagcaacttcctaatagtgcagcttcctgattttggcagaggcagcaactgtgcagtgtgattttgggaagccatttctagaaggtcaatttagattgtttcttcaactctcccagcaattctgtgagctacaaatactttttcataaacctctttctgcttagccaggtagaacagattctgttatttctaatcgcactgccctgactgaccccttcacaccctctcaaactgttcctggccttctacctttcaaagttctttcccacactcaaactctcaaagtccagtgcagcttagcttacctaagctatattaagaactcattctgctccaggccctgggccagatgctgtaatacatgacagtcttgatgtgaatgggtccctgccctcctagagtttacagtctaatgaagcaactaaccatgtaatcaaataatttatcaatcagagacagggaatccaagatggtttaaatggaagacactgatatttctgcaagttttaaatgggagatgcttacgttttgggaaggcagctcatctctggtccacaagtgttcatgagcattactctgagcaccttctggaaagtaaaccagggaccagtaaacatattatgaggtgatggattttgaaatctacsacaaacaaaaaaaccaggctcaccacattcaggctgacttccacgagcacaacaaaatacacacatgctccactgactctagcctgttccttcataataaaggctttctcactcattgcttacaacaatgcatgggaccctcaaaagtgttacccacattttccttggaaggaaaatgctgtctgccttggggttctgagaattttgtagcattctagctttatctcccattaattgctccattcatcctgagcttcaggcacatctgaccttccccaccctgaaaatacaaactgccctgtccccatccccatgcctcactctaatcttccatatcactctcctgctttgtcaaaatcctacccaccctccatggctccgataaatgtcacctgcaccaaaagccttcaaccaattactagagacagggttaatttgttctacatctgtattatagactcttgacacttacaaattttaacattctctattttgactattttcaagtgatcctaaaggtccaagacctggactgatttggaatttcgttgagcacagaatttgaatcgcagctattgacaggttggtgtacaggaaaatgtcactgagccaagagggtactgagaaggtttggtataaatgaggccctggaggataaaaagggcagagaatgacagagcatcctatttctaccttcacctttaacccacccagatagagaagatgggattggtaagagagtgggatctggtttttaaaccacagcaaaagggtctgggggtatcagaaggtacagaccaggccctctaataaaggaaaaaaggaagcctgcctaggagaaatggtcaagcactgagggagcaggactgaagaactgctggttagggaccagggctaaggcgccaattgtcaagtaggagctcagggccgtagggccagagggctgaccaggtacccagcagccatgcatccctatttccatactcctttgttacatctactgatcaagcctgtcctatagaggatgccccaagtgaacaggtctcaaaggccttggcaggtgccctctaaatgtgaatgtctactggatttggtgagtgcctccctcgcaacacccatcatctggggaagggggggatcctgcctcttcaccctctagactggccagggcctcatcttggtgatccttgtatctatctataagatcacagatcaaagtggaataatcatggcacttgtccacttgaccaggttgattgggccaagagtggaatcaaactcaacttggcctccaagtcttttcccttcagatatttggacttggaactaggaaacatttagtcagtatgtctctggtacctgaagtcagatgtaacatttaagagctgtcagagcctattttcctaccatctggaaaaagacagtctgcattcaaataatataaataacaccaataacagctaacacttattaagcaccttctatgcaccagggactgtgccaagccctttaagtgcattaactcatttagtcctcgcaacaactccaggaggtaaacgatatgatcattcttgtttatagatgagaaaactgtggtgcagcaaggttaagtgacttgctcagagtcacacagctagtaagtaacaacaaccctctggctccagagcccatcgtctcaaccactactctatacctggcagagctggcagggagaagggagtacaactgagagatggcaagaggcgtggtcatggtcaagcccctgttccagtagttcctgaagccagactgcgtctgcaaccatgctgccat

SEQ ID NO: 679100 - DNA, 481 bp, Homo sapiens
caggaagctaggggatgggagactccagtgtgtcctggccctgtgaacaggctgtggtcttcctctccctctttgggctgcacgctccctgttgcatctgtcctgtgttgagaaggcgggaatgcacttctgcaatcaggtaggctcagaagcaagacaggtggaaatgctagaggtggtagcatctctctggggaacagagaagggaagaggaagtgagggcaagggaagtagacaaaggaggaggaaaggaaggaggacaagaagaaatgcaaaagggagaatagaagagagaggaaaggaaaggagaaagcaggaaggaagaaggaatgaaaggaaatcattaaagagaggaaggaagaaaagaaaacagaaaaaaagggaaaagaaaataaagaatgaagtcttcctgtgatgggaaactgcccaggcatcctgacaggcctgcacaattgcacctctgtrtagtttacggacaggg

SEQ ID NO: 679101 - DNA, 629 bp, Homo sapiens
ataaatgtaaagaagaaaaataagatagcacatctggtttacaattctccctttaacaagcaacatttcttcatgctgctgtaggcgaccaactacaacagtcacaactctcaaagcaatggttttctccttccaacggcaggaaaaggagctacttcagtcagcaacagaggggtacgtacctggagttttgatggagtcctgccacttctcactgaaaccagaagagtgccaaagccatggccagtggatgaggccttttatattccagttccctaattcctggatctgtggagtgtgtaaagatgtgaggcacttgctatccawaattaagaattagtgggcaaaccataggcctgcttctgtgggggaaaaatcttctggaaacttctctcctatatccttttaagcccagtggttgggaagtggcaccgtgccatgccagcaacaccttatttttgcccacagaccagcgacctgcagcttgttcgagatgctctccgcagcctgcgcaacagcttcagtggccacgatcctcagcaccacactattgacagcttggagcagggcatttctagcctcatggagcgcctgcatgttatggagacgcagaagaaacaagaaagaaa

SEQ ID NO: 679102 - DNA, 617 bp, Homo sapiens
taaaatgagtccaagtttactcagtaaataacagccaagatgtgaaccctggcctaattagtctaattcttttcctctacagtggtattccttagagccttagacttttgcagagtgggctcaaagtgggaactgggcatggcagagtgggtagaaaccacactctgactcactcagttgcttcaaaggccagagcagcaactctacgccataacgtttcaacacaccctaacctgattttcattcagaggcaatatggtatagcaacagttaaaaatctgggctcttgttctggctcttccattgacttctgtattatcctagacaactttttttttgagatggagtctcaccctattgccaggctggagtgcagtggcgcgatctcagctcactgcaacctccacctcccgattcaagcaattctcctgcctcagccacccgagtagttgggactacaggtgcaygccactacacccagctaattttttgtatttttagtagagatggggtttcaccatgttggccaagatggtctcaatctcctgaccttgtgatcctccccgctcggcttcccaaagtgctgggattacaggcgtgagccaccgcacccaact

SEQ ID NO: 679103 - DNA, 1345 bp, Homo sapiens
tgcccgcatctatgccgctggcttcgatgcctctagcaacatcttccttggagtgagtgagccccaggaagggaccaactcttcatctgtgaggcaaggggtaggcttgggaggtgcagcatcttgaggtgatgaaccagcccacagtaatccaaatggtggtcctggcagttagcaaccccacctaactgatgagcaaagtgaggcccagagagacgctcaagtcatgcagcttcaatgccagtcctctctgggccgcctctgaacttgaaggtagcgggggcagtgcctctggcacatggcctgctggggggcccctgggggatgtgatctgatccctcatgtggtcccaggagcgagcggccaaatggcggaccccagatggcctgatggatggactgaccaccaatggagtcctggtgatgcacccggcaggcggcttctccgaggactcagccccgggtgtctggcgggagatctcggtctgtgggaatgtgtacacattgcgggacagccgctcagcccagcagcggggcaagctggtaggtggcccgctccattccccacccctatccttgccaggccctcacaagctgcccatccccctgcccaagccaggagatgatctccagtccttctgccccagggagccccaacaggctccatatcagggaatcccaggcccagggggttcttagcatgagccacttgtcccacagacaggcagacagaccagggtccccaagcatagcatgcataccactggaggtccagggggtgatgcgatcaaggcacacacagacatactgtgcagtcccaggtggcttcaaggctgctggcagcttaaaaaaaatcacaccttcttatgagagtgacacttggcccatgtgtgagcagtttatagcctaaagggttggcagtttgtagcatgtctatcacgttcagacaggtttagcactgttctcctctcgcaggaggaaagggtccttacagtagttctgacacaggtgttagtggcagctccttgtggtacagatcagagagctgaggttagggaccgggagtgagtcctagagagaggcaggggctgtccaaggtcacatggccgtgctcctcaaactggccatgcactgctyttctctggcatgagcacattggccaaggagatgcaaaacctcagagaaaagcctggcttttctttccagagcgtcaactctgtggggaggtctggggaagcattgtttgttaaaacaatgcatgtgaatgtttcacaagcctactcttcttgagcactatttgccacgcactgttctaagtttttaaactgattgatccatttatttat

SEQ ID NO: 679104 - DNA, 617 bp, Homo sapiens
taaccttcaacacatatttgagtgagcattgtgctgccctttgctctaatcagccctttgcaccatacttagaactatccctgagagggtcaaagagcttcacagagtttgggaagcagcagtagttaagaatttccttacttcctgctgatgggcctgaaatataggaagaaaaaaaaaagaattcctactgtgaaatcggatagatatgttcaaattccagctccaccattaacagctctgtagccttggaaaattacttcacttcttggartctcattctttatctgtaaaatgatgattcatacctatctcacaggatgactctggggattaaacgaaggcgtacatataaaatgcctggcactgtcctgacagatagtatgtcctccataagcgataattatcgttattatcataattatcagaaacaacagaaaccctataatgtggctattatgtggagagagagataattagacccagaggaggaatggaacttgagaaaacccttgggagactgtggatgcaggcacttacaggatgtcttcagtatcaaaactgatgtggagataacgccctgtgtggaagtttcaaataaactgtcctctgaagag

SEQ ID NO: 679105 - DNA, 653 bp, Homo sapiens
aataaagtgaggtagagacagtggtaaaattagtccccacacccttacctctactgcaaacaacacctcagctacatagtatgcacatggacctctagtaccatcccaaacagcaggttattgattctatttaaagatttttaaggttagagtcattctagttcttcattatttttttcacacttaggaaattctgcacgatgtctaacttagcctgaatgtggtttatgaattgtacaaccagtgctctccacctcaataaagtcttttcgtaccacattatagaggacagagccacacagtggagtcaagcttgatttcaagtccaagctatgctactttctatacaagtacacttgggaaaattacttaaactctctgagaatcagtgttcagaaaaaaaaatacctatcttgtaggactactttagaaataaaatcaggtaagacaggtgatgtggtttggctstgtgtccccacccaaatctcatcttaaactgtactcctacaattcccacgtgttgtgggagggacctggtgggagataactgaatcatggggcagcttctcccatactgttttcatgacagtgaataagtctcatgagatctgatggttttataaggggaaaccttataaaaccttggctctcat

SEQ ID NO: 679106 - DNA, 1809 bp, Homo sapiens
tccgtccccactcagtgatatggctcttcctttttgtacaacagtgaaacacacttgtgtgtggtttgttagtaaataactgctgtcctgagccctcctgagtgacccacaactctggctccctagaagtccccactgccctgctgtctggcatctgtggcactacggccattcattgtgtggatgggtgccagggttatgccaaggtgtgaaaattttgaatagcatccctgaccataggtaaagaaaaatccagagtggctgaagcatcagtgagagtaggggaagtattgtggatggggcaggctgtccaggcaggcaggggccagactctgcaaaattctgtgggctgtgttaacaattttaggctttaagaacagcaggacaccattgaaaggctttaaagagagcaggaaaaggatatgattagataggctttttgtacagtttcctctttccaaaggctggaagtctgtatgtgatgggtgatgtttatatgcactaggcaatcatcaggaataaagaactctgcccatagtcaggccctgctgaatacccacactctggtggctgggccaggaggtacagcctggctagtggggctctgaagccaaggctgagcaagagtgactcccctggagcctcttcacaagccatatctgttttcatttgaggtggtcttgtgatcaggtgagcagtgagttctgagctgtgcaggaagaaagatccagtaaggtagggagaagtctaaatgggctctacaattaagagaggcaaaagccagaaatgactgaagagtcaatgtgtctagatgcagtgggttagagagagagagcaaatgcctggaacaagcatgctggtttggagaggcaacttccacatggtttctggaccagaactctaaatttaactggtcagatttaaggcaataagcttttacctcctcaaaaacagcatcaactccacttagttggatttcacttcaaagtttaagagtatgtcctggctgatacagtaccttgaaatttctgaaaccttactgatactttttcctgaagggagagtagtggttttgctggagtttgggtgactccaagttttgaagatgagagaagagaagctgaaggtgtggcttaggtgaaaggtttcataagatttctgatttaagctgtttcacttttggggacaaggtgaaataatagcactgagatgtggagatgagacttgtccctaacactgcataggccccagatcctctttagyatttcagagcgtgcttgtttcaggaacacacagagggagagagagtttcttaggcagagaacatcagtactgaaaactaggaaagcaaggttccttcatgggaccgggaaccagagccagagaggaacggcacggcaggtatggcatggtgactggaagggatgaggtctggcggctcatatgaggaccacttcaggaaatcgaagaaataattttggacatctttactggggatggcagtggagaggtggaagcaacaacaccagcagagatttagaaatgttatttgaggtaacaatataaggtgaccttatcagtaccccaagatggagaatagtctgtatagtgctcatattctgtttaattaacttgaaaatagagtcctggcaaatcaagtccttcccctctgcacgtttctaaacatgaagataacctgaaaatttttgaaatacccatgtcagctgtgactcatttttactctttttaaatcaacaatgcaatttaaattctaatttggaaatccagttacctattataccttcactt

SEQ ID NO: 679107 - DNA, 1809 bp, Homo sapiens
tccgtccccactcagtgatatggctcttcctttttgtacaacagtgaaacacacttgtgtgtggtttgttagtaaataactgctgtcctgagccctcctgagtgacccacaactctggctccctagaagtccccactgccctgctgtctggcatctgtggcactacggccattcattgtgtggatgggtgccagggttatgccaaggtgtgaaaattttgaatagcatccctgaccataggtaaagaaaaatccagagtggctgaagcatcagtgagagtaggggaagtattgtggatggggcaggctgtccaggcaggcaggggccagactctgcaaaattctgtgggctgtgttaacaattttaggctttaagaacagcaggacaccattgaaaggctttaaagagagcaggaaaaggatatgattagataggctttttgtacagtttcctctttccaaaggctggaagtctgtatgtgatgggtgatgtttatatgcactaggcaatcatcaggaataaagaactctgcccatagtcaggccctgctgaatacccacactctggtggctgggccaggaggtacagcctggctagtggggctctgaagccaaggctgagcaagagtgactcccctggagcctcttcacaagccatatctgttttcatttgaggtggtcttgtgatcaggtgagcagtgagttctgagctgtgcaggaagaaagatccagtaaggtagggagaagtctaaatgggctctacaattaagagaggcaaaagccagaaatgactgaagagtcaatgtgtctagatgcagtgggttagagagagagagcaaatgcctggaacaagcatgctggtttggagaggcaacttccacatggtttctggaccagaactctaaatttaactggtcagatttaaggcaataagcttttacctcctcaaaaacagcatcaactccacttagttggatttcacttcaaagtttaagagtatgtcctggctgatacagtaccttgaaatttctgaaaccttactgatactttttcctgaagggagagtagtggttttgctggagtttgggtgactccaagttttgaagatgagagaagagaagctgaaggtgtggcttaggtgaaaggtttcataagatttctgatttaagctgtttcacttttggggacaaggtgaaataatagcactgagatgtggagatgagacttgtccctaacactgcataggccccagatcctctttagtatttcagagcgtgcttgtttcaggaacacacagagggagagagagtttcttaggcagagaacatcagtactgaaaactaggaaagcaaggttcctycatgggaccgggaaccagagccagagaggaacggcacggcaggtatggcatggtgactggaagggatgaggtctggcggctcatatgaggaccacttcaggaaatcgaagaaataattttggacatctttactggggatggcagtggagaggtggaagcaacaacaccagcagagatttagaaatgttatttgaggtaacaatataaggtgaccttatcagtaccccaagatggagaatagtctgtatagtgctcatattctgtttaattaacttgaaaatagagtcctggcaaatcaagtccttcccctctgcacgtttctaaacatgaagataacctgaaaatttttgaaatacccatgtcagctgtgactcatttttactctttttaaatcaacaatgcaatttaaattctaatttggaaatccagttacctattataccttcactt

SEQ ID NO: 679108 - DNA, 1809 bp, Homo sapiens
tccgtccccactcagtgatatggctcttcctttttgtacaacagtgaaacacacttgtgtgtggtttgttagtaaataactgctgtcctgagccctcctgagtgacccacaactctggctccctagaagtccccactgccctgctgtctggcatctgtggcactacggccattcattgtgtggatgggtgccagggttatgccaaggtgtgaaaattttgaatagcatccctgaccataggtaaagaaaaatccagagtggctgaagcatcagtgagagtaggggaagtattgtggatggggcaggctgtccaggcaggcaggggccagactctgcaaaattctgtgggctgtgttaacaattttaggctttaagaacagcaggacaccattgaaaggctttaaagagagcaggaaaaggatatgattagataggctttttgtacagtttcctctttccaaaggctggaagtctgtatgtgatgggtgatgtttatatgcactaggcaatcatcaggaataaagaactctgcccatagtcaggccctgctgaatacccacactctggtggctgggccaggaggtacagcctggctagtggggctctgaagccaaggctgagcaagagtgactcccctggagcctcttcacaagccatatctgttttcatttgaggtggtcttgtgatcaggtgagcagtgagttctgagctgtgcaggaagaaagatccagtaaggtagggagaagtctaaatgggctctacaattaagagaggcaaaagccagaaatgactgaagagtcaatgtgtctagatgcagtgggttagagagagagagcaaatgcctggaacaagcatgctggtttggagaggcaacttccacatggtttctggaccagaactctaaatttaactggtcagatttaaggcaataagcttttacctcctcaaaaacagcatcaactccacttagttggatttcacttcaaagtttaagagtatgtcctggctgatacagtaccttgaaatttctgaaaccttactgatactttttcctgaagggagagtagtggttttgctggagtttgggtgactccaagttttgaagatgagagaagagaagctgaaggtgtggcttaggtgaaaggtttcataagatttctgatttaagctgtttcacttttggggacaaggtgaaataatagcactgagatgtggagatgagacttgtccctaacactgcataggccccagatcctctttagtatttcagagcgtgcttgtttcaggaacacacagagggagagagagtttcttaggcagagaacatcagtactgaaaactaggaaagcaaggttccttcatgggaccgggaaccagagccagagaggaacggcacggcaggtatggcatggtgactggaagggatgaggtctggcggctcatatgaggaccacttcaggaaatcgaagaaataattttggacatctttactggggatggcagtggagaggkggaagcaacaacaccagcagagatttagaaatgttatttgaggtaacaatataaggtgaccttatcagtaccccaagatggagaatagtctgtatagtgctcatattctgtttaattaacttgaaaatagagtcctggcaaatcaagtccttcccctctgcacgtttctaaacatgaagataacctgaaaatttttgaaatacccatgtcagctgtgactcatttttactctttttaaatcaacaatgcaatttaaattctaatttggaaatccagttacctattataccttcactt

SEQ ID NO: 679109 - DNA, 1809 bp, Homo sapiens
tccgtccccactcagtgatatggctcttcctttttgtacaacagtgaaacacacttgtgtgtggtttgttagtaaataactgctgtcctgagccctcctgagtgacccacaactctggctccctagaagtccccactgccctgctgtctggcatctgtggcactacggccattcattgtgtggatgggtgccagggttatgccaaggtgtgaaaattttgaatagcatccctgaccataggtaaagaaaaatccagagtggctgaagcatcagtgagagtaggggaagtattgtggatggggcaggctgtccaggcaggcaggggccagactctgcaaaattctgtgggctgtgttaacaattttaggctttaagaacagcaggacaccattgaaaggctttaaagagagcaggaaaaggatatgattagataggctttttgtacagtttcctctttccaaaggctggaagtctgtatgtgatgggtgatgtttatatgcactaggcaatcatcaggaataaagaactctgcccatagtcaggccctgctgaatacccacactctggtggctgggccaggaggtacagcctggctagtggggctctgaagccaaggctgagcaagagtgactcccctggagcctcttcacaagccatatctgttttcatttgaggtggtcttgtgatcaggtgagcagtgagttctgagctgtgcaggaagaaagatccagtaaggtagggagaagtctaaatgggctctacaattaagagaggcaaaagccagaaatgactgaagagtcaatgtgtctagatgcagtgggttagagagagagagcaaatgcctggaacaagcatgctggtttggagaggcaacttccacatggtttctggaccagaactctaaatttaactggtcagatttaaggcaataagcttttacctcctcaaaaacagcatcaactccacttagttggatttcacttcaaagtttaagagtatgtcctggctgatacagtaccttgaaatttctgaaaccttactgatactttttcctgaagggagagtagtggttttgctggagtttgggtgactccaagttttgaagatgagagaagagaagctgaaggtgtggcttaggtgaaaggtttcataagatttctgatttaagctgtttcacttttggggacaaggtgaaataatagcactgagatgtggagatgagacttgtccctaacactgcataggccccagatcctctttagtatttcagagcgtgcttgtttcaggaacacacagagggagagagagtttcttaggcagagaacatcagtactgaaaactaggaaagcaaggttccttcatgggaccgggaaccagagccagagaggaacggcacggcaggtatggcatggtgactggaagggatgaggtctggcggctcatatgaggaccacttcaggaaatcgaagaaataattttggacatctttactggggatggcagtggagaggtggaagcaacaacaccagmagagatttagaaatgttatttgaggtaacaatataaggtgaccttatcagtaccccaagatggagaatagtctgtatagtgctcatattctgtttaattaacttgaaaatagagtcctggcaaatcaagtccttcccctctgcacgtttctaaacatgaagataacctgaaaatttttgaaatacccatgtcagctgtgactcatttttactctttttaaatcaacaatgcaatttaaattctaatttggaaatccagttacctattataccttcactt

SEQ ID NO: 679110 - DNA, 1809 bp, Homo sapiens
tccgtccccactcagtgatatggctcttcctttttgtacaacagtgaaacacacttgtgtgtggtttgttagtaaataactgctgtcctgagccctcctgagtgacccacaactctggctccctagaagtccccactgccctgctgtctggcatctgtggcactacggccattcattgtgtggatgggtgccagggttatgccaaggtgtgaaaattttgaatagcatccctgaccataggtaaagaaaaatccagagtggctgaagcatcagtgagagtaggggaagtattgtggatggggcaggctgtccaggcaggcaggggccagactctgcaaaattctgtgggctgtgttaacaattttaggctttaagaacagcaggacaccattgaaaggctttaaagagagcaggaaaaggatatgattagataggctttttgtacagtttcctctttccaaaggctggaagtctgtatgtgatgggtgatgtttatatgcactaggcaatcatcaggaataaagaactctgcccatagtcaggccctgctgaatacccacactctggtggctgggccaggaggtacagcctggctagtggggctctgaagccaaggctgagcaagagtgactcccctggagcctcttcacaagccatatctgttttcatttgaggtggtcttgtgatcaggtgagcagtgagttctgagctgtgcaggaagaaagatccagtaaggtagggagaagtctaaatgggctctacaattaagagaggcaaaagccagaaatgactgaagagtcaatgtgtctagatgcagtgggttagagagagagagcaaatgcctggaacaagcatgctggtttggagaggcaacttccacatggtttctggaccagaactctaaatttaactggtcagatttaaggcaataagcttttacctcctcaaaaacagcatcaactccacttagttggatttcacttcaaagtttaagagtatgtcctggctgatacagtaccttgaaatttctgaaaccttactgatactttttcctgaagggagagtagtggttttgctggagtttgggtgactccaagttttgaagatgagagaagagaagctgaaggtgtggcttaggtgaaaggtttcataagatttctgatttaagctgtttcacttttggggacaaggtgaaataatagcactgagatgtggagatgagacttgtccctaacactgcataggccccagatcctctttagtatttcagagcgtgcttgtttcaggaacacacagagggagagagagtttcttaggcagagaacatcagtactgaaaactaggaaagcaaggttccttcatgggaccgggaaccagagccagagaggaacggcacggcaggtatggcatggtgactggaagggatgaggtctggcggctcatatgaggaccacttcaggaaatcgaagaaataattttggacatctttactggggatggcagtggagaggtggaagcaacaacaccagcagagatttagaaatgttatttgaggtaacaatataaggtgaccttatcagtaccccaagatggagaatagtctgtatagtgctcatattctgtttaattaacttgaaaatagagtcctggcaaatcaagtccttcccctctgcacgtttctaaacatraagataacctgaaaatttttgaaatacccatgtcagctgtgactcatttttactctttttaaatcaacaatgcaatttaaattctaatttggaaatccagttacctattataccttcactt

SEQ ID NO: 679111 - DNA, 509 bp, Homo sapiens
aaaaaaaaaaaaaaaaaaawatatatatatatatatatatgtgtgtgtgtgtgtgtgtgtatatatatatgtgtatatatatgtctatatatatgtgtatatatatgtgtgtatatatatgtgtatatataaaaaacaaaaacaacaacaacaaaaagaaaaacaataaaatctgtgggcactcagcaaactgtgtagggaaacaaaattaacattgctcctttccagttatattccttaagtcttgcttattcaatgtgtcataaacatactatatgtcacaacttagcaaggtgcagtgaaaatagtacattgggaaccatgtacttaacatcagacttgtaacacctgactcacaatatcactactcaaaggatttaactgtaagcagctttcaaaagtctgaaacttaactcagtgcaccagtaaaacaccagcttttctcgcagtggtacttccaaaactgtgtataatagcggatgtgtgaaatgcttcataaaaaaggttca

SEQ ID NO: 679112 - DNA, 1451 bp, Homo sapiens
ggccagattccagccagcagggaggctgggcaccactttagctcccaaccctgcctctcagttgctggcaaaggtagtttctgcaggctccctgggctaggaaaaacacgcttgcgagtacacagagagggcccgtggggctgcttcctggaatcaccagaacacaggtgcttggtgctccccaggcagagccccctccactggcggggagacktgcacatgtttgggttttgccaggcccccagcttttatcttccaggcttcccctctccatggttcttcctgaagaccaggcctctcgctcttcccaggcagggaagtgggtaatgcgagcgatccagaaacccaactattactttgaaagaagactgaaaacatgtgaccgcatgaatcccatgggtttacttcaatgtctttaaaacaaatgacttgaatggatttctcccacccttcctccccacggagccactcgatggaaaacagcagctcaaagggccacagattcagggctgccggaaatggggtatcagacacaaagcctggcagggggcacttgaataaaggcagctttggccaggaaaggatgaaaggcagacacctgacaactgacaggcagccggcgcagaggcacaaagggtgcacgtgaggccaatgtcaggtccaagcacacccaggcaccccggccctctgctatgggtggtggatcgctctcatgtcccagcattggtctcccttcctcctgccacagcatggaagcctggctgtggggacagcagtggccttgctcaagcccttgactggagagccctgccctgagcagccatttacgcgcaaactcactgggtagctggaacacacaggtgaggtcttcttgggcagcaaaaattgcttagaaaaaaacaggcaaggaagcaggactgaagacatgtgacagtccccagaagttcagagctggagaggcccagggaactcagatgccacgcctccctgattccccgaatcctacagatgagtaccctaagctcatagaggaatgctgacgtgccaaggtcacacagctttgggcctctgccccatccttggctgccttcccagcctcattcatgcagccattactctccgagcatatcctatgtgcctagactctggaatttagatttagtcacctaggtgatgccaaactaaacttggcctcagaggtttgcaagctgggggcttcccacctctcagctgtcccctccccaccctctcctcttatgtaaaatgggaggagtgctgggcatcatcagggaagactcaaagcagagaggaagtaagaaagcgggagaagcggtgtgaagccctggggatcatcagccataccctggaggtgagggaggcgatggtgaaagtcaccccagtgggggagtctgggctgcccctggctgcaggagcctcacctcaggcagggc

SEQ ID NO: 679113 - DNA, 697 bp, Homo sapiens
cttgaggcctgtaaactctgaataaaataggcccttgtgtttgtccaactattaaatcaaaatgctaccaacatcctagaaaaaacaaggcaatttatggcctttcaagtttcagttacacattggtttttattaactcctttctgtcatcaggcagccatggcgtcactaaggagaagggtgagaagtcagagaggaaacacaggagtggacagtgggagagagagggataaaggagaagcttgaggggctgagcatgggcacgaggggagacgagtggaaacctgagatcaagaactgaggttgattattcaggactcggatgtggggacaattctgagagtgaaggggcaactcagaccagtgaggacggtgagtcctgccagatcaccccaagaaaacaccaacctggaatcccagtcctgccactggatgagtcrtattatttaagcctctctgggcctgtgattcctcatcagtgatgcagacagtgaagccccccttagtggtgtcctgatgactatattggaccatacataaaaagccacagtgctgggcacagaccacgttctgaataatagtcctcaaagatcagactctatccttcccctccaatttctagaacagtttttaagaggcaaaagatcttcatctttaatcccttcttcagacacagtaggtatttaatacactgtta

SEQ ID NO: 679114 - DNA, 579 bp, Homo sapiens
cttctcaagaccttggtttttcccacgtatacattcagggagttggaccagaaaccctttagccaaccatcacttctaaagttcttgacacattcaggtattttgtccacatcatacmagcctgcttctggagcagcttctcttgggccaccccctctttttgcaagaggagcttgcagatgttccagatgcctttcccaagatacaggtccaggaaaatactatctagatgacccgagcccccacactatttcttgatagctgtgtcaactgcgttgacatctcccctgaaaactaagagcaactagggtgaacaagcagatatccacacaaaagcatagctcttggcaagttcttcatggactggtaagataacttgcagagcaattttatcagacttgaacctactgactttgcagagatcatgagctataaaaacacagtggtgttggctaactggttggtatattagaacaatcactactttccctttgtgtcatactgatttttttttaattgggcctattatctctgatttgaacttataaaaatccagtgaggttttagggcagtgaaaat

SEQ ID NO: 679115 - DNA, 633 bp, Homo sapiens
ggagtgcatagtgggcactgttaataatcatagttaaagtaggaactttacatcacttcatatcctaccactgtcctatatgtaatttatgttctagatatagtcaacttttcaaatgtattttgccatcatatcatctcctgctcagtctagaaactcttttctgtcatacccacatacctttgatggggcctgagataccaacagacttatgattcctactaaaattatttagccaacttctacaaactcttctaaaagcacttttaaaatgaaaaaaattaagaatttgataaataaagttgtcaaaatacatatgcctttccttctgtctggcatccttttttctccctatttgtctggcaaaatacttyaaaattcagttttaagtgccttgcatggtggattccacatacagctgtcacagtttagctgtgataacaaacaatcccaacatttcagtagtttaaaacaacaaagtccatttaactcatgttatatgactattacatgtcagcaagtgggctcagattactgaaagcctcaggaacctaggctgacaaaacagtccttttctcagattgctggctggaaggaattttggaggtattgctcactgactcactgctctgg

SEQ ID NO: 679116 - DNA, 656 bp, Homo sapiens
ctcactcagcaggggaggaatggagttccaagatcaaggatacttcacttcagtttctgttatctctctcaagagtgaatcatagaaaatatctactaaactctgcttttcatgtcttctctttgcaacaccaatttgctgctttataattattcatccaaagttttaaagttaggagataatcwagcctaaaataaaacatcaaatttcaaaatctcagtaatactttgaaaaaagaacggcttcatgaaaactgagtaaaatggattttgaatgacaataaagatataaatttttgaagcaattaacagacaaaaatatgaacataaatatttttacttaaaaatcaggtaatatgcaggatcatttttcaaatatactaaaaataaccaattatcttcaaatgttaatttttgtaactgcctgctacagttataaaggaacacaataggccccggtgtgtgatgtaccctaaaacttaaagtataatttaaaaaaaaggaacccaataatatctgggaataggaaattagaaattacacagttaagtaatttaaactatattctattaggtagaatttttctctactaattgatactgtccttggctagagaattaaattttaatctcaaaatttataaaagccaacttttgt

SEQ ID NO: 679117 - DNA, 678 bp, Homo sapiens
ccagctgccccttctgactcacccatcccaggttcttagyaaagggcatcactggatgctcagtggggacggaggcaggcactgcacagggaggaagaacaggtggccttgggagagagggcagcatcttctctgtgctatggaagcaagcaggctgaggaggggaaaggcccaggcctcccatactccctgggttcctgagccagacctaggagaaattctcacctcatccaggaagacttagagttgaaaagaaagaattgagctagtcggggaagcaagccagagtatagaaggcaaggaggcaggctccccctctttctgactttccataacccagggaagggatgtggggtaaatagaggaagagagggggaaggagtgaggggaatcacttcccatctttgcgatgagtggatgagctgaaagaagctgaaggccccaagaaggatttggttagacgtccacaactgtacaaagacagcagctggaccctacggcacatttctgctcgaataaacaggatcttctctcttgcagaaatccttctcttccaagtggtattgggggcgagcccgctgagaggttgagagggctctgatgacctccagctcctgcccccacctgactgtcctagttgtctgcaatggtggcaaagggaaattttatgagctcttc

SEQ ID NO: 679118 - DNA, 678 bp, Homo sapiens
ccagctgccccttctgactcacccatcccaggttcttagtaaagggcatcactggatgctcagtggggacggaggcaggcactgcacagggaggargaacaggtggccttgggagagagggcagcatcttctctgtgctatggaagcaagcaggctgaggaggggaaaggcccaggcctcccatactccctgggttcctgagccagacctaggagaaattctcacctcatccaggaagacttagagttgaaaagaaagaattgagctagtcggggaagcaagccagagtatagaaggcaaggaggcaggctccccctctttctgactttccataacccagggaagggatgtggggtaaatagaggaagagagggggaaggagtgaggggaatcacttcccatctttgcgatgagtggatgagctgaaagaagctgaaggccccaagaaggatttggttagacgtccacaactgtacaaagacagcagctggaccctacggcacatttctgctcgaataaacaggatcttctctcttgcagaaatccttctcttccaagtggtattgggggcgagcccgctgagaggttgagagggctctgatgacctccagctcctgcccccacctgactgtcctagttgtctgcaatggtggcaaagggaaattttatgagctcttc

SEQ ID NO: 679119 - DNA, 641 bp, Homo sapiens
tttaatcagacccatgtctactgcctggtccctgaactaatcgtgattaaaatgctggggtgaaggagggctacttgtccctatcttgctacagacactcgtgattcctgtccaacctctctcagtagtcataaattttctttgttttgacttttacatggagacaattttgtaatttttacagtcacaaagcaaaaaagaatatatgtttcaccatttattgtattaccgatgtcatgtatttttgacagttccatcacatttctgacatttacaatgtttttttttcccctggggggtgagtagaaggagccgttttcccatgccccactcacacgatcctggaaaaggagagcaacccgagatgccccaggttagggacaggcctgtgtgaccttgtgtttcaacaaatggatcacaaacaatgcaacctgcacctctccggccttccccacccagtcggagttctccgctccacatcatcgcctctcccgctggyaagtggtaggaaatactatgtgacaggatggttgccatggcaaccctcatttccagttaaacaaccgggcattgatgaaaggagtctcgtttgctttggttacagggtttgctgggaagggtgtggagtgcgtttcttcctc

SEQ ID NO: 679120 - DNA, 600 bp, Homo sapiens
cacctacacttcccaagcctcagtttcttctttaatctgggcactggagatggtgtctgtaggggggcctggctcatttagccagggcttagtgaagggtaggtaggcatggccctgtcacagtcattgcggggtccccgaccacagctgtgaaggggtctggacaagcagatgctaaacgccactgggacctgcatacarggagaaagtcactcatctcttctaatactggaaagagattgtgactacctactaaaattgccccagcaacattctatgcagaggagaaagaacaatgtggtgtgactagtccttccagcctcagtgggacagccacacagtatttcccatctatcagctctctatcaattcatctcctgtgtcaggttattggccagggcaagagggaatgagaggagaggaagatccagtccctgacccctggaaatgcagactcttgcagggccagattctcatgagcaatggcatgccatgatgccaagcctcaccaggtccaggccacggccggaggtgccgagttcaggctgtttgcatggtgacctctcagacttagtcagcgtccccaccatccccagcttt

SEQ ID NO: 679121 - DNA, 1537 bp, Homo sapiens
  misc_feature 1179, 1180, 1181, 1182, 1183, 1184, 1185, 1186, 1187, 1188,1189, 1190, 1191, 1192, 1193, 1194, 1195, 1196, 1197, 1198,1199, 1200, 1201, 1202, 1203, 1204, 1205, 1206, 1207, 1208,1209, 1210, 1211, 1212, 1213, 1214, 1215, 1216, 1217: n = A,T,C or G
  misc_feature 1218, 1219, 1220, 1221, 1222, 1223, 1224, 1225, 1226, 1227,1228, 1229, 1230, 1231, 1232, 1233, 1234, 1235, 1236, 1237,1238, 1239, 1240, 1241, 1242, 1243, 1244, 1245, 1246, 1247,1248, 1249, 1250, 1251, 1252, 1253, 1254, 1255, 1256: n = A,T,C or G
  misc_feature 1257, 1258, 1259, 1260, 1261, 1262, 1263, 1264, 1265, 1266,1267, 1268, 1269, 1270, 1271, 1272, 1273, 1274, 1275, 1276,1277, 1278: n = A,T,C or G
agaagcagaggtaagatgggaagcctcagccagcctcctaagccgtcctctcagatctctgcacacctctcacccacaagcttttactccacataaacccagatgccctcattcacagcacagaaagcacacaaatcctggagtcagagggacttgcgtttgaatcccaggtctgccactcatcaatcaggcgaccttgggtacctgttttctcatcataaacaaagggggtaactggccgggcatggcagctcacacctgtaatcccagcactttgggagatcgaggcgggtggatcacttgagctcaggagtttgagaccagcctggccaacatggtgaaaccccatctctactaaaatacaaaaattagctgggaatggtggcacgtgcctgtaatcccagctacctgggaggctgaggcaggagaattccttgaacccgggaggcaggaggcggaggttgcagtgagccgagattgtgccactgtactgcagcctgggcaacagagcgagactccatctcaaattaaaaaaaaaaaagtggggggggatggtaaccatactcacatcatagtttatttatgctgtttctccttgctagaatgaaagttcccaaaaggcagggatctgttttggtcactgctttatcctccgtgcccatcagtgcccggcacattcctttcctttgcaaaggaaataaattaattattttacaagtttcacaatggccctttgaggcaggaaccttattatcacccactcattcattcatttattcaacaaatatttagtaagtacctactatgtgccaggtactgctctgtgtaatgtccgtaaatcatcagtgaattaaaaaaacaaagacagccaggtgtggtggctcacgcctgtaattctagcactttgggaggccgaggcaggcagattgcctgagctcaggagtttgagaccagcctgggcaacatggtgaaacctcgtctatactaaaatacaaaagaaattagctgggtgtggtggcaggcgcctgtagtcccagccactcgggaggctaaggcagaagaattgctcaaactcaggaggcagaggttgcactgagccgagatcatgccactgcactccagcctgggagacacagcgagactctgtctctttaaaaaaaaaaaaaaaaaaaaaaaaannnnnnnnnnnnnnnnnnnnnnnnnnnnnnnnnnnnnnnnnnnnnnnnnnnnnnnnnnnnnnnnnnnnnnnnnnnnnnnnnnnnnnnnnnnnnnnnnnnnaaaggaaaatttttttcmaaaaaaaaaaaaaaaaaaaaaaaaataggaactcccagtggtgcagctagagctgaggagaaggtggagtgcctggtggcaggcggggtgggggtacatgggtcgggggtagggacatagatttaattaaaatcactcagcccatcaggcctgcaggggtcttctgtcaagtggccattccccgctccccactgaaggtgcccatccctctgggctctgtttcttcctctcatctttccat

SEQ ID NO: 679122 - DNA, 904 bp, Homo sapiens
tgcagtttcagacccgcggcccgtgaagatatgttgatgagccagaagaatgaaggaatgaaacatctggacaaatgatttatcagttatataaggatttctagcctctgcttggaagccttgttgaaaggctctcttaaaaaataaccacaggctgggcgcagtggcttacgcctgtaatctcagcattttgggaggccaaggcgggtggatcacctgaggtcaggagttcgagaccagcctgaccaacatggagaaatcccgtctctactaaaaatacaaaaattagctgggcgtggtggtgcatgcctgtaatcccagctacttgggaggctgaggcaggagaatcacttgaacccaggaggtagaggttgcagtgagccattgcactccagcctgggcaacaagagygaaactctgtctcaaaacaacaacaacaacaaacacaaacctgcatcgctttgagttcctctttacttctccaaattcaggaaactgaaccaaatattttctgctctaaaattgttgatacctcatccttcataatatgtcaccccttccaggaagcctcacctgctttagtgaggttaacacacactcttctctgcagctcttgctatctgtgaataagtacacacagcattttcacaatataccaccattcctaacttttgcttgtcgctctctagaagataagcaaccccaggccaggactaggccttccttatttgattttgacttcttagcacctagtatcaggcagatacatagtaggtactcaataaatgcttattcactagatcactcctcattgatcaatcttgtctctacagccaatttattagatgggttgaatgtgcacacagactctaggatacgccttgtaaatgtgcataataggaca

SEQ ID NO: 679123 - DNA, 1166 bp, Homo sapiens
tattcctggcagaataagataggcagttcatgatagctcttgactcatggaggcctccatttcacttggagatgcttctccctcaactcattccactgagaaggaccctgggtatccacagctgctatcctgcccctctcctttcgcttcttcccttaggacaggcagctttcacagcctagtgaaaggccatcacttttctgcagtgcaccagccacgctgggtgattaatacaggagactgcatacctcaggtaaggcctaacctgttacaattttaagctgagcaggaaatgatgtgcagagtggccacaggcaatggcataggagtgagactatgttacatgaagctgtgtaaagggagggtgaagacactaaagccacaatcatagcccaggagcagcctgggcaccaggtccaggacttaaaacatacgtgagctcccaggcatgaggcttccaaaagacttatatggagataagggctaggcacaaagcatccagtaacccaatgggctgagagccagagatccatcaggcggtggttgccagagtggttaattaattatcaaccacttctagtctgctaaacttcttcctccactgaggtggaactcaacctcatgaaaaagttgccactcctcttctaatgtacctgctgtgtcctgtcatggaggggtgtgagcaagcagccaggccaactctttgttccccttcaccctctaagtcacttggatgagctggaatccttgagtctcaggtcaaagcaagagtcccactctccagtgtcaaagcactgagcccagggctcagtgggaagcgtcgcaagtgcccgtccttccctggaaacccagtgagaagtggccmataagcctctccttaggcacaatcatggagctctactccagacccttggtgccttccaggctggaatggggcttcttggcattagaggaacttgaggatattgaaaatttcactgcctctctgtcttagggcctgtgcccctgacatttaccttggctaaatcagcagaggctttccttcttatcttccaaagacaaaaatgaataaaaccgaacctagtctctgtgggtgcaagtctagacatgaaaaaaaaaaagggcttttatgactataaaacaaaaaatcctgttaatctaaaaag

SEQ ID NO: 679124 - DNA, 1166 bp, Homo sapiens
tattcctggcagaataagataggcagttcatgatagctcttgactcatggaggcctccatttcacttggagatgcttctccctcaactcattccactgagaaggaccctgggtatccacagctgctatcctgcccctctcctttcgcttcttcccttaggacaggcagctttcacagcctagtgaaaggccatcacttttctgcagtgcaccagccacgctgggtgattaatacaggagactgcatacctcaggtaaggcctaacctgttacaattttaagctgagcaggaaatgatgtgcagagtggccacaggcaatggcataggagtgagactatgttacatgaagctgtgtaaagggagggtgaagacactaaagccacaatcatagcccaggagcagcctgggcaccaggtccaggacttaaaacatacgtgagctcccaggcatgaggcttccaaaagacttatatggagataagggctaggcacaaagcatccagtaacccaatgggctgagagccagagatccatcaggcggtggttgccagagtggttaattaattatcaaccacttctagtctgctaaacttcttcctccactgaggtggaactcaacctcatgaaaaagttgccactcctcttctaatgtacctgctgtgtcctgtcatggaggggtgtgagcaagcagccaggccaactctttgttccccttcaccctctaagtcacttggatgagctggaatccttgagtctcaggtcaaagcaagagtcccactctccagtgtcaaagcactgagcccagggctcagtgggaagcgtcgcaagtgcccgtccttccctggaaacccagtgagaagtggcccataagcctctccttaggcacaatcatggagctctactccagacccttggtgccttccaggctggaatggggcttcttggcattagaggaasttgaggatattgaaaatttcactgcctctctgtcttagggcctgtgcccctgacatttaccttggctaaatcagcagaggctttccttcttatcttccaaagacaaaaatgaataaaaccgaacctagtctctgtgggtgcaagtctagacatgaaaaaaaaaaagggcttttatgactataaaacaaaaaatcctgttaatctaaaaag

SEQ ID NO: 679125 - DNA, 1292 bp, Homo sapiens
agggtgggcacctaaccctttatgacgggttacacacacacacacacacacacacacacacacacacacagagagagagagagagagagagagagagagaacactccatttgaagatgaaggcaaatattggggtgatatttctacaagctaaggaatgccaaagattgtgaagatgggagagatgcatgaaaatggccctcctttgtagccttcagaaggaaccaaccctgttgacaccttgatcttagacttctagcctctagaactgtgagacagtaaatttatgctgtttagcaccaaatttgtggtactttgttatggcaacactagtaaatcaacgtacctatttctctaccatacttctcacattctcttattcttgctgtcattggattgtgacaactccatctctgcccccctataatgagtaagcattcaaaattgtcctcagctctgtttccctggaaatataagctaatatagcctttattcctatttaaaaataagtgtgtagttagacctgggttgagcactgactgawaaaaagaaatatgatatgtcctcttcttgaaaacgcctacagtgttcagcaagactaatctaattcgtaagaccactagaaatcagcaaaggcagaatgttgcaggtttgacatctacattgtgatagagttcaggaaagggagagttacaccataagcctccagaactacaaaacaaactattgactatgagaaattctattctatctctgtgttttcctcatatcaccaaaaagcaagagttcatatttggcgtattctgtacatattttttaattcttacacatgagtgtgtggcaggcaaaggggaatcattccaaataggaaactcaggcatttgtaaacaaagcctcatgttggtaattcaaagtaattagtgtttatgactgtaggagtctggagtatatgtgatgaattatattaatcgggagtgaattgatactggagggtaaagaaggataatttctccagctaagagcgcatggccagtagctgaaactgttccccagaccaagccattacatctatcaaaaggcgtttattaactgcttattcacacatcacactatgctaaatgaggaaccaagtcttaaaactcactttcttaacttgtgtataatctatactggtttcaaagaaagagcaagaaaacttcacttgaaatttagagccttagagcttttagagttcctttaaagaaatctttatatgtaataatacattttttttggagaagaaatcaattgaga

SEQ ID NO: 679126 - DNA, 1292 bp, Homo sapiens
agggtgggcacctaaccctttatgacgggttacacacacacacacacacacacacacacacacacacacagagagagagagagagagagagagagagagaacactccatttgaagatgaaggcaaatattggggtgatatttctacaagctaaggaatgccaaagattgtgaagatgggagagatgcatgaaaatggccctcctttgtagccttcagaaggaaccaaccctgttgacaccttgatcttagacttctagcctctagaactgtgagacagtaaatttatgctgtttagcaccaaatttgtggtactttgttatggcaacactagtaaatcaacgtacctatttctctaccatacttctcacattctcttattcttgctgtcattggattgtgacaactccatctctgcccccctataatgagtaagcattcaaaattgtcctcagctctgtttccctggaaatataagctaatatagcctttattcctatttaaaaataagtgtgtagttagacctgggttgagcactgactgataaaaagaaatatgatatgtcctcttcttgaaaacgcctacagtgttcagcaagactaatctaattcgtaagaccactagaaatcagcaaaggcagaatgttgcaggtttgacatctacattgtgatagagttcaggaaagggagagttacaccataagcctccagaactacaaaacaaactattgactatgagaaattctattctatctctgtgttttcctcatatcaccaaaaagcaagagttcatatttggcgtattctgtacatattttttaattcttacacatgagtgtgtggcaggcaaaggggaatcattccaaataggaaactcaggcatttgtaaacaaagcctcatgttggtaattcaaagtaattagtgtttatgactgtaggagtctggagtatatgtgatgaattatattaatcgggagtgaattgatactggagggtaaagaaggataatttctccagctaagagcgcatggccagtagctgaaactgttccccagaccaagccattacatctatcaaaaggcgtttattaactgcttattcacacatcacactatgctaaatgaggaaccaagtcttaaaactcactttcttaacttgtgtataatctatactggtttcaaagaaagagcaagaraacttcacttgaaatttagagccttagagcttttagagttcctttaaagaaatctttatatgtaataatacattttttttggagaagaaatcaattgaga

SEQ ID NO: 679127 - DNA, 1808 bp, Homo sapiens
gcaaagaaggtatttgggaaatggtggggaagaagaggagaggaagaacaagaaatcaaaagacaaattcaagtgggaagccagctcccatgcctcccaggggtccccaaccccttcccaggccctgggggtcccagggtgaagagaagtttcctgaaggagaccctgggcaaagacatctcctgctccccaaaggaccgagggtggggaagacatctctggggaaccataattagcccaggcccccctggggcctattttaggcatatccatgggccaagggccccggtactcagggggcagtcctgacatccttgggaggatggaaaggccctgccaccctcctctctgccaggtgagtaccaagtggattagtgcaaaggtaaggcaggaaggatggccggggaggaggttaaaaatagcattctgcaaggttccctgaggactctccctagcagtataatgtcccaaataatgttgccttctaccccggctctaggaaccaaatttgaaaacggtagcaggaataagcagatgaccccctaatgattcccagagcgtctcccctccaaatctaaaaaaaaaaaatatgagcctccctacctcgcccagcccaccaagaatgcttagcggggaagatatttaactagggtctctcctgcctgccccgcctcacctcactggataatgactgtctctgagccatcagggctgttcatcacgtgaggaccctcgcagatgttctccggctcaccaccccaatatcgctccccgcagcccctgacaaggaggtaccgcctcaacggggtcccgctcaccttggaattcttgccgccgctccggccggactgggaggagcagctgcgctgcacgccctgctccggtgtggacggggacttgtccgaggagtgatctgagcccttctccaccatggtgtctccgtcctggttctgcggggttggcgagcgagaccgcttccggaggatgggcgagcaggccggcgtgctgcggttggagttactggcagtgctgcagcggcagatggagagagggagcggggtggaaagagaaggaggaggaaaggcaggcagtcagtgatcgaggccaaggacaagcccaaaggagccagctcagggagccaggtgaggggctggggagaaaccgggagagaggggcccaggctgcggcttgccgcaccgtaatactgccgttggccacgggagggcagcagtgcccatgtggacacagacgcacgagccaacgggcaatcgacatctagacatgcatccgtccatccgtccgtccaacctgttattgtttgagcccctattatatgccaaaaattgtctggggcatatagaatttaatacctgaaaggctcactggagacyatccaatacaatcagctcattttatacatactgcaaatgcaaagcttctatattttgttcagatatttttgttcatgaaaataacaattacaatcctatttttcacagccttcacatacgcattatttcttaaaacattccaccaagggagtaatggcaagtaccataatccctatgttaaaaaatgaagaccagtgcctgacagagggaagctaaatgcccactgttgagagaaacaaagtgcagctcttctgatttgtaactcacccacaccatattatttccttgtaaggaagccatgtgggttcctgcttcctctgcccagggtaaagatgcacacagccgaagttctcacattccatattcccttaccccaacatttattcccaataagtaccttgtacttcccacaggacc

SEQ ID NO: 679128 - DNA, 3170 bp, Homo sapiens
cagcctcccaagtagctgggactacaggcatgcaccaccacacccagctaatttttgtatttttagtagagatggggtttcatcatattggtcaagctggtcttgaactcctgaccttgtgatccgcctgcctcagcctcccaaagtgctgggattacaggcatgagccacagcacccagtcgctacacactmttaaaacgaccagatctcatgagaacccactcactcactgtcaggagaacagcacggaggggacagtgccaacccattcataagaactccgcccccaccaggccccacctccaatgctggggattacagtaggacatgagatttggtggggacctgaatccagaacacatcggagaggaatagaagccatgatggagtgagtcgcttgtggtggccgcagccaggaccggggcaggcagtggtgcccctgcatgcatcttgccctttcatccccatttttgggaggaagaatcaaggctgatgtcaaccagaaataaaattctaaggccctcccaaccttttgaatgaaccgcttctctcagaggggccctccaaggttaacctgaaagaccggttcaggccatgactgggagtggggggtgatcgggggtcggacaggcctcatttaccctcctcccttttggaaaagccgaccagcatgagcatcaacacagaccttaagtctcataagaaacatttacagtctgttctctctgaagcctgctacttggaggtttcatttacatcataaaactttggtctccacaacccgctatcataacccagacattcctttctattgataataactctttcaaccaattgccagtcagaactgtttaaatccacctatggcctggaagcccgtccctggccccctcgagttggtcctgcctttccagttcgagcagtgcccatcttgtatgtattgagtgacgtcttctgtctccctgaaatgtgtacaagcaggctgtgccctgaccaccgcaggcacgtgtagttaggaccccctcgggctgtgtcaggagtgcatccttcacctgggcaaaataaatgttctaaatggactgagacctgtctcagatacttttgggttcacaccggttacttagccagtggcaaggctggaattggaactccacaccatccacatttggtttttcttcccctgaaacacttttgctgtcgggtcacacctctggcaggcgcctgtgcttttcttcgacactgtgtcctctcagtgcccctatgagggtcatcttccccttgtgctgccctgatctggcccaaacctcctgtcgggtcactctggtccccactcgagtgcccccagccaggccgccctctcctgctatggtccccttatctgcagggggagatgatagggtgttggcgaggtgatgggagcgtgaagccaagacccagtcccgagaaagggccagcccggagcagcaaatggaggggttccacctgtcccaggtggtgggtggaaatgagctcagggcggacaggtgctgaaaagtggatgcctcaggttagcataaggcaatttggaaggggaaggggaggaggcaacagaggctggaacattccaggaggagagggaagaaccctgtggtggaatgaatttgcccttcattgagaagaagctcctctaggcttagagtcggtgctgcctgggtggcagaaccatctcggctccttttagctttgatttgagggtgccacagaagagccttgcagttctccgaagggatcggaggaagcttcgtagtaaagtaaaatgcatgattccagagctgcagccgctgcctccatgtgctctgtgtttcataaccgggcagacacacatgtacctcccctctctcctgcaggcctgtaatgcaccgaaacgtccgctacaactgcagagtgatattcctcaacaggtaggccccctgcccccaccctgggagggtgactggggcctctccctggctctcagccgagggctgccaggacccgtgctggtgccctggggacccgttgctgggaggctgcttctggaagtgcccgggcttagtgagggccgatgcaccaggcaggtgatccgggtgcctttgcttttctgggtctcagccaccaccgagacaggcatcatcaggtatcagaaggagagagacgcagagggtgggggtgtggggacacaggtccttgtggcctggaagccagtccaggtgagcaagttcccttggagcgcctggtcaccagctgctggggaggcgcacaccttctggggcttagctgcttcatcgttgacggtcacgaatggatgcagccatggggacccgagtcatagaaagcggaagcccagagaaggagagagatttgctcggggccccattctcaagctgactctgcatggcatcacctcgtcacttggtggcactgaccaccgccagtggcacgttcatctcaggagcccggtgtgcacagccctgttcccctgtctgcaggaagatcctgctcatcagacccaagatggccttggccaatgaaggcaactaccgcgagctgcgctggttcaccccgtggtcgaggagtcggtgagtcgggtgcctgaccactcctgggatgtgcgttaagcacctccgctgtgtgtagccttgggtcctgatcatgggagtgttaccggtggagggtgtccaggtttttgacattttgaacaaagaatgggacaaaaagcacaaagaaagccaaaaaagaatgaagcaaccaaaggagagagtgattgaaaatgaaagccccctccacagggtgggagcagccccggcaggggctcagggcgcggttacacaatgtcccggggtttaaatatcctctagaggcttcccatcggttacttggtgtgagccccatgtaaatgaagaggctgaagtggagttacaaagttatttacttggtgtacacactatgcaaataaaaagggtgtttcctgtctgaagtagttacaaagttatttacttggtcttagaaagctggggttttgggctgggcacggtggctcacgcctgtaatcccagcactttgggaggccgaggtgggcggatcacgatgtcaggagatcgagaccatcctggctaacacggtgaaaccccatctctactaaaaatacaaa

SEQ ID NO: 679129 - DNA, 623 bp, Homo sapiens
taccccaggacagggtcagggcaggaatccagtgggcacattcagagaggctrttttcccatgagtagattcaatcctgatacaccccaccctctccaacctcaaccttcgaaagcgaggtgaggcctttctcagaaaccaccctgcttgctgttggctccagcagatctgctttctggtccacatttaacaatcaattgctcagcacatatctctgtcctgggaggagctgcgcagattgcaggcactgtctttgatggcacagctgatttcttgggaaactgaggcctggggtttaaagcaactcaccccaaatgacagaactagcaactggtagaggccaaatttaaacctaaggaggagaggtaaaggggcaatgtaggtcacagagtacaatgtttgggttagacaggagaataagtttctgagatctgtggcacagcatggtgggtgaccatagttcggaatgtattatatatttcaaaattgctaagagtaaattttcagtgttctcactatgcccacaaaaatacacaggtgaagttatggatatgttaattagcttgatttactcattctgcaatttacacatgtatcaaaacatcacattgtaccccataaat

SEQ ID NO: 679130 - DNA, 905 bp, Homo sapiens
aatatttttaaaatataaacgtatataaatttatatatttttactatatgtgtacatataaaaacggcaattagtaagactgaaggctctttctacccccaattttaccccaatttctgttttaatcatccaaagaaacacatgtgcatgtgctcacatcctacactcacacccacactccacagcacacacacacgtgcgcaaacacacacgcacatgcgtacacatgcgcacacacacacactctctctctgtctctttctctctctctctcctttttaattgtcagctaggattccagctgattgctcaatttcacccacacagaagtcttgggctgttgccactccagccagttaacccacggaggtcctcggagcctcctttagggctcaggagcacagacttcagacccaggccatctaggtttgaaatctgtctctaccaccttctactgtgagccygtggggaagctgtttcatgtctctgtacctcagtctcttatctgtaaaatggggataataataatattcacctctggggtgttgtgaagatgaaatgaattgacacataaaagacacataaaataaaccatggtaagatttattacatccttttaactaacaccttgtaaatgctcattgagtgttagctattattattctccttattgcgtcagtttctgctggagtgtcagagattgtatgtatcttaaactttctcccagttatgtagtatttgtttaattaaactatacgctataaaatgaggaaaattagaataccgaataagtttttcatagagtaaactgtattacattttaaaatcctttagtcctttagagattatgttctaatttttatattttatgtaattttgtcagtggtagatagtaattatcttta

SEQ ID NO: 679131 - DNA, 905 bp, Homo sapiens
aatatttttaaaatataaacgtatataaatttatatatttttactatatgtgtacatataaaaacggcaattagtaagactgaaggctctttctacccccaattttaccccaatttctgttttaatcatccaaagaaacacatgtgcatgtgctcacatcctacactcacacccacactccacagcacacacacacgtgcgcaaacacacacgcacatgcgtacacatgcgcacacacacacactctctctctgtctctttctctctctctctcctttttaattgtcagctaggattccagctgattgctcaatttcacccacacagaagtcttgggctgttgccactccagccagttaacccacggaggtcctcggagcctcctttagggctcaggagcacagacttcagacccaggccatctaggtttgaaatctgtctctaccaccttctactgtgagcccgtggggaagctgtttcatgtctctgtacctcagtctcttatctgtaaaatggggataataataatattcacctctggggtgttgtgaagatgaaatgaattgacacataaaagacacataaaataaaccatggtaagatttattacatccttttaactaacaccttgtaaatgctcattgagtgttagctattattattctccttattgcgtcagtttctgctggagtgtcagagattgtatgyatcttaaactttctcccagttatgtagtatttgtttaattaaactatacgctataaaatgaggaaaattagaataccgaataagtttttcatagagtaaactgtattacattttaaaatcctttagtcctttagagattatgttctaatttttatattttatgtaattttgtcagtggtagatagtaattatcttta

SEQ ID NO: 679132 - DNA, 654 bp, Homo sapiens
caccgcgcccggccgccaagcctctttatgctaaactattcacttatttaactgaaaactgatttattaagtttttacatgtgctgagctttggggaatggtaatgcataagataaggcccgtgccttcaaggtacttaagatctcatgtgtgaagactaacgtgtaaactcagaagtaaatggacattccagagggggaaatacctgctcagagggcatggtagcataaaggatggagtagccaggtctgtttgggggctctggagggaaagggcttatagaagaggtgactcttgaggaagatgagcaggtgctttccaggtggatggggaggaggttgcatgagatgggcctgggttgggaagtggcatggggtacctatgcatgcttgtcccggrgcttgtcagtgtaatgtgtgatgtgagtgtgtatgtgtgtgtgggagtgtgcatgcgcaggttagaacatgttgtgtctttcacagcctgatatttaggaacatccgtgcacatatccgagacagtctgtgaggcaatgaggcttatttaacattcactgtgggacaaataagagaaaattaaaagagcaattttagtagggaataattgttttccatacaccataattacaactgcttgtaaatgctgctatca

SEQ ID NO: 679133 - DNA, 621 bp, Homo sapiens
tgctaataattaacttgattctgtttaaatacatagctttgatttatgatctctgaatagcaagagacacactgagtcttaatgatatgacggagtactcctatataaggctgttagaacttctgaaatacttcaaattgctctctgttgtaatttttggagaccctgggatctgaagacactgtcctgggcaacacagatatcagagatacccactccaagcacaagaagtgttgctttaaatattctttgtaatcttcttgtacatatattgttctttaytgagcaacgtttctgggtttacctgattttgtaccctgcacaactttgcaaactgaccatgtccttattagattagcactggataggattttgatcacctatattcatctagtaaaatctttaacctatctttacatcaattatcttttcctatgcgaattgtctcaggagatggtgaacatatgcaaggaattaatcaaagagagtgaatgtatccagagttttttctctttttctctagcttatcaaatgtcaacaaggtaagttttcaggataaattttatcatgaataagaaaagcaatccacaactccttgttctttactggaaatggtagatt

SEQ ID NO: 679134 - DNA, 595 bp, Homo sapiens
gaacaattttcccagctcagaagatctgtacctggcctccatctactggtaccagttccttattcccagcttatcctgctgatctggtgtccagtgtccccaaaactctagggtgaatagtttgtggaaatctatgcctattcttttcttggctcattttaatttcttttcatttagaatggaactttaaaagtcttcaaattctggaatttggatttctytgccttactttagtctaccttctgtgtgaagtggggagttctctgtaaaggaacaatttactatacctgaaacacttggaagtgacctccaaaacgtactaagcaccccaaatgggccaggcactgggcctgtgtgctaggattacggaggagagatgtgagaatatggtccgcatgagggcaggatcgtttattgcacagtgacatactccctctacctacaacagcacccagtacttcataggcactctataaagatttactaaataattgtaaacaaaccattatggatcactgtgctgcaaatggcattttgaagttaacacagagggttagcagagcacagagaagagatatgtaacccaagccagaat

SEQ ID NO: 679135 - DNA, 1161 bp, Homo sapiens
actagaacagtatctggcatagaatgttaagcaacatattccaaactttcagggtcacagatttaaaaatattattaaagcacctatttacttcttctgagatgctggtgttttaggaaatgcaattcgagaaacattcttttagcactaagaagtcgtgtgggctcttgagcagaggaacaaatctccccacccccttcaccccagtattaagggctttttggactccttcaattatggttggaaagaatggtacaaactgagaagtcctgaaggaacctcccattgttgtacagacagcctggactaaagctgctgaaagaaacccagctccccacacactggaatgaggccttcctggctgagatgaacaaagtataaaaattgaagtgattgtattaacccaagaatctgggactttggattattcctagagtaaaaggatttaagttttttcttttcctttattttttcccaggtaactttaaaatgggataggagcatatcaaaattttggaaatctttatgtttgtcatcatgcaagtatgtttggattatctttgtattgccatttactctcgttgcagcttctacttacctatattgggcaacatggctgagcaaaatctgctcagtgggagagtgggaaatataataggaagcaaatttcaatctttttacttttaggaataatccaaagtcccaaattctcaggttagtacaatctcttcaattttcatactctgttcatctcagccaggagggcctcattccagtgtgtggggagttgggtttccttcagcagctgtagtccaggctgtctcttcaataatgggaggggttccttcaggacttctcaatttgtactagtctttcccagccataattaaaagggttcaaaaagcccttaattctggatacataatactatcacagcactacacatwtattctgagaaagttacaataagctgatcctcaatgcctacagaactccaggaacttcaggcaacctgttgtcccaggatgtcatccttagggttgccaaaggccttaacagatacatgctcatctgtagcccataaaaaaaaaaggatgtgactgagactgtcttggttgcagccttggtaggatgtcagtcagtttatttcagttgtctata

SEQ ID NO: 679136 - DNA, 2947 bp, Homo sapiens
gttgttttcactttggcgctattatgaataatgctgctatgaacatttgtgtacaagtttctgcacggacatatattttcatttctttcataaactggagtggaagtggtgggtcatagaactctgtgtttaagcttttgaagaagtgccagactgtgtaagaaagaaagcctttcttcaccctgtgagactgagctccctctctccatttatacgttctctttatgccctttgcttctctttcagagcaattcacgttgacctgggtcaccctcaacttaaggctcataactcccctakatcctcagggtccacactaaatgtgatgaaatatgatggaagccacatacttacttttgcattttgtagtaaccacattttaaaaagtaaaacaaaagaagtgaaggtaattggaataatatcacagatttaaacaaatctatccgaaataccaggtctacaagtataaaatattttaacattaacaaaatactttgctttctttttatattaagtcttcacaatctaatgtgtatttgacacttctcgcacatctcagaatgatggcagcaccccatatggggggccctcccatgatgtcaatgatgggccctcctcctcctgggatgatgccagtgggacctgctcctggaatgaggccgcccatgggaggccacatgcccatgatgcctgggtgcccaatgatgagacctcctgccgtctcatgatggtgcccagtcagcccagaatgactcgaccagacagataaggataggggggaggcctcactgcatcagtgttgttttgttgttgttattgttgtgttttctttgtttgtaatgtttttgttttgtttttgagacacagtcttcctctgccacccaggctggagggcagtggcatgatctcagctcactgaaacctccacctcccgggttcaagcgattcccctgcctcagcctcctgagtagctgggactacaggcgtgcgcaccatgcccgactaattttttttattttagtagagacagggtttcaccatgttggccaggatggtctcaatctcctgacctcgtgacccgcccgcctcagcctcccaaagtgctgggattacaggtgtgagccactgcgcccggcctatatgagttttatatttacctgttcccttcaccaggagatcatgctgctgtgatgccgggttttcttaacagcataaggaagacttgccccttgccctatcaaagagaatagttttggagggccgaagtgggaccaaaaaagatgcagttttcatttctattgggaaatgtgaaaaaaaaattgtcaactcttttagttaaaaacaacaacaacaaaaaaggaaacgagatgtggggccgccgcacgcaatatcgtgcattaaaaggatgttctactctggaggaaaatatctttgctgatgccagaccaacctaacacaaagaacttttggttttttaatgtgactgtgttttattttacactgtgtaattcactttagaagggcaaagtacctgtctggggaagactatttaatttcctgcatttatttagaatattggctaatattattctgaagggaaatatctctaacaagtgagtgccccccacatagacacagctcatgagctcacggggcaaaggaattgaacagcagcctcctaatagctagccttctttgtggtatggaaataattatcagcatgtaaaagactatatatatattcaacaattctgaccccctgcaaaattcaaatctacaattgatttgcttcctgggctcctgaaaacaactttgtcaaaactgttcagaaataaaatcagccaatcgttgccccttggggacgcaggacaaagcaaatcagccatgaccaatgtggagtcggccgtacacaattacatgcagacctgcaggacatcgagtccctgctatggtccctccccagtcaggcccccattgcctgggctgcagccagaagcattcaggcacaagtgcattcaacaaatacttatttaattgtattggtggttagagggctgttgttgattaaggtacattaatggatccatgtcctccctgtatccaagactctgccatttgtctctgcagttcctcccactgaagaatcggagtatatttctccagcccctaatgttgggtttagtcatgtgtctagctttggccactggaatattaatctgtatgaccaaaaacatggaaagtatgcattcatttgtgctcactcactcctgctatcaccctgagaacaagcccaggccagcctgctgcttccagcagaagataagagacaccaagagcaaagtagagcttcccagacatgctcatgctagattaaccaacctcagctgacccatagatccatgaaaataaatgactgttgtattaagccactgagatttggagtgacttgttatgcagcattttgtgacaataagtaactgatacaagggtcaccatcctttatctctgtagattttaaccaatttttaatagctagatggagatcttctagttgcctttatttataatgaataagactgtagagctagtttggcctgacactaccagttacctacccagaaattcagaaatactttcttctccaacccaccccaaccaaccattaccatttttttttttttgaaacggagtcttactctttgcactaggctagagtacaagtggcacagtcagagctcactgtaccctcaaaatcctgggctcccctgatcttccccttcaaactcctacgtagctaaaactacagacttgtgccaccagtgtcgggctaattttttaatcctttgcagagacagtgtctcactatattgcccaagttggtttcaaactcctggcctcaagcagtcctcctgcctcatcctcccaaagtgctaggattataggcatg

SEQ ID NO: 679137 - DNA, 1235 bp, Homo sapiens
  misc_feature 689, 690, 691, 692, 693, 694, 695, 696, 697, 698, 699, 700,701, 702, 703, 704, 705, 706, 707, 708, 709, 710, 711, 712,713, 714, 715, 716, 717, 718, 719, 720, 721, 722, 723, 724,725, 726, 727, 728, 729, 730, 731, 732, 733, 734, 735: n = A,T,C or G
  misc_feature 736, 737, 738, 739, 740, 741, 742, 743, 744, 745, 746, 747,748, 749, 750, 751, 752, 753, 754, 755, 756, 757, 758, 759,760, 761, 762, 763, 764, 765, 766, 767, 768, 769, 770, 771,772, 773, 774, 775, 776, 777, 778, 779, 780, 781, 782: n = A,T,C or G
  misc_feature 783, 784, 785, 786, 787, 788: n = A,T,C or G
gttgggaaacttcatggaggaggccatgcttcagataagtctttactttggccagcagacaaggaggacaagaaaaccacatgcagaatcagcagacaggataaatgcttgaagctctgcggaggaacagcctggtaaggggtcacagctggctagggaccagcaaggcatgtgaggacaggtggcccagcagcaaggcgtgctttcgggaagaggcaaggacctcagatgccatgtgaagggctgcaaactcatctctgggagctgggtacccaggcagaatattaagcagagaagtgttacgattcagctgcattttgaaaagattactctggtgagaggaagaaggataaatgcacgagggaagtatgagggatgaaacaaggaggtccacacctgagatgactataggtagtcttagcaagtctgtggtttgtgcagtggtggggtagaaaccggactgctgttgaygaagactgaataggaaaataagaagcagaggcaacaaaaatagcctcggctttcaagacatctggaagtgaaggaaaggagagagagaaagatcagtgactaaaaacaagaacctgtttgaaactatttggatttccttttaagagggagctgtttatgtgctgaaacaaagggaatgtattttttctttccttcccttttttttttttttttttttnnnnnnnnnnnnnnnnnnnnnnnnnnnnnnnnnnnnnnnnnnnnnnnnnnnnnnnnnnnnnnnnnnnnnnnnnnnnnnnnnnnnnnnnnnnnnnnnnnnnaatagaagtccaagtcttgagcagagcattcaaatcaacagaatatatcaacatattcaaaacaacataatacggcaaaactgaccttaataggataaagctaaatcaagaaaaatttggtcccctggtgagtggaaaaattcctaaccgtaatacatatgagagagtaacacgatttcctgagggaattgtctttcttcctgttattattcagtgtttgtcaagtgcctacatttatagatcttatttaaaatagaactagttatagtctctgccaaatgaccctacaatatttgtgtgacttcagctagctagaaatatctcagggggcagctgagtagcataaaaatatctctgatgtccagaaggggtgtctatcttccagcacagcagccagacattctgcttataggtctggttttctgtgccacggccttttctctttga

SEQ ID NO: 679138 - DNA, 610 bp, Homo sapiens
ctttatagttcaagaactacagatttaaacaggataggtaacatgctacagataaccagaaacactttgggatataaaagaatctggatataattggtcttttggctctatgagatatatttccagttcagattaagaatgcctcagatagatctagtagcatgaaataggatcagaaaataatcataaacttcattttaagtactctttgggtgcaaaaagtatcctgctttatcacaaatgtgtttaaactatcagacataggaaaaatgataaaacaagaataaaagcaatgagtctgagtgtgtttgaaacgtggagttaacaatagtatctaagcgtattatattttgtcttatgtctgaccccctgaaagtagagcctgagatgggataatgttataagctatttgttgaggaaataaggaaagcgacttaggctgtgggaaaagccaggcaaagacgtgccatgaggaraagtctagtgtccgtctgatactgggtagagcttaggagtatgcgttgtgccacagaggctatatatcttacaggcaagaggacagagccattatatcccctatgtctttccaggcaaggtggccctcatcagc

SEQ ID NO: 679139 - DNA, 598 bp, Homo sapiens
tttttcttcaatcaatgccattgtcctcagatgtttgcaaatataaacaaggataaaagctgactaatcttccacttgactttcaaattttttttattttacttatttttgagacagtctctctctctcacccaggctggagtgcagtggtrtgatctcagctcactgcaacctccgcctcacaagttcaagcgattctcctgcctcagcctcccgaatagctgagactacaggcatgcaccaccatgcccggctattttttgtatttttcttagtggagacagggttttgccatcttggccaggctggtctccagcttgtgacctcaggtaattaaccctccttggcctccctaagtgctaggattacaggaatgagccaccgtgcccagctgactttttttttcaagtagaagtttaataactttccagtttccaaaagtgaatgttccaaaaggtatttgggcagcacgcattgctgcctctagtttgtgggtctccagcaagatgcatgtattgcaggctctgttatatcactgtttctaccaaactgttacttcgtattttcagctttaaataaaattatttttttctgctca

SEQ ID NO: 679140 - DNA, 598 bp, Homo sapiens
tttttcttcaatcaatgccattgtcctcagatgtttgcaaatataaacaaggataaaagctgactaatcttccacttgactttcaaattttttttattttacttatttttgagacagtctctctctctcacccaggctggagtgcagtggtatgatctcagctcactgcaacctccgcctcacaagttcaagcgattctcctgcctcagcctcccgaatagctgagactacaggcatgcaccaccatgcccggctattttttgtatttttcttagtggagacagggttttgccatcttggccaggctggtctccagcttgtgacctyaggtaattaaccctccttggcctccctaagtgctaggattacaggaatgagccaccgtgcccagctgactttttttttcaagtagaagtttaataactttccagtttccaaaagtgaatgttccaaaaggtatttgggcagcacgcattgctgcctctagtttgtgggtctccagcaagatgcatgtattgcaggctctgttatatcactgtttctaccaaactgttacttcgtattttcagctttaaataaaattatttttttctgctca

SEQ ID NO: 679141 - DNA, 598 bp, Homo sapiens
tttttcttcaatcaatgccattgtcctcagatgtttgcaaatataaacaaggataaaagctgactaatcttccacttgactttcaaattttttttattttacttatttttgagacagtctctctctctcacccaggctggagtgcagtggtatgatctcagctcactgcaacctccgcctcacaagttcaagcgattctcctgcctcagcctcccgaatagctgagactacaggcatgcaccaccatgcccggctattttttgtatttttcttagtggagacagggttttgccatcttggccaggctggtctccagcttgtgacctcaggtrattaaccctccttggcctccctaagtgctaggattacaggaatgagccaccgtgcccagctgactttttttttcaagtagaagtttaataactttccagtttccaaaagtgaatgttccaaaaggtatttgggcagcacgcattgctgcctctagtttgtgggtctccagcaagatgcatgtattgcaggctctgttatatcactgtttctaccaaactgttacttcgtattttcagctttaaataaaattatttttttctgctca

SEQ ID NO: 679142 - DNA, 598 bp, Homo sapiens
tttttcttcaatcaatgccattgtcctcagatgtttgcaaatataaacaaggataaaagctgactaatcttccacttgactttcaaattttttttattttacttatttttgagacagtctctctctctcacccaggctggagtgcagtggtatgatctcagctcactgcaacctccgcctcacaagttcaagcgattctcctgcctcagcctcccgaatagctgagactacaggcatgcaccaccatgcccggctattttttgtatttttcttagtggagacagggttttgccatcttggccaggctggtctccagcttgtgacctcaggtaattaaccctccttggcctccctaagtgctrggattacaggaatgagccaccgtgcccagctgactttttttttcaagtagaagtttaataactttccagtttccaaaagtgaatgttccaaaaggtatttgggcagcacgcattgctgcctctagtttgtgggtctccagcaagatgcatgtattgcaggctctgttatatcactgtttctaccaaactgttacttcgtattttcagctttaaataaaattatttttttctgctca

SEQ ID NO: 679143 - DNA, 635 bp, Homo sapiens
gggcagtggaaatgaatgggtcataaagtagaaagacctaggtttgaactcagaactccgctacttaatatgtaaatgatgttagtcaagttttttaacctccatgagcctgatttcccatttatataacagagataataataccttagagtgtcgttttaaagatgaatagataatttctctaatgagctacctttcccagtcccagttctctactctccacttttacttcattgtgtgtgcctggcagttctcatcttgtgtccttgggaagataatgcaatctcacatttttaaagttgttctccccactaatattgttgagccctgtaacagcctgccattgctgtgcaaagyatttataagcacaagagaaaattaacccagttttcaagctatttaaatttctatggacttatttatattcacttgagctaaggggaagctaagattcacctaaatcctggtaccagcaccctctccttgttaattactattttagccttgcatatgtctagcactcaatttgttacaaaagcaaatggaaattaggtagtctctgatctccacttaatccttgttcccactgagtaggacccgatgatgagtccttattagccgacctgattccaata

SEQ ID NO: 679144 - DNA, 1683 bp, Homo sapiens
tgtaaaatggggatcacacactgctcacttccctggcagggtcatcatgggacaagaggggaacaagaaaacactttaaaatgtataaaggtccaggcggtcaagttatttcagtgaagtgttgccctgtcgtttggtgtaataatctgggaccagagaaatctgacatcagtttaggacggcacactaggtgctagtggccatgtgcagagtagtggctgtttgggttttccctcccgtactgacagcaggccagaagcgaagtttcctgagttgctgccagtgcactttgcagccttggctgggactgagtcctgccctgctaatgacttcatctaagctttcaccgcctgccaggtcctgtctcttaaccccacaggtgctctaggaggagtaggtactcttacgcatcgtgcagaagagaagtctgaggctgcctctcttctgcctgcaggtcatgtggctgcctagcaggcagaggcccctggtgcggaaggtggctcccggcttccaacagacatcaggctccaaggaggcagtcgccagcctgcggagaggccacatccagcggctgaacctgcgctacactcaggtgtcccgccaggagctcaggtgcctgccctgccctgggctcctccaggagagggtgggactgagtctctcccagtcctgccaccaccaccccccaacacacacacacacacacacacacacggtcgggcagagggatgggcacacagaggaatcaggcacacatggttcaaagacaagagggtgagcgtgtcgggcagacccgggcttgtcccggagcttggccctctggagccaatgttccttgccccgggcatggctgtgaggtcgtgaacaggacgtgctttaccagccccgacactgggcctggagctgccagggtccgcatgctgacctgcctctcccctgccccacagggactacgcgtcctggaacctgagtgtgaacctctacacagtcaacgcaccgtggctcttctccctgctgtggtgtgcgggggtcccatccgtcacctctgacaactcccacrccctgtcccaggtgccttcccccctctggatcatggtgagttggggggcagagggcccctggggggcagtgctggagctgcctatagcctgccctgaccactcggcaagctctgtgcttggagctgtccctgggaggtctctagcatggtggggagtccatggtgggcgtgcaggcttgaggcatgagggtttcatggcatctgggatctgcactaaggtgctgggaggaccctgggcctcatccacagggagaaaagcatcactaagggctctaaagaagtaaagagctgcttgggtttctttgctttggagggtaacaaggacaggaataggaagcattgaccgggcgtggggctcacgcctataatcccagcattttgggaagcagaggcaggatgatcactggagcccaggggtacaagactaacctgggcaaccctgtctctacaaaaaaaaataataataattaattaatttgctggccaaggtggcacacgcctgtagtcctagctactcggtaggctgaagtgggaggattgcttgagcccagcaggtcaaagctgcagtgagctgtgatcactccagcctggatgacaaagtgagatcctgtctcaaaaaataa

SEQ ID NO: 679145 - DNA, 1683 bp, Homo sapiens
tgtaaaatggggatcacacactgctcacttccctggcagggtcatcatgggacaagaggggaacaagaaaacactttaaaatgtataaaggtccaggcggtcaagttatttcagtgaagtgttgccctgtcgtttggtgtaataatctgggaccagagaaatctgacatcagtttaggacggcacactaggtgctagtggccatgtgcagagtagtggctgtttgggttttccctcccgtactgacagcaggccagaagcgaagtttcctgagttgctgccagtgcactttgcagccttggctgggactgagtcctgccctgctaatgacttcatctaagctttcaccgcctgccaggtcctgtctcttaaccccacaggtgctctaggaggagtaggtactcttacgcatcgtgcagaagagaagtctgaggctgcctctcttctgcctgcaggtcatgtggctgcctagcaggcagaggcccctggtgcggaaggtggctcccggcttccaacagacatcaggctccaaggaggcagtcgccagcctgcggagaggccacatccagcggctgaacctgcgctacactcaggtgtcccgccaggagctcaggtgcctgccctgccctgggctcctccaggagagggtgggactgagtctctcccagtcctgccaccaccaccccccaacacacacacacacacacacacacacggtcgggcagagggatgggcacacagaggaatcaggcacacatggttcaaagacaagagggtgagcgtgtcgggcagacccgggcttgtcccggagcttggccctctggagccaatgttccttgccccgggcatggctgtgaggtcgtgaacaggacgtgctttaccagccccgacactgggcctggagctgccagggtccgcatgctgacctgcctctcccctgccccacagggactacgcgtcctggaacctgagtgtgaacctctacacagtcaacgcaccgtggctcttctccctgctgtggtgtgcgggggtcccatccgtcacctctgacaactcccacgccctgtcccaggtgccttcccccctctggatcatggtgagttggggggcagagggcccctggggggcagtgctggagctgcctatagcctgccctgaccactcggcaagctctgtgcttggagctgtccctgggaggtctctagcatggtggggagtccatggtgggmgtgcaggcttgaggcatgagggtttcatggcatctgggatctgcactaaggtgctgggaggaccctgggcctcatccacagggagaaaagcatcactaagggctctaaagaagtaaagagctgcttgggtttctttgctttggagggtaacaaggacaggaataggaagcattgaccgggcgtggggctcacgcctataatcccagcattttgggaagcagaggcaggatgatcactggagcccaggggtacaagactaacctgggcaaccctgtctctacaaaaaaaaataataataattaattaatttgctggccaaggtggcacacgcctgtagtcctagctactcggtaggctgaagtgggaggattgcttgagcccagcaggtcaaagctgcagtgagctgtgatcactccagcctggatgacaaagtgagatcctgtctcaaaaaataa

SEQ ID NO: 679146 - DNA, 612 bp, Homo sapiens
tgaggtgactgttccctgtgtggcccactccctctccttggctaagctccacatgcctaacttcctcttgtacagaaagacccccttcaccaaggcacccagaaacacatgagtgagggaagcatctctgaagcatgttgcagcacttgctctctgtgggctcggcatactggtgggagatgctgccatgaaaatggactccatgatttcagtggaaatgataggaccccaggggagcagagggcgagcagcactcgaccacccaggacatcagacctcaggtggcaataagcatgttctgaccatagatgtcttcagcaaaggctgatcaatcaaggaccaaataagaccaaggagaccaaacagatgggcagctcttaaggtcctccttaatctctctttctctttttttttttaratgggagtgcagtgatgcgatctcggatcgctgcaacctccacctcctgggttcaagtgattctgctgcctcagcctccctagtagctgggattacaggcatgcaccactacacccagcaaatttttgtattattagtagagacaggatttcaccatgttggccaggctggtcttgaactcctgacctcaggtg

SEQ ID NO: 679147 - DNA, 1016 bp, Homo sapiens
gaaaaagatggacaataacaagtgttggtaaggatgtggagaaactggaaccctcctacactgtgggtgggaatgtaaaacagtgaagccctggcccacccagaaccagaataaacgccgtagaggatttttccccttttccccccacttcaagagatgggctcttgagcacagtagaatgatcagagctcactgcagccttgagctcctgggttcaagcctcagcctccgaaatagctggaactacaggcatgcaccaccacacccagcagaggatgttgaactgatggcccaaggtggagagggagtgaaagtgcaggtgctttgatggatgagggatggagtggcttccctccgggaatgaaggtgtgcagaaagggccacgcgcctgcgggctgggttgcagggcctctgagggatgggctcagatgtggaagctataggaatgcctgggcaaactgggcagaaataccacaacctgggcaggctttgggaggtccccagccaagccctagggagagggagaggggctgccagccccccggcttgggctcagggaagccatwgtgattcttctcaggatggcctgaacctcctggaattgtgataagccccaaagacaggatgaggctccaggaaaatgactaatatcagatttcctgtcaaccgtggcaacgagagaagggggctcccagtctatttaattagatttaccaaaataaagacgtggcatttcttacacctgagtgccatgctgtgatgcatagactgaattacaaattgtgagatgggtgaggtaagagggggtggccatagagatagtgaaaagtgggcaaatttgctatttagcaggaaggccaggcaggtcttactgatagtttggaagctgagggtcggagactggtactgaaaaggatttcccggtttctggctgagaactgggtcaacccgagtgcattcccacccacttcctctagaccatccatccactcagcggcacagactcccgaaagtgt

SEQ ID NO: 679148 - DNA, 571 bp, Homo sapiens
ctttcatcaataatggaatgaaatctgtgtgtgaatttccaggccaccaattttgtaggtggatgttgcttcatgactgtgctctggttaggcttcggggctcagcgaggaccactgggagtgtatgtaaccccagaactaatggtgtcgtcaggcccccaccccttccccagatcctctctctgtggctcccactttcttttcacttccacttctctaccttagaaaaaaggctccattcctgagaaacttagtaaccatgagttgattaggtcatgcccaagctcatttccctctccttcctcaccctctttgaatgacccctttcaaaaagggtcagggtcagatttgtaatggaatacaagaacaacaagcaagaaaatgtgacaagagcattgagctttaaaaccttmttgtgtcgatgctacactcaataaaaaggaaaaaacagtggtcatgggcatgtcaggctggggacttggaggctagaagtgagtcctgtttcctccatgaaagccacagcactttacttctcagtgactcagtttcccacttgtaaaatgggagaggt

SEQ ID NO: 679149 - DNA, 669 bp, Homo sapiens
gtcaacttacaattagaaaataaaaatttaaaaataacgaatggataaacaaattgtggtatacctacacaatggaattatactcagcagtaaacaggaatgaactactgatacatgcagcaacctggatgattcttaaaataattatactgattgaaaaaagctggactaaagaaggatacatatttagctagtatgattctatttatgtaacattctagaaaatgcaaaggaatctacagttacataaagcagacacactggttgcccttcagtggaggtggatgtaccacatctgttctttactttgattgttgatggttccatcaagtatacctacgtcaaaacttatcaggttataaactttaaacatgtgaaatttattgaagctcaattgttcctaaatacagctttaaatttttttwaaaaaatcaggaaaatttattataatcatatatcttagatgtaaccatgatgcttgggtgaacatttggcttatacatattttctgagccttttaaaaaccaaatttgcatttacataatatattagcatatttttcatttgtctctaacactataagacactcctagtattattagaagttctttataaacatttacattgaaagattcatactgtgataaactgtatcagtcatgtgccatc

SEQ ID NO: 679150 - DNA, 1517 bp, Homo sapiens
caaagctgaattggattcctactatcaagttatttgaatcctttcaaacagccagtggtatagcctgtagagcctcccagcccctgcctaacctctggaaaaatcttgtctcaaaataaacactattgcagattaaaaccaagattctcaggagggactgcttagcatcaacatgttgccttgcttatgttaagccatccctgctctggtgctgggatggagaataattgccaggattgtgtggaggcccatcattttgctttctctgaagcagctttatcaggaacaagccccagggtggcattacttaatcaatagcagagatacagagagagaaagagagttcacaataaactgattgctgcatctggtttcctatgagcagttacaagacaagtgaaagtcctctaatctcatcaagcaaccagacagattgattttgagttcattaatagttgctggggtgaagaagagagaaaggaaaaagagaaaatgaatacatcattgggatctacacccttaatgcagatcaagaagctctttcaaaaaccattcctggctagtagagagcactgagcaaggatctggtgcctggcctggaaccacaattaacacccaaggcctgagagtaacatcttccaaccaggaaaccacatgttttcaattcatctgcaaagcacccaaaatacaagtgaaaagaaaactcctgtgctatttatgcagatattttacttacataatctcaaatagctttcatccaaatacttggcaccatttagatttatagaggtgctttagcaaactcagagctacctatcagccttacctaccacaggaaaaaacaaaacaaactgtgactatgcctgaaaagaacatgaaataacaataagtcaatttgactttggatgtaggtgcttctaactcagctaattcagaattggtagagggccggcatatcaagattacattgtccctccaagctccttttactcccttctctgataaccaacatgctaatattcgaaagagctagtgacccatcaaaaagtgggtatttttgatacaggtgtcttgttgttttatagaactggtatattccttgaaggctgtatacaaattgatccaatagtaaaatacacggaagtggccagttttgcttagaggaatcacaatcctcatgaatagacaactgtctcctaatatatcaagtttttagtactaaattttaaaatattgtgctttcttgcagcagtcacacctatttcctgtcagtgtgaagttcaatcaaaggcaagcaaggtgctttcagacaggcagttagaattttacagcaacattttagtgggcgacatttctctgagctctttttctttctcagtagtccatggtaacttacgagactcctttattagctacacaaatatttattgactatctattatgggctcagcattgaactattattagtgatataatagacatcgygtggacatggtttttcacctgcaacgactcaa

SEQ ID NO: 679151 - DNA, 586 bp, Homo sapiens
aagtgtccaagttaactataagaccatcttaaggtcactgtctccttcatgaaaaataaaagaattagatgagatgatctttaaggtctttctaaaactgaatattctatgaagtagacaggttgtaatgaccagtttgtcaaaacctaatgaagactaaccacatcatcaatctcaaattgtatataaagaatatgagattctttttcaatcaaccattaagtctataaaacaaatcccgtaatccagtctccggatttatctctgactcataaaaacatttttcttaaagaaccaagcgagatcccagggaccataccacagccaattatggctgatctgcagaggtctttgatttttcatttaagaattgtgttggtaatatgcttctcaygctgcatctggttcacatggtacattcctacaggaaagtgacagcattagggggagcaacgagcaattcctaaacaggtgggctttcatttgccttcaggaggcagttccttctgctagtcagatctcaatgtttgtgacaagactggacttctgtctacacctgcaattctcattctatttacagtggcca

SEQ ID NO: 679152 - DNA, 640 bp, Homo sapiens
caaattccataactcagagtatttctgtgtggggtaaccatccccaaatctctcatatgtggaagtcagatgagaaaacaattctaccccaatatgagccatattagcaccaggatgcagtgcaaagagcgcatggtttgcacgagaggccctgggttcaaatccttgctctgccactcaccagctgtgggaccttggccaggcactttctctcctggcccatttcttcgtctgtgagatggaactgttacacctaccctagaaagtgggaaaggaataagtggcagacacaccagtggacagcatagctcctggcctgtaatamattcttagttaatatttgtttgaaatacaaagtcatgctgggagtagtggtgcatctgtagtcctaactacttggaggatgaggcaggaggatcgcgtgatcccaggagttcaaggctgcggtgaactctaactgcaccatggtactccaaccgggctacagagtgagacgctgtctcttaaaaaaaaattgaatcagtatcctaaaatctaagaaaagcaaaagtaagatttcacctcactgtctccaaacacccccaaatcagttggttgaaacctgattaattgctattccataggcaaatgatgctgccaa

SEQ ID NO: 679153 - DNA, 646 bp, Homo sapiens
aggagaggtagcctccacctctttctgggaggagtggctaagtgtttgtagccatctgtaatttaccacagtgcattttccatttatgcacatacacatagstatacattacatatacatatacacttgcacatacgtagtgttagaccattcttacattactataaagaaatatctgaggtgggataatttataaagaaaagaggtttaattggctcacagttctgcaggctgtacaggaagcacggttccagtatcttctcagcttctggtgaggcctcaggaagcttccaatcatggcagaaggtgaagcaggagcaggtacatcacatggggagagaaggtgcaagagagagggaaggagaggtctcagacttttaaacaaccagatctcatgtgaacaaactgatcaacaactcacttatcaccaagaggttagtgccaaaccattcctgaggaatccgacctcatgacccaatcacctcccaccaggccccaccttcaatactggggatcacatttcaacatgagatttgaagaggacaaacctccaaaccatatcacaaagacatatataaaatttgcagaatgatgcaaataaactgtttataattttggcacgagtagaaaaggactgacatctttg

SEQ ID NO: 679154 - DNA, 729 bp, Homo sapiens
tgggcttaatacctgggtgatggtggtgggttcatcggtgcagcgaaccaccatggcacacgtatctatgtaacaaacctgcacatcctgcccatgtaccccagaacttaaaagttgagagaaaagaagaaagtaaaagaaataaaaaggtggattcctttaggtcaccttcttgcagttgtaccctaaatttagaggattcatcattgacatgcagaacacctaaacctgttgatccattcttttgggtgtaaagctttaaaaaaaagaaagtctcttacggtgttggcttatttaaaaacagatgacaaaagacacctggcttgcagttttgtctttattctccaggaccatgaggagcaattagcttttacaagttcatttccataacaacctttagcacacgatatttctggattgagttaaggatgggggcatcaagagatgacttggctctactcaagattccacgtggaaggaaggggcaagcctaktgaatgagtcacaccctgattctgttcttagctctcacttctcccactgtgtgacctgaggcacacaactgacttctctaaaccctcatcttatttctctgtaacacggggaaggatagccgctattttgtgaggttgtggaggggatgaatgggacaaattttgaaagcacacagtatctggcatgtagtagcatttcataaatgtgagctattataattttatttatttattt

SEQ ID NO: 679155 - DNA, 1167 bp, Homo sapiens
gcacagcactgcttctaatcatagactcagcacctcagaggaacagctgagcagagccttgttaaacaaatgtagatatcatgggtgtttaaaggaaacacgttactttagggaaggaagaacctgttgcattaaaaatagagctaaggtaaagagcatgtacttgtaggyttgcagggagaaaaataacaaatgaggaaagccaacactattaaaattaataggaaagatagaaaaattaagcagctggaccatggataaacagcaaaaaagccaagtgtataaaacagctcatctaagaccagaggaggcagaggggataaacagctcaccctgttgaggatgtttacttttgcatctgtcaactgaaaaggaaggaaatgaggatttgcctgagtcagaatgagtttccaaggaaagaggatgcagtgtaccacagaaaatggtggtgatgatgacagccagtcaacagaagctgatggtgacttagctggcatgctggccatgggatgcgagtgactgagggcttcagcttcctcattgtgggggacagaaggggatggtttagcaatatcctcaggcttctaccttcccatttctcccaccaatcaggcattagcatccccagtcctctggtgtcctatggttggaacccctgctcggtactccctgtcccatgcccagaaggggatgccttgctttctcatccttccagcctatgtggctgcaaaatgacacttgtaaaatgacatgcagaagagcaatgagaccaatgccagatcccagaggggtcagggagctccaccgagcttccctaacttgttcacatcctgtcacgctagctaatgatagcatttgtagggcagctggaataaacatgtgatggacccatatctagaggtgactctggcactctggctgtcccaaccccaccctgatctgaaggctgagggggtcattatgtggacccactacaacccacgggtgggaagctctagatcttggcaccccgtcctcttggctctggctgagccactcagctcttgaatcagaggcttcagcaggaggagaggctcaaatgagcccaagctgattaaggaagtggccatgctccacagaaggacagatcaatcttgattagagtattaggaacgtttcgaggatgcc

SEQ ID NO: 679156 - DNA, 1167 bp, Homo sapiens
gcacagcactgcttctaatcatagactcagcacctcagaggaacagctgagcagagccttgttaaacaaatgtagatatcatgggtgtttaaaggaaacacgttactttagggaaggaagaacctgttgcattaaaaatagagctaaggtaaagagcatgtacttgtaggcttgcagggagaaaaataacaaatgaggaaagccaacactattaaaattaataggaaagataraaaaattaagcagctggaccatggataaacagcaaaaaagccaagtgtataaaacagctcatctaagaccagaggaggcagaggggataaacagctcaccctgttgaggatgtttacttttgcatctgtcaactgaaaaggaaggaaatgaggatttgcctgagtcagaatgagtttccaaggaaagaggatgcagtgtaccacagaaaatggtggtgatgatgacagccagtcaacagaagctgatggtgacttagctggcatgctggccatgggatgcgagtgactgagggcttcagcttcctcattgtgggggacagaaggggatggtttagcaatatcctcaggcttctaccttcccatttctcccaccaatcaggcattagcatccccagtcctctggtgtcctatggttggaacccctgctcggtactccctgtcccatgcccagaaggggatgccttgctttctcatccttccagcctatgtggctgcaaaatgacacttgtaaaatgacatgcagaagagcaatgagaccaatgccagatcccagaggggtcagggagctccaccgagcttccctaacttgttcacatcctgtcacgctagctaatgatagcatttgtagggcagctggaataaacatgtgatggacccatatctagaggtgactctggcactctggctgtcccaaccccaccctgatctgaaggctgagggggtcattatgtggacccactacaacccacgggtgggaagctctagatcttggcaccccgtcctcttggctctggctgagccactcagctcttgaatcagaggcttcagcaggaggagaggctcaaatgagcccaagctgattaaggaagtggccatgctccacagaaggacagatcaatcttgattagagtattaggaacgtttcgaggatgcc

SEQ ID NO: 679157 - DNA, 609 bp, Homo sapiens
cctggactgaatggatttttctgacattgctcttacctccttgagttcagttgcttgtcatcttttctgtaccaagcactcagcccaagtcacccagaacaggcttatttggaaaatcaatgcaagtgaatcaaaataagcaagattttcctgcctcttccctgcaagctttttgaatggactataggaaagattcagaggaccgtcttcratgccctttgctaatttgggttacagacgatttatgacaagttccttccctaataatatcttacatagggcccaaagtgaagaatcggactgatgatattttcatttctgtggttcctttcagtgctctcacgacaggaactcactctcctataggactgctgagttaatgtaatgtgatcatatttttatgggtgccgaactcagtaagagagagactcaatgatgccaaaggtcaaatgacagcctgggaagacaacaccccgaacagaacataaaaaccctgtccagctcccagtggtttctacaactctcattttcacacctagctgttatctcttcagaatttccaagcaatttgtaatgattacaatcttttagataaagatcattattctc

SEQ ID NO: 679158 - DNA, 653 bp, Homo sapiens
cagtttacccagcttagagcagctttcttcaggaggagctgagcacatttaatagggcacttgtaaacaggagcaatttgaatagtttctccagcacgctgttagcatttatatgtgccccatttcatctgtaatctgcttttacaaggcgctggtgagcctttgatggcagcaatgaatgacccagacagcttcatcccaaatgttcaaactgagctgaaaatttgggagaatctaaggtattcatctctgtaaaaaatccaaacccattgaytgaaattgctcttctccgtcctgatacattagcctttccttcttttcttcttttcttccccctttctttcttttgcattttgccattaccatgttctggttattgcctacatctggagcatggcagctgtcctgtaatatgcaagctgtggcatgtaatttggagaacttgaatacatatatctgttaattaaaaaaaatacagaagcatgtttgtcagcttgtaattatgtaaagaagaacaccaactcccaaactaatttgaaaagcaaaatgaaaataactttaccaacagctttacaaaatccaacaactctacatttagctattaacttttttctgagtatcccaaagtcctttgcaaatgtctatgaagtttc

SEQ ID NO: 679159 - DNA, 653 bp, Homo sapiens
cagtttacccagcttagagcagctttcttcaggaggagctgagcacatttaatagggcacttgtaaacaggagcaatttgaatagtttctccagcacgctgttagcatttatatgtgccccatttcatctgtaatctgcttttacaaggcgctggtgagcctttgatggcagcaatgaatgacccagacagcttcatcccaaatgttcaaactgagctgaaaatttgggagaatctaaggtattcatctctgtaaaaaatccaaacccattgattgaaattgctcttctccgtcctgatacattagcctttccttcttttcttcttttcttccccctttctttcttttgcattttgccattaccatgttctggttattgcctacatctggagcatggcagctgtcctgtaatatgcaagctgtggcatgtaatttggagaacttgaatacayatatctgttaattaaaaaaaatacagaagcatgtttgtcagcttgtaattatgtaaagaagaacaccaactcccaaactaatttgaaaagcaaaatgaaaataactttaccaacagctttacaaaatccaacaactctacatttagctattaacttttttctgagtatcccaaagtcctttgcaaatgtctatgaagtttc

SEQ ID NO: 679160 - DNA, 574 bp, Homo sapiens
tgacaatgatgaaaatgagatatgttgggccaccaacgctttctgtaatcaccttaataggtcaacataacaatggatgttgctggtggaaaaaataagaagacggtcctaaatcaaaggcaatttaatatattagaagttctattgctaccccctctagggagactggattatttgggtaccttgcttggtaggcttgcattagcttcaggtgcccaacaatgaaagtaatcccttggttcaccctggaacagaaccagttctttacaaggtgaccctataatarctatccccttggtagatagcacatctcaactctggcctggaggtaattctcaagcagggatttctgcactgggaggaggccagattacaagaccctgaaggtcctttccaactctaaattgctatgattttatgaagatggcatagaaaaaactgcctcactctaagagaaccataccctttgaagcctctttttaacacacaggtaaagttttcaggactatttttatcatttggacaccgaacttcagatgagatattccaagtttcatttagcacaacatataga

SEQ ID NO: 679161 - DNA, 609 bp, Homo sapiens
gataagggcgttagaggaccccgtagatcgatgtgggtcgtcagcaaggctggagagggctcaggagaaagtgtggctggtggggctttgagggagggccacgtcgccctaggtggagagcaaaggagggctgggagaaggaaattgcccctgmttcacagccttccctctttggtgactgtaatggtggggctgggattcatttagccttttctcccactcctgatgactactaagctctgatgcttgctcagtctttcttacaggttggttaggagggtaaagtgtaggagtgtcatatactataagcccggattctatccacatgtaggggccgatcattatttgttattgtctctgatgctgttagtgccctttcttatcctctcagcagcattcaactctactggcagtctgcttggggctgctataaccgaataccatacactgagtggctgacaaacaacagagatttacttctcacacttctggaggctgggaagtccaagaccaaggcactggcagattaggtgtctggggagggcctggtttcctgcttcatagacagctgccttctggctgtatcctcacttgctggaggggcaagag

SEQ ID NO: 679162 - DNA, 961 bp, Homo sapiens
gtcaggagttccaagaccagcctggccaacatgtgaaaccccgtctctacaaaaaaattttaaaaaattactggatgttgtggtgcattcctgtctagctactcaggagtctgaggcaggagaatcacttgaacccaggagatggaggttacagtgagctgagatcacaccactgcattccagcctgggtgacagagtgaaactccatctaaaaaataaaaaaataaaaataaataaatttttttttaagtggagctttaaataagatatagaaaggcacatgtatttcatacttcattcctggttttacgtaatttaaaaaaagctagtgcaagtagaatcagaatttgaaggccttagggaatttagtctaatttgatacttccattactgctctgcggatagccttcattagattaattgtaggagtttattttgtttaatttttttaaatgaactttatattataaatatcacatgattaaagagaaaaatagaatatagcaaggtataaagtaaaagggaaaagtcagcctggagaccttgtttaaaagacagatttcttcgcttttcccccaaattgtgattcaggtggcctaggaatgtatctaggagtgtggagattgtaaaattccccaggtggacttctgcatccagattttagaatcattttttaaatgccttattttacacatgaagcaattgagtcccagagaggtagagtgatttttgcaaggtgtcattgcaaataaaagacaaaactggtggttctgtttgagggtgaccagtttgttggtattttcattatgagtcattcttttgcttgaaacaaaatctttgctgatccttgaacctggygtttgacaggtgctatatcaatatttgtaaaatgaatgaatgaatgatagaattccaaatactgaaacccaaaccatgatactggttttccagaaatacttcc

SEQ ID NO: 679163 - DNA, 623 bp, Homo sapiens
ggtgaattactgaccctcgtgccaccaaaaaccaagaatgtgtcaatccatgtccaagtcctctgaaaaaaaaaaaaaagacaaaacttacaaaggaaaaagatcgttgttaaataatgaagcaataataataactagcactgtagacatccgaggcccatccatatatatcttatggtaatactatttgggaaccttaaccagagaatgtgaaccgagattttaaatgagtgttttcatggtggcaaaacattgtgagtgccacagagttgttcagtttgaaatgaggttaattttatgttatgtaaatttcaactgcataaaaaatattttattgggcaaaagaaaagsaacatcattctgaaagtatttgcaataccataataattttgttggatttttaattccaataatttaggctcttctcttaattttgcagtctcctcaatactaataattaacattcattagctcctaatttgtagcaaaaagaaaaagaatgcttgcctgccagtgagtttatagttattgatgatccattatgcagaactgagtcttagagatttttgggccgtactcttcactctaaatgtcatcaactctttagagtaaaatccagtaaa

SEQ ID NO: 679164 - DNA, 1402 bp, Homo sapiens
gagtcttaaatataggtgttcctgcccctattgagaggttttcaaaacatgctcttaatttaacgtttaaatataccagagtcttagaatgtgagaataatgaaattggtttgttttaattttgtgataatattaaatctactggaaagaatattctcctttgaaaagattctcagctcagtgatcatagaacctgtacttgcgtttaattcaatgaggaaagacatagaaatgccacgttaatatcctcatttaggtggtttctcccttcactgatcagcctatgaatgtgtcaatgcagtactccccagtttaggcttaggtacttattgaaaggatgctgcctgagcatttttaataattgctatttcaagatcacattttggccatgaggcaggctgccactcactttaggctctgcctaggcaggaatgggtcctggaagacacatgttctctctctctctctctctctttcacacacacacacacacacacacacacacacacacacacacacacccctctcttctctctgggtacacattattctggacatcttcagtttccaggattctctatgtctccagctagaagtcagggcttagcctgtggtgatccagccaccctcaggttgaatctcgatgaagtcacaggaaccaccagtggcatggagggtaagggatcctgctatcaggttcagccaggaaatgctctggacacctgctggtggaagagtttaatgctgggcaatcacaagtcaggtcccttcttccagtcggcagttcagcctccctgactttctctgggttccagtcagtgcatgaggatgatggtgacatttattcaggggcagcacagcagcctcagtcaccaccaacagtcactgtcatatgagaaaattagatagaaattggccttccaactcttctgtcagatccatctttgccctttttctgcctgcttgagtgaatackaccaagaccagctcaggtttttgctgatgctatcacacgtgctcctaaaaccagaaggcttaatggtattttctgtttatctttacggattcaatgaaaagacaccttttcttactggtctcccaatgaaaacataatcactatgtccacagtaacaaagatagccctcgttgttgtctgctgggatgagaagagcagcagaagtttggcaggtatggccctcatgggcttcacatgtccctacatctggccctggctttgctgatcaccctttgggctctgaacccacagggaagttaggtttctctttcttttgagattgcctctggaagagctgctctgttcccaggtgcagggcagcccctccgcagtaaggacccagctctcagagccatgaaggcctcaagcctccaggttgactccaca

SEQ ID NO: 679165 - DNA, 1402 bp, Homo sapiens
gagtcttaaatataggtgttcctgcccctattgagaggttttcaaaacatgctcttaatttaacgtttaaatataccagagtcttagaatgtgagaataatgaaattggtttgttttaattttgtgataatattaaatctactggaaagaatattctcctttgaaaagattctcagctcagtgatcatagaacctgtacttgcgtttaattcaatgaggaaagacatagaaatgccacgttaatatcctcatttaggtggtttctcccttcactgatcagcctatgaatgtgtcaatgcagtactccccagtttaggcttaggtacttattgaaaggatgctgcctgagcatttttaataattgctatttcaagatcacattttggccatgaggcaggctgccactcactttaggctctgcctaggcaggaatgggtcctggaagacacatgttctctctctctctctctctctttcacacacacacacacacacacacacacacacacacacacacacacccctctcttctctctgggtacacattattctggacatcttcagtttccaggattctctatgtctccagctagaagtcagggcttagcctgtggtgatccagccaccctcaggttgaatctcgatgaagtcacaggaaccaccagtggcatggagggtaagggatcctgctatcaggttcagccaggaaatgctctggacacctgctggtggaagagtttaatgctgggcaatcacaagtcaggtcccttcttccagtcggcagttcagcctccctgactttctctgggttccagtcagtgcatgaggatgatggtgacatttattcaggggcagcacagcagcctcagtcaccaccaacagtcactgtcatatgagaaaattagatagaaattggccttccaactcttctgtcagatccatctttgccctttttctgcctgcttgagtgaatacgaccaagaccagctcaggtttttgctgatgctatcacacgtgctcctaaaaccagarggcttaatggtattttctgtttatctttacggattcaatgaaaagacaccttttcttactggtctcccaatgaaaacataatcactatgtccacagtaacaaagatagccctcgttgttgtctgctgggatgagaagagcagcagaagtttggcaggtatggccctcatgggcttcacatgtccctacatctggccctggctttgctgatcaccctttgggctctgaacccacagggaagttaggtttctctttcttttgagattgcctctggaagagctgctctgttcccaggtgcagggcagcccctccgcagtaaggacccagctctcagagccatgaaggcctcaagcctccaggttgactccaca

SEQ ID NO: 679166 - DNA, 594 bp, Homo sapiens
gtattaccaggataatattaaatagtaaaagaagtcagaggcgaaacagagcaagagacactttttttctgacagcatcattcttatgggctataatgccaaggcttgtgcagtaggagctgaaggaatctcacaggcgaccctcacgacaataaygacaataacaaaataagtcaacctctaaaagaagcccatgtagaattatccccaggtatgaaccacctggaggctcagcagaacattaagccttagattgggttcaagatgaccacagactggtgatgaccacaggcccctgggagcaacacactcacacgcctggtgatgctgatatctggtaaatcatcactgtgcatcctgaaacacattctgtgattagctctttgcagaccataactaacatgaaagaaataatgcctcagctgtaaacactgcagagaggacccactcattctactcccttaggtcatgagttgaaagatccatttgcaatggtcaggatgtccttccagaagagctgggtctgttctgaggggccacccgacttgggatcggagcccagcagggggtgctgttggactgttcctgagaggg

SEQ ID NO: 679167 - DNA, 594 bp, Homo sapiens
gtattaccaggataatattaaatagtaaaagaagtcagaggcgaaacagagcaagagacactttttttctgacagcatcattcttatgggctataatgccaaggcttgtgcagtaggagctgaaggaatctcacaggcgaccctcacgacaataatgacaataacaaaataagtcaacctctaaaagaagcccatgtagaattatccccaggtatgaaccacctggaggctcagcagaacattaagccttagattgggttcaagatgaccacagactggtgatgaccacaggcccctgggagmaacacactcacacgcctggtgatgctgatatctggtaaatcatcactgtgcatcctgaaacacattctgtgattagctctttgcagaccataactaacatgaaagaaataatgcctcagctgtaaacactgcagagaggacccactcattctactcccttaggtcatgagttgaaagatccatttgcaatggtcaggatgtccttccagaagagctgggtctgttctgaggggccacccgacttgggatcggagcccagcagggggtgctgttggactgttcctgagaggg

SEQ ID NO: 679168 - DNA, 594 bp, Homo sapiens
gtattaccaggataatattaaatagtaaaagaagtcagaggcgaaacagagcaagagacactttttttctgacagcatcattcttatgggctataatgccaaggcttgtgcagtaggagctgaaggaatctcacaggcgaccctcacgacaataatgacaataacaaaataagtcaacctctaaaagaagcccatgtagaattatccccaggtatgaaccacctggaggctcagcagaacattaagccttagattgggttcaagatgaccacagactggtgatgaccacaggcccctgggagcaacacactcacacgcctggtgatgctgatatctggtaaatcatcactgtgcatcctgaaacacattctgtgattagctctttgcagaccataactaacrtgaaagaaataatgcctcagctgtaaacactgcagagaggacccactcattctactcccttaggtcatgagttgaaagatccatttgcaatggtcaggatgtccttccagaagagctgggtctgttctgaggggccacccgacttgggatcggagcccagcagggggtgctgttggactgttcctgagaggg

SEQ ID NO: 679169 - DNA, 594 bp, Homo sapiens
gtattaccaggataatattaaatagtaaaagaagtcagaggcgaaacagagcaagagacactttttttctgacagcatcattcttatgggctataatgccaaggcttgtgcagtaggagctgaaggaatctcacaggcgaccctcacgacaataatgacaataacaaaataagtcaacctctaaaagaagcccatgtagaattatccccaggtatgaaccacctggaggctcagcagaacattaagccttagattgggttcaagatgaccacagactggtgatgaccacaggcccctgggagcaacacactcacacgcctggtgatgctgatatctggtaaatcatcactgtgcatcctgaaacacattctgtgattagctctttgcagaccataactaacatgaaagaaataatgyctcagctgtaaacactgcagagaggacccactcattctactcccttaggtcatgagttgaaagatccatttgcaatggtcaggatgtccttccagaagagctgggtctgttctgaggggccacccgacttgggatcggagcccagcagggggtgctgttggactgttcctgagaggg

SEQ ID NO: 679170 - DNA, 1191 bp, Homo sapiens
gcatggggtggcaggaggccgcatgcttcagctccaccagctcctggaagacggggtcacaaaagacgcagcccatgtgctgcgcctcatcgcccgggagtggggacttggccttgttgaagtccacatcaagcaaggcggcctcacagacactgcaggtgtcggcggrcacccgcacgcggtgggcgttctcgaagcagtgcgctaccacgttgcacttgttgcaggccaccttccacttggggcccgaggtggggtccagcaccagcaccccgctctcacattccacgcactggccgatgcccagcatgctcagcgagtgctggcaggaggggtgcgtacactcgttgcagcccatgcctggcgggagaagggagccctgtaaaggcacgcccactgtgcccacctgccctctgctgcctgctcccaatgcctcaagctcctggatccctcgtcccagcagaaggaactcttcttggccttgctcttggggacagccttgctcatgtttcggctcctggctgccattacccctgttttctgcttacctgaaacctcctcaactttcaaggcccctcgctggcgccatcccagtgggtttcagctgactccatcccccctttgctttgctgccagcttgttactggtaatgccacatgaccctcatgtcactgggccacatgggaccaccctgtcagctactctggcggcagcaggagggcagggatggggtctcactcccggggcagcctgggtgcagactgaggcctgagggggctttctgcagagcacacggtgaatgtgggcagatgcctcactcccgctgattcctggtctggctcggtgctctgtcctgcctgcctggacatgcgctccctcctccagtaatgaggacgaggatgaggatggaggacagtggtggacgctgactgggggtgcccgctcaccgggtgggtcccccgactgctgcatcctcttgctgactcagctccagagggagcactgcacacctgcgcccaggtcctgagggtggactagggttgcctgctcgattctgacacagagagagggtggcaccactggctgaggcctaagcagtgccccagctacatccagggtctctcgtctcagtgccaatgagtgcaggaaaggccagggtgaggggtcccctcagagtccagcctggtgcaa

SEQ ID NO: 679171 - DNA, 1281 bp, Homo sapiens
tgtaaccaccccattcccatataagatcccattttgaggttctggggctgaggacttcaatatcaattcggcgggggggagcctacaatgtaaatttgtaacattgtctctgtcatgggccagctgtcaatattccctgaatatccaggatccacccatgctctctggccatcaccagagtgagcaaatccctgacacatggataagagttgcttccatgggctcccagccaggctggaaattcttgattcatggaatcaagaatctttctccagtgggtggggctaaatgcagctgcctccctgacagtctccctgggacactaggcttatcagcttttctcctaaagctgcaggtcctgactgtcctgagccccagctctgctgtggtctttgcatcttaagatcttattcaactcgcttttgtgcctcagtggactgacttacaggaaaacagtgggagatgcccctgctctctctccccagggtctcctcccctcagtggcacaagacctgccctattgactggcagtccccccatgcccatctcaacctccacactgcccactgtgcacggtcacaggtcacaaactgattgttcactttgggcagatcaccttgacagtttctgcagaactgggtgcttcttcccagaatcaggaatttacaaacaaggccagttctagagatgcaactgggagagtaatgtgcatcacagcgaatctggacaagacaaagtggttttgctgtagttctcctggaacacattctggtgatgtgtccatctcccaggatagtcttagcaagttacatccaatgctgcatcaggacccacaagaaaaggaactggcctgcatgagtggccggcagggtcctgggaggagaccctgagatgcccagtgacaggaggagtggattcttaggttggtaagcgtgtggaggaactgcgagtgatgtgctcagccaggtacaggagcaggcgtattggtgacctgtggcctcatcttatctcagttgtctctttagaccaaactccaggaaatcagcacatagagacttctgtctgtctccgagatcatcgcaggacttcacacgtcttttctatttataatrcaacatcatgttgtgattgaattactttcatcacagcctcaacagtcctaggtctgaaaactaatacatatacttagaatattaattaaggaatactttcttgtcaattatgtttattaaattaaaagacttcagtatctagtgttacagctgtcctaattcaacagcc

SEQ ID NO: 679172 - DNA, 1297 bp, Homo sapiens
tctgtgcagggacttgacccctgtcctgctagctttgcactgaggcaagttttgtccatgcctagtagtgccacatctttactagatgaggtttctaaagagcttggcatggaaggaaagcctggggggccttagaagccatcacttaggaactgggagagctccaggcaagccaccttatctctttgggcctcagtatcctcactcacatccccatggtcagtagagtgccaagcacatggtggacacgcagaagtattgatcatcttcctcacctcccctaggagagcccttggaatccccatataatattctctgaagacctcaatccaatgagccgagtaattgactcggtagcaaactcatggaaaggacattagaagccaaaaggaggtagagtatgtcccagtacaataaccagcctctgatctcaaggaagaaagaacagagctgcaggtgagaagtgtgcgcctcaaatcaccaaagtgagagtggaaggagcacccaccagtcccttggaggcgatccctaagaccggtgagaatggcttcgaaaaatgtgatcgtcctcaaccccacagtcttgaacctaacaggagatcttgaagcctgaaagacaccactttaggatcaacagcagatctgtgactttccacagcaggcacacagaaccctagagttagtcgaggttggacataggaagggcttccaaacacacagagaaattcatggatcctaaattataaagggaggttctttaaaagaaccaagatgattctgagatttatcctgagctttttttttttttttttttttggatgcagagtctcgctctgtcgcccaggctggagtgcagtggcgtgatctyggctaactgcaacctccacctcgcgggttcaagcaattccctgcctcggcctcctgaatagctgggattacaggcgcctgccaccacacctggctaatttttgtatttttagcagagacgggatttcaccatcttggccaggctggtcttgaactcctgatctcatgatccacccaccttggcctccctaagtggtgggattacaggcgtgtgcccaacttttcctgagccttttgaggctgacaccagaggtagaagcccagcctctccccactggccatgtggggagaggctccagcctgcagcaaccagggatctggcctcaagtgatgccccaacagtgggcgacttcccagtactgttaggagaatcccaagtctaattcaaagttgattttttactagcaattaatgatagacatggtctccat

SEQ ID NO: 679173 - DNA, 632 bp, Homo sapiens
cacttttataccgactgattacaaagaaaaacagattgaaaacacacacatacacagaaagcttaactgttgttctatcttcagtagcagcagcaccagcaaccttatcaaataagcaacatcttcagggttgtcttgaacagttctcatcacccatcaagtttgctggctgatcctctaatttgtattctcctccgtgcctacgggctgctgataccaacaaatttttttttaraaagttatctttttgcattttaagctttacagtttgttattaggacagtcaggatacttgctgaatgttcacatgtataaaatgtgaattttaagacttcacaataaaacactgaatgaattactataacgttatatttagcaaacattgtttacattccatatgtagaacactttacatcttagtaaaggggaagaggaacaagagcaataaaagaagttgaaaaatatttgctgctattcatcagtcaaattaaggaactgaagtacaagcaatcaaatagaatggaattataaaagatggtaaagctgcaagacattaatagaatagatgcttgctgctccaagtgtggatcatggaccagcagctttagcatcaccttggaggttgttagaaa

SEQ ID NO: 679174 - DNA, 1531 bp, Homo sapiens
cctctgtagggtggccttgcctgctttccccctaatgctcacatctccagggtcgccgacaggagaatggctgccgcgagactctgagtgccacctctgcatgtccgtgaccacccaggccgggaacagcagcgagcaggccataccacaggcaatgctccaggcctgtgttggctcctggctggacagggaaaaggtatgggctgggcacatggggactcatggtcagggcccgttcaaggcagaaggctgagcccaggaaaggctttgcagccagagacacctaggatgggccagaatggagcacagacaggcagacaggatgtggggcagacaatggtgggactgtaagttagggcagagcctgctaagggttaggagtcgcctctggacaaagggctgtgggctccagaggaccagcaggccctcttcacgggctgagtgagcaccaggcaagccttcagaggcctggttatctaccaggagatgagtaatgctagggccagttcaagccaggaaagggactagccttctctccagggtcctgatccctttactgcccccacactcctcaaggtgtgactcactcaggacaaacccattggcaaaaggagagggctggacttgaaggtcctagggcccttgccaatactcagtcaatgacaggaaattcccttttttttttttttttttttttttttgagatggagttttgctcttgttgcccaggctggagtgcaatggcacaatcttggctcactgcaacctctgcctccgggttcaggcgattctcctgcctcagcctcttgagtagctgggattacaggcatgtgctaccaggcccggctaatttttgtatttttagtagagacaaggtttcaccatattggtcaggctggtctcgaacccctgacctgaagtgatctgcccgccttggcctcccaaagtgctgggattacaggcataagccactgcacccggacaggaaattcccttcttaaagcgagatcctgtcctgaggaaagccagctgatgctcttcccaggaggcagctgtccacactgtgctccctgctcagcaactcccaagcctcccgactgcccatcacatctggtctcaaggaccagatgaacgttaagkttccttctagaactgaaatggaggtggagggaggggagggtggtggctgagattccacccctctgcctgagtcctccgtctccagtgtcgcctgcttttctgatggaagtcctccatttcagcctggctccagtttgttaagggtttcaactgcagccagaggtgttccgtgagggctgatggaggagtcgggagggagccctagagtgatccagagatgtggagaggcccaggaccacacgacaggagagtcctgcaaagggacctccacagctgtgtgtctccctcagtgcaagcaatttgtggagcagcacacgccccagctgctgaccctggtgcccaggggctgggatgcccacaccacctgccaggtacacccaacccctcccaa

SEQ ID NO: 679175 - DNA, 823 bp, Homo sapiens
ccagacaatatcagcataaatgtcaaaattaccatatgtggtcaacatatgctgatactgtgaccatatgctacatgggacttgttcccttaattgtgaataagagaactattcgtgtaggtgttattatccccaattttataggctcagaaagagtaatamttggtccaatgtctcacaactgtatgtttcatggcaaagattggaaatgaagcaataacttttttctagtaaaattacaagaatgaccttaatttctttctaagcaaacgtagcgtatcatcacaacagttatgttaaatcagctcaataatctcctagaagaacatattataatattcattagaggtggtatgggctttaagagggagaaaaaactaggcaggatattgctatatgtgaagtaccatgctagatatttcacatatggtatttcatttcatccataccagcaacccaaaattatgttatttatccctgttttactaacaaagaaattgaagtttaaggagggtaagtgcaggatgaacactaagccaattgtagagctggcttttgtaatcagggattttatttaattcgatttgctctactatcatcatgttgaattaagaatggcaaagggctgggtgcactggctgacacctatagttctagctactcgggaaactgaggcaggagggttgcttgatcccaggagttcgaggctgcagtgagatatggtcatgccaccgaactccagcctgggtaacagaatgagaccctgtctctaaaaatttaaaaaaaaaataagaaattttcaaaaaagaataaaaattaaaat

SEQ ID NO: 679176 - DNA, 823 bp, Homo sapiens
ccagacaatatcagcataaatgtcaaaattaccatatgtggtcaacatatgctgatactgtgaccatatgctacatgggacttgttcccttaattgtgaataagagaactattcgtgtaggtgttattatccccaattttataggctcagaaagagtaataattggtccaatgtctcacaactgtatgtttcatggcaaagattggaaatgaagcaataacttttttctagtaaaattacaagaatgaccttaatttctttctaagcaaacgtagcgtatcatcacaacagttatgttaaatcagctcaataatctcctagaagaacatattataatattcattagaggtggtatgggctttaagagggagaaaaaactaggcaggatattgctataygtgaagtaccatgctagatatttcacatatggtatttcatttcatccataccagcaacccaaaattatgttatttatccctgttttactaacaaagaaattgaagtttaaggagggtaagtgcaggatgaacactaagccaattgtagagctggcttttgtaatcagggattttatttaattcgatttgctctactatcatcatgttgaattaagaatggcaaagggctgggtgcactggctgacacctatagttctagctactcgggaaactgaggcaggagggttgcttgatcccaggagttcgaggctgcagtgagatatggtcatgccaccgaactccagcctgggtaacagaatgagaccctgtctctaaaaatttaaaaaaaaaataagaaattttcaaaaaagaataaaaattaaaat

SEQ ID NO: 679177 - DNA, 620 bp, Homo sapiens
ccctgcccccagtgtccctgcccctgccccagcacaggtgacttcatttctgtcctctcagctcagtggactcgctcaacttttgtataagtctccacttggtggcagcagcttgctgatgacttgttttaaaactttcatcctaaataaccttttgatacttgaatatttgtaagttttatacatagtttctaatttttttccgaacagatccagatacctaataagatgctggratgtaatccctggacaatccgtgtcctggcagcatttggtcttcctctaagcgcctggctccgctgttctcaggagtgggttctgaagtctctggagaacaggatacgtggagggttaggaaggggccaggcctagagacgggagactccctcccggagcaggtggaggcacaggaccattcgctaccccatctgccgacacctgcgggggagcccaggcattctttgtaaaccctcctgaccacctggctcaaagaaaacagaagcatggagaccgccaagtattttcaagaaataaccccatgaatattccatcacttttttagaaagaggggcttggggcaggcagaggagagaagggagagcaaactgagagccaagttt

SEQ ID NO: 679178 - DNA, 620 bp, Homo sapiens
ccctgcccccagtgtccctgcccctgccccagcacaggtgacttcatttctgtcctctcagctcagtggactcgctcaacttttgtataagtctccacttggtggcagcagcttgctgatgacttgttttaaaactttcatcctaaataaccttttgatacttgaatatttgtaagttttatacatagtttctaatttttttccgaacagatccagatacctaataagatgctggaatgtaatccctggacaatccgtgtcctggcagcatttggtcttcctctaagcgcctggctccgctgttctcaggagtgggttctgaagtctctggagaacaggatacgtggagggttaggaaggggccaggcctagagacgggagactccctcccggagcaggtggaggcacaggaccattcgctaccccatctgccgrcacctgcgggggagcccaggcattctttgtaaaccctcctgaccacctggctcaaagaaaacagaagcatggagaccgccaagtattttcaagaaataaccccatgaatattccatcacttttttagaaagaggggcttggggcaggcagaggagagaagggagagcaaactgagagccaagttt

SEQ ID NO: 679179 - DNA, 898 bp, Homo sapiens
tgggcatggtggggcgcacctgcagtcccagctacttaggaggctgaagtgggagggtggcacgtgcttgtaattccagctactcgggaggctaaggcactagaatcgcttgaacccaggaagcagaggttgcagtgagccgagatcttgccatttcactccagcctgggtgacagagcaagactccatctcaaaaaaaaaaaaaaaaatcaccctgttaagtataagctctgacaaatgcatagtcctatcataatcaagacatagaacaatcgtagaatcactctaacagttccctcaagatcaagatcaagaagtcaaccccttcttgatcccaaggaactcattgacctgtttttctgtcaaaagggtcaaatttaatcactaaaatgatctacagtactatggaaaaatttgtaagcatagaaaacacacaaaccaactmtttttaaaaagtaagatattttaaaagtttaccataccaacagaatgaagatagcttcacattttactacagatgtgcagatattcatcaaagtccaccattgtcatatatatggctcaacagtaatatttaagaatatactggccagggccgggagtggtggctcacgcctgtaatcccagcactttgggaggctgaggcgggcggatcatgaggtcaggagattgagaccatcctggccaacatggtgaaatcccatctctactaaaaatagaaaaattagctgggtgtggtggtgcgtgcctgtaatcccagctactcaggaggcggaggcaggagaatcacttgaaccagggagtcggaggttgtggtgagccgagatcactccactgcactccagcctggtgacagagcgagactctgtctcaaaaagaaaaagaaaaaatactggcc

SEQ ID NO: 679180 - DNA, 651 bp, Homo sapiens
gggaataccttcttccctagaggtctggaagagtgcggctctcatctgtgtggggtgtttagctgtcagagttaaggcaaaggaatgttctgaatgaccctcagggccttagtaatcagtcatgcctatagtttcaagaaagggggcacaggaggctgattggagaccagcccaggccctacctttgccctctccctcccacatctcatctttcccttgcagcctgtccagggggctgagccccacccccaaatccctggggcatccagaagattcctgactggtcaagaaccagaggcaaaagagacctggaagtcccagcatggggaccagaaccccccagccagcctcatagttgggaaagtagccagcttgcctgccccatcaattgcagggatgcttaaggaaggccccgcccagtatgaaagctgaggattgcctctgctgaccctcagtctcctcccctgccctctacatctgccctcagctgggtccatcatgcaatgctgagcactggggtgagcctgggggcagcctgcctgctgacagggcgagsattgtggggatcatgggagtgtttgtgagtggggctcctgggtgagacctagcccccacccccacagagctcaagggggtggggggctgaggata

SEQ ID NO: 679181 - DNA, 614 bp, Homo sapiens
tcattttaaaaatgaaagcgagaaaatgcaaatttttgttaattcttagatcgaaggatgggcatacgggacttattacattttcctctttggtgcattaaaattttattacttaaaataattactctaaaaatgtactctaaaatgtacttttaagacatcaatgggttgccccctgaagtttggaattctataagttactagaatactggaattctagaatttactagaaaataaggaaatcattattgtctatggctgttgtcacacttaattgtgatagcttatttttttaattgctcctttgacatcatttttaattgacatataatagttgtacatattttgggggtacatgtgatattttgataactgcataaatgtgtaatgatcaagtcagggtaattggaatgtccatcatctaaaacatttatcttttctttgtaytgggaacattacaattctcctcttctagctattttgaaatatacaataaattactgttaactttaattttcctactatactactgaatactagaacttattactgctatctaattgtatttttgtactccttggccaacttctcgtcatccctctcttcctccttgt

SEQ ID NO: 679182 - DNA, 1331 bp, Homo sapiens
gatcagcttggtgggatggtgagggccgaggaggggaaggggctgttgaagtaggtgggtagcggtcagggtgggccgcactgaggaggtgactttgagcagggacttagaggagcaagggaggcagctaagcaggtgcctgggggtgcattcctgtctggttcattctgtggagagggcttacccgttccctcactgtgtttcccatcagggaatagtgcccaccagacacaggtgatgaagagggagaacagtaagtaacaggaagcagtgccgtgggctcctcccacagccggggaggtggagaccgagagagggtgctcttgtggaaaggcggctgctggccctgcacagactgagagcagcggccagcggctgtcctcgaaagggcagccagtcaacaccctgggcttggtggcccctgtggtctgtagcagctaatctctgccattgtggcccagagcagccacagggaatctgtataaaggaaaacacatagttgtgttcccataacactttatttacaaaaatgggtgggcaggattggctgatggtcagtttgctgacccctgatctagatgaaatgggtcctagcagaggaagagtaagttcagagaggggcactgaggcaggagaggtgtggcatttaaggaacatttaagcagcgaagtaaaagtgggaggggccatggtgagtgacgagtctcggcctcttggtcagagaggcaggaagggccaggcccgcaggagccgtcagcctaggcagggcctgggcttttatgctgggcatgattagaagcaattggaagtgttttcgggctggtggtgttaaaatgatgtgattgtcacagagtctctagagccagcgtgtggagaaaggaccgtggggtctttgtccacccactgatggacagtcacctgtgagcccggccagtcttcagcgtctctgtatccagggctgagcagcgggtgggagagtggctggggctgggtgaatgaatgttgttgttgtgtgtatctgtgggtggctcttagcatgcggatttgtccccaggtcttcggtgacttgggatcacatggctctcctgagcagtgtgggacctcaggttaggagctggggcttggcttgagtttgccttcgtgtccatgygactctgggcacattaaccacgtttcctgagcctgtctcctcgtctgcagatagggacagtgacggccttctgtgattagtgggattaaagcagcactgtgtgaagcacggagcgtggtgaggacccagcccttccttagttcacctgcgggtatggcaattcgggggcaaagaaaaagaag

SEQ ID NO: 679183 - DNA, 478 bp, Homo sapiens
ccaggaggcctcaagatacccaggcyggagctcagccttttatgtgtgattgtctaattacctccctttcattagacaacaaaccccaagagggcttcaccctgagttctacttccatcccaactcctaacagtttgctgaagataaaactttaatatgtttcttggctgaattaaaattttatatatttctgtaatttgttgaatatatattaaggacctgtaatttatctgatctaccttttaaaaaataataataataagagatggggtttcaccatgttgcccaggctagtctcgaactcctgggctcaagccatctgcttagtccccccaaaagtgttgagattacaggcatgacccagcccctgagtctgatgtacccggactctactaaaaatacaaaaattgcccagcacggaggctcacgcctgtaatcccagcactttgggaggccaaggcaggcagatcacctgagg

SEQ ID NO: 679184 - DNA, 1315 bp, Homo sapiens
aagctgctttatgtgtgaagggacattgtgcacaacctgagcctggctgtcaggttatctgacgttaggatctggggtttaggggaaaggatgcctgcgtttgtgcttccccttgcgggggagttgcagactggctctattgccagccagctcgcacaccatcttcccgtggagagagtgcagatccctgaaaggagcaggcaagaaggggccgggtataagcctgaccaaaggtgggcccttggacttaggtggcaagtggtaagcatgggcggggaaggcgtgagtgactgtctgtgtgtacatccgtgtgtgtgtgtgtaggggcactgagaataaagtgtgagtgagggcttggagctctggaaatctcggcagttctttggtggctggggctgcagttgctggagcagtaggtgggctggaggttcggctttgggtcttatcacttggcatgatgcgatgatggggatgactaaacaccccttggagccagttctgggagagacctaggagggaaaggggcttttgatagtgaggtatgaaattttcagccttcataactaaaaatatgcttggcgagaatagaaattcatctcccaatttcacaagccaggtgctccttgaccatgagagagctgaaaggaatgtgaatgtaaatcttctgttcctttttttttttaatgtatagatcatgtatacaataaggtagattatcaaacatgtacagcagaaggctcatttcagatcagaagttctacattcagtgagggtggtagaaatgaaaacattttattcattttgcatgttgcctatattttctaattttaaaaatacacatattgcttctttctgtattaataaaagcttattttaaatgaccgtactaatacagtttgtactgtggttaaaatatacatgaccttgaccatgagagagctaaatcttctgttccaaccgcctcattttgcagaggacaaygtcaaggctctggcctgtggaatctgatggctctgcctgaggggaggggtgttgacaacacacaagacagttggagttgtgtagccttcagaaagccctgtgtgctcatggcctgagttttcttagctaaagtttttgaagttgaaaaaacagccacaagccaaggtcacaagtagagagaggtttttttgttattgttttttgtctttctggatgtgtgagaattgcatatttccttagggcagcctctaatggaatttagtttgttgaggaggatgttagattctcaaagctgaaggaggagcaggaatattatatgcatgtcttttttttt

SEQ ID NO: 679185 - DNA, 2172 bp, Homo sapiens
cagtgtctacttaactaatcatgtacttttctagccagaaagacagtacttgtagggtacgttccattttaatgcacaaatcattgttgcttttcaaaaagttatctttttttccctggccacacacagcaccccgaggcctggccagcccccatgccagctcaagagcatgaactcttaccggaatgggttctgtggggagtacaaagtcaaacataagtaggcttgcattcagagctcactgcctagcgggaaaaaagacatatgcactcataactctaatttaacacggcgtcctagaaattccatatccatcttcaaagttctctggaagcaaaaagacaggaggaaagacatttttagaaggaggcttcctggaaggagtgacttcagtttcaggccttaaaggagatgtgagtttccacatgcaaggagggaggaaaagcatgttgcagacagacgaagcaagtgtgtgagcaaaggcctgcggggtgacagggaggggtgttgggaggtgtgtatctggatgaaggcaggtatggaaagtgctgggaaaaaaggtctgggaaagggccttgggggccaggtgataaggaagttgaatgcctctttgaagagtggggttttattttatgtgcctttggtggggagttgtgaaggtttttattcaaaagagcagtggggctgggcacagtgactcacacctgtaatcccagcactttgggaggccaaggtgagcagatcacgtgaggccaggagtttgagaccagcctggccaacatggcgaaaccccatctctactaaaaaatacataagtaacaaaaattagctgagcgtggtgatgcatgcgtgtaatcccagctatgcaggaagttgaggcacaacaatcgcttgaacctgggaggcggaggttgcaatggcctgggattgtgccactgcaccccagcctgggcgacagagcgaaagagactctgtctcaaaaaaaaaaaaaaaaaaagcaatgggaatggttcttaaggaatatttctctgggcacactgtatgttctcactgaatatttggtgtggtttgggttttataccagttacgatatggggcttggtatctctgagcctaaaatctgtgctttccaaggacagtagaaatgctagtgttcactttgctcagtactcttccctccacttggcactcatgctgcttctcaagccttggggtgtccctggttctggagtccctcctacccctgcagcccttttctaagctatagtctcacccctcctctgcaggctcccaggcagcctcacctcctcctgcagagggatcagctgtcaccctgctcctccctcctggccctcagcctaccctacccacatgcattcaccatcttaccagtggaacaggcgtccctcycctgtatacagaggtcccttcccctgagctcttctgcctcagcctccccagtgggcttctcccctccttcacagtcagcctctttctcatttgcacctagttccattccatcttcaaagaagcccacttggattgcacatctctcttcactaccacaaatctggttcctcacagccaagttctggaaagagttctccacatggtgtcctcctcctcacctcccattagcgcctcaaccctccgtgatctggtttctacgcctgctgcccctctgccctggctgcagtccccagatgccgaatccatctgccatctgctgcccgaaactctcctggcttgcaagataccactgtcctctgacttgtccccggtcttgtcccctgctgttccctcctttaagaatacaccttttctaaattgcctgctgcctaaatgttttcctctggaaaactcacctactccagcggcttcaacgatcatcagtgcgatggggacttccaaatattttttatctctagcctgggcctttctcttaaataacagatgcatgtgtacaactgcctactgggcctctttacctagatgttgtacagttacctcacattcaacaaagctgaatatatcccccgccaatccatcctctgtgggatgagatgggcgggcccctctattcatctagtttcaggaatcaggagcttggattttgtcattgactgcttcctccacattgaattaatctcttaagttccatcaattctaccc

SEQ ID NO: 679186 - DNA, 654 bp, Homo sapiens
ccagtgataactgcgggacttcacactggggaagaaacagggtgagcactgcctcactgaagacaagagccgatgcgtggtgtgccccaggccctccgctcaggagcagattcaggcactccgcgaccgtcgccaccttgcccatcaatgaagaaccgtgctgccatcaacactcccttgcccccaaccaaaatccattgtgactctacagcatcaaaaggaggactgccacactcatatggtgctgtgcaaagagcactcttgtggcagcaagagaaggagacctgggtcctgggttctgatttaccgtggcatctgagctactgctgtctatgcatccctgaacctcagcttctacacatggaaacaagtcactgactcatttttctctgtaacaaacaaatgttaacccttggctatacatttgggaaattaagtaaaaattacttaaaactccagcattggtgagtaatacttctctgagctgatggcataactcaaaactttacccatacaagcctgtctgaggctgctctctcatgatgccaacagtactgacttgagacacacacagctccaggatactgaggtatcaagaggcgagtgaccacacgaaccatgagctmcaacattcaagtttgggaagaactgaac

SEQ ID NO: 679187 - DNA, 1619 bp, Homo sapiens
ggaaaggaatgagagaaagtgcgtcagcaggccttttgtaggtaccaccggcctctgcctgagaggtcggtctcagtgagggccctgagcttgcctgccttgcatggctctaaggtctagggggatccccccttcctgcttgtcttccttgtttyagaggcagacacgaggattggtcaagagcagttcaagacatttgctggaggacgcagctgggaagtctcccgggcagtgtcctgttctgagagggctcctgggtgggctgtgcccggtaatgaggatgggggcatgctaaatgccagcaagaagagccccagtgagaagactccagcatttgctgaagggcagctctatggcatggaacaaagggtcaccgaagctgctggctctgctccctctggctccagggctttcccagaaagcacttgaacatgggagggtgggtgatatgacgtgccgctccattaatgtaactctgatggcttggcagaacccaagccgaaactggtaatcattgaccctttgagggtcaatgatacccgtgggcatagcaacggagtcaacagaaatgctggctcttccactaatcccctagagcctggctcttctcacctcctttctgagaagcaggatgctattgcagcctgcacagtagcaagagcagcccaggattaaaggcctcacagatagggacaagattgcctcctttcattcaatgcatggcaggagcttgaaggagaaactggagttgcacgtagtatgactcaaggtattaacagcttgatcacgttctatgtccaagtgtggtctaagctctttccatccatctgtaagatagatataaaagcccccatttttcagatgaggaaattgacacactgaatacccaatgttagagctagtaagtgactgatttcagattcaaacactggaaacccacttcttaaatcttaccccataggccacttgttgggactgggacagagaaactcaaacacgctaaggtgtgggcctagaaggcatccaaatccctctccaaacccaagcacgtggtgctctgtgccttagatcttgtgtgtctgtggaagctgggctacaccagccttctttgcctcatgcaacataatgaatactagtctccgagtgtccatactgaagacattagttgaattttttccattttataaattgtcaaggttgggcatcctatatgttttctttaaaacaaagtgtacattcttgttgcagacgctcggtaaagcatgttcaggcctcccgtccacatggaatccattcctttctggtctggaaagactgagttgatttaataccaacccaaaccacacagaactagaagggtcagactaataacagatctctgcacacataatagctacaactttttaataaacactggaattccttcattaaactccagtgccatttgaggtgggtggctgaatatgagacttaagaacagtttcattacagatttatccggtttttagaacaaccatctcctcctcaacacacacacaggataaacaagtggaagaatgattatttgatttgcaaaaattattcttcactttataaaataatccactataggattccta

SEQ ID NO: 679188 - DNA, 659 bp, Homo sapiens
ggacttgcataggatctgggcatgtttcaggtgatgyggcgggggaggcttaaggaagcaatgctttgctctggattaggggctgttagggagtagtgatgattctatgatcaaatatgttgataattcttattatctaggtgagaagactgacatgagactaaagctgttctggggaaagaaacagcagacactcatcaggatggggggatattcggccattttgtggcttggacaatgtttgtgttttgttggtgttcagacatgattacagagtggccttgttttatcccaatccatcatgatctgagtggcctggtctgaggctgatgatttgtgagattgcttgtgtttaacaggagcaagacccagcctcatgtgccaggagaaccaagacctcgccggtagtacgaggtcaccttccagtggcctgcttttccacagatccaatcctagttaatcctaatcctagggtgagagaagaacagcatcaagcctcggtaccgtcgctcagttcagccttgccaaggataattctctccctctatcctgttcccacctctccaagacaagtcttttgccctgattatagagaaaacctttataaaacatgtttgtattttccagatcttctgttgcgcactgggaggatgggctct

SEQ ID NO: 679189 - DNA, 1399 bp, Homo sapiens
gcggtaacagccatgcctattttccctttcccctctttgacatagtggctgtttgactgctgagcaggctggggtggtaagtgctgtaagaaatcccaaattctgaatgaattgttctcaagtggatgtctgtggaagaagagcttctgcacctgggttcatcagattcagtaaggaccacaaactgttggtccctcccttaaaatgagcacatgctgattaaagtagatgttgcataaaaatgaagcacatatttttatggagaaaaggaaattcaggaagaaaatatgtttactttcaagaatttgaagggctgttaaatggaggagacttaagacttatttagaattttaatgagatttctctgaagcacaactagaacaatgttctttataacagtttctcctttcgttctatgaaaaaaacctgtcaaatggtacaccaagtgcagagtccgttggccctagcttgcctttgcagcccagtgtctcactgaggctttctatgctccattatttgcttacttggaacttctttcagctcccccatgttttctttccttggttgcccctgcctgggtcacacagaagactaccctgtagtgtggttagtagtgcacacacaagacatctccattagagtgggagccaccagatactatgtgatataagtgacagtaagctcattgattttatattctcattgattaatgtatttatcatcattcagcaaatatttatagagtttctactatatgtgactctaactcatcttcagggcttggcctcagggttacagttctgctcatcaaaataggtgctccccagagtgctcccactgtttcatatcctgtcattcatcactggtcatttcatagattattgacacatttgcaccaccctctctgctgaaatgggagttgcatgataacaaggactgagtccattacttctctgatgtctagcacaatggtcagcacacacagtcaacattgggtatcaacatatcatcattgaatagtgattgataaataaattaatgtatacataaatgcaatgagttttctgccagttgaagtatggtttgcaaagaaagggtggatccccagctgatggggatctttttaaaaagttattctttttggcattataccaaccatgctcggttgtggttgatttccttagttcacttccccattagactatgaactccttgagaacaggaagagttctatttgtctttgaaatcctagcagmacaggcacacaatcagtgtttgggaagtgcacaaaatgtctattttctgagaatggattgtttatagaacaagaatgctgaggcactaaagaaaaagtggcagtaatgtaatccgcttgttttgccaagccactaaaaatacc

SEQ ID NO: 679190 - DNA, 1399 bp, Homo sapiens
gcggtaacagccatgcctattttccctttcccctctttgacatagtggctgtttgactgctgagcaggctggggtggtaagtgctgtaagaaatcccaaattctgaatgaattgttctcaagtggatgtctgtggaagaagagcttctgcacctgggttcatcagattcagtaaggaccacaaactgttggtccctcccttaaaatgagcacatgctgattaaagtagatgttgcataaaaatgaagcacatatttttatggagaaaaggaaattcaggaagaaaatatgtttactttcaagaatttgaagggctgttaaatggaggagacttaagacttatttagaattttaatgagatttctctgaagcacaactagaacaatgttctttataacagtttctcctttcgttctatgaaaaaaacctgtcaaatggtacaccaagtgcagagtccgttggccctagcttgcctttgcagcccagtgtctcactgaggctttctatgctccattatttgcttacttggaacttctttcagctcccccatgttttctttccttggttgcccctgcctgggtcacacagaagactaccctgtagtgtggttagtagtgcacacacaagacatctccattagagtgggagccaccagatactatgtgatataagtgacagtaagctcattgattttatattctcattgattaatgtatttatcatcattcagcaaatatttatagagtttctactatatgtgactctaactcatcttcagggcttggcctcagggttacagttctgctcatcaaaataggtgctccccagagtgctcccactgtttcatatcctgtcattcatcactggtcatttcatagattattgacacatttgcaccaccctctctgctgaaatgggagttgcatgataacaaggactgagtccattacttctctgatgtctagcacaatggtcagcacacacagtcaacattgggtatcaacatatcatcattgaatagtgattgataaataaattaatgtatacataaatgcaatgagttttctgccagttgaagtatggtttgcaaagaaagggtggatccccagctgatggggatctttttaaaaagttattctttttggcattataccaaccatgctcggttgtggttgatttccttagttcacttccccattagactatgaactccttgagaacaggaagagttctatttgtctttgaaatcctagcagcacargcacacaatcagtgtttgggaagtgcacaaaatgtctattttctgagaatggattgtttatagaacaagaatgctgaggcactaaagaaaaagtggcagtaatgtaatccgcttgttttgccaagccactaaaaatacc

SEQ ID NO: 679191 - DNA, 1399 bp, Homo sapiens
gcggtaacagccatgcctattttccctttcccctctttgacatagtggctgtttgactgctgagcaggctggggtggtaagtgctgtaagaaatcccaaattctgaatgaattgttctcaagtggatgtctgtggaagaagagcttctgcacctgggttcatcagattcagtaaggaccacaaactgttggtccctcccttaaaatgagcacatgctgattaaagtagatgttgcataaaaatgaagcacatatttttatggagaaaaggaaattcaggaagaaaatatgtttactttcaagaatttgaagggctgttaaatggaggagacttaagacttatttagaattttaatgagatttctctgaagcacaactagaacaatgttctttataacagtttctcctttcgttctatgaaaaaaacctgtcaaatggtacaccaagtgcagagtccgttggccctagcttgcctttgcagcccagtgtctcactgaggctttctatgctccattatttgcttacttggaacttctttcagctcccccatgttttctttccttggttgcccctgcctgggtcacacagaagactaccctgtagtgtggttagtagtgcacacacaagacatctccattagagtgggagccaccagatactatgtgatataagtgacagtaagctcattgattttatattctcattgattaatgtatttatcatcattcagcaaatatttatagagtttctactatatgtgactctaactcatcttcagggcttggcctcagggttacagttctgctcatcaaaataggtgctccccagagtgctcccactgtttcatatcctgtcattcatcactggtcatttcatagattattgacacatttgcaccaccctctctgctgaaatgggagttgcatgataacaaggactgagtccattacttctctgatgtctagcacaatggtcagcacacacagtcaacattgggtatcaacatatcatcattgaatagtgattgataaataaattaatgtatacataaatgcaatgagttttctgccagttgaagtatggtttgcaaagaaagggtggatccccagctgatggggatctttttaaaaagttattctttttggcattataccaaccatgctcggttgtggttgatttccttagttcacttccccattagactatgaactccttgagaacaggaagagttctatttgtctttgaaatcctagcagcacaggcayacaatcagtgtttgggaagtgcacaaaatgtctattttctgagaatggattgtttatagaacaagaatgctgaggcactaaagaaaaagtggcagtaatgtaatccgcttgttttgccaagccactaaaaatacc

SEQ ID NO: 679192 - DNA, 2713 bp, Homo sapiens
gatcttggctcgctgcaagctccgcctcctgggttcacgccattctcccacctcagcctcccgagtagctgggactacaggcgcccaccaccacgcccggctaattttgttttagtatttttagtagggacagggtttcaccatgttagccaggacggtctcgagctcctgacctcgtgatgcgcccgcctcggcctcccaaaatgctgggattacagtcgtgagccaccgcgcccagcccagcaaaggctacctttttaagatgtatggtaataaaaaggagatgcggtagtagctcgatataaatagaattaggtaaaagtattatcagaacagagtactctggagcataaatgtagcttgaaaaagcagagaaggtatagggaagaatcgatggaataaattctacagaggcagaagtgcttggaatctggagcactgtgggaggatgagctaagagtagggagagaagaatggtgaaggtgaagattgatgacgactttgacgacagtgagcaatcaattttaagcacttattgtgcacaagccgaacattatgtaccttattgccactaactaggtactattatctccattctatagatgataaaatgttaagtaacttgtctgagtttgcacagctattaagtacaagagttgggatttcaacccatgtctacctgacttgggagcctaaattcctaaccactcgcctctgctttatcatcatagtctttaacaccactgctatgtgaactcctatgactacatgcttgctgtctcgcacagaataaccaaacagtagtctccacacttcaggtaatctatcctttgttcaacccagattctcttgcatttgtaaccttctgacctccccggcaaggtacccatttgcatttgcacatccccacactaacatgcagtgaaatagtctcttagccactctcttcagtgctcctcagagaggtgacaatcatcagtaactgtgaccccattgagagtgtggtttctgaccacgctcaagattatttgctgcaattgaagcagttagtagttgcttattcttttcttttccttgtttgcagatacctatgaaaatggaaattattttttggcaaactttatagcagctcaggtaagactaatttactacattttacaaatcttttcccaggtgtctacagattaaacattacagttaactgcgtaaatgtaatatcccacatcttaataggaggttcttcttgcctttacttttataatccaggtctgttgtcattaaagtaaggaagaaacaatccttactttggcagttttccagtatactatctccatgaaaagaaacttggaattcatacaatgctggggaaaaaatggggccttaaatgtgtaacatgttttccaaagatgagaaatttactagctgataaattttgaaagaaaaatgctatataagctacttattatgcaataatgcataaaagacgacctcaaaaccttagtggtatctaacaataagcacttacttagctcatgagcttgcagggctcagaggatgtgggtctggtcttggctgatctttgctagctcacatacatctccagttagtcttgggtctattgggctgtttagataatcttggctgtattcacatatctggggggtcagctgactctcatatgatttatcatggccttgtgggaaggtctaggcacggcttcttcataattatggaagagggctaaaataaaaataaaagtggagatcccttagttctttataatttttttgtatcgagttgactaatttcccattaccaaagcaaaatcacatggtcaagcccagagacagaggagggacagaatgcctcaactggagtgggagggcattgcaaaactgcatggaaaggggtatggatttgtaagggttgaatatttcataacagtgatgcaatcaatgcaccttgcatattaaatatcccattggtaatctacataattttaattagagtatgaggagaatcattctaggtcaaactggattctgcttctctatttttacctagtcactttaaccaagaagtaatatagcacaaatctattttttttctataacagtgattcacatatttgaagatgtctctcagttatttcttttgtcttcttagaattatacatcaccaggctaacttcatattttctctatttcctgcttatagtggtttccaggtctgatcattctgtttagactccagttaacttagatttcttttaaaacatcagaaccgagagcatattttagagctgtctatccagtatgatagccactagccacatgtggctattgaacacttgaaatgtgaccagcctaatttgaaatattcaaaagttagcttaaaaaattcaaaaatgatttgtgggcttcctgggcaagatggccaaataggaacagctctggcctgcagctcccagtgagatcaatgcagaaggcaggtgatttctgcatttccaactgagatacctggttcatctcactgggactgattagacagtgggtgaagtccacagagggcgaggagaagcagggtgtggtgtcacctcccccaggaagcacaaggggtcagggtactccccccgtagccaaaggaagccacgagggacagtgctatctggcccagatactacacttttcccatggtctttgcaacccayaga

SEQ ID NO: 679193 - DNA, 2000 bp, Homo sapiens
ttcttgggaggcctcaggaaacttataatcatggtagaagggaaagcaaacacatcttcatgtggatggcaggattaggggggtgcacccacttgaaacaagctggttttgggagaactctatcacaagaacagcaagggggaagcctgcccccacrattcaatcacctcccaccaggccccacctccaatactgggaattacaattcgacatgagacttgggtggggacacacagccaaaccacatcaataacctttcacattttctcaatataatagtttggccctatgtccaccttcttaacagctagtttcaagagaaagttaatcaatgccgacagggaccattcttgaaaagacgtggtacaagacagtatatttttatttagatactgtgttttggcatagaaagaaggtaaagttgatgaataggatatggaacatgaagagataaaggtgtttagttggcagcaatggtctgctgaatccatttcacgtagttgcaaactttagtgtagactccaggtttgttcttctgaggacaaccatagccccaggagacaatgccctggagttctccgttgcagaccacaggaacaccagagtcaccctgggcaaaaaggaagggatattcagagatcttatttatgcccagatgggagaatgggccgtaagatgttcttccattgtgctggagccattgtcccacactgctgatccagcatgaagcactttctcttcctcttgaaaccctccaaccctcaatctacttactatatcagtagttagtcttccttataccttatttgagccccttctctttccttggtaggccaagtgggccaagaggaggtttcatgctgcttaactagctctgctccttccgctagagttcctttccacagtttacctcctcagaagggcacttagaaatactatttgcacaccatcttctgtgcatcttttaactcttaaacctagacattaatacaataaaaataaaatatttaatttgtcccaaggctatccctcacctctcacaatcagttatagggactgttttacaatcttctgtgtttctgaaaaggggaattatggtggagaagactaagaataagctggaattgagaagcagtacaaagaaactaacctggcaagagtcctttcaaccctccaggaatcccagacatatcatgtttgtagtaatcttgcctgggtaggctgtgcggcaagcagtgttagagagaatgggagccttcagacactgcaggagatcagggtagttggccgtggagtggaagagtgaaaaatgcaagattactcatgaggtttccaaaattttctttctcaatacatctcccctcttccccaatactctcactttttctttcaattagccaacggcttctcatttgagagaacaatactttcttttctagaagctttcccaaatagttctaatcaatgaattgttccaattcattccaattgaatgctccaagcaagaccaaatccctgagtctttgttttgtttacctcctcagtttatagttctctgcccatcactaatcacacttcagttaaataccctgatatcttcatagtacttcattattatgtcttctgcatggttccagcaaaggaatcttcttcatttcaattattaatagtatatttctgagattccatgtatccaaaaactatgctctgggaacttaaccttaagtgagtttggactagctgactttccacatgtctttcagctctaaaattgtcacacttggtacttctgtttcaggcgacactaaagccactgctcagggtgttgtcccagccagagatgaggcactgagtaccagccgctgcacaggatcttggcagagagatggtggccacttgagagttgatggtggcgactgagctcagcttaatcagcatgatgtcattatcaatggtggctgagttatacttggggtggcaaataatcttggctgcattta

SEQ ID NO: 679194 - DNA, 2000 bp, Homo sapiens
ttcttgggaggcctcaggaaacttataatcatggtagaagggaaagcaaacacatcttcatgtggatggcaggattaggggggtgcacccacttgaaacaagctggttttgggagaactctatcacaagaacagcaagggggaagcctgcccccacgattcaatcacctcccaccaggccccacctccaatactgggaattacaattcgacatgagacttgggtggggacacacagccaaaccacatcaataacctttcacattttctcaatataatagtttggccctatgtccaccttcttaacagctagtttcaagagaaagttaatcaatgccgacagggaccattcttgaaaagacgtggtacaagacagtatatttttatttagatactgtgttttggcatagaaagaaggtaaagttgatgaataggatatggaacatgaagagataaaggtgtttagttggcagcaatggtctgctgaatccatttcacgtagttgcaaactttagtgtagactccaggtttgttcttctgaggacaaccatagccccaggagacaatgccctggagttctccgttgcagaccacaggaacaccagagtcaccctgggcaaaaaggaagggatattcagagatcttatttatgcccagatgggagaatgggccgtaagatgttcttccattgtgctggagccattgtcccacactgctgatccagcatgaagcactttctcttcctcttgaaaccctccaaccctcaatctacttactatatcagtagttagtcttccttataccttatttgagccccttctctttccttggtaggccaagtgggccaagaggaggtttcatgctgcttaactagctctgctccttccrctagagttcctttccacagtttacctcctcagaagggcacttagaaatactatttgcacaccatcttctgtgcatcttttaactcttaaacctagacattaatacaataaaaataaaatatttaatttgtcccaaggctatccctcacctctcacaatcagttatagggactgttttacaatcttctgtgtttctgaaaaggggaattatggtggagaagactaagaataagctggaattgagaagcagtacaaagaaactaacctggcaagagtcctttcaaccctccaggaatcccagacatatcatgtttgtagtaatcttgcctgggtaggctgtgcggcaagcagtgttagagagaatgggagccttcagacactgcaggagatcagggtagttggccgtggagtggaagagtgaaaaatgcaagattactcatgaggtttccaaaattttctttctcaatacatctcccctcttccccaatactctcactttttctttcaattagccaacggcttctcatttgagagaacaatactttcttttctagaagctttcccaaatagttctaatcaatgaattgttccaattcattccaattgaatgctccaagcaagaccaaatccctgagtctttgttttgtttacctcctcagtttatagttctctgcccatcactaatcacacttcagttaaataccctgatatcttcatagtacttcattattatgtcttctgcatggttccagcaaaggaatcttcttcatttcaattattaatagtatatttctgagattccatgtatccaaaaactatgctctgggaacttaaccttaagtgagtttggactagctgactttccacatgtctttcagctctaaaattgtcacacttggtacttctgtttcaggcgacactaaagccactgctcagggtgttgtcccagccagagatgaggcactgagtaccagccgctgcacaggatcttggcagagagatggtggccacttgagagttgatggtggcgactgagctcagcttaatcagcatgatgtcattatcaatggtggctgagttatacttggggtggcaaataatcttggctgcattta

SEQ ID NO: 679195 - DNA, 2000 bp, Homo sapiens
ttcttgggaggcctcaggaaacttataatcatggtagaagggaaagcaaacacatcttcatgtggatggcaggattaggggggtgcacccacttgaaacaagctggttttgggagaactctatcacaagaacagcaagggggaagcctgcccccacgattcaatcacctcccaccaggccccacctccaatactgggaattacaattcgacatgagacttgggtggggacacacagccaaaccacatcaataacctttcacattttctcaatataatagtttggccctatgtccaccttcttaacagctagtttcaagagaaagttaatcaatgccgacagggaccattcttgaaaagacgtggtacaagacagtatatttttatttagatactgtgttttggcatagaaagaaggtaaagttgatgaataggatatggaacatgaagagataaaggtgtttagttggcagcaatggtctgctgaatccatttcacgtagttgcaaactttagtgtagactccaggtttgttcttctgaggacaaccatagccccaggagacaatgccctggagttctccgttgcagaccacaggaacaccagagtcaccctgggcaaaaaggaagggatattcagagatcttatttatgcccagatgggagaatgggccgtaagatgttcttccattgtgctggagccattgtcccacactgctgatccagcatgaagcactttctcttcctcttgaaaccctccaaccctcaatctacttactatatcagtagttagtcttccttataccttatttgagccccttctctttccttggtaggccaagtgggccaagaggaggtttcatgctgcttaactagctctgctccttccgctagagttcctttccacagtttacctcctcagaagggcacttagaaatactatttgcacaccatcttctgtgcatcttttaactcttaaacctagacattaatacaataaaaataaaatatttaatttgtcccaaggctatccctcacctctcacaatcagttatagggacwgttttacaatcttctgtgtttctgaaaaggggaattatggtggagaagactaagaataagctggaattgagaagcagtacaaagaaactaacctggcaagagtcctttcaaccctccaggaatcccagacatatcatgtttgtagtaatcttgcctgggtaggctgtgcggcaagcagtgttagagagaatgggagccttcagacactgcaggagatcagggtagttggccgtggagtggaagagtgaaaaatgcaagattactcatgaggtttccaaaattttctttctcaatacatctcccctcttccccaatactctcactttttctttcaattagccaacggcttctcatttgagagaacaatactttcttttctagaagctttcccaaatagttctaatcaatgaattgttccaattcattccaattgaatgctccaagcaagaccaaatccctgagtctttgttttgtttacctcctcagtttatagttctctgcccatcactaatcacacttcagttaaataccctgatatcttcatagtacttcattattatgtcttctgcatggttccagcaaaggaatcttcttcatttcaattattaatagtatatttctgagattccatgtatccaaaaactatgctctgggaacttaaccttaagtgagtttggactagctgactttccacatgtctttcagctctaaaattgtcacacttggtacttctgtttcaggcgacactaaagccactgctcagggtgttgtcccagccagagatgaggcactgagtaccagccgctgcacaggatcttggcagagagatggtggccacttgagagttgatggtggcgactgagctcagcttaatcagcatgatgtcattatcaatggtggctgagttatacttggggtggcaaataatcttggctgcattta

SEQ ID NO: 679196 - DNA, 2000 bp, Homo sapiens
ttcttgggaggcctcaggaaacttataatcatggtagaagggaaagcaaacacatcttcatgtggatggcaggattaggggggtgcacccacttgaaacaagctggttttgggagaactctatcacaagaacagcaagggggaagcctgcccccacgattcaatcacctcccaccaggccccacctccaatactgggaattacaattcgacatgagacttgggtggggacacacagccaaaccacatcaataacctttcacattttctcaatataatagtttggccctatgtccaccttcttaacagctagtttcaagagaaagttaatcaatgccgacagggaccattcttgaaaagacgtggtacaagacagtatatttttatttagatactgtgttttggcatagaaagaaggtaaagttgatgaataggatatggaacatgaagagataaaggtgtttagttggcagcaatggtctgctgaatccatttcacgtagttgcaaactttagtgtagactccaggtttgttcttctgaggacaaccatagccccaggagacaatgccctggagttctccgttgcagaccacaggaacaccagagtcaccctgggcaaaaaggaagggatattcagagatcttatttatgcccagatgggagaatgggccgtaagatgttcttccattgtgctggagccattgtcccacactgctgatccagcatgaagcactttctcttcctcttgaaaccctccaaccctcaatctacttactatatcagtagttagtcttccttataccttatttgagccccttctctttccttggtaggccaagtgggccaagaggaggtttcatgctgcttaactagctctgctccttccgctagagttcctttccacagtttacctcctcagaagggcacttagaaatactatttgcacaccatcttctgtgcatcttttaactcttaaacctagacattaatacaataaaaataaaatatttaatttgtcccaaggctatccctcacctctcacaatcagttatagggactgttttacaatcttctgtgtttctgaaaaggggaattatggtggagaagactaagaataagctggaattgagaagcagtacaaagaaactaacctggcaagagtcctttcaaccctccaggaatcccagacatatcatgtttgtagtaatcttgcctgggtaggctgtgcggcaagcagtgttagagagaatgggagccttcagacactgcaggagatcagggtagttggccgtggagtggaagagtgaaaaatgcaagattactcatgaggtttccaaaattttctttctcaatacatctcccctcttccccaatactctcactttttctttcaattagccaacggcttctcatttgagagarcaatactttcttttctagaagctttcccaaatagttctaatcaatgaattgttccaattcattccaattgaatgctccaagcaagaccaaatccctgagtctttgttttgtttacctcctcagtttatagttctctgcccatcactaatcacacttcagttaaataccctgatatcttcatagtacttcattattatgtcttctgcatggttccagcaaaggaatcttcttcatttcaattattaatagtatatttctgagattccatgtatccaaaaactatgctctgggaacttaaccttaagtgagtttggactagctgactttccacatgtctttcagctctaaaattgtcacacttggtacttctgtttcaggcgacactaaagccactgctcagggtgttgtcccagccagagatgaggcactgagtaccagccgctgcacaggatcttggcagagagatggtggccacttgagagttgatggtggcgactgagctcagcttaatcagcatgatgtcattatcaatggtggctgagttatacttggggtggcaaataatcttggctgcattta

SEQ ID NO: 679197 - DNA, 975 bp, Homo sapiens
tggctaacttttttgtttacatttttggtagagatgaggtcttgctatgttgccaggtttctctcaaactcttgagctctggtgatcctcccgcctttacctcccaaagttctgagaatacaggtatgagccaccgcgcttagctcctcctattgatttctgaaatttaaatggagatcagactgtctccacgcaaggaggaagtcagacagggcagagcttaaccaatgtccacggtttgttttctcactgcagtcttggacttaccactcatctcttcattctctggctcaraatagcttcagtcttcccagaagattctcatgattttcagtttgtttctggtttcttagttatttcttgtctcatcaggctcccctgaggaaggagccaggagatgctacaagtctgcaattttagggggagtcagatggagtgcactggtcttttgcacttctttataatattatctaagcctcctcttctttgaaatataatggctattcatcatgggatatgaggcatctcagaagcaatctaaatatctgtttgtttctttttctagtaaagaattgaccagtattctagcaattttattttaggtattcctttaaaagtaaaaaatacatagtttttcttaacgtgacttctattgatagtttatatttttatgattttgtgtagtagctttaccttccctaggatcagaaaccacatcagataatcagcttctattatgaaagaagctgattcttctatttggagagtgaggtatgcagaaaatccataaaaggtattaagttatagaacaccaccatctgatccaccatctgatcttgagagaattttaactggtttatatccatgaatactccctcagtagggtatttttgttctctggatggcatcttggaagaggtactggtcattgatcatatctcactggcacattggctagtgaccgctaatgtcaca

SEQ ID NO: 679198 - DNA, 1296 bp, Homo sapiens
tcaattaaaaaatacgtaaatttgaaaaataaaaacatgcagtcaataaacatgtgtgataaactttaataatacagataatgattgtatgtgagtaacaatcagcaggttttctctctgcagttgtcagcatatgaataatttgaatcctatccttggtgacaccctggctctggagcctcctctagacctctcattggatgtattatgcaaccaaatctcaacaggtactatgtgtttggaaatctttttcccctgtttttgcrgaaatatgctaataagagtaatgttaaagatgatgatgttgataatttcaactatttcattcggcaccctttaaatttcaaaaaaatgcacacaaatggatatcctggcaacgagtccaaaatcttagctcaaaatgaattctgctactccagagctttctaactcttccatgtaacaaacatatcccaacattatatggggctgggccagctagttcagagactgatgaggacactttcacttgtctgtcctcatatattaaaatagctccttagttgatatggtttgactgtgtccccacccaaatctcaacttgaattgtacctcccagaattcccacgtgttgtgggagggacccgggggatataattgaaccatgggggccagtctttcccatgctattctcatgatagtgaacaagtctcacgagatctcatgggcttatcaggggtttccacatttgcttcttcctcattttctcttgccgccaccatgtaagatgtgccttttgcttcctgccatgattctgaggcctccccagccatgtggaactgtaagtccaactaaacgtctttttcttccctgtcttgggtatgtctttatcagcagcatgaaaacagactaatacatcagtgcattagatattcctgaaagaacttcagaagcaattaactgcccctggtccagttgcctcctctgataatgcattgtgtgtgtccaactctagtctctaccctatcttctgcccagactgtcttgtactagaaattattctgaagtattggttagaatgtttggaaatgcagcttcctgggaatcttctgaaggactgtcactgtccctcagcccctcctgacttccctttccatccacctgactgcaggtcctaactgatggccatgaactcactacacatctcccttccttccctgcaatttactcagctaacaacacctcagccaggtggtgggtgaccatgaccatcctcctcttccttgccagaattttcatttggttctttttctgatc

SEQ ID NO: 679199 - DNA, 1296 bp, Homo sapiens
tcaattaaaaaatacgtaaatttgaaaaataaaaacatgcagtcaataaacatgtgtgataaactttaataatacagataatgattgtatgtgagtaacaatcagcaggttttctctctgcagttgtcagcatatgaataatttgaatcctatccttggtgacaccctggctctggagcctcctctagacctctcattggatgtattatgcaaccaaatctcaacaggtactatgtgtttggaaatctttttcccctgtttttgcagaaatatgctaataagagtaatgttaaagatgatgatgttgataatttcaactatttcattcggcaccctttaaatttcaaaaaaatgcacacaaatggatatcctggcaacgagtccaaaatcttagctcaaaatgaattctgctactccagagctttctaactcttccatgtaacaaacatatcccaacattatatggggctrggccagctagttcagagactgatgaggacactttcacttgtctgtcctcatatattaaaatagctccttagttgatatggtttgactgtgtccccacccaaatctcaacttgaattgtacctcccagaattcccacgtgttgtgggagggacccgggggatataattgaaccatgggggccagtctttcccatgctattctcatgatagtgaacaagtctcacgagatctcatgggcttatcaggggtttccacatttgcttcttcctcattttctcttgccgccaccatgtaagatgtgccttttgcttcctgccatgattctgaggcctccccagccatgtggaactgtaagtccaactaaacgtctttttcttccctgtcttgggtatgtctttatcagcagcatgaaaacagactaatacatcagtgcattagatattcctgaaagaacttcagaagcaattaactgcccctggtccagttgcctcctctgataatgcattgtgtgtgtccaactctagtctctaccctatcttctgcccagactgtcttgtactagaaattattctgaagtattggttagaatgtttggaaatgcagcttcctgggaatcttctgaaggactgtcactgtccctcagcccctcctgacttccctttccatccacctgactgcaggtcctaactgatggccatgaactcactacacatctcccttccttccctgcaatttactcagctaacaacacctcagccaggtggtgggtgaccatgaccatcctcctcttccttgccagaattttcatttggttctttttctgatc

SEQ ID NO: 679200 - DNA, 1296 bp, Homo sapiens
tcaattaaaaaatacgtaaatttgaaaaataaaaacatgcagtcaataaacatgtgtgataaactttaataatacagataatgattgtatgtgagtaacaatcagcaggttttctctctgcagttgtcagcatatgaataatttgaatcctatccttggtgacaccctggctctggagcctcctctagacctctcattggatgtattatgcaaccaaatctcaacaggtactatgtgtttggaaatctttttcccctgtttttgcagaaatatgctaataagagtaatgttaaagatgatgatgttgataatttcaactatttcattcggcaccctttaaatttcaaaaaaatgcacacaaatggatatcctggcaacgagtccaaaatcttagctcaaaatgaattctgctactccagagctttctaactcttccatgtaacaaacatatcccaacattatatggggctgggccagctagttcagagactgatgaggacactttcacttgtctgtcctcatatattaaaatagctccttagttgatatggtttgactgtgtccccacccaaatctcaacttgaattgtacctcccagaattcccacgtgttgtgggagggacccgggggatataattgaaccatgggggccagtctttcccatgctattctcatgatagtgaacaagtctcacgagatctcatgggcttatcaggggtttccacatttgcttcttcctcattttctcttgccgccaccatgtaagatgtgccttttgcttcctgccatgattctgaggcctccccagccatgtggaactgtaagtccaactaaacgtctttttcttccctgtcttgggtatgtctttatcagcagcatgaaaacagactaatacatcagtgcattagatattcctgaaagaacttcagaagcaattaactgcccctggtccagttgcctcctctgataatgcaytgtgtgtgtccaactctagtctctaccctatcttctgcccagactgtcttgtactagaaattattctgaagtattggttagaatgtttggaaatgcagcttcctgggaatcttctgaaggactgtcactgtccctcagcccctcctgacttccctttccatccacctgactgcaggtcctaactgatggccatgaactcactacacatctcccttccttccctgcaatttactcagctaacaacacctcagccaggtggtgggtgaccatgaccatcctcctcttccttgccagaattttcatttggttctttttctgatc

SEQ ID NO: 679201 - DNA, 1296 bp, Homo sapiens
tcaattaaaaaatacgtaaatttgaaaaataaaaacatgcagtcaataaacatgtgtgataaactttaataatacagataatgattgtatgtgagtaacaatcagcaggttttctctctgcagttgtcagcatatgaataatttgaatcctatccttggtgacaccctggctctggagcctcctctagacctctcattggatgtattatgcaaccaaatctcaacaggtactatgtgtttggaaatctttttcccctgtttttgcagaaatatgctaataagagtaatgttaaagatgatgatgttgataatttcaactatttcattcggcaccctttaaatttcaaaaaaatgcacacaaatggatatcctggcaacgagtccaaaatcttagctcaaaatgaattctgctactccagagctttctaactcttccatgtaacaaacatatcccaacattatatggggctgggccagctagttcagagactgatgaggacactttcacttgtctgtcctcatatattaaaatagctccttagttgatatggtttgactgtgtccccacccaaatctcaacttgaattgtacctcccagaattcccacgtgttgtgggagggacccgggggatataattgaaccatgggggccagtctttcccatgctattctcatgatagtgaacaagtctcacgagatctcatgggcttatcaggggtttccacatttgcttcttcctcattttctcttgccgccaccatgtaagatgtgccttttgcttcctgccatgattctgaggcctccccagccatgtggaactgtaagtccaactaaacgtctttttcttccctgtcttgggtatgtctttatcagcagcatgaaaacagactaatacatcagtgcattagatattcctgaaagaacttcagaagcaattaactgcccctggtccagttgcctcctctgataatgcattgtgtgtgtccaactctagtctctaccctatcttctgcccagactgtcttgtactagaaattattctgaagtattggttagaatgtttggaaatgcagcttcctgggaatcttctgaaggactgtcactgtccctcagcccctcctgacttccctttccatccacctgactgcaggtcctaactgatggccatgaactcactacacatctcccttccttccctgcaatttactcagctaacaacacctcagccaggtggtgggtgaccatgaccatcctccwcttccttgccagaattttcatttggttctttttctgatc

SEQ ID NO: 679202 - DNA, 1693 bp, Homo sapiens
tcatgaaaacaatgaggtgtgctatagttgctgtggcctcatttttagtgtgttgagcaggaagcattgaagaactttgaaagctttgctcttgagtctagggatgtgctggagccagcttgaatgactcagaagaaccaaataggcatactactcttcccagctcccctttcagtgaagccatgttggctgcttgaagtctgtcatggtgggtatgctggtacaccacaaattgggaaatgctaccagccatgcccccaccttcacagacacccagtatagcagcatatccctggggtattttctgatgtccctgttatgccatttcttgtggggccaaaagggctcagaattcacctcccctctactcctgctctgagaagccatcatctaagtgggcctcaattgtacctatttctattcracctctaaattctcttgctctgtagctctgtgtctcctacaagcatgccagtctggaacatgacaactattttgaatgtaactaaaggtatcactgaaccagttcattatttgcaaattatctttccttgcatggaatattcagatgctggagtcattgggaacagagatggccaagcagcaactctgggttgtgaaccacatacagccccgctattcttctatgtcaccgacagaccctgaaacaaggactattttgctttggagactaagcagctccccaccagtcaggaatgactctgcttttactttaggctgagaggtcagaaggatcatgccctcagtattctcctctccaagacagagtgtggccactctccatctcagtccctggaagttgtccagagttccctgagaatccctgctctgggacagaatcaccaaggctcatcctcaccagctcccaacaggctccagcagggctttcctgccaggtgcagggcacaggaaatggctctgcctgtctcttagttagagggaggccatgcaatgatgtttgtataagagggactgggattctgggtctccattaaagtatttgataacattttctttgtttttgttttatttggccatctcaccaattaggacagcaatccctttacagttatattgttcttggcacttgggaaggtttttgtggttaagtcacattaagaaattgtgcctttttttcctgttcagatataacccaaggcagtgaaagaaacaacaataattttgaaagcagttacttatgcatcctatgataaaggtgttaagtttcattgcccacatctaactttcagtctagtggaaatgaaaagtcacagttagggggcatgtgagcatgccctgagagaggccgatgccaattgagaagtctgtgccaatccccaatactgtgagattgaaggggagggagagatgacctctctttcagaccatgctcaacaaggagggagagggattttcatccatgggaagctgaggaggagcaaatcccagggtcctctaactcagggtgcgggaacaaatccttggagaggaaaatggtccagttcagctgtcacaggagacaggagaaagcacagtcatctaatccacagtcccctggctgatttgcttccttatgatgctattttgtaccagcatgtcctcatctcccgctgctcctctgcctgtttcagaatcatctcttccgtgtttggtgctcagatcagtggatgtg

SEQ ID NO: 679203 - DNA, 1693 bp, Homo sapiens
tcatgaaaacaatgaggtgtgctatagttgctgtggcctcatttttagtgtgttgagcaggaagcattgaagaactttgaaagctttgctcttgagtctagggatgtgctggagccagcttgaatgactcagaagaaccaaataggcatactactcttcccagctcccctttcagtgaagccatgttggctgcttgaagtctgtcatggtgggtatgctggtacaccacaaattgggaaatgctaccagccatgcccccaccttcacagacacccagtatagcagcatatccctggggtattttctgatgtccctgttatgccatttcttgtggggccaaaagggctcagaattcacctcccctctactcctgctctgagaagccatcatctaagtgggcctcaattgtacctatttctattcgacctctaaattctcttgctctgtagctctgtgtctcctacaagcatgccagtctggaacatgacaactattttgaatgtaactaaaggtatcactgaaccagttcattatttgcaaattatctttccttgcatggaatattcagatgctggagtcattgggaacagagatggccaagcagcaactctgggttgtgaaccacatacagccccgctattcttctatgtcaccgacagaccctgaaacaaggactattttgctttggagactaagcagctccccaccagtcaggaatgactctgcttttactttaggctgagaggtcagaaggatcatgccctcagtattctcctctccaagacagagtgtggccactctccatctcagtccctggaagttgtccagagttccctgagaatccctgctctgggacagaatcaccaaggctcatcctcaccagctcccaacaggctccagcagggctttcctgccaggtgcagggcacaggaaatggctctgcctgtctcttagttagagggaggccatgcaatgatgtttgtataagagggactgggattctgggtctccattaaagtatttgataacattttctttgtttttgttttatttggccatctcaccaattaggacagcaatccctttacagttatattgttcttggcacttgggaaggtttttgtggttaagtcacattaagaaattgtgcctttttttcctgttcagatataacccaaggcagtgaaagaaacaacaataattttgaaagcagttacttatgcatcctatgataaaggtgttaagtttcattgcccacatctaactttcagtctagtggaaatgaaaagtcacagttagggggcatgtgagcatgccctgagagaggccgatgccaattgagaagtctgtgccaatccccaatactgtgagattgaaggggagggagagatgacctctctttcagaccatgctcaacaaggagggagagggattttcatccatgggaagctgaggaggagcaaatcccagggtcctctaactcagggtgcgggarcaaatccttggagaggaaaatggtccagttcagctgtcacaggagacaggagaaagcacagtcatctaatccacagtcccctggctgatttgcttccttatgatgctattttgtaccagcatgtcctcatctcccgctgctcctctgcctgtttcagaatcatctcttccgtgtttggtgctcagatcagtggatgtg

SEQ ID NO: 679204 - DNA, 1693 bp, Homo sapiens
tcatgaaaacaatgaggtgtgctatagttgctgtggcctcatttttagtgtgttgagcaggaagcattgaagaactttgaaagctttgctcttgagtctagggatgtgctggagccagcttgaatgactcagaagaaccaaataggcatactactcttcccagctcccctttcagtgaagccatgttggctgcttgaagtctgtcatggtgggtatgctggtacaccacaaattgggaaatgctaccagccatgcccccaccttcacagacacccagtatagcagcatatccctggggtattttctgatgtccctgttatgccatttcttgtggggccaaaagggctcagaattcacctcccctctactcctgctctgagaagccatcatctaagtgggcctcaattgtacctatttctattcgacctctaaattctcttgctctgtagctctgtgtctcctacaagcatgccagtctggaacatgacaactattttgaatgtaactaaaggtatcactgaaccagttcattatttgcaaattatctttccttgcatggaatattcagatgctggagtcattgggaacagagatggccaagcagcaactctgggttgtgaaccacatacagccccgctattcttctatgtcaccgacagaccctgaaacaaggactattttgctttggagactaagcagctccccaccagtcaggaatgactctgcttttactttaggctgagaggtcagaaggatcatgccctcagtattctcctctccaagacagagtgtggccactctccatctcagtccctggaagttgtccagagttccctgagaatccctgctctgggacagaatcaccaaggctcatcctcaccagctcccaacaggctccagcagggctttcctgccaggtgcagggcacaggaaatggctctgcctgtctcttagttagagggaggccatgcaatgatgtttgtataagagggactgggattctgggtctccattaaagtatttgataacattttctttgtttttgttttatttggccatctcaccaattaggacagcaatccctttacagttatattgttcttggcacttgggaaggtttttgtggttaagtcacattaagaaattgtgcctttttttcctgttcagatataacccaaggcagtgaaagaaacaacaataattttgaaagcagttacttatgcatcctatgataaaggtgttaagtttcattgcccacatctaactttcagtctagtggaaatgaaaagtcacagttagggggcatgtgagcatgccctgagagaggccgatgccaattgagaagtctgtgccaatccccaatactgtgagattgaaggggagggagagatgacctctctttcagaccatgctcaacaaggagggagagggattttcatccatgggaagctgaggaggagcaaatcccagggtcctctaactcagggtgcgggaacaaatccttggagaggaaaatggtccagttcagctgtcacaggagacaggagaaagcamagtcatctaatccacagtcccctggctgatttgcttccttatgatgctattttgtaccagcatgtcctcatctcccgctgctcctctgcctgtttcagaatcatctcttccgtgtttggtgctcagatcagtggatgtg

SEQ ID NO: 679205 - DNA, 971 bp, Homo sapiens
gggctcctgaagctctgggcaggacgtgctggagtggcaggaacatgagaggatcagagcatatcaggccatgcagtgggatcttgagctgggagcacaggaaaatgccaaggaaatctgtttctgggaaagctgttccctctctatgggggccacccctgcagatgcactaccaaacactgtgggcagcctggctgctgttggccagcatttgggaagatgaactggacacagggtgcagaaggaacaggacttcctaggtctgttggatgcctctatatctgctggtcactgactctcactgtccaaccacgataacctgccaattgtcatagtgactgttttatatctgtcttctaaatgttacaaaatgtatccttgaccatctgwaacccagaatgataaaagaaatggcattctggtaaatacaggctcttgccattgtagagttgacctaacacaatccagcacaggatggattctcccagattaaggcattggacctaacacaatccagcacaggatggattctcccagattaaggcattggatcacacaactgccccaacccgccacaatccctggtcttctatccgggggacacctgtgctgcccaggtgaatgtggacacaatttgtgtgtagatgttccagacgctggtgactaacttttcttttaatcctgtgcctgaagtctccctccacccagagagtctatatgtgtatatctgtctgtctatctatctctatctctatctctctctctctgtaatttccacttggaagaaaatgtcatgatgactacatgttactgggatttatttatgaaaaggattttattaaaaagaattagaaaatttgaatccttttctgaatttttccttgggactgtcctgagagcatttttgacatgaccaacctttgtcgtgtgtgtatttggcagcctagagtgcagcagagagttattggccc

SEQ ID NO: 679206 - DNA, 647 bp, Homo sapiens
tgagctccagcatggagcaccgcagcactaggtcagaggagagtaagagggcgatggggcagcctgtgagctggggcagtgtaggcagaggagtaactgtatcatcacagaagcttctgccttcaaccatccctccagctctgcaggacaggtagagagtccagggtctgtggggcactagacctaaggaaggcttcctggggaggacacaggacagcgacatcacaggatacccctcccatcaggaaaatsaaggcccagaactcactcggctcttccccaggaagaccaagccctgaatcaggtgcagtgccgcctggcccactgtgccatgggacccaggctcctcttctgggcactgctttgtctcctcggaacaggtgagtcctgggcacaggacagcagccccattctcagctttcccaccccagtgtcctccactttaccttggggaggacctctgggctgtctcctgagctcatcctccatctgcttttcctgcaggcccagtggaggctggagtcacacaaagtcccacacacctgatcaaaacgagaggacagcaagcgactctgagatgctctcctatctctgggcacaccagtgtgtactggtaccaacaggccctgggtctgggcctccagttc

SEQ ID NO: 679207 - DNA, 647 bp, Homo sapiens
tgagctccagcatggagcaccgcagcactaggtcagaggagagtaagagggcgatggggcagcctgtgagctggggcagtgtaggcagaggagtaactgtatcatcacagaagcttctgccttcaaccatccctccagctctgcaggacaggtagagagtccagggtctgtggggcactagacctaaggaaggcttcctggggaggacacaggacagcgacatcacaggatacccctcccatcaggaaaatgaaggcccagaactcactcggctcttccccaggaagaccaagccctgaatcaggtgcagtgccgcctggcccactgtgccrtgggacccaggctcctcttctgggcactgctttgtctcctcggaacaggtgagtcctgggcacaggacagcagccccattctcagctttcccaccccagtgtcctccactttaccttggggaggacctctgggctgtctcctgagctcatcctccatctgcttttcctgcaggcccagtggaggctggagtcacacaaagtcccacacacctgatcaaaacgagaggacagcaagcgactctgagatgctctcctatctctgggcacaccagtgtgtactggtaccaacaggccctgggtctgggcctccagttc

SEQ ID NO: 679208 - DNA, 602 bp, Homo sapiens
ggagtagagaccacatgggcaaaggtttatggctggtctgtaggttgaaggttgcagcaggtagagggaggaatagcaggcagagggcagagtcactgtagggcaggggcagtggcatcatcagttgactttactgacatccaggaattatgtccctaacacacaagctgaaaaacctcccacaatttgcctatttttccctgaccctgccatggccaccagactcctcagtggtgtggccttttgcctcctgggggcaggtgagtgccttaaagccttttccttggctcaccacatcccagcctaagcctttacctcaggtctacattattggggtccctccttgggcactcaacttccttctatcatagatttcacagaagctgggacaaccagatcccaagataccagagaacaaaggcaggacgtgaagtgacatggagatgcctgagactgccatccatgactacatgtgtaggtgttaataggagccaaggctggtgcacagctgatcygtcccagcacacactatacagaatccctgagggtctgtgactttttctcaaagccaaatatgtggccttggtgtcagacagcctctc

SEQ ID NO: 679209 - DNA, 602 bp, Homo sapiens
ggagtagagaccacatgggcaaaggtttatggctggtctgtaggttgaaggttgcagcaggtagagggaggaatagcaggcagagggcagagtcactgtagggcaggggcagtggcatcatcagttgactttactgacatccaggaattatgtccctaacacacaagctgaaaaacctcccacaatttgcctatttttccctgaccctgccatggccaccagactcctcagtggtgtggccttttgcctcctgggggcaggtgagtgccttaaagccttttccttggctcaccacatcccagcctaagcctttacctcaggtctacattattggggtccctccttgggcactcaacttccttctatcatagatttcacagaagctgggacaaccagatcccaagataccagagaacaaaggcaggacgtgaagtgacatggagatgcctgagactgccatccatgactacatgtgtaggtgttaataggagccaaggctggtgcacagctgatccgtcccagcmcacactatacagaatccctgagggtctgtgactttttctcaaagccaaatatgtggccttggtgtcagacagcctctc

SEQ ID NO: 679210 - DNA, 602 bp, Homo sapiens
ggagtagagaccacatgggcaaaggtttatggctggtctgtaggttgaaggttgcagcaggtagagggaggaatagcaggcagagggcagagtcactgtagggcaggggcagtggcatcatcagttgactttactgacatccaggaattatgtccctaacacacaagctgaaaaacctcccacaatttgcctatttttccctgaccctgccatggccaccagactcctcagtggtgtggccttttgcctcctgggggcaggtgagtgccttaaagccttttccttggctcaccacatcccagcctaagcctttacctcaggtctacattattggggtccctccttgggcactcaacttccttctatcatagatttcacagaagctgggacaaccagatcccaagataccagagaacaaaggcaggacgtgaagtgacatggagatgcctgagactgccatccatgactacatgtgtaggtgttaataggagccaaggctggtgcacagctgatccgtcccagcacacactatasagaatccctgagggtctgtgactttttctcaaagccaaatatgtggccttggtgtcagacagcctctc

SEQ ID NO: 679211 - DNA, 602 bp, Homo sapiens
taaaagtgggaactaaacattgagcatacatggatataaacaatggaacaatagacattgtgaactaccagaagggggagagagacaaggggaagtgttttgaaaaactacctatcaggcactatcttctgtacctgggtgacaagatctgtacttcaaacctcagtacaaacctcagtattaggcaatattcccatgtaacaaatctgcacatgttctccctgtatctaaaataaaagttgaaatttaaataaataaataaatagcgggccacarcaaaacttttggaggtgatgtgtaagttcattacattaagttttatgatggtttcccaggtgtttgcgtatgtcaaagcttaccaaattgtacattttaaagatgtctattgtttgtcaagtgcattttaataaagctgtaaaagaaagaattatttttgatacagtgttaggacaacagaaaaccactgagaaaatttaagcaagagaatgtcaataattaatgccacattttaactaattaactgcaattaatcacaatcaatcagtaagaaaaggttttgtgctgaagattttccagagagataagtaagcaagtatatcatg

SEQ ID NO: 679212 - DNA, 661 bp, Homo sapiens
ctggttgtcgtggaaatgggatttcaaccattataatgagatcaaatcatatgctaacaaagaaatcagtaattagagttggggccacccacagagctcacctccatcttgggataagatctaggaagagccagacatgcatttttgccgcagataaaatcccaaaaggaaaggttttaagtatgaaagggttgggctgaaataacatactcaagaatattgctattctgagtgttgcttctgcttccagctctgaccaggtcactgcagataacaaattatgtcatttcttatagctctattccactcatcagctccccttctatgcaggaaggagcatgaaatgggaaaaaaaccgaggttcccactcttggtgtcctaagtgatcagccacaggaagaaaaagatctctgctcattttccctctcacttactattgcccaggaatcttggatctcttcagaatagtgggcaaactgagagaaagcaagttcatttaatcctcaaaacaaccctatagattccattctgttatcatcawccccatttcacagatttcacaatggacagggaggagcagcattgaagggatcagtaacctgcccaaggtccattttaacacaagagctttctgacttcattcaggctcccctctctgtga

SEQ ID NO: 679213 - DNA, 658 bp, Homo sapiens
ttccattaatgggaatattactacattgagaggctgctcattccattgctggacctctatatttgtttcaaaagttgttaattcaagctaaagccgggttctctattactagtgtctgtcatcaggaattagaaagaataaattttagtccctcttccatatggcagtcactatagtatccaaggaagggcaaataatcattgataaccacaccactaaagcccttckcccagctgaaaaccaccagggtttttataaatcttctagaataatataaattttcagacaccacagaaatagaagctttgaattgccgatgagcagattaatcattttcagatggtctcagggaactaaacagtcacttcctcggtgggcctctttcgaagagggcactttcatgtttattacttgcaagggttggcaaatggtagaattattttttaggatgataaggatttatatttctatctagtctgccactaattaaaagtatattatcttccctactgaagttggggtaattggtggttattttcagagcaactcatcagggtgagacagattctttctgattgaggtagcagaggtgttgaacattcattgtgtactgagttcacgtttctagtatcacaatttcccacaccacatgcgtgat

SEQ ID NO: 679214 - DNA, 658 bp, Homo sapiens
ttccattaatgggaatattactacattgagaggctgctcattccattgctggacctctatatttgtttcaaaagttgttaattcaagctaaagccgggttctctattactagtgtctgtcatcaggaattagaaagaataaattttagtccctcttccatatggcagtcactatagtatccaaggaagggcaaataatcattgataaccacaccactaaagcccttcgcccagctgaaaaccaccagggtttttataaatcttctagaataatataaattttcagacaccacagaaatagaagctttgaattgccgatgagcagattaatcattttcagatggtctcagggaactaaacagtcacttcctcggtgggcctctttcgaagagggcactttcatgtttattacttgcaagggttggcaaatggtagaattmttttttaggatgataaggatttatatttctatctagtctgccactaattaaaagtatattatcttccctactgaagttggggtaattggtggttattttcagagcaactcatcagggtgagacagattctttctgattgaggtagcagaggtgttgaacattcattgtgtactgagttcacgtttctagtatcacaatttcccacaccacatgcgtgat

SEQ ID NO: 679215 - DNA, 616 bp, Homo sapiens
tgcttttaggcaacaattctttactgcatgttaacatactgaatactgtagataactgtaacacaagtatatttgtgtatctaaatatagaaaaggtacagtaaaaatatattataatcttatgaaacctcagttgtatgtgtactctaccactgatcaaaatgtcattatgtggtgcatgactgtatgtgaacatttcttgatcataaaaataaagtgtatgttgacttagttagtgccctggcaagttaatatgtatgttgacaaactataatgcttaacatgagtatggttaaaataacactatgtgaatatataaacacatgtctatacatatacacatatatacctatatatacacacacatataaatatatacatgcttataaattacagtctgtcttacattagctaaactattactacagtttgagataaatttgagatgttacaattggaaatmtcctgtttcaatttgagaagggaaaatgttggcatattctccctgagtggagaaagaggctttctatgtcagcagatacttcagaggaacgttaatgtctcgaggtttctagcaaattaacagcccaggtaacaaaatgcagggaactctggc

SEQ ID NO: 679216 - DNA, 673 bp, Homo sapiens
ttgaaaataaatgcttaatggaataaaaaatgtacagttgtaggtgctactttgtaaatgagaatcaggctgcagaaatatctttttcatgaaatgcagagtgaaagtggcttccttgttctattctccatgattaactgagaaatctaggaggggctacacaaaatggtggaaactggaaagtaaaagagttggtgggggggggtcagaggaagagtgagagcaatgttcttaaccttaatatttaaaagctatctacaacagagatgtcctataaaaggtactcaactattattttttctctcttgcccttaccgctttatagcctagaacatgaaggcttgccaagtcacagaggttaagttacagagagaaagggatgggaaccactttggcttctttggtccccaaatatctgttcccatcaatctattatttttgagaaagatacatgatgaggactaaattctgattttttcatcttgtccaaattcctatctaaggggtctgggaagtcatgccctacaaaycataaattgtcatcggatgggttttatttaaccttatatatatcgtgacttactttccaatctgactctggcataacattacaagacaaggaagaaaattaaaatattttactccaaaacatgcttctttgccatatcttgaa

SEQ ID NO: 679217 - DNA, 583 bp, Homo sapiens
tggctcagatgggcgattcacacctcctctccatctcccccatccccttacagacagtattaagggccttgccactttcttttgttttgttgacttgctgtttcctcagcatatattcaataaaagttttctgtaggaatcaataagtgcatgaatgaatgaaattaccaggcatgggarttcattgattcaaaacgtggaggctgcccctgccttggcctcccgcctacctgaagaaacccacagttccatcacctgtgctcacttgagtttagaaatcccctggaaactatcattgagagcatcactgcagatgcctactccccatgcccaaacactatcatggaggtgaggatgctcccaacagtattgtgcatgatgcctcctgtattggaccccacacgtccccatcagtttaacaaggaagggtgccatctgcactgccttgccatccaacctgctcacatacacaccttggaccagccctctaccccagacactgtctggtggcatcataggccagtgattagagccccaggatacctgtctgcttttgtctcaagagctcagaagcctcagaagt

SEQ ID NO: 679218 - DNA, 651 bp, Homo sapiens
aaaacagaaaccagggttgataagtaaaatctagttttatttattgaattaatgagttaacgtattgtttagagacaggatcyccttccgctgcccatgctggagtgcaggggcacaattatggttcactgcagcactgacctcctgggctcaagtgatctttctgcctcttcctcctaagtagctaagactgtaggcgcctgccaccacacccagctaattttttaagaacattttttgtacagatggggtcttgctatgttgcttaggctggtcttgaactcctggcctcaagtgaccctcctgccttggcctcccacagtgttgggattataggtgtgaggtactgtgcctggccaaatctagttttagggggtgcctttagttcctgaagatacatgctaacttgtgcaactgtaggcatgtgagggcttaatgggagactcaattaatagaattatagtatgtttagtattaaaagacagtgagtggctgaacctagtgtctttagaactcatgaatgggcttcagcactgtcttctgattgtttagatgaaaacttctggtgttcagcttcagcttgtagcttctgaagagaatcagtgctcagtaccatgtagaagaacaaggcttactcttagaatttcattt

SEQ ID NO: 679219 - DNA, 1193 bp, Homo sapiens
agctttttaattgaattatactttcagaaaagtgccttggatgaattttcactaagtgaacacacccatgtatccaccatccagataataagatagcacttcaccagcaccccagaagtccccatcctgggtgctcattagccatcccgccccaccctccaggtgaccaccaccctgaccttctacaaattagagatccatttggtctgttttgaactttatacaaatgctatcatgcagggaactttttaatatccrgtttctttcactcaacattatgaactttatctgtatcatttgtagctttagttcattctctttgctgttgagaattctgatgcataaatataaaattatttatattttataaaatacttatattttattttatttttttcttttttttgagactgagtctcgctctgttgcccaggctggagtgtgatctcagttcactgcaacttctgcccgggttcaagcaattcttgtgcctcagcctcctcagtagatgagattacaggtgtgcaccaccacacccagctaatttttgtatttttagtagagatggggtttcatcatgttgacccaggctggtctcgaactcctgacctcaagtgatctgcccgctttggcctcccaaagtgttgggattataggcaagagccaccacgcctggcctatatttatattttatattcatattttgtatcagtgatctcttctactgttgatggccatttgagttgcttaccgattttggccactaagagcagtgctcctgtgaacattcttgtatgtatattttgatacatgtgtctgcatttttgctgagtatatcacaggagtaaagtcgctgagccatagagctgatacatgctcagctttaggtgtttgcaaacatccaaagtggatgcaccagtttgtgttctcccagcagtgtacaagggtttccattgctccacatcctaacctacacttgatatcgtcagttttttttaattttagcccttctggtgggggtgtggtattatctcactgtggccttgatttacattccactgatggccaatgaggttgcacactttttcgtatgtttatgtttgtttgccatgggctagctatttttgtaagattcctgttcaagtcttttgcccattttttattggagtctttgtgtgtgtgtgtgtgtgtgt

SEQ ID NO: 679220 - DNA, 663 bp, Homo sapiens
tgtaacagcttttggtggccaggcacagtggctcacgcccataatcccagcactttgggaggccaaggcgggcggatcacctgaagtcaggagtttgagaccagcctgaccaatgtggagaaaccctgtctctactaaaaatacaaaattagccaggtgtggtggcacatgcctgtaaactcagctactcaggaggctgaggcaggaaagtcgtttgaacccgggaggcagaggttgcagtgagccaagatcgcaccattgcactccagcctgggcaacaagagtgaaactctatcaaaaacaaacaaacaaacagcttttggtgagttctgtgagtcctaggtaattatcaaaactcagggtgcttttgctcccctctcttgaacttccagttcagaagtgagagtagtcttgcctggactgtgttccctctaactgtacagtcatcagactctcacagccacatgtctgccccatagcaccacctatataggaaaatcccacacacacttgcagctcacagcctaagttttgaatgactccctttaggctgattctttatgcagacgccagctytgtgtagcctttgaccattccaccttctgcttgttctctgttgttctttctgtattacctagagccattttaccatccgtaagatta

SEQ ID NO: 679221 - DNA, 674 bp, Homo sapiens
taggagcaagtcgtrcagattttcaaggatttgttttattcagtaaaataaagtgctgctatactgtaagttttaggaggcaggagtttttatcttttgcttattaatatgtcactgatggttaaacagtatgtaatgcaaagtaggtgttcactaataattattgaagaaataaagtgtcatttctgtgttgttttaatttggatttattagtaagggcaacttatttgactattagttctaatgattaaaatgtaatgagcattaaggaaataaaaggttctatgtggattttgaaggtcatctctatcaatttgaggttgaatgggaagaacagttttcttgacatccttcagctgtgttacgagtacaattttgttttttactcaggcaaaagaaaatatgtgtgtgtgtgttaaatacagtcagtcccctttatctgtgggtcctgcatcctcactttctaccaacctcagatcaaaaatattccagaaaaaaaaggatgtttgcatctgtagtgaacacgtacaagctttttttcttgtcattattctttatgcaataaagtgtaacaaccatttaagtagcatttccattgtattaggtattgtgagtaatctagagataatttgaaggatattggagggtgtgtccaggatgcaggcaagtactat

SEQ ID NO: 679222 - DNA, 674 bp, Homo sapiens
taggagcaagtcgtacagattttcaaggatttgttttattcagtaaaataaagtgctgctatactgtaagttttaggaggcaggagtttttatcttttgcttattaatatgtcactgatgrttaaacagtatgtaatgcaaagtaggtgttcactaataattattgaagaaataaagtgtcatttctgtgttgttttaatttggatttattagtaagggcaacttatttgactattagttctaatgattaaaatgtaatgagcattaaggaaataaaaggttctatgtggattttgaaggtcatctctatcaatttgaggttgaatgggaagaacagttttcttgacatccttcagctgtgttacgagtacaattttgttttttactcaggcaaaagaaaatatgtgtgtgtgtgttaaatacagtcagtcccctttatctgtgggtcctgcatcctcactttctaccaacctcagatcaaaaatattccagaaaaaaaaggatgtttgcatctgtagtgaacacgtacaagctttttttcttgtcattattctttatgcaataaagtgtaacaaccatttaagtagcatttccattgtattaggtattgtgagtaatctagagataatttgaaggatattggagggtgtgtccaggatgcaggcaagtactat

SEQ ID NO: 679223 - DNA, 674 bp, Homo sapiens
taggagcaagtcgtacagattttcaaggatttgttttattcagtaaaataaagtgctgctatactgtaagttttaggaggcaggagtttttatcttttgcttattaatatgtcactgatggttaaacagtatgtaatgcaaagtaggtgttcactaataattattgaagaaataaagtgtcatttctgtgttgttttaatttggatttattagtaagggcaacttatttgactattagttctaatgattaaaatgtaatgagcattaaggaaataaaaggttctatgtggattttgaagktcatctctatcaatttgaggttgaatgggaagaacagttttcttgacatccttcagctgtgttacgagtacaattttgttttttactcaggcaaaagaaaatatgtgtgtgtgtgttaaatacagtcagtcccctttatctgtgggtcctgcatcctcactttctaccaacctcagatcaaaaatattccagaaaaaaaaggatgtttgcatctgtagtgaacacgtacaagctttttttcttgtcattattctttatgcaataaagtgtaacaaccatttaagtagcatttccattgtattaggtattgtgagtaatctagagataatttgaaggatattggagggtgtgtccaggatgcaggcaagtactat

SEQ ID NO: 679224 - DNA, 1802 bp, Homo sapiens
aagcatttccagaacttaaaaaagaaagcaaatattttttcttgcagttaagttctatagcagaaaaaagacaaataaatacacttaaattttaatgtatacagtgaaataatgtattacagtattatttcaaacataccattgtctaataaaatattaataactgtataagagattttagctatttttgcacatagtctcagatttttaaataagcactttttagatttaataacattgaaggaatatctgtaagaacttaatatcagaattaatacaaatgatttctgtcacttccatgctcataaaattaagaaactcttaaatgtcaaatctgattaaatatcaaaaattactcatataaatgccatagcttggaaattggatgttactggattttatagcacaaaaagtataagttcctctttaaaaatgaaaatgaaatgtactgtagttattccagggtatatttaaagagcaataaattcaaggaatatgaaagcaaataaattaggaagtcaaaacaagattatctgggcattgtatagagttatgtatctattattttagctcattcagaatattgtggtataagcattttctagaagatatatataatccaacaatatgtttctgttattttcttggactaattgagatttgctattagatgaacaataatgtcttattttatataatggctcaaatataattttatatgatactatgcctgaacacagtgaacaaaatctatataggtaacaatgatgcagcttaattttaagtagtgaagcaaagctgtcttctgctcagaacaaagttatttttctttaaatgcattaaacataagggaaatattagtaggacttgatgaacaacagttaatagtgataattgaaaccatccaatcacctacccatatactatgacatttattatataggaaatttcatcaaaatgttacattgtgtaaaataaaatcatggggcttgatttctttagggtctttaatctttgtggaagaatttcaacctcagctaaaatttagaaaatgaattccgatgaaacttgaaagactgaaatattttaatctccctacatcaggaactgcagatagacactgttactaactggcttcctatgggccagggctgagaggaaaggcaaagcaaacatttggtgccctatctatataatggagctttttttttacaactcagattgttacccatcccatctttcagtaggctgggaagaaaaatgaggaaatactcctttctttctaatgcaaaagaagattaaaattgtatgtatttaccatgtagaacatgatgttttgaagtatatatacattgtggaatgactaaatccagctaattaacatatgtattrtcacatattttgatcatttttgtggttaaaacacttaacacctactctcttagcatttctcaacagtacaataagttattaagtgtaattcaccatgtagtaggttagatctactgaatttattccttctgactgaaattttatatcctttgattaacatatatgcagccttcccagatctcaaccaccccagcctctggtcaccatgattctactctctgtttaagttctatcattttagcttccacatataagtgagaatatgtggtatttgtgcgtctggcttatttcacttagcataacggcctgcaggttcatccctgttgtcacgaatgacaggatttccctcattctatggctgaatagtactcctttctgtatatttaccacatttttaatccattcatctg

SEQ ID NO: 679225 - DNA, 1802 bp, Homo sapiens
aagcatttccagaacttaaaaaagaaagcaaatattttttcttgcagttaagttctatagcagaaaaaagacaaataaatacacttaaattttaatgtatacagtgaaataatgtattacagtattatttcaaacataccattgtctaataaaatattaataactgtataagagattttagctatttttgcacatagtctcagatttttaaataagcactttttagatttaataacattgaaggaatatctgtaagaacttaatatcagaattaatacaaatgatttctgtcacttccatgctcataaaattaagaaactcttaaatgtcaaatctgattaaatatcaaaaattactcatataaatgccatagcttggaaattggatgttactggattttatagcacaaaaagtataagttcctctttaaaaatgaaaatgaaatgtactgtagttattccagggtatatttaaagagcaataaattcaaggaatatgaaagcaaataaattaggaagtcaaaacaagattatctgggcattgtatagagttatgtatctattattttagctcattcagaatattgtggtataagcattttctagaagatatatataatccaacaatatgtttctgttattttcttggactaattgagatttgctattagatgaacaataatgtcttattttatataatggctcaaatataattttatatgatactatgcctgaacacagtgaacaaaatctatataggtaacaatgatgcagcttaattttaagtagtgaagcaaagctgtcttctgctcagaacaaagttatttttctttaaatgcattaaacataagggaaatattagtaggacttgatgaacaacagttaatagtgataattgaaaccatccaatcacctacccatatactatgacatttattatataggaaatttcatcaaaatgttacattgtgtaaaataaaatcatggggcttgatttctttagggtctttaatctttgtggaagaatttcaacctcagctaaaatttagaaaatgaattccgatgaaacttgaaagactgaaatattttaatctccctacatcaggaactgcagatagacactgttactaactggcttcctatgggccagggctgagaggaaaggcaaagcaaacatttggtgccctatctatataatggagctttttttttacaactcagattgttacccatcccatctttcagtaggctgggaagaaaaatgaggaaatactcctttctttctaatgcaaaagaagattaaaattgtatgtatttaccatgtagaacatgatgttttgaagtatatatacattgtggaatgactaaatccagctaattaacatatgtattgtcacatattttgatcayttttgtggttaaaacacttaacacctactctcttagcatttctcaacagtacaataagttattaagtgtaattcaccatgtagtaggttagatctactgaatttattccttctgactgaaattttatatcctttgattaacatatatgcagccttcccagatctcaaccaccccagcctctggtcaccatgattctactctctgtttaagttctatcattttagcttccacatataagtgagaatatgtggtatttgtgcgtctggcttatttcacttagcataacggcctgcaggttcatccctgttgtcacgaatgacaggatttccctcattctatggctgaatagtactcctttctgtatatttaccacatttttaatccattcatctg

SEQ ID NO: 679226 - DNA, 1802 bp, Homo sapiens
aagcatttccagaacttaaaaaagaaagcaaatattttttcttgcagttaagttctatagcagaaaaaagacaaataaatacacttaaattttaatgtatacagtgaaataatgtattacagtattatttcaaacataccattgtctaataaaatattaataactgtataagagattttagctatttttgcacatagtctcagatttttaaataagcactttttagatttaataacattgaaggaatatctgtaagaacttaatatcagaattaatacaaatgatttctgtcacttccatgctcataaaattaagaaactcttaaatgtcaaatctgattaaatatcaaaaattactcatataaatgccatagcttggaaattggatgttactggattttatagcacaaaaagtataagttcctctttaaaaatgaaaatgaaatgtactgtagttattccagggtatatttaaagagcaataaattcaaggaatatgaaagcaaataaattaggaagtcaaaacaagattatctgggcattgtatagagttatgtatctattattttagctcattcagaatattgtggtataagcattttctagaagatatatataatccaacaatatgtttctgttattttcttggactaattgagatttgctattagatgaacaataatgtcttattttatataatggctcaaatataattttatatgatactatgcctgaacacagtgaacaaaatctatataggtaacaatgatgcagcttaattttaagtagtgaagcaaagctgtcttctgctcagaacaaagttatttttctttaaatgcattaaacataagggaaatattagtaggacttgatgaacaacagttaatagtgataattgaaaccatccaatcacctacccatatactatgacatttattatataggaaatttcatcaaaatgttacattgtgtaaaataaaatcatggggcttgatttctttagggtctttaatctttgtggaagaatttcaacctcagctaaaatttagaaaatgaattccgatgaaacttgaaagactgaaatattttaatctccctacatcaggaactgcagatagacactgttactaactggcttcctatgggccagggctgagaggaaaggcaaagcaaacatttggtgccctatctatataatggagctttttttttacaactcagattgttacccatcccatctttcagtaggctgggaagaaaaatgaggaaatactcctttctttctaatgcaaaagaagattaaaattgtatgtatttaccatgtagaacatgatgttttgaagtatatatacattgtggaatgactaaatccagctaattaacatatgtattgtcacatattttgatcatttttgtggttaaaacacttaacacctactctcttagcatttctcaacagtacaataagytattaagtgtaattcaccatgtagtaggttagatctactgaatttattccttctgactgaaattttatatcctttgattaacatatatgcagccttcccagatctcaaccaccccagcctctggtcaccatgattctactctctgtttaagttctatcattttagcttccacatataagtgagaatatgtggtatttgtgcgtctggcttatttcacttagcataacggcctgcaggttcatccctgttgtcacgaatgacaggatttccctcattctatggctgaatagtactcctttctgtatatttaccacatttttaatccattcatctg

SEQ ID NO: 679227 - DNA, 661 bp, Homo sapiens
ggtttagtccatgaacttccttccaagaaaggatcgtggtaaaagaggaggaatcttagctagcggaaagagatttgataggcttcaaacatccatgtaaaataaaataatcttctcattctagcttttttaaaaacaaattttacttgtgaagattaattggtgacttgtgaagattaattggtgacatttgccaactctttcttctcaaatttcccaattcttttttttttttttttttgagacagcatcttgctctgttgcccaggctggagtacagtggcatgatcatagctcattgcagcctcgaactcccagcctcaaacgattgcgctggcttagactctgaaagtactgcgattacaagcttgagccacctcactcagccccaattctcatttaaaaaatacattagaactcatgttaattcagtgttataagacgcatttgttacttcagtagtaaacactataccttagaccatttccttgaaggattttttgccatgtttaggtgatgactttcaagygattaaaattcatttttctttttctagcttctgactctttctcactcatttaacaagctaaaaatcttacattctctttaccttacctttccttgagaattgaataaatatcttgaaaacttagtaaattcc

SEQ ID NO: 679228 - DNA, 915 bp, Homo sapiens
atgactgaacaaccgagaagagcccgactgtctactgaacaacgggaagagcccgactgtcaatgacggagctctgttaaatatagttaaggctattttgttgaatgaatgaagccagacaggaaagaggacagtatctttaatccatttatagaagttaaagacaggcttatttaatctctatgaagacagagtggcccttacctctgggtggagcaaaaggcaccttctgaagtgatagggatgttccttatcatcttgatccggagtggtagttacatgcatgtrtgcatatcaaaactcaccaagctgtaccactaagtgtgttcttcctcaataaaaataataaagaactacacttataaagaattttttaataatataggaaaatgtctacactataatctttagctaaaaaaaaaaaaaaagaagccgcctacagaatggtatatgcatgagaacaattaatcgaaaagtgcatgggaaaagtcaggattgaaacatcatgttttaaaagacattgttttgatactgtgagaatgtacctaagtttttccttttttctgtttttcccaattttatacaatgagcatgtgttggttttataattagacattttgtttgtttggtttggttttgagacacagcttgctgtcacccaggttggagtgcaatggcccaatcttggttcactgcaacctccatctcctgggttcaagagattctcccacttcagcctcctgagtagctgggactataggggcgcaccaccacatccagctaattttgtgtatttttagtagagatggggtttcaccatgctggccaggttggtctcaaactcctgacctcaagttatccactcgccttggcttcccaaagtgctgggattataggcatgagccaccgcacttg

SEQ ID NO: 679229 - DNA, 671 bp, Homo sapiens
ttgaagggaaagagattacagagggcccatgaattagttgaagagtaattaaaagctaggcatgtaaaaccacacattacgctttaaagaagaaatttaaacctaattaaatgatatttgttaaattagaaggtaaaaatgttgtgccctgttgggaacaggcccccaaatctggccataaactggccccaaaacaggccataaacaaaatctctgcagcaccatgacatgtttgtgatggccatgatgcccaccttgaaggttgttggtttactggaatgagggcaaggaacacctggcccacccagggcagaaaattscttaaaggcattcccaaaccactaatgatagcatgagcaatctgtgccttaaggacatgttcctgctgcagacagctagccagagcccatccctttgttttggcccatccctttgtttcccataaggaatgctttcagttaatctatgatctatagaaacgatgcttatcactggcttgctgtcaataaatatgggagtaaaactctgttcagggctttcagctcagaaagccataagccccctgatttcccacttcccaccctttatttctgtgtgtgtgtcttgaattcctctagcgcctctgggttatggtctccacaaccacgctggtcttggcagtgcccttctca

SEQ ID NO: 679230 - DNA, 671 bp, Homo sapiens
ttgaagggaaagagattacagagggcccatgaattagttgaagagtaattaaaagctaggcatgtaaaaccacacattacgctttaaagaagaaatttaaacctaattaaatgatatttgttaaattagaaggtaaaaatgttgtgccctgttgggaacaggcccccaaatctggccataaactggccccaaaacaggccataaacaaaatctctgcagcaccatgacatgtttgtgatggccatgatgcccaccttgaaggttgttggtttactggaatgagggcaaggaacacctggcccacccagggcagaaaattccttaaaggcattcccaaaccactaatgatagcatgagcaatctgtgccttaaggacatgttcctgctgcagacagctagccagagcccatccctttgttttggcccatccctttgtttcccataaggaatgctttcagttaatctatgatctatagaaaygatgcttatcactggcttgctgtcaataaatatgggagtaaaactctgttcagggctttcagctcagaaagccataagccccctgatttcccacttcccaccctttatttctgtgtgtgtgtcttgaattcctctagcgcctctgggttatggtctccacaaccacgctggtcttggcagtgcccttctca

SEQ ID NO: 679231 - DNA, 649 bp, Homo sapiens
aacatcagttctaaggggcaattggggcagtgctataatgagtggtagaaatgaaactcaaacccagatctatctgatcccaatgcccatgctctaaggtcaaaagagctacaaaacagtgtttccaaaactctcaacactgcatagaatttaccccagctacatattctgtactctgtcatataccactcagtatgtcatgacattcacttttttttttttttttttgagacggcgtctcgctctgtcacccaggctggagtgcagtggcgtgatcttggctcactgcaagctctgcctcctgaattcacgccattctcctgcctcagcctcccaagtagctgggactacaggcgcccaccaccacaccagcctaattttttgtacttttagtagagacgggtttcaccaygttagccagggtggtctcgatctcctgacctcatgacccacccacctcggcctcccaaagtgctgggattacaggcgtgagccactgcgcttggccgacattgactttttttactcaaactccctaacggaaatgtcccatgacatccacagacaataaatgactcttacttggcataattagaaaatagccatgaaaataaacctgaggaaacaaagcaatactgttaaattcttg

SEQ ID NO: 679232 - DNA, 593 bp, Homo sapiens
tttttttttctttttttctttttyttctttttttttttttgagacagactcttgctctttcgccaggctggcgtgcaggagtgcagtggcgtgatctcagttcactgcaacctccaccacctggggtcaagtgattctcctgcctcagcctcccaagtagctgggactacaggcacccgccagcacacacagctaatttttgtatttttagtagagatggggtttcaccatgttggtcaggatggtctctatctcttgaccccgtgatccacccgcctaggcttctcaaagtgctgggattacaggcaagagccaccgcacccagcccacaatttactgttaagtgcactctacctcgtgggtcttcagaggccctggattggtgtctcatctctcaaggtttcaccccacgcgggagtgggtaggagctggaaaaagcccccctgccggacccctgacactcgcagtgtactcagagctttacctcccagcccagacctgcaaattattaagccggaagagaatttcaaacctagcctgatcccttcacactgagtcccaggtgccacagcagcacagacccaaatgcctta

SEQ ID NO: 679233 - DNA, 957 bp, Homo sapiens
gccaccatgaatattgtacggtaccataaatacttgaccacctatagtacataaaaacccaatccacatcaaaaccccctccccatgcttacaagcaagtacagcaatcaaccctcaactatcacacatcaactgcaactccaaagtcacccctcacccattaggataccaacaaacctacccacccttaacagtacatagcacataaagccatttaccgtacatagcacattacagtcaaatcccttctcgtccccatggatgacccccctcagataggggtcccttgrccaccatcctccgtgaaatcaatatcccgcacaagagtgctactctcctcgctccgggcccataacacttgggggtagctaaagtgaactgtatccgacatctggttcctacttcagggtcataaagcctaaatagcccacacgttccccttaaataagacatcacgatggatcacaggtctatcaccctattaaccactcacgggagctctccatgcatttggtattttcgtctggggggtgtgcacgcgatagcattgcgagacgctggagccggagcaccctatgtcgcagtatctgtctttgattcctgcctcatcctattatttatcgcacctacgttcaatattacaggcgaacatacctactaaagtgtgttaattaattaatgcttgtaggacataataataacaattgaatgtctgcacagccgctttccacacagacatcataacaaaaaatttccaccaaaccccccctccccccgcttctggccacagcacttaaacacatctctgccaaaccccaaaaacaaagaaccctaacaccagcctaaccagatttcaaattttatcttttggcggtatgcacttttaacagtcaccccccaactaacacattattttcccctcccactcccatactactaatctcatcaatacaaccc

SEQ ID NO: 679234 - DNA, 957 bp, Homo sapiens
gccaccatgaatattgtacggtaccataaatacttgaccacctatagtacataaaaacccaatccacatcaaaaccccctccccatgcttacaagcaagtacagcaatcaaccctcaactatcacacatcaactgcaactccaaagtcacccctcacccattaggataccaacaaacctacccacccttaacagtacatagcacataaagccatttaccgtacatagcacattacagtcaaatcccttctcgtccccatggatgacccccctcagataggggtcccttggccaccatcctccgtgaaatcaatatcccgcacaagagtgctactctcctcgctccgggcccataacacttgggggtagctaaagtgaactgtatccgacatctggttcctacttcagggtcataaagcctaaatagcccacacgttccccttaaataagacatcacgatggatcacaggtctatcaccctattaaccactcacgggagctctccatgcatttggtattttcgtctggggggtrtgcacgcgatagcattgcgagacgctggagccggagcaccctatgtcgcagtatctgtctttgattcctgcctcatcctattatttatcgcacctacgttcaatattacaggcgaacatacctactaaagtgtgttaattaattaatgcttgtaggacataataataacaattgaatgtctgcacagccgctttccacacagacatcataacaaaaaatttccaccaaaccccccctccccccgcttctggccacagcacttaaacacatctctgccaaaccccaaaaacaaagaaccctaacaccagcctaaccagatttcaaattttatcttttggcggtatgcacttttaacagtcaccccccaactaacacattattttcccctcccactcccatactactaatctcatcaatacaaccc

SEQ ID NO: 679235 - DNA, 957 bp, Homo sapiens
gccaccatgaatattgtacggtaccataaatacttgaccacctatagtacataaaaacccaatccacatcaaaaccccctccccatgcttacaagcaagtacagcaatcaaccctcaactatcacacatcaactgcaactccaaagtcacccctcacccattaggataccaacaaacctacccacccttaacagtacatagcacataaagccatttaccgtacatagcacattacagtcaaatcccttctcgtccccatggatgacccccctcagataggggtcccttggccaccatcctccgtgaaatcaatatcccgcacaagagtgctactctcctcgctccgggcccataacacttgggggtagctaaagtgaactgtatccgacatctggttcctacttcagggtcataaagcctaaatagcccacacgttccccttaaataagacatcacgatggatcacaggtctatcaccctattaaccactcacgggagctctccatgcatttggtattttcgtctggggggtgtgcacgcgatagcattgcgagacgctggagccggagcaccctatgtcgcagtatctgtctttgattcctgcctcatccyattatttatcgcacctacgttcaatattacaggcgaacatacctactaaagtgtgttaattaattaatgcttgtaggacataataataacaattgaatgtctgcacagccgctttccacacagacatcataacaaaaaatttccaccaaaccccccctccccccgcttctggccacagcacttaaacacatctctgccaaaccccaaaaacaaagaaccctaacaccagcctaaccagatttcaaattttatcttttggcggtatgcacttttaacagtcaccccccaactaacacattattttcccctcccactcccatactactaatctcatcaatacaaccc

SEQ ID NO: 679236 - DNA, 1069 bp, Homo sapiens
catccttgtcttgtctagatcttagaggaaaggctttcagtttttccccattcagtgtgatactaactgtggctctgtcatatatgactattactgtgtttaggtatattccttctatatccggtttttcgagagtttttatcctgaaacgatgttgaattttattaaatgcttctttagcatcagtttacatgatcatatgccccgtgtttctttccactgtgataggacagcactgagttccagtgcaaagtcccacaatcaccgtactctccttcccccaagcgcagaggtttttctctctgtgcccatgtggctgctgctggggaatgagggaaggacggtataggcaattcaagactggctttcctaccctcttcagtgcctctttccttgatgtgatgttaaaaccaggtattgtgattgttcacctggattttggttcttatgaagatgctttgtgtgtgtgtgtgtgtgtgtgtgtgtgtggctagttgttcaatttggtgttcctgcagggaggacacttgctggaggtttctacagccttcttgctctgcttcatcctctatgttggccatttttatctgacaaagctgtggcttttcactgccacccccagttgagtctacccactggggcagcaaagctgctgayttcccagccagcctttttctgacaaaactaaggtctcactgagctaggagggacaggagtagtctcaggcaaaaaggccatagtgcctgctctacttaatgccaagttctagcagtttttaaatattaaattttgtttaatttattgctcccccttgatgaattcccagattcctaaaatggttatttgttgacaatgttgtccagttttgtacttggtttttgtagaaatgatttgtcaaccttctcatgccattatacctgcaagcctggcttccatggattacaattttttttttcatggcccactttttaaccttggctaatattctgatttctagatctttgactggctgtttttatgctgcctagtcttttgctactctccctttcaagtccctgttctgtcctgg

SEQ ID NO: 679237 - DNA, 1069 bp, Homo sapiens
catccttgtcttgtctagatcttagaggaaaggctttcagtttttccccattcagtgtgatactaactgtggctctgtcatatatgactattactgtgtttaggtatattccttctatatccggtttttcgagagtttttatcctgaaacgatgttgaattttattaaatgcttctttagcatcagtttacatgatcatatgccccgtgtttctttccactgtgataggacagcactgagttccagtgcaaagtcccacaatcaccgtactctccttcccccaagcgcagaggtttttctctctgtgcccatgtggctgctgctggggaatgagggaaggacggtataggcaattcaagactggctttcctaccctcttcagtgcctctttccttgatgtgatgttaaaaccaggtattgtgattgttcacctggattttggttcttatgaagatgctttgtgtgtgtgtgtgtgtgtgtgtgtgtgtggctagttgttcaatttggtgttcctgcagggaggacacttgctggaggtttctacagccttcttgctctgcttcatcctctatgttggccatttttatctgacaaagctgtggcttttcactgccacccccagttgagtctacccactggggcagcaaagctgctgatttcccagccagcctttttctgacaaaactaaggtctcactgagctaggagggacaggagtagtctcaggcaaaaaggccatagtgcctgctctacttaatgccaagttctagcagtttttaaatattaaattttgtttaatttattgctcccccttgatgaattcccagattcctaaaatggttatttgttgacaatgttgtccagttttrtacttggtttttgtagaaatgatttgtcaaccttctcatgccattatacctgcaagcctggcttccatggattacaattttttttttcatggcccactttttaaccttggctaatattctgatttctagatctttgactggctgtttttatgctgcctagtcttttgctactctccctttcaagtccctgttctgtcctgg

SEQ ID NO: 679238 - DNA, 1883 bp, Homo sapiens
tgcatgtgagtgtgcatgggcatgcattctggaagcaaggaagcccctcctcacttcgagcaccttcacccatccaagcatgtcattattctctgcttttagggtgcaaggccattagggttcctctgaaagttgaactaaattctcaacccttagtcaaatgtcctctcctagccacatacccttccgatttttttcttccagaagtcccaggcgaaaaggttcctcattgttagcactgcctgtgccttcctctttttagtttctggatgtcagttcacttttttggtgaaaaattaacaatatgttgtcactttatgaacactgtgtgccaagcagtgtgccaagcccttcacacacattatcttgcccattctttatgtgtttctcattgtaccgaggagaatactgagggcttaagcaacaaggtagtttgtcaaaagtcatgcagctgattgaaggtggagtcagaattcgaacctacgttcatcagattccagagtgcattctctccaccacagtatagggttgtgaaagcaacctttgggaacattattcctttagactgcttcctagccaagcttcctgaaaacacataagaccattgagtactaactgctgttttctttaaggagttaaggttaacagactctttacacttcccttctcctctgaaatcactggagtgggagtagggttgcagctaaaagggaactcattgacaacctgcagatttttatacaaaatccccttggaactggtttttctcatagcagttgctttgagtttctgagtgcaataacttaaggtctaaaatgaaaacgcctcaaaatttcaaaatactcctccttgttggcagatttccattaaacctgattcagcattttcagtcagggaacaagtcacaagatatccccaaatcagaggcaactaacagacactctaatcatgttaaacttctcgcagttttatgaacaaaccattctctcctgcctctttgtaccttttccttctgcctgacacctctctctgaacccaactatttgccagtggcacagttttgagggaggcatttagccatcctggctctgccctggaggagtccttatctgaaccctaaagcagcgcttgatgtctcactcctagggaagcctgggaaggagaaggttgttaaaatctgggccctgccccaaatctactacgtcagaatctctagggtggatcctggggaagacgcatctcaacaagttctccaggcgcttgggaagatgtcctggaccaaggttccaagcgttgaatcgttacttcatcttcacaatttttatcttgtactttaaaaaaattaacaaacactgatgtggagcttactgtgttccaggcactcatgcagtgatcatagcaaccctagtgaggaaggcaccgtcatcatccctgtgctgcagacaaggaaacaggggcaccaagaggttaaggaactggtcccgccgggcgcggtggctcacacctgtaatcccagcactttgggaggccgaggcgggcagatcacgaggtcaggagatcgagaccatcctggccaacgtggtgaaaccccgtctctactaaaaatacaaaaaattagccaggcgtggtggcgggcgcctgtagtcccagctactcgggaggctgaggcaggagaacgacgtgaacccgggaggcgkagctttcagtgagcggagatcgcgccactgcgctccagcctgggcaacagagcgagaccctgtcttaaaaaaaaaaaaaaaaaagaaactggtccgaagtcacccatcaagtaagcggcagaactggctcctgcctgctgcactctcctacttctttatatctgtggattttttttttcatttaaa

SEQ ID NO: 679239 - DNA, 1883 bp, Homo sapiens
tgcatgtgagtgtgcatgggcatgcattctggaagcaaggaagcccctcctcacttcgagcaccttcacccatccaagcatgtcattattctctgcttttagggtgcaaggccattagggttcctctgaaagttgaactaaattctcaacccttagtcaaatgtcctctcctagccacatacccttccgatttttttcttccagaagtcccaggcgaaaaggttcctcattgttagcactgcctgtgccttcctctttttagtttctggatgtcagttcacttttttggtgaaaaattaacaatatgttgtcactttatgaacactgtgtgccaagcagtgtgccaagcccttcacacacattatcttgcccattctttatgtgtttctcattgtaccgaggagaatactgagggcttaagcaacaaggtagtttgtcaaaagtcatgcagctgattgaaggtggagtcagaattcgaacctacgttcatcagattccagagtgcattctctccaccacagtatagggttgtgaaagcaacctttgggaacattattcctttagactgcttcctagccaagcttcctgaaaacacataagaccattgagtactaactgctgttttctttaaggagttaaggttaacagactctttacacttcccttctcctctgaaatcactggagtgggagtagggttgcagctaaaagggaactcattgacaacctgcagatttttatacaaaatccccttggaactggtttttctcatagcagttgctttgagtttctgagtgcaataacttaaggtctaaaatgaaaacgcctcaaaatttcaaaatactcctccttgttggcagatttccattaaacctgattcagcattttcagtcagggaacaagtcacaagatatccccaaatcagaggcaactaacagacactctaatcatgttaaacttctcgcagttttatgaacaaaccattctctcctgcctctttgtaccttttccttctgcctgacacctctctctgaacccaactatttgccagtggcacagttttgagggaggcatttagccatcctggctctgccctggaggagtccttatctgaaccctaaagcagcgcttgatgtctcactcctagggaagcctgggaaggagaaggttgttaaaatctgggccctgccccaaatctactacgtcagaatctctagggtggatcctggggaagacgcatctcaacaagttctccaggcgcttgggaagatgtcctggaccaaggttccaagcgttgaatcgttacttcatcttcacaatttttatcttgtactttaaaaaaattaacaaacactgatgtggagcttactgtgttccaggcactcatgcagtgatcatagcaaccctagtgaggaaggcaccgtcatcatccctgtgctgcagacaaggaaacaggggcaccaagaggttaaggaactggtcccgccgggcgcggtggctcacacctgtaatcccagcactttgggaggccgaggcgggcagatcacgaggtcaggagatcgagaccatcctggccaacgtggtgaaaccccgtctctactaaaaatacaaaaaattagccaggcgtggtggcgggcgcctgtagtcccagctactcgggaggctgaggcaggagaacgacgtgaacccgggaggcgtagcttkcagtgagcggagatcgcgccactgcgctccagcctgggcaacagagcgagaccctgtcttaaaaaaaaaaaaaaaaaagaaactggtccgaagtcacccatcaagtaagcggcagaactggctcctgcctgctgcactctcctacttctttatatctgtggattttttttttcatttaaa

SEQ ID NO: 679240 - DNA, 616 bp, Homo sapiens
gagccctgccccgccccttcttattttcatctgcaagctttggccatggagatttgacttagcggacgtagggtaaggcctcagcattcatatttttaacacacgccctcgaagagcttgagggccatcataaaggaccttgcttatccctaaaagagaggcaggcatagaaacaccaagggcatggcaatatcacccatcacctcctgtaaggatctgaagattaagcctcctgaatttgtttcttattgccactgtgacagatcatcacaaattttgtagctttaaacaacataaatgcattatcttacaggtctgcaggtcagaattctgaaagaagtctcatggggctaaaatcaaggggtcagcagggctgtgttcctcctggatgcacgaggggaggataacccatttccttgtccatcccagcttctagaggccgcctgcatcccttggcttatagctctccctccatcttcaaagccagcagtgtggtgtctcccagtttctcttcctgtgaccctcctrcctccctattctctcttctaaggaccctcgtgactgcactgggccaacccagatcatctgggatgatctctgcatcttcaagtcctta

SEQ ID NO: 679241 - DNA, 977 bp, Homo sapiens
acatttttccctgggctcttcccacctgaagggacttttcaacttggggaggagcctgccgggagctgccaggtatgtaactcgcccccaagagcatctctcctggggttcgtcttcctcggcagtttctgtcttcaaaaacctctttgttataagtaactctttaccatcaaacatcttaatttgcagactgcgctgtagccatcacccaacaccggagttgagtggtaacaccttggctatcagcagacgcctcagatggcacctgarccctcactggcagctgagatgaaggctccgtggggatgaaatacagacaccccgctcggtgtgtggaggggctggggttgaacaggaaggaggccagaagacggcttctgggaggaggaaaatggctctgacaaggaatgggagccaccaaagacccaagagccaccctcacctcctagcccaggggctgtgcagctcagggctctactgggcatcaccctcataggtggcatcacctctaccgtacgggcacatcaccctcatccagatgaggtggcctgggagcagcagagagcatggcacacgccagctatcatgggtgtttgctacaaatgtctttaatacacgacaaaagtaagctgtggctaattttcattgaacagacgcaaacatcaaggctacagagaggaaagatctgtgaaggccaccagagcctgcaggcacacgccaggccctcccactccggggctgtgcgggcttcttgctgtgctcgtctgtcctcagctgccgtgtgccacacccacccatcactggagtttgtcagagacgccaggccgacaagtgcccctgggttgtcactcctcccatgtccttgggatgctggctgggaaagccctgctctgctgacccctcactcctaaggggctcgcggaagaggccgagggtctgagagctggctccttggcccaaggcagggctgtccaaat

SEQ ID NO: 679242 - DNA, 597 bp, Homo sapiens
tcaagaatagtcaagtaagattgagagatgtgtttctaatgataatcaatttatttatgtggaaggttgtttttcaaaatttattttccctttttatgtaggaatattatgccgtgatcaaagtattacatttcacacataaaagcattctaacatttcttgataactgatggaatggattctttgaaccattaaaaacaaagcattaaattgttttgataactattagtgtgttcacttgaaatgataattaattcattcatatttaattccaaattacttcaatattattctataatcatattactattttaaaaaatttttggatgactcacaaagcctaataaactattggaatttttagccagatttttatcatgataaattgttttactttacttttcgactttactagtttgaaccagaaaatagatgtaaaataattatataacgtataaaatatcagtaggttattaaatcttgtaaatatgaaatracaaatttcacaaatttctctacactttgtattataaatgctaaacatctgttattataaagctgaattattacatttcatttcttcaaccaggtttcagt

SEQ ID NO: 679243 - DNA, 996 bp, Homo sapiens
attcaacctaagctgcaacaaatgcattttcagctcaagccgcgatatgcctctggtctctgcaaagcggtcccgcttggacagggagaccaccacaggcaacaatagcactcgtgatgctgtaatttgatgttctttgtccacagcaggcagctgaagtgatcccctcaccacatgaaggaggctgcaagggaggaatttacaatgccaacattgcctgcagactgcacaaccaagaagttactcaaagctctgtgggagcccctgcctggccaataagagtgtggtcctggattgagccctggaactttcacccaatgaggtggtgattggctaaggctggatcttcagtagcaccctctgcagattctttgacatctgcaaaccaagcgcgttgtgggtggattccgtcccattgtgttcgagagggccgtttatggggcaggggtttccaggagaatctctctgtttccatttctgataaagagggacatgaatgagaagagcatctgggcaccgactaactcccccgccaagactggcttttcagacaaacccatcagcggtttcaaaacctgaaccttagcacatccacttccctctgatatcaaaggaaacttcaagtctgaagcggacttggcaagcatgttattaataactgtcatgcttattaacaaatttaatccggcctgctgcagaaatgagttgcagcaacgtgacacagtctcccgacacacttcattgatgtacatcttaatctggccctgactttcaatactcgcatttaagttatccggggcacacaaagcctctctaacagtggggtctggagtggggctcgtgtttctagccattgagaggctggccaaatggctattgatatcctggctaaatggaaagcccgcatccttgggctcggcaaacaacagttttccctgaatgaaaagacacttggagaggtcyagaacacaactgccatttttacaattttgagca

SEQ ID NO: 679244 - DNA, 996 bp, Homo sapiens
attcaacctaagctgcaacaaatgcattttcagctcaagccgcgatatgcctctggtctctgcaaagcggtcccgcttggacagggagaccaccacaggcaacaatagcactcgtgatgctgtaatttgatgttctttgtccacagcaggcagctgaagtgatcccctcaccacatgaaggaggctgcaagggaggaatttacaatgccaacattgcctgcagactgcacaaccaagaagttactcaaagctctgtgggagcccctgcctggccaataagagtgtggtcctggattgagccctggaactttcacccaatgaggtggtgattggctaaggctggatcttcagtagcaccctctgcagattctttgacatctgcaaaccaagcgcgttgtgggtggattccgtcccattgtgttcgagagggccgtttatggggcaggggtttccaggagaatctctctgtttccatttctgataaagagggacatgaatgagaagagcatctgggcaccgactaactcccccgccaagactggcttttcagacaaacccatcagcggtttcaaaacctgaaccttagcacatccacttccctctgatatcaaaggaaacttcaagtctgaagcggacttggcaagcatgttattaataactgtcatgcttattaacaaatttaatccggcctgctgcagaaatgagttgcagcaacgtgacacagtctcccgacacacttcattgatgtacatcttaatctggccctgactttcaatactcgcatttaagttatccggggcacacaaagcctctctaacagtggggtctggagtggggctcgtgtttctagccattgagaggctggccaaatggctattgatatcctggctaaatggaaagcccgcatccttgggctcggcaaacaacagttttccctgaatgaaaagacacttggagaggtccagaacacaactgccatttttamaattttgagca

SEQ ID NO: 679245 - DNA, 996 bp, Homo sapiens
attcaacctaagctgcaacaaatgcattttcagctcaagccgcgatatgcctctggtctctgcaaagcggtcccgcttggacagggagaccaccacaggcaacaatagcactcgtgatgctgtaatttgatgttctttgtccacagcaggcagctgaagtgatcccctcaccacatgaaggaggctgcaagggaggaatttacaatgccaacattgcctgcagactgcacaaccaagaagttactcaaagctctgtgggagcccctgcctggccaataagagtgtggtcctggattgagccctggaactttcacccaatgaggtggtgattggctaaggctggatcttcagtagcaccctctgcagattctttgacatctgcaaaccaagcgcgttgtgggtggattccgtcccattgtgttcgagagggccgtttatggggcaggggtttccaggagaatctctctgtttccatttctgataaagagggacatgaatgagaagagcatctgggcaccgactaactcccccgccaagactggcttttcagacaaacccatcagcggtttcaaaacctgaaccttagcacatccacttccctctgatatcaaaggaaacttcaagtctgaagcggacttggcaagcatgttattaataactgtcatgcttattaacaaatttaatccggcctgctgcagaaatgagttgcagcaacgtgacacagtctcccgacacacttcattgatgtacatcttaatctggccctgactttcaatactcgcatttaagttatccggggcacacaaagcctctctaacagtggggtctggagtggggctcgtgtttctagccattgagaggctggccaaatggctattgatatcctggctaaatggaaagcccgcatccttgggctcggcaaacaacagttttccctgaatgaaaagacacttggagaggtccagaacacaactgccatttttacarttttgagca

SEQ ID NO: 679246 - DNA, 639 bp, Homo sapiens
aaagtacctagcagagaactggccacggagaggtgcccaagaaacattggggggtcttattgctacaactcaacctaagacagcctgtgcaagaaggtgaccaagcccagatgcctccattcagacctcctctcccactgggaccccatcaccatggcagggcctaacatttcttgttgcccagaactagaaaatcactctgtctgtcttcttagagatcgaacaaagctgggatgtctgcagtgactcttgggaaccagtccccaacaccctcctccagccacttcctcgcccaggaagggccccctatccaggtccacccacccacacatgggtgtccccatccagctcaccccagtgctgggctcttctcaagttaaagtgcccacagtatctccatctctcacatacaggaagcgccgaggctaccagcttggacaagcagtttccccaacacctcttgcagccaaaccccaacctccatacccctggccaattaacctgcagccccggccaggctgttgtatggcctctgccagaacacccactgtttccggggtaagagagctgacttatctctcccatcaacgagrcagtaataaattaagaagctgaagctctggattttgtgacaactca

SEQ ID NO: 679247 - DNA, 1133 bp, Homo sapiens
tgatttagttagtgttcttactttcaggaaaccaagactacgttagaaatcttcaataaaaatgcattttattaaaatgttatttggtagctctgaaatcatcaagaataccgaaaagccaggctcagaaaatgagcaggaataaaggaagaagggcatactgaagaaaacattcgtggttagcgcaaaggcagtgtcagtaacaccaaattcaaaattttacacgggtgacaagcctagttacatgctaaaaagacaattagagctctggaatcttttattgtgtatagtgggaagtgggttttctgtcctataaaattcataatgtaaagcactaaccaaataatgggagctcagatgataggcaaccaaaagtcgtgacaaatattcacagcaaatgtgatgaaggcagattataatgtcgtcatggaagaagcaggtttgtgtaagagggtgcaatatttgtacatggttgatgtgcagaatcaaaagaaattgaagtaatgagatatgatgtaaaggggaaacaagacaaaagagaaattcagcatgaggttcatctgtagatgtttaagcaaatgtaatctgatgtgaataatgtttcaaagggctatctttactacaatatgaaaaagttaaatttaagaaacagagacagaaagttggatatttgagtctggcagttatcaatgttctgtctgtcaatgttttgccaggcaccaatttaataagttgaaaacttctgatacccagttgtttctcctagtcactcctttcttatattctcccaaattgttatgtcgtttcaaaaagtctcattctctgactcctgtgattactaagctaataaagttcctagaacttatactatttcacatgattctaaattctcaacatatatagctactgaataaactaccaccttctgcacagcatatctatattctgaaaaacctgcctttctgaaaaaattcaatatcgttttctcatatcttrctttagaattttgtacaacttatttttgtatcagaagactcttaaatgaactgttgatcttaactattcagctataagtgtgtatcaaagcaatgccttatacaaatttttctcactaatgaaagggagctttgaag

SEQ ID NO: 679248 - DNA, 658 bp, Homo sapiens
ctcctgcagagcagggctactccaaggtcagtatgctgagggtagcagctcaggagcaattatgcagtcatatttatacccacttaattatatgcaaattacggggaaaattatgcagaaatttctagataaagggcagtaacttccgggtcatgggtcgttgccatggaaagaggcattaatgtctggatgttgccatggcaatggtaaagtgacaaggcacactgatgggtgtgtcttatggaaaggtgcttttgcctcttccttgttttagctagtcctcaatctggtccagtgtcgagtcttgcctcctgcctcacttccagtcctcctgttacagatgaagaaacaagggaaacaagggctcagcaaggttcacccccaccaccggcttcccgttacacagttatttctcctgtaaatgtggtaaacgaccaagtccacagtccccctgtggggagattcacsgcgcagactccaggtgtaacgtcaggtcttccttcattgagggaggtctgggtttgcaaactaactcgggtctgggactgggggagggaatgcgtgcctctgtccgggggacagtgggggagggggtctcaagtcggacccctgtttaccaaacccaggcctttctggttgtaaaagccacaggtccttg

SEQ ID NO: 679249 - DNA, 813 bp, Homo sapiens
tttcctcctcctcccataggaacacaaccttgttttttccatactagtaatgcacycagcccccaatttttgtatatagatataaaataagtatacatatttatatatttataaaattatacatttataattatatatatattttttccaaccccccttatagataggtatggccacataacacagtcctggtcaataaaatgtgagtggaaacttgttggggcagtatctaagaaagaacttttaaaaaagaaagacctggctggctcaagcaccttgcccttcatgcctccccatctttgtgcccgaaacatctggaatggctggtgctctggcagctagcctgcatgcatgaagatgtacctggagctgtggaaagctaaaagcaaccagggtgtctgatgacatgctgcactggccctgtagcagcaatatctggactcctgttctcagagacaaaaataaccacctctcttatttaaaccaccgttttgtgggttttctgctaattcagcatatgaagaaaagggagaggggaagagaaacaattcagacaaagaatataaaggttccagatcaccctaaagttttctgccaactttaccagttcttacttgatatttacgttaaataacacatttaaaaatatacaagagtcggctaggcgcggtggctcacatctgtaatcccagcactttgggaagccaacacaggaggatttcttgagcccaggagttcaagagtggccggggcaacatagtgagacctcatctctacaaaaaaatttttaaaaattattcaggcctggtggca

SEQ ID NO: 679250 - DNA, 813 bp, Homo sapiens
tttcctcctcctcccataggaacacaaccttgttttttccatactagtaatgcactcagcccccaatttttgtatatagatataaaataagtatacatatttatatatttataaaattatacatttataattatatatatattttttccaaccccccttatagataggtatggccacataacacagtcctggtcaataaaatgtgagtggaaacttgttggggsagtatctaagaaagaacttttaaaaaagaaagacctggctggctcaagcaccttgcccttcatgcctccccatctttgtgcccgaaacatctggaatggctggtgctctggcagctagcctgcatgcatgaagatgtacctggagctgtggaaagctaaaagcaaccagggtgtctgatgacatgctgcactggccctgtagcagcaatatctggactcctgttctcagagacaaaaataaccacctctcttatttaaaccaccgttttgtgggttttctgctaattcagcatatgaagaaaagggagaggggaagagaaacaattcagacaaagaatataaaggttccagatcaccctaaagttttctgccaactttaccagttcttacttgatatttacgttaaataacacatttaaaaatatacaagagtcggctaggcgcggtggctcacatctgtaatcccagcactttgggaagccaacacaggaggatttcttgagcccaggagttcaagagtggccggggcaacatagtgagacctcatctctacaaaaaaatttttaaaaattattcaggcctggtggca

SEQ ID NO: 679251 - DNA, 813 bp, Homo sapiens
tttcctcctcctcccataggaacacaaccttgttttttccatactagtaatgcactcagcccccaatttttgtatatagatataaaataagtatacatatttatatatttataaaattatacatttataattatatatatattttttccaaccccccttatagataggtatggccacataacacagtcctggtcaataaaatgtgagtggaaacttgttggggcagtatctaagaaagaacttttaaaaaagaaagacctggctggctcaagcaccttgcccttcatgcctccccatctttgtgcccgaaacatctggaatggctggtgctctggcagctagcctgcatgcatgaagatgtacctggagctgtggaaagctaaaagcarccagggtgtctgatgacatgctgcactggccctgtagcagcaatatctggactcctgttctcagagacaaaaataaccacctctcttatttaaaccaccgttttgtgggttttctgctaattcagcatatgaagaaaagggagaggggaagagaaacaattcagacaaagaatataaaggttccagatcaccctaaagttttctgccaactttaccagttcttacttgatatttacgttaaataacacatttaaaaatatacaagagtcggctaggcgcggtggctcacatctgtaatcccagcactttgggaagccaacacaggaggatttcttgagcccaggagttcaagagtggccggggcaacatagtgagacctcatctctacaaaaaaatttttaaaaattattcaggcctggtggca

SEQ ID NO: 679252 - DNA, 1060 bp, Homo sapiens
agtgggagctaaacgatgaggacacatggacacacagaggggggcaacacacactggggcctaccagagagtggtggggggaggcagggagaagattaggaaaaataattaatggatactaggcttaatacctgagtgatgaaataatacgtacaacaaactcccacaacacaagtttacctatataacaaacctgcacatgtacccctgaaattaaaataaaagttaaaaaaaaacagtctatctcaaatctaatttcccacttggaagtatttgctcgttctcccaacatgcaagggccttcactgctctgaatctccatggcaaatattttatcttgtatcacaggcagctaataatttacctttacccaaaactttgcaaccatctgtaaacttgtcaaagtggagactgcrtattcctcacatctatatgttccgaaacacccagaataacaccctgtctcagaagatactcaggaataattccttgacttaaatgcatatggaaatgtccaatacatatcgtaacagaatagctccttccagcttcctggtttgaagtaaaagggagtaacacccttggtctctgagcaaacagctttcctactatcttggagactggtatttttatatatcccagaagtagcatggcacattttataaaaatgtttggagttgaaataaaaaatactaaaccagacaaattctgacctgaaatccataattcctttaaaatccttctgtttaagatgacaagcagagattgattaatccaaggttgatgaatggatagcttcattcaccccaatctgtcttcccctttatctactgagaatacatgttttaccagtgctataatgtttccatggcaatttacattttgaacttttcacaatcgttttctgtcggcattcagcatgctaaaaaagagtggttaggtccacataggaaacagggaaagactcaaccattgagatgttaaaggtcatccttcaaatcagaggcagtgctgagaagagaacactgacttcagagacttgggctctgaaggcatatta

SEQ ID NO: 679253 - DNA, 1400 bp, Homo sapiens
agagaagtcctaaaatggaaaaattttatcatggaaattgacccattcagagcagagagtttatgtgactttatggtacaggaaatttgaaaatcgcatctcatcttttattttctattgtcatgttaaactatggttgtgcctatgggattaagtgaatattctagccacttgcattaaatgattagccagtcttttcatagtgacagttggttgtatgtgctgctagtcctgcagcggtctagtctgctagtggttaactatggagaattggtcagaggagtccctccccctattatacacatctcattaaagactctctgccactgccaaaccagaaaaggcaacttatttcacgattcattaaagaaaacataattggraaggtaattttgtaaagtcatcatcaaacatagtccaccacccagtaggaattatcctctcattatctctttttctagatagtcattgacattgttcccctctgttagcatgaataattaaggactgagcataaagaagtggtgtggacctatggtcaatctgaaggtgtcatcagaagagttagcagggctttcttgccttcagcaggccatttattctgagctaacctgccaattgtatttagaacagggaccattaacagggtgactgtttggctggctgtcagtaggctgtggggctttttccagagcaaatagagaagccagctgggcttcactaagaccacccaggaagagagatcatgtcccacctgatcacattccaagcaggtagcaaatgggctccagttgaattgtacttctgaaggctttctgaaggggtaggggaaaatacctcccatcttagaaattatggctgctagtgtccagtttaaaaaatttctggccctcagcaccaagtgtcttagctttttgtccatctatagctgtcagaaagacacgctttgtcttcctggcaaaactgcctctcaaggtctatgccatcattatggcttggtttaatcaagctaccagggttgcccctgtgtctctcatctggctcttccagaagggacagtttgggaaactttcagagattctgaagatttcatagggggagaccacacttaaggaataagaccctccacacattgcagtgagagtgacatgttcattgccaccaaaagaagcccctctgttaaaacaaacctgattccaaacagagctaaggttgcttgggggctccgtattgtaaggcctatgggcatgcaatgaaataggagttgatgtggactctgaaccctgaagaagcagtttaaatcactagcactgctgtttattagctgggaaattttgggcaatctatttcagttgtcaggtcttcagtttcatcatctctaaaatggggaggacagtgcc

SEQ ID NO: 679254 - DNA, 874 bp, Homo sapiens
tggaaatggagcagatcagacaacagaactttttctacgctaatgtatttaccattgtctctgtattttttaatttaaagatataatagagccaattaatttctttttcattataaaagaagacatgggccatgtatataaaggggtaaaaacacaatatgcatgtttctgagtagtgagaatatgcataagaccagtaacagtctccacatgatatagaagcaaatgtttcttgaatgtctttatactgaaagaactaggggggtcctcttgcagggcacatggagaatattaatgacagagaagagtaaagttgacacattggactttaaaattttttgtcaaatgaactcactggctttctccacctgtcagtctgcttttagagtaactacagtgattctatagtctccaggagaaactctatataaatcataattatttttagaaaattttaatgatgtaaattacacctacccgcctttgtttcttatctgcgtaacactagtatttgttgaattttaacttctgaaagacttcataatgtatgtgggtaattttttaaaataaacttgtgtaataaaatttgctattctctctagggcccttataaattcattttgaaattgtctattatttgaccaagccctaagttcatacttcatgcttttastacaggtgctcttcactgacagaattcagagaatggtcctttttcctttctttttatgtgtcacttattaaataatgtcaagatgaaaaaagattttgtgatacatagcctcaggtgtaaaataaaaagggataaagagctttgcaaataagtctacattctgcaagatgtgcacaatatgcaataatataatactgaaag

SEQ ID NO: 679255 - DNA, 625 bp, Homo sapiens
aaaacgatgcaaatatactctatagttttaccattttccaaaaccaattgcctgtgcatgaatatgattgtgcacacttggacacacacacagagagaacacacacacactgtggtatgcagaattttaagatgatcctcaagattcctttctccagtggtacacatcctatgtagtcaccttcctttaaatgttggtggaaactatgattgtaatggagtatcactcctatgattgtgttactctgcatagaaaaggggttttgaagatgttattcagctgtctaatcggttgacttttattaatcagaagggaaattacactgggtgaaccttatgttatcaggtgagccagtcaaagacagaagaagcagcagaaattctcttttcggtcttgaaggataaaactgccatgttgttgggaggttcatatggaagggaacaataggaacaccctagaagataagggcctcagtcctacaaccacaaaggagtgaattctgcaatcaaatagtgagtttggaagaggacaccaagactcagatgagawcacagcttcagccaacctgctaaatgcactgtagtgagaccctaagtagagggcctagtgaactcgtactcaggca

SEQ ID NO: 679256 - DNA, 1085 bp, Homo sapiens
tgggaatgatttcaaagctccttccggaccacaatgaaggagagatagttagcaacagacaagttccctcccctccataaagccttatacagaaactaatacttaataaactaccttgggaggctgaggtgggtggatcatgaggtcaggagatcgagaccatcctggctaacacggtgaaaccccatctctactaaaaatacaaaaaattagccgggcgtggtggcgggcacctgtagtcccagctacttgggaggctgaggcaggagaatggtgtgaacccgggaggcggagcttgcagtgagctgagatcatgccactgcactccagcctgggtgacacagtgaagactccgtctcaaaataaaaataaaaataaaaataataaactaccatttacagtagacactctaaatatatcatttctaatatcaaaacactgttggttttattgccttttcttatgaatggggaaattaaggcttagagatgtgaattactttgcccagtgtcacacagcaagtaaatacctgaggtggggaggaaaacccatgtcaatgtgagtctcaagtctctgttctttcactatgctaggctgccataattttctaggtatgcatttgccttccttgacttttcacttgttgtaattttgggccagttaagtcagcatcattcagagatagggactccctgctgatggaatttgtcttccttaggtgtcatatccaagtaattacagagtgcagtagagctagattacaatactacacattgtcagtaggtgtcactatcttatctaatgtgattatttgttcaaaagtactcactgagcacttgctatatgaaagtctctaaggatatagtcatgaactgacagagtctctgtttcactcagcttacatttcagtaggggaaagtctgaaccrtgaaaaaatatataatatatcagatagtgatcagtggaataaataaatgctgagatttaaggctaaattaatcagctttgtgagttcgaagtgtgttgaatgagggaggactgtctctagtgacacgaaaccagctgccacacaatgtaagaggtca

SEQ ID NO: 679257 - DNA, 978 bp, Homo sapiens
ggaaatgagaagaggagatgatactcatggattatgggtacactgggataggaagtggctaaaaattgcctttggtcataacccaggtttcggcctgctggatacaccatgctgttagatacagaatacagaagaagagaggggagcaaaaaaaaaaaaaaaaaaaaatttaaaagactaaaaagtctggtggtccttagcaggatcctttctcatgaatctatgcttatggaatcagctagttaacctttgttctggagagaatagagagagactaaaatgctggaaaatcacattagcaaaatttctcttttaatcttttccatatctccttcctttgctattttcaatctgacttaggcaagcaacatcaaaagaaaaaaatccatccactcaaacgaatacgttcttaacttccactcacgcatcagccttaattaaaaaactcagaaaactcatggctgggagagcccagttggaactacatttttcctagtctgagtgcaggatcaggatccaggatctgggatccactcttccatgctcccactttaaacacattaaaatagaggtcacatttgaagaaagattattctttcctttgagccagcaagtgctaaggttatcatattactatccatgctgctttacccaaatcatgtccagtttagagaaaaaaaatatcagaagggatcatgtccttctggacaattccacttaatggtggcatgattaggcttagtggtatgtgtgccctggcttttttgaggtatcaagcaaattctttctttccccactktttttttgtccccaagcaaacctcttatgcccaaggcagcattgtgggtattcaaaggtgatctcatccagcttcttttcagctacaaattcacagggcatacaggttagtttgaagggctttggggatagttaagaatatcttccacagtttggttctgactaattctattccttacc

SEQ ID NO: 679258 - DNA, 1818 bp, Homo sapiens
cctcctgggcccaggacacactcatgcggctaatgcttggtcagtccaggccttctgaggccgttcatcctcacagcagcctcatgtgtgaggccggtcctattattattattgtttgacaagtgaggacaccaaggcacagcgaatgtcacacagatcaatgtcgtcttgcagatagcaggggacagagccaggagtcaagcccaggctggggattcaactccagaatccacactggcctctcccagctatgagaatggcctcggagccctttgaggtgccctcagagcctcggatgccctcagagctgggcattgtgtgacacatccagcactactgttctcccaacaggcagggtgggggccattgtgtccactttcagggaaagaagctgaaaggtggtgtgacttgctcagggccccgaagtttgcttctggagcagctgggacctcagcccaggtctgggacgtccctgtgctgggtgcttggcaggcacgacacatgcaatcttgcacccaagcctatttccgaggtgaatactgaggccccctcagcctggagttatttctgaggtccttgctgtcttttgaggaggaagaaaatggattccccctcccaggcccctaggcttcatgtcccaggtccctttactttttcttcttcttcttcttctttttttttttttttttgagatggagtcttgctctgtcacccaggctggagtgcagtggcrcgatctcggctcactggaacctctgcctcccgtgttcaagcagttctcctatctcagcctcccaagtagctggggttacaggcgtgcaccaccactcctggctaattttttgtatttttagtagagatggggtttcgccatgttggccaggctggtcttgaactcctgacctcaggtgatctgccctcttggcctcccaaattgctgggactataggcatgagccaccgcgcccagccccaggtccctttacttctgttcctctcttgactctctcctttcaaagaggcttctcattccaagaagcgcctggcccactggtcttggtcccgccctgctgacagccagttatcccctgagcccagccaggagactgaaaagctttactgcattctcttaagggcttcacagccaggaaaaccagcaaaggggaatatagtgtctgcagaccggtgaggtccagggtcgctccataaaaatggattcctggaaaaacataaaccagcaatttaccctgtgaattttattggcctaaaaaaaaaaaaaaggctatctcatttgaataatgaagagagataaaccattcctagctcctcttttattagtgaataaggacacaaacactcaacagaaatggaacactcacacaaagcttcaggtctgatttattagccactttagtttcataaaactcagcatttctattaaaataaaatgatgtccaaaaggtttgcttgtttttaagaaaattgcatttaatacagggcaagactttgttatggtttatttatttatttatttattttttaaacaaagctcaaattctcctgacttcacgcctgttactacagctggagggaaaccgatttcagaatctatctgatatgtcggatttctttgtggcatccacttcatcgctcagcagccagccatgatgtcataagcccatcagatttccggtagggggaaaacgctggggaattggaaagaatggatgtttcttacccgtcaggaaggcaggggaaggagctgggtatgtttgggaggagaagccgcgtggctggtgggggacaggagcaggctcaa

SEQ ID NO: 679259 - DNA, 1818 bp, Homo sapiens
cctcctgggcccaggacacactcatgcggctaatgcttggtcagtccaggccttctgaggccgttcatcctcacagcagcctcatgtgtgaggccggtcctattattattattgtttgacaagtgaggacaccaaggcacagcgaatgtcacacagatcaatgtcgtcttgcagatagcaggggacagagccaggagtcaagcccaggctggggattcaactccagaatccacactggcctctcccagctatgagaatggcctcggagccctttgaggtgccctcagagcctcggatgccctcagagctgggcattgtgtgacacatccagcactactgttctcccaacaggcagggtgggggccattgtgtccactttcagggaaagaagctgaaaggtggtgtgacttgctcagggccccgaagtttgcttctggagcagctgggacctcagcccaggtctgggacgtccctgtgctgggtgcttggcaggcacgacacatgcaatcttgcacccaagcctatttccgaggtgaatactgaggccccctcagcctggagttatttctgaggtccttgctgtcttttgaggaggaagaaaatggattccccctcccaggcccctaggcttcatgtcccaggtccctttactttttcttcttcttcttcttctttttttttttttttttgagatggagtcttgctctgtcacccaggctggagtgcagtggcgygatctcggctcactggaacctctgcctcccgtgttcaagcagttctcctatctcagcctcccaagtagctggggttacaggcgtgcaccaccactcctggctaattttttgtatttttagtagagatggggtttcgccatgttggccaggctggtcttgaactcctgacctcaggtgatctgccctcttggcctcccaaattgctgggactataggcatgagccaccgcgcccagccccaggtccctttacttctgttcctctcttgactctctcctttcaaagaggcttctcattccaagaagcgcctggcccactggtcttggtcccgccctgctgacagccagttatcccctgagcccagccaggagactgaaaagctttactgcattctcttaagggcttcacagccaggaaaaccagcaaaggggaatatagtgtctgcagaccggtgaggtccagggtcgctccataaaaatggattcctggaaaaacataaaccagcaatttaccctgtgaattttattggcctaaaaaaaaaaaaaaggctatctcatttgaataatgaagagagataaaccattcctagctcctcttttattagtgaataaggacacaaacactcaacagaaatggaacactcacacaaagcttcaggtctgatttattagccactttagtttcataaaactcagcatttctattaaaataaaatgatgtccaaaaggtttgcttgtttttaagaaaattgcatttaatacagggcaagactttgttatggtttatttatttatttatttattttttaaacaaagctcaaattctcctgacttcacgcctgttactacagctggagggaaaccgatttcagaatctatctgatatgtcggatttctttgtggcatccacttcatcgctcagcagccagccatgatgtcataagcccatcagatttccggtagggggaaaacgctggggaattggaaagaatggatgtttcttacccgtcaggaaggcaggggaaggagctgggtatgtttgggaggagaagccgcgtggctggtgggggacaggagcaggctcaa

SEQ ID NO: 679260 - DNA, 2712 bp, Homo sapiens
tgcatggatcctgtttttcctaccacactcggagctctttaaggaaagaacagtaaaaaaaaaaacaaacaaaaaaacaaaaacagtagactagtttttttccccctccctcctaacccagtccactcaaaaattacttattgaactgaatcagtgtatcaattctagaaacaaaattaatcctttccctcctcctctggctcaaagacggcttttggaaacactgtatcactccttttattacaaactcctctgccctcctccaggcgcctgggccactccaggattacaaatggagccttctgcctctaggtcactgattctactaccatctgtcagcgtggattgattgaggagactggccctgctcggcagatcagtgacttgtgcgaagtgagccagggtgtcggtgccttcagagcaggcggatgtccttcctcacttgccagctctcgtgagcagacacacagccctcacctttatccttcaccaagctccagctctccttcctcttgggaggcgccgcctgctaactcagtcacaccaagagggaggcctggaattcctgctcacaagctcggggcttcatctgcagtctgccaggaggcaacttacaaaagcctctggctaacagagcgggaaactccccacagcctcctgctgtgcctgtccccaagccacgcactgtccccttgcaaagcacaaggatactgagagtgcacaaacagcaggggtggagagcctctgtgggcacgccctcattctgtgccctcattccacaggagcccctgctttgtgcaagtctctgagcccgcatggagggagcatgggggctcagaacagttctttctggggcaaggtcaggggaggctctaaagttatggtggtggggagggccttaaaacagaggaccagagaataccaagacttaggggtgtgggggagagccacctgctgtgcccaggaggactgtgcccagtgcaggggaaaaagatgaagctgcggagttgggcaagggtgggatcctgcagggccttagagcattgacatgtttggcatggatttgtttcacagggtcccacagaaacttctgctctccaggtttgcccctccactctgccctccaggatagaagtgtggcatcctaatctgggatgcatccatctctccccctggactgtgagcatatgcagggcagagacacctctgcttctcttgggtctccggcatcctgtgcagggtagggcaccatgtccattaaaatgatgttaatgaggatgatacagcccagaggaatccaggcttactatgaaccaggcactatgcagatttccctttatcatcccagttcttcttatttgcagcagtctaatgagtttggtactgttatcacccctattttacagatggggccactgaggtgcaaagagtttaacttatcccaagtcacacagtttggaagaggctgagctggtatttgaacccaggttttcagaggctgcactcttaaccaccaagcttcccagcactcagcaaacactggaaagacagagatggacctagacagtcagtaggaccaaaagtctgcaggccgatagggaaagaatgtaagaggacggcatgggcagcgccagcccctccagcagtcatatattaagccctggacactgggcagctcgggcaggtcggggggcctcagactctcggaccccatgcctggaagaccacggtctgcccaacaagcagcagctgctgtgaatcgacttacacatcttccccacaggtgagcagagagctaacacctgaggataggccaagaaacgggaagcccgtgcaacctgagcgcacagatcacccccacctgcccggcactcactgtccccagtggctggactctcaycgggccagtcactgagctggcgccagcctggtctcaccagtgtgtgtctttaaatcatccaatttcttcagctgtaaattgggctgggaggggccaggtgagctgcctgcctcaggggagtcggcgcccttacctgagtgatcccattcactcctcacaacaaacccatgaggcagggattgtcatcttcattgtacagagcaggaaatgggtgcacacagaggttaagagacttgcccaggtcacacagctaggaagaggctgtgatttgaactcagtcttctggctccaaagcccccacagagtcactcagggcactacaaagagttaacctgaatatgaaatgatctaagagtcgcagtgacaaaggcatgctctaagcgcttttcctgcagtaacttgcttaatccttacaacaaccctataaagtgggtactgttctcgcctcattttgcagatgaggaaactgaggcacagagcagctcggagggggcagagctgaatctgacaggctacagggcccctgcgttgctttgttataagatgacaataaggaagttcctttcctttgggattatttctgcctgaaagctcaagacttttagccacatcattgtctgggctccacgggaaggcagtgccacatgctgaggcatgctgggaaaagactttgttccatcctgttttgttgacatgctcttcatttttaagcctgaaaccgaagcttcctgctaagaattcaaaccatggagaaaaacgcagccatgataacggccactacttcctgagcctccagtgttccctgtgcttgg

SEQ ID NO: 679261 - DNA, 2712 bp, Homo sapiens
tgcatggatcctgtttttcctaccacactcggagctctttaaggaaagaacagtaaaaaaaaaaacaaacaaaaaaacaaaaacagtagactagtttttttccccctccctcctaacccagtccactcaaaaattacttattgaactgaatcagtgtatcaattctagaaacaaaattaatcctttccctcctcctctggctcaaagacggcttttggaaacactgtatcactccttttattacaaactcctctgccctcctccaggcgcctgggccactccaggattacaaatggagccttctgcctctaggtcactgattctactaccatctgtcagcgtggattgattgaggagactggccctgctcggcagatcagtgacttgtgcgaagtgagccagggtgtcggtgccttcagagcaggcggatgtccttcctcacttgccagctctcgtgagcagacacacagccctcacctttatccttcaccaagctccagctctccttcctcttgggaggcgccgcctgctaactcagtcacaccaagagggaggcctggaattcctgctcacaagctcggggcttcatctgcagtctgccaggaggcaacttacaaaagcctctggctaacagagcgggaaactccccacagcctcctgctgtgcctgtccccaagccacgcactgtccccttgcaaagcacaaggatactgagagtgcacaaacagcaggggtggagagcctctgtgggcacgccctcattctgtgccctcattccacaggagcccctgctttgtgcaagtctctgagcccgcatggagggagcatgggggctcagaacagttctttctggggcaaggtcaggggaggctctaaagttatggtggtggggagggccttaaaacagaggaccagagaataccaagacttaggggtgtgggggagagccacctgctgtgcccaggaggactgtgcccagtgcaggggaaaaagatgaagctgcggagttgggcaagggtgggatcctgcagggccttagagcattgacatgtttggcatggatttgtttcacagggtcccacagaaacttctgctctccaggtttgcccctccactctgccctccaggatagaagtgtggcatcctaatctgggatgcatccatctctccccctggactgtgagcatatgcagggcagagacacctctgcttctcttgggtctccggcatcctgtgcagggtagggcaccatgtccattaaaatgatgttaatgaggatgatacagcccagaggaatccaggcttactatgaaccaggcactatgcagatttccctttatcatcccagttcttcttatttgcagcagtctaatgagtttggtactgttatcacccctattttacagatggggccactgaggtgcaaagagtttaacttatcccaagtcacacagtttggaagaggctgagctggtatttgaacccaggttttcagaggctgcactcttaaccaccaagcttcccagcactcagcaaacactggaaagacagagatggacctagacagtcagtaggaccaaaagtctgcaggccgatagggaaagaatgtaagaggacggcatgggcagcgccagcccctccagcagtcatatattaagccctggacactgggcagctcgggcaggtcggggggcctcagactctcggaccccatgcctggaagaccacggtctgcccaacaagcagcagctgctgtgaatcgacttacacatcttccccacaggtgagcagagagctaacacctgaggataggccaagaaacgggaagcccgtgcaacctgagcgcacagatcacccccacctgcccggcactcactgtccccagtggctggactctcatcgggccagtcactgagctggsgccagcctggtctcaccagtgtgtgtctttaaatcatccaatttcttcagctgtaaattgggctgggaggggccaggtgagctgcctgcctcaggggagtcggcgcccttacctgagtgatcccattcactcctcacaacaaacccatgaggcagggattgtcatcttcattgtacagagcaggaaatgggtgcacacagaggttaagagacttgcccaggtcacacagctaggaagaggctgtgatttgaactcagtcttctggctccaaagcccccacagagtcactcagggcactacaaagagttaacctgaatatgaaatgatctaagagtcgcagtgacaaaggcatgctctaagcgcttttcctgcagtaacttgcttaatccttacaacaaccctataaagtgggtactgttctcgcctcattttgcagatgaggaaactgaggcacagagcagctcggagggggcagagctgaatctgacaggctacagggcccctgcgttgctttgttataagatgacaataaggaagttcctttcctttgggattatttctgcctgaaagctcaagacttttagccacatcattgtctgggctccacgggaaggcagtgccacatgctgaggcatgctgggaaaagactttgttccatcctgttttgttgacatgctcttcatttttaagcctgaaaccgaagcttcctgctaagaattcaaaccatggagaaaaacgcagccatgataacggccactacttcctgagcctccagtgttccctgtgcttgg

SEQ ID NO: 679262 - DNA, 634 bp, Homo sapiens
tttgttaaagtagtagcagatttttcttaaagtagtctctggttacaaaagttttaatatcgtcctcttacttcaagcatttgattttccaaatttctccttttgtctctcataaacagggagaagaggaaactttccacttattcaccatcattcattccaactgctaaacagatccaggctcctaacagctaataaatgaaactgagaggtttgagaagacaataagtaagtctgcaggacgctgagggaggtatttctgattcctagcaactgcaaacagtgaatagataaccaaaggagacctcctcagttaatagcttgggcaatatctggtgtagtcacttaagagcattgcgctacgtctctgccccaaacatttcctccccttttgctttgctgaggtgacaaaaaaacctctgctttaatcaaggttttgggttcagagtaaaggcttttataaaataaaaatataaaataatataaaataaaaatattatataaccctgtagttatgctgtgtagttatgctgtgtaacttcctcaagscctttatcagagaaacccagctttacacaatggtgatgaaaacacacttggagcccaggggaggatgtgtaatctctattgtttc

SEQ ID NO: 679263 - DNA, 619 bp, Homo sapiens
tcacctaaaacaagcacaaaccttacaattgatttatggtcaattttatgtgtcagctagactgtgatccccagttatcaaatcaaacactaataatctaggtgttgctgtgaagatattttgtagatgtcattgaaattcataatcagttgactttaagaatttatcctagaaaaactgggtgagcttaatctaagctgttgaaaagccttaagagcagagctgaggtttctctgaggaaaaagaaattccactctggacagygtgtcagcctgtgctgagagttccagcctgcccttcctgacaactaccacccagtggatctctgatttgcctagcccacccctacagatgcaaaaattaattcgttgcatcattctcttaatatatgtattctcctggttctacttattcggttccaacaatctcttactgcatgattctcatggtgagttttatccatcattgcaatgaataataaagtcaacttgttcattgcttggatgctcctgctggtctttggctggaggcattgaggtacctcattaggcagttgtgaggaatatacatatactgtacttggaatgaaaaattcctggactctttacatatacttgtc

SEQ ID NO: 679264 - DNA, 619 bp, Homo sapiens
tcacctaaaacaagcacaaaccttacaattgatttatggtcaattttatgtgtcagctagactgtgatccccagttatcaaatcaaacactaataatctaggtgttgctgtgaagatattttgtagatgtcattgaaattcataatcagttgactttaagaatttatcctagaaaaactgggtgagcttaatctaagctgttgaaaagccttaagagcagagctgaggtttctctgaggaaaaagaaattccactctggacagcgtgtcagcctgtgctgagagttccagcctgcccttcctgacaactaycacccagtggatctctgatttgcctagcccacccctacagatgcaaaaattaattcgttgcatcattctcttaatatatgtattctcctggttctacttattcggttccaacaatctcttactgcatgattctcatggtgagttttatccatcattgcaatgaataataaagtcaacttgttcattgcttggatgctcctgctggtctttggctggaggcattgaggtacctcattaggcagttgtgaggaatatacatatactgtacttggaatgaaaaattcctggactctttacatatacttgtc

SEQ ID NO: 679265 - DNA, 619 bp, Homo sapiens
tcacctaaaacaagcacaaaccttacaattgatttatggtcaattttatgtgtcagctagactgtgatccccagttatcaaatcaaacactaataatctaggtgttgctgtgaagatattttgtagatgtcattgaaattcataatcagttgactttaagaatttatcctagaaaaactgggtgagcttaatctaagctgttgaaaagccttaagagcagagctgaggtttctctgaggaaaaagaaattccactctggacagcgtgtcagcctgtgctgagagttccagcctgcccttcctgacaactaccacccagtggatctctgatttgcytagcccacccctacagatgcaaaaattaattcgttgcatcattctcttaatatatgtattctcctggttctacttattcggttccaacaatctcttactgcatgattctcatggtgagttttatccatcattgcaatgaataataaagtcaacttgttcattgcttggatgctcctgctggtctttggctggaggcattgaggtacctcattaggcagttgtgaggaatatacatatactgtacttggaatgaaaaattcctggactctttacatatacttgtc

SEQ ID NO: 679266 - DNA, 619 bp, Homo sapiens
tcacctaaaacaagcacaaaccttacaattgatttatggtcaattttatgtgtcagctagactgtgatccccagttatcaaatcaaacactaataatctaggtgttgctgtgaagatattttgtagatgtcattgaaattcataatcagttgactttaagaatttatcctagaaaaactgggtgagcttaatctaagctgttgaaaagccttaagagcagagctgaggtttctctgaggaaaaagaaattccactctggacagcgtgtcagcctgtgctgagagttccagcctgcccttcctgacaactaccacccagtggatctctgatttgcctagcccacccctacagatgcaaaaattaattcgttgcatcattctcttaatatatgtattctcctggttctacttattcggttccaacaatctcttactgcatgattctcatggtgagttttatccatcattgcaatgaataataaagtcaacttgttcattgcttgkatgctcctgctggtctttggctggaggcattgaggtacctcattaggcagttgtgaggaatatacatatactgtacttggaatgaaaaattcctggactctttacatatacttgtc

SEQ ID NO: 679267 - DNA, 619 bp, Homo sapiens
tcacctaaaacaagcacaaaccttacaattgatttatggtcaattttatgtgtcagctagactgtgatccccagttatcaaatcaaacactaataatctaggtgttgctgtgaagatattttgtagatgtcattgaaattcataatcagttgactttaagaatttatcctagaaaaactgggtgagcttaatctaagctgttgaaaagccttaagagcagagctgaggtttctctgaggaaaaagaaattccactctggacagcgtgtcagcctgtgctgagagttccagcctgcccttcctgacaactaccacccagtggatctctgatttgcctagcccacccctacagatgcaaaaattaattcgttgcatcattctcttaatatatgtattctcctggttctacttattcggttccaacaatctcttactgcatgattctcatggtgagttttatccatcattgcaatgaataataaagtcaacttgttcattgcttggatgctcctgctggtctttggctggaggcattgaggtacctcattaggcagttgtgaggaatrtacatatactgtacttggaatgaaaaattcctggactctttacatatacttgtc

SEQ ID NO: 679268 - DNA, 626 bp, Homo sapiens
tttttaagccacctgttcattttcttcataatgtcctacttttgtctatgcactctatttctttgactcactgaaaaacttaaacatactcattttaacatcttcacattgctctgtcatctgcagttctggaatgccagttcttttgtgtgctgagtgttctctgtattttcttactctaagtgcrtatttcatgagaactggttttcataggcgttctgagcaccattggtggtgaaaatctccctgtgcagtgattttgcatttgcatctgttaaagccaagttggtctgctttctcacttcagggtttttttgacacaaacatggaccctatgcatcacagaattggcattccaaaatcagtgacccatggcagggagcaggttcccatttggtggtcccattccctgaagtttcagaccccatatttatgcaggaaactccattccagatctccccaatcctggggccaagagctgcaggtcagccttgtatctactgctgacattgcacttaaactcccactcttgcctctggttttgagccccatcttcttctggtatctgaggctttcccttgctttaaagttctactatggctgggcaccatggctcatgcctgtaa

SEQ ID NO: 679269 - DNA, 1557 bp, Homo sapiens
tttttataacttgataactcatttctttgtattgctgaataatattacattgtaaggatgtgccacaatttagccattcaactataggttcatggggtttttttgacagttatgaataatcctgctataaatagttgcatacaggtttttgcattggcataacttttcaaatcccttgagtgtacctaggagagcaattgctgaatagtatggtaagcttgtgtttggcttcgtaagaaactgtcaaattgtcttgcaaagtggctgtaccgttttgcattcccagcaatgaatgcaaatcccagattcaccagcaatgaatgtgaacacctgttgctctgtattcttgctagagcaaggtgttgtattaaaaacttcatcaccaaccccaagattatgtagattttattctatgttttcttcaagaagttttatagttttctattttccaagtagatctatgatatattttgatttattattatacaaggtctaaggtctgtgtctaagttcttttttttaacacgggcatattgcacatgcaatatgcatatggtgtgtattactcttgtgctgttgttgaaaagactgccctttatctaccctgttcatgtttcttcatgtttttttcatctctgttctgaagtttgaataatttttatggatcttttctcatggtccctgtcttttttgtttctgtcatctctaatatattgtgaagcccatcgagtgaatttttcatcaaaattattgtactttttagttctagaatttgcatttttaatagtttttattcttctgctgagtttcctacttgttcattcattaatacaatatcctttagtttctcaaagactttttttctttaattctttggacatatttataatggttattttagagtctttgtctactaagcacaatatcagagccatctcaagtttagtttctattgactgcttttttccttgactgtcaatcacatgtttctgtttctttttgttccacgtgattttgttccaagtgattttttttattgagtggttggcattgtgtataacctattgtagagatcctggattttgttatcttcctctaaaaagtgtttcttattttatcaggcagttaaattactagctgaccactttgaacttatataggcttgtcttcacactttggtcgtgtggatggtagaaagactatgtgtttccttgacccctttggtttggcaggagttctctcttaattctgttttccctgcagatcttttcaaaaagccccttaggttttgctgggggaggtttagtataaataagtatactaggctgttgtccttactcctaaggcatagccttttttttctaacattagaatamcatttattatgatgctggcttgctatactatttatgtttttttaaatttttttatttctgtaggttattggggaacaggtggtgtttggtgacatgagtcagttctttagtggcgatttgtgagattttgcatcacctgagctgtatacactgcacccaatttatagtcttttatccctca

SEQ ID NO: 679270 - DNA, 1557 bp, Homo sapiens
tttttataacttgataactcatttctttgtattgctgaataatattacattgtaaggatgtgccacaatttagccattcaactataggttcatggggtttttttgacagttatgaataatcctgctataaatagttgcatacaggtttttgcattggcataacttttcaaatcccttgagtgtacctaggagagcaattgctgaatagtatggtaagcttgtgtttggcttcgtaagaaactgtcaaattgtcttgcaaagtggctgtaccgttttgcattcccagcaatgaatgcaaatcccagattcaccagcaatgaatgtgaacacctgttgctctgtattcttgctagagcaaggtgttgtattaaaaacttcatcaccaaccccaagattatgtagattttattctatgttttcttcaagaagttttatagttttctattttccaagtagatctatgatatattttgatttattattatacaaggtctaaggtctgtgtctaagttcttttttttaacacgggcatattgcacatgcaatatgcatatggtgtgtattactcttgtgctgttgttgaaaagactgccctttatctaccctgttcatgtttcttcatgtttttttcatctctgttctgaagtttgaataatttttatggatcttttctcatggtccctgtcttttttgtttctgtcatctctaatatattgtgaagcccatcgagtgaatttttcatcaaaattattgtactttttagttctagaatttgcatttttaatagtttttattcttctgctgagtttcctacttgttcattcattaatacaatatcctttagtttctcaaagactttttttctttaattctttggacatatttataatggttattttagagtctttgtctactaagcacaatatcagagccatctcaagtttagtttctattgactgcttttttccttgactgtcaatcacatgtttctgtttctttttgttccacgtgattttgttccaagtgattttttttattgagtggttggcattgtgtataacctattgtagagatcctggattttgttatcttcctctaaaaagtgtttcttattttatcaggcagttaaattactagctgaccactttgaacttatataggcttgtcttcacactttggtcgtgtggatggtagaaagactatgtgtttccttgacccctttggtttggcaggagttctctcttaattctgttttccctgcagatcttttcaaaaagccccttaggttttgctgggggaggtttagtataaataagtatactaggctgttgtccttactcctaaggcatagccttttttttctaacattagaataccatttattatgatgcyggcttgctatactatttatgtttttttaaatttttttatttctgtaggttattggggaacaggtggtgtttggtgacatgagtcagttctttagtggcgatttgtgagattttgcatcacctgagctgtatacactgcacccaatttatagtcttttatccctca

SEQ ID NO: 679271 - DNA, 1557 bp, Homo sapiens
tttttataacttgataactcatttctttgtattgctgaataatattacattgtaaggatgtgccacaatttagccattcaactataggttcatggggtttttttgacagttatgaataatcctgctataaatagttgcatacaggtttttgcattggcataacttttcaaatcccttgagtgtacctaggagagcaattgctgaatagtatggtaagcttgtgtttggcttcgtaagaaactgtcaaattgtcttgcaaagtggctgtaccgttttgcattcccagcaatgaatgcaaatcccagattcaccagcaatgaatgtgaacacctgttgctctgtattcttgctagagcaaggtgttgtattaaaaacttcatcaccaaccccaagattatgtagattttattctatgttttcttcaagaagttttatagttttctattttccaagtagatctatgatatattttgatttattattatacaaggtctaaggtctgtgtctaagttcttttttttaacacgggcatattgcacatgcaatatgcatatggtgtgtattactcttgtgctgttgttgaaaagactgccctttatctaccctgttcatgtttcttcatgtttttttcatctctgttctgaagtttgaataatttttatggatcttttctcatggtccctgtcttttttgtttctgtcatctctaatatattgtgaagcccatcgagtgaatttttcatcaaaattattgtactttttagttctagaatttgcatttttaatagtttttattcttctgctgagtttcctacttgttcattcattaatacaatatcctttagtttctcaaagactttttttctttaattctttggacatatttataatggttattttagagtctttgtctactaagcacaatatcagagccatctcaagtttagtttctattgactgcttttttccttgactgtcaatcacatgtttctgtttctttttgttccacgtgattttgttccaagtgattttttttattgagtggttggcattgtgtataacctattgtagagatcctggattttgttatcttcctctaaaaagtgtttcttattttatcaggcagttaaattactagctgaccactttgaacttatataggcttgtcttcacactttggtcgtgtggatggtagaaagactatgtgtttccttgacccctttggtttggcaggagttctctcttaattctgttttccctgcagatcttttcaaaaagccccttaggttttgctgggggaggtttagtataaataagtatactaggctgttgtccttactcctaaggcatagccttttttttctaacattagaataccatttattatgatgctgrcttgctatactatttatgtttttttaaatttttttatttctgtaggttattggggaacaggtggtgtttggtgacatgagtcagttctttagtggcgatttgtgagattttgcatcacctgagctgtatacactgcacccaatttatagtcttttatccctca

SEQ ID NO: 679272 - DNA, 1557 bp, Homo sapiens
tttttataacttgataactcatttctttgtattgctgaataatattacattgtaaggatgtgccacaatttagccattcaactataggttcatggggtttttttgacagttatgaataatcctgctataaatagttgcatacaggtttttgcattggcataacttttcaaatcccttgagtgtacctaggagagcaattgctgaatagtatggtaagcttgtgtttggcttcgtaagaaactgtcaaattgtcttgcaaagtggctgtaccgttttgcattcccagcaatgaatgcaaatcccagattcaccagcaatgaatgtgaacacctgttgctctgtattcttgctagagcaaggtgttgtattaaaaacttcatcaccaaccccaagattatgtagattttattctatgttttcttcaagaagttttatagttttctattttccaagtagatctatgatatattttgatttattattatacaaggtctaaggtctgtgtctaagttcttttttttaacacgggcatattgcacatgcaatatgcatatggtgtgtattactcttgtgctgttgttgaaaagactgccctttatctaccctgttcatgtttcttcatgtttttttcatctctgttctgaagtttgaataatttttatggatcttttctcatggtccctgtcttttttgtttctgtcatctctaatatattgtgaagcccatcgagtgaatttttcatcaaaattattgtactttttagttctagaatttgcatttttaatagtttttattcttctgctgagtttcctacttgttcattcattaatacaatatcctttagtttctcaaagactttttttctttaattctttggacatatttataatggttattttagagtctttgtctactaagcacaatatcagagccatctcaagtttagtttctattgactgcttttttccttgactgtcaatcacatgtttctgtttctttttgttccacgtgattttgttccaagtgattttttttattgagtggttggcattgtgtataacctattgtagagatcctggattttgttatcttcctctaaaaagtgtttcttattttatcaggcagttaaattactagctgaccactttgaacttatataggcttgtcttcacactttggtcgtgtggatggtagaaagactatgtgtttccttgacccctttggtttggcaggagttctctcttaattctgttttccctgcagatcttttcaaaaagccccttaggttttgctgggggaggtttagtataaataagtatactaggctgttgtccttactcctaaggcatagccttttttttctaacattagaataccatttattatgatgctggcttgctatactatttatgttttttwaaatttttttatttctgtaggttattggggaacaggtggtgtttggtgacatgagtcagttctttagtggcgatttgtgagattttgcatcacctgagctgtatacactgcacccaatttatagtcttttatccctca

SEQ ID NO: 679273 - DNA, 1459 bp, Homo sapiens
cttgtcagcccagtgtccctgtaacctcctggggactggtccaggagctcctaagcttctgctggttcctagagcaggaaggagaattgctcattgcgggagaagtctccctgttgaattagggaaacatctaagaattccatcctgccaccccagaaccagggaaatgtgaaaaaccaaggtttcaaatctcttcaacagactctatctgtgcagaccacagtacattcacaattaggaaatttgaataaacacttttctcatttgaaaatcttcgagcttgggttcaagcctgcatgacgctggtgtgagcctggttggagggagtggttgggttggtgagtgacagggttggtgagtgacagggtcctctcttcccactgtggctcccgctggggactcatggaacttccacaggggaccatggggtgagatgggaacctgacaaatacactcccctccccagtgaagctgcagggaagccacatgtgatggagcttgggggtgagggggtggcctctgagatgagggtgtgcattagagaaggcccccagcatggtggctcacacctctaattctaacagtttgggaggctgaggcatgtgaatcacctgaggtcaggagttcgagaccagcctggccaacatggcaaaaccccatctctactaaaaaaaaaaaaattacaaaatttgtatttatgcaggcatctgtaatcccagctactcgggagactgaggcaggagaatcacttgaaccaggggggcagaggttgcagtgagctgagatgatgccacttcactccaggctgggtgaaagagcaagactccgtctcaaaaaaaaaaaaaaaaaaaagcccccagaggaagggacttagctgacaccaggaggtaaagagtggggagggggtggggactttgtttcccaagcagaggccaatcctgccctcacccagcacctgcacagccctcttcccatataaggacccagactccctgtgtgcagtaaaaggggaaagagagggttctgggccccaggggttgcgtgggctgagtttgggaaacagggtgtgaccagcagaagaaatacaaaaatccatcctctttcctcatcagggaaatgaaaatgacaaccagaggccacttgtgcctccaggatgagaaaggttttttctaacgggacagtaggcaggactcacaaacaggcagcgaaactaaccaggttgacgatggctggagagggtgcagataagtaccatctttcagagcacgactcaacacgggtttcaggagcattaaaatcttcacacctggccgggcgtggtggctcacrcctgtaatcccagcactttgggaggccgaggcgggtgaatcaaaaggtcaggagactgagatcatcctggctaacatggtgaaaccccgtctctctaaaaattcaaaaaattagccgggcatggtggcgg

SEQ ID NO: 679274 - DNA, 599 bp, Homo sapiens
aatgtttagctcccacttataagggagaatatttagtcaagatagatcccatggctatgtattgaacttaaacaccctgatattagagaatacaccttcttctcaaggtttcataaaacattcacaaaatttgagcaaatattaggtaacaactcagtgagtttcataagttagaaacaatacaaacatcattaccagatcatggtgaaatgaacgtacaaattaataagaatatttaaataccagaaaagcccttctatctgtaatttttttaaattttaaacaattcttgtgtataaggggaaataaaacataaaattttaaaatatctaagaaaaattataacgaacacaccacatgttaaawtactattaaaccttgtataagatgaaaattcacatcaataaaagaaaacaaatctgaaaaatcaataaaaagaaaacacaagaaaggaaataagaaagatatagcagaaattaatggagtaggaaacaaaaataatagaaagataaataaaatagtgttaaaaattaacaagtaggcagaccataaataatctgaaatcaagagaaaaggggaaatatatacgaagtaagaaa

SEQ ID NO: 679275 - DNA, 1010 bp, Homo sapiens
acatcaataaatgaatacttagcttaagcgattttccatgagacccatgaagcatttctaattgaaacttaacaagctacaacccaacagacactccaatcttcacttctagaagggaaatgtgatactccatgtagacgtagctttttaaatttagctggaagacagcgtgacagtgaagttgtgtgctgtaattttttaaaattgctgaagtgtcatggtttgctatttcgtatttattgaaaaaatgtaaatgctatatttaacagaatggcagtaastctgtttcaatctgaagacttaatcttactaatcatggtaatatatgctggctggagttgggaatatttcataaaatactggaataaatttgtgcttatatttcaggggaattaataaaagcaccttcatctgcaacatttaaaatgttattgcctttaaatttgtattaaataatgcagggaagatagatcactgggggagaatggatgcacctctgtgaggatcttggtcattcaacacacgtgtacgggtgaggaaactaaggcacgacttactgggtagggaggtagggatattagcaagatccttcacttgtctgggctttctgtctttgagtcacctttgcgcagtttttcactggacttcacaagcctctgaggcggcagggcagacaggacatccttattttatagaggaggaaacttaggcttacagaggtttcctgccccaaatcacaaaggtggagcctagaccttctcagtctccaccaactgtatttcggttagccacaatcctatctacccacatccaaatggacaccgtgctctgcaacttctgtcaaaagggctctttggcaacaggaaaaacgtcatggctccattgtattgtagaggatgggaatgggtgttccggctaaattctccctcccctttccctccacagctcagatggcaaatgtgcgacccagggacctcccgctccagcagacctgtgcgcacaactttgca

SEQ ID NO: 679276 - DNA, 1010 bp, Homo sapiens
acatcaataaatgaatacttagcttaagcgattttccatgagacccatgaagcatttctaattgaaacttaacaagctacaacccaacagacactccaatcttcacttctagaagggaaatgtgatactccatgtagacgtagctttttaaatttagctggaagacagcgtgacagtgaagttgtgtgctgtaattttttaaaattgctgaagtgtcatggtttgctatttcgtatttattgaaaaaatgtaaatgctatatttaacagaatggcagtaactctgtttcaatctgaagacttaatcttactaatcatggtaatatatgctggctggagttgggaatatttcataaaatactggaataaatttgtgcttatatttcaggggaattaataaaagcaccttcatctgcaacatttaaaatgttattgcctttaaatttgtattaaataatgcagggaagatagatcactgggggagaatggatgcacctctgtgaggatcttggtcattcaacacacgtgtacgggtgaggaaactaaggcacgacttactgggtagggaggtagggatattagcaagatccttcacttgtctgggctttctgtctttgagtcacctttgcgcagtttttcactggacttcacaagcctctgaggcggcagrgcagacaggacatccttattttatagaggaggaaacttaggcttacagaggtttcctgccccaaatcacaaaggtggagcctagaccttctcagtctccaccaactgtatttcggttagccacaatcctatctacccacatccaaatggacaccgtgctctgcaacttctgtcaaaagggctctttggcaacaggaaaaacgtcatggctccattgtattgtagaggatgggaatgggtgttccggctaaattctccctcccctttccctccacagctcagatggcaaatgtgcgacccagggacctcccgctccagcagacctgtgcgcacaactttgca

SEQ ID NO: 679277 - DNA, 622 bp, Homo sapiens
atttgccagataatttctctcttaggttttctttcagcttcggatgaccacagaatctagttttggccaaggagaaataaaaggaaatcttatttctggaaaagattttcctccctgatccaaaagcaaagtccttttctgcccatccctttcttttctgcctgggcactggcatgactacataatgcctggaactgtggaagccatccagtcaccatgaaatcacaggttcagagatgaaggatttgcacactgcaggtgcccagacagaaggatgagaaaagcctgagttcttgatcacatcgttgagcagcagacaaatcctggggccacctacatccagcctctcaactaggaaacaagaattatctttatggttttaaccactgtctgttagattttctgttgtggcagaaaaatgaattcttcagtggcaagggacatgatgaaggtggaggagagaatgtgggtgataagtcaggatgtgagtcatagagcagtgaaatgaatgttgtactgagaattaggagaccttttcctaattagtagtgtaaccctgagtaattcgcacaactctcttggctgcaatgtcttcttctgagagaagaagkcacgtacctgg

SEQ ID NO: 679278 - DNA, 625 bp, Homo sapiens
ggggaaaacattgctctttgtttactagaagtgatcctgtaaattaaacttgacatgaattctaggtggggacaattattttctaatgttctagctagtattctctaatgattagaaaggcagtggagtagaattaggaagagcctggcttctggaacgagactgcctgggtttaaatcccagactcattatttagtaactgtgtgacctttagcaattcacatatctaagccacacttcagttttctcatttgtaaaatayggatgataatagtacccaccatagagttgttgtgagagtgaaataatttatatatgtaaaatgtttaaaagagtacctcacatatagccagatttatcagtttatctctttttatcttttaactcattttttttattccttatcctcagtcagcatagctttcctttactgccttaaataggaaatacatgcatatatacatgcacacacaaacaattattcattcttttattgtctggctgatacagcagagtgtgaactaatatgtatagtagaaatacgtattacccccaagactgcatcttgtatgggctcacagctccctaacacacacagactcaaggtgataggtcctaaagggca

SEQ ID NO: 679279 - DNA, 587 bp, Homo sapiens
ttttacttttttattcttcttagacagagtctggttctattgactaggctcgagtgcagtggcacaatcttggctcactgcaaccttcgcctctcgggttcaagtgattstcgtgcctcaccctcccgagtagctgggattacatgtgtgcaacaccacacccggctaatttttgtatttataatagagacggtgtttcaccatgttggccaggctggtctcgaactctggacctcaaatgatctgcccaccttggcctcccaaactgctgcaattataggcgtgagctactgcacctggcctgaaacctctttttaattgtgtgttcagtccctctgtttgcttcctttcttgttggcataattgttgctcaaaacaaacaaaaaatgtaaaatctcattggcctttttaggaagctttccaaactggcttctccaggactccattcttttatttgccttggctccttcttttgccaactttgatcttttgtccactttcctttagtcatcgatatgttcccccttcaagtctctatttcttccatttggtagtcaatggatgaaaaattactgaaaggacacata

SEQ ID NO: 679280 - DNA, 587 bp, Homo sapiens
ttttacttttttattcttcttagacagagtctggttctattgactaggctcgagtgcagtggcacaatcttggctcactgcaaccttcgcctctcgggttcaagtgattgtcgtgcctcaccctcccgagtagctgggattacatgtgtgcaacaccacacccggctaatttttgtatttataatagagacggtgtttcaccatgttggccaggctggtctcgaactcyggacctcaaatgatctgcccaccttggcctcccaaactgctgcaattataggcgtgagctactgcacctggcctgaaacctctttttaattgtgtgttcagtccctctgtttgcttcctttcttgttggcataattgttgctcaaaacaaacaaaaaatgtaaaatctcattggcctttttaggaagctttccaaactggcttctccaggactccattcttttatttgccttggctccttcttttgccaactttgatcttttgtccactttcctttagtcatcgatatgttcccccttcaagtctctatttcttccatttggtagtcaatggatgaaaaattactgaaaggacacata

SEQ ID NO: 679281 - DNA, 587 bp, Homo sapiens
ttttacttttttattcttcttagacagagtctggttctattgactaggctcgagtgcagtggcacaatcttggctcactgcaaccttcgcctctcgggttcaagtgattgtcgtgcctcaccctcccgagtagctgggattacatgtgtgcaacaccacacccggctaatttttgtatttataatagagacggtgtttcaccatgttggccaggctggtctcgaactctkgacctcaaatgatctgcccaccttggcctcccaaactgctgcaattataggcgtgagctactgcacctggcctgaaacctctttttaattgtgtgttcagtccctctgtttgcttcctttcttgttggcataattgttgctcaaaacaaacaaaaaatgtaaaatctcattggcctttttaggaagctttccaaactggcttctccaggactccattcttttatttgccttggctccttcttttgccaactttgatcttttgtccactttcctttagtcatcgatatgttcccccttcaagtctctatttcttccatttggtagtcaatggatgaaaaattactgaaaggacacata

SEQ ID NO: 679282 - DNA, 587 bp, Homo sapiens
ttttacttttttattcttcttagacagagtctggttctattgactaggctcgagtgcagtggcacaatcttggctcactgcaaccttcgcctctcgggttcaagtgattgtcgtgcctcaccctcccgagtagctgggattacatgtgtgcaacaccacacccggctaatttttgtatttataatagagacggtgtttcaccatgttggccaggctggtctcgaactctggacctcaaatgatctgcccaccttggcctcccaaactgctgsaattataggcgtgagctactgcacctggcctgaaacctctttttaattgtgtgttcagtccctctgtttgcttcctttcttgttggcataattgttgctcaaaacaaacaaaaaatgtaaaatctcattggcctttttaggaagctttccaaactggcttctccaggactccattcttttatttgccttggctccttcttttgccaactttgatcttttgtccactttcctttagtcatcgatatgttcccccttcaagtctctatttcttccatttggtagtcaatggatgaaaaattactgaaaggacacata

SEQ ID NO: 679283 - DNA, 587 bp, Homo sapiens
ttttacttttttattcttcttagacagagtctggttctattgactaggctcgagtgcagtggcacaatcttggctcactgcaaccttcgcctctcgggttcaagtgattgtcgtgcctcaccctcccgagtagctgggattacatgtgtgcaacaccacacccggctaatttttgtatttataatagagacggtgtttcaccatgttggccaggctggtctcgaactctggacctcaaatgatctgcccaccttggcctcccaaactgctgcaattataggcgtgagctactgcacctggcctgaaacctctttttaattgtgtgttcagtccctctgtttgcttcctttcttgttggcataattgttgctcaaaacaaacaaaaaatgtaaaatytcattggcctttttaggaagctttccaaactggcttctccaggactccattcttttatttgccttggctccttcttttgccaactttgatcttttgtccactttcctttagtcatcgatatgttcccccttcaagtctctatttcttccatttggtagtcaatggatgaaaaattactgaaaggacacata

SEQ ID NO: 679284 - DNA, 661 bp, Homo sapiens
gaattgcttgctcattaaattgttgttgtctgaaatcaccaagctttggggtagtttgctatacagcaaaggctaactgatatgtttagtatctgaagagtaggtgatttttccttctttcagttgataatcacatttcaggtttatgattttaattaaaatgcgggcttccctaaaaaataaatagaaaataagttgaagtatgtatttttgaagggaagaccagccaccaggaatttcaatgggtattttaatatgttccatgaatgcagataaatttttgcctcccctattgtccttttactttatagcagagaagagttatttaatatacagagaaatctttgttttattagaattccaaaaaattgtacttcctgcaaaatatgcattccttttctcttccttcaacacctaaacaagtgttttgaaaagacacaaaaaatgaattattgacacatttcatgaataaaatgccaatcactaatcttaatctcctgaccawacaagccaggagacttggaaattcttcattctcatttaagttggacttctcatctgaaaagtctacttgaactgagaatcccagggatgaaatagctaggccaaacttgctttacttataactaatgcattgattgtaattagcatattatactgt

SEQ ID NO: 679285 - DNA, 599 bp, Homo sapiens
cttatgttatggcagagaggagagctgacatgatctcaaaagcaaactgcttctggtgagccttgaaaatgggtatagaggggaaaagaatttattgtggtcaatagctgtatcattccataggccaggtgttgtgctgatttacttcaagaaaaataccacatgtgaacagcagatacaactaaagtcaccagctatttatagccagtctccaagatccatctctcttctccaaagaccaaacaggtgagttaaatgggaggtatataggcatcaccacttctgcaatcttatacctgacactaacatcaaacgctcctctctctactaaaccaaaaagcaatctctagagattgaggaaattaatcctatacacacataccctgatattgtcataaagcatagctccttcaggtcactgttatttttgtgcccaaaacccttcaataatttgctaggcttatggmataaattcaaactttctagtctggcattcaagatccttcaatatctggcctactgaagcattatagccagtgccctctattgacacaccccttttcttaccagccaaagcaaagtatttgaactcatgtgta

SEQ ID NO: 679286 - DNA, 598 bp, Homo sapiens
tatgtatatatatctgtatatataacatacaatatataataatatatacacacatatagccttagtatattctgagagttgaagaaattcaaattttgaagaatgatagcaagcaaaatgggagctatcatggaggcctcctttccccyagaagtagcattgccaactgaccatctttctcatgtctttctaattatttacctgcaaatagatgtgcatacatccttcttctttcttaggtaactggtattttactaaacctactgaagctacaacattcttttttcacttaacaatattcatgtagctattttcacttcagtagctcacttttatcagtaacaggtgtgtttcaataaccacttacccattaatgaccatttaagttcttagctctttttatttgtttgcatgcttggttttgctagcacagctaatgaaacagtaatcatctttgtacctatagctttgagcacatgtgtcggcatccattaaaagtagatcaccagaaatgaaattgttccaacaaaggagatgtacatttaaaatacaagcaggtacttacaattttctttccaaagaggtttcattaatttaa

SEQ ID NO: 679287 - DNA, 1735 bp, Homo sapiens
tatatcaaacacattaacttgttttgcagccaactggattcggggaatcacttctcctgttacattcggaggagccgtacttcctcctgtctacaattcatccttccacttgagctttgaattctccctgctccctgcttctgagatctctcacatgtgattatttgataaatgtctacctcccacagtaggctgtaatttgtagatcagtgatcttattctatttttgattcctattgcacccctaatgcctggtagactgcctggcacatagtaagtgctcaataaatatctgttgaataaacaaatgaaaatgctaaggcccttgaagtatgggactgtataatgtaaactccatcttagaatctactgtcatgttactcagactctcaaaatatatgtaaatgatgaatgaagacactcttgaagaaatatgtaatttaatgctatgttagaattcataggcttcagaagattaatcttcaatttcagagaaaagtattctgcatagaagtttagacctaaataaaagaggacatatccctagataaaagttcagactagctgtcaatgatatggtgcattcctaggctcattttgatggtcaatatccacattccttttttgaaatctgtttaaataattttctccttttcatatgggcaagaaaacagaattggtttgatcaaaagactcaatgcagtttctaaccattgcacaagccaacaaaaggctcactctgtgttcatttttgggttagtccacatctccatcatttattatggaatgtaactggtatttcctgctttcacaaagaaacataaaccccagttgaaatgtcaagaactcaaaaggatggggctgtgttctctccattcgtaaaacaaggaatcctccctccgcaaaaatcccaaataagacctgagggcctaacaacagcagtcccagttctgtttgctctgtagcagtgctgtccagtagaaacttaatgccagtttcttaaatataagccacatgtgtaatttaaaattttctagtatccacatttaaaaaaaggtaagagaaatgttgaaaatagttttagtaatgtattattaaaatgtaatgctgtttatttaattttaaaaatatttcagcattctaaacatacaaaaaaacagagtgttggagatcatgtttaagtacagaaggttcttgaactttcattgatgcagtggctcttcgctttgttgacaatgaaatgttctacactttctttaaaaacaaatggtttaaaaactaccacacttaactgaaaaaaaagcaaaaacaaaaagtaaatacttttcaagccagctgaccaccttttgttcacagctaggaatggtagcagaatgctatgtggttagatacagaaacaagacaacctgaagctaaatggatgcccagtgcatagtcaacaggcccagcctcacagtgcacagcctgagctacggccactcccagaggcatcttctaccacagcctcaacatcaagcaaagagcatcaagagtttgtcttggttgttttgttcgttttacaaactatggatatatgcaattgataactcaggatttctagctaataaccatgtagttaacactaccttacaaattaaaaaaaaaaaaatgccagragcacctttaaatgccttatcacactaacagcaaagcacacagagtgaggagagcatgaagttgccttttcattttaaaa

SEQ ID NO: 679288 - DNA, 547 bp, Homo sapiens
ttggtggacagtgcaggggactatcaggatgtatttaggttgtttgtttgtgtttacaagactccagttgacaccaggctcttggggcatgaccaataccagctcagaaaggggaaaacagaagagcccaatttccyatgcggtgagtgtagctactgactgagctgttccatgtagagtttgtattattacttctgtggtacatggcaaagatatgtctgtgtttggaagctttcgcagttttactggaaagctcaaatttaaatgtaagtcactcatgtataccaaactctgctggctttgtcttggagatttatcagaacccactgaaatgactggttgcagaatgaaagattcttgggcagaaataatgcatgtgaaagtatcttgcacaaagcctggcacataccagacataatagacactggttaaattgaatagtcaaatctcagctgcagagcacagaagaggggtctctgataaaataaagcctaaggcgatttttaataccccttgtagggataagacaggcaaagaggtataacct

SEQ ID NO: 679289 - DNA, 547 bp, Homo sapiens
ttggtggacagtgcaggggactatcaggatgtatttaggttgtttgtttgtgtttacaagactccagttgacaccaggctcttggggcatgaccaataccagctcagaaaggggaaaacagaagagcccaatttcctatgcggtgagtgtagctactgactgagstgttccatgtagagtttgtattattacttctgtggtacatggcaaagatatgtctgtgtttggaagctttcgcagttttactggaaagctcaaatttaaatgtaagtcactcatgtataccaaactctgctggctttgtcttggagatttatcagaacccactgaaatgactggttgcagaatgaaagattcttgggcagaaataatgcatgtgaaagtatcttgcacaaagcctggcacataccagacataatagacactggttaaattgaatagtcaaatctcagctgcagagcacagaagaggggtctctgataaaataaagcctaaggcgatttttaataccccttgtagggataagacaggcaaagaggtataacct

SEQ ID NO: 679290 - DNA, 547 bp, Homo sapiens
ttggtggacagtgcaggggactatcaggatgtatttaggttgtttgtttgtgtttacaagactccagttgacaccaggctcttggggcatgaccaataccagctcagaaaggggaaaacagaagagcccaatttcctatgcggtgagtgtagctactgactgagctgttccatgtagagtttgtattattacttctgtggtacatggyaaagatatgtctgtgtttggaagctttcgcagttttactggaaagctcaaatttaaatgtaagtcactcatgtataccaaactctgctggctttgtcttggagatttatcagaacccactgaaatgactggttgcagaatgaaagattcttgggcagaaataatgcatgtgaaagtatcttgcacaaagcctggcacataccagacataatagacactggttaaattgaatagtcaaatctcagctgcagagcacagaagaggggtctctgataaaataaagcctaaggcgatttttaataccccttgtagggataagacaggcaaagaggtataacct

SEQ ID NO: 679291 - DNA, 637 bp, Homo sapiens
cagctggtgagtgaatggagaagctggcctggagctcaggactgtgtcttatagcctcaccatgaggtaattggaggcaggtaaatccaatggcagtctgctaacctcttagagctaaaaaagcctgttgaggctaagcatggtggctcacgcctataatcccagcactttaggaggctgaggcaagtgaattgcttgagcctaggagtttgagaccagcctgggcaacgtggtgaaacctcatctttacaaaaagaatttaaaaattaactgagtgtagtggtgcacgtctgtagtcccaactactcaggagattgaggcaggyggattgcttgagcctgggaggcagaggctgcagtgagctgagatggcaccattgcactccagcctaggtgacagtgatctgtctccaaaacaaaacagaaacctctcaaggctaaaatctactgtatgttgcattgtgagagttcagagctgaccagattcttgccatgtaaggggcatagtggtggagagtacatccctgagaccagataggcctgtgttttgcatctcagccctgctactgacagctctgtgaccttggccaggtcatccaacctctctgaacctctgcttcttcatctataacatggga

SEQ ID NO: 679292 - DNA, 1891 bp, Homo sapiens
cagcacaaaacagtagcaactcagtggtagttattaaaatgaataaagcaatttctggtaaagtggcttcctctgtaatgtgtcaaagcaagcagagtggctcaaagtggttaatgtgcttcactgtatttgtggagtcttggagagaaatatattagatgaagttactttttaaatcccttccaaacatgagttcatgatgatggcatcttatcccacctgccatcataccaactgatgacagatgcttttattccctcaggtccccaaaaagcaattccaatgccacctggagatgccctaactgagctcctgtaagtcctatcttagccagggccaaactagcaccccctctctataatagggccaatcctccttgatccagtggctcatctttacacggaacatccgaagactgccccaaggggatgtgggccaacaggaagattctgtccttcccttcatttcctttccaatgtgttctccggtgggtaaagtgaaggtaagaggattatgggtagcagcccagaatgtgtgggagaaatttaaaaaaaaatgcaacctaaagaattggaggtagaagatagggatccaggacccattggtctggccttgaactacacgcatggtgcaggttgggaaaatatgtggaactcctgcaacttcatcagtttttcctttcctgaacactgccaaattttcaacagctcaacccaactctgtcctctaacaaggcagccagaagcataacaatgactcataaagcctagagtaagccctgggcctgagtcctgccagtaagtaacagagtcctggaaatgtgatctcaagacaaagagggcaagagaatgaacacaacactgggcaccctaactagctaagtgaccttggacaagtcacttatgctatctgggtttatactgaactcatgtgtaaatcagagacagctggactggatgacccctataagccctttcatttctaaacatctatacatctataacctcagtcctatgtaaaatgtcgagatgcagtttgacagcattgagagaatagtttggagtagagctgaaaaggggcctggtagaatggacatatcatttcttgtctctttgtattatttctgagcagaggattttcctaaggaatagatgagaaaactccataacccattacttcaagaatccagatcaagaggagatgcagcctaacagataaaatagaagtagattactgtgacctagtgaggatgccttgacctcttttcctggggtcatgatgatcccaggttccagctgaatctgtcaaccatagttgaaacatctatataccttagctgcrcctttattggatagtgtttcatgcttctggaaaattgttctaaattctccttgttttgcatgagcttggttagcctcactgcacagagtggtttttgttccccagggagttcactcgtgaaaaatcagatcggatcttttctctctactctttccaagggaaggcacgtttgtcttccagaacttccagaggcatcctacagtgatcaggttggcaatcatagccaaccaacatctctggcaagatcacattcatttcagcttacgagttatgtgtaaagtaaccctgggatccccaaatgtttatccacataactgagtatatcaaccacaaggaatattgtcatgattaaggatagcctcgtaaaatgcaagtaatgcgttaggtaaaatatttctcaatggagaaaaagatgtcaatgtactttttacgttgggatttggtttgtaccatttaagatcttattaagtctcagtaagatgcacttcaaatagttcattcttgagtcaataacttcttaactttaaaagatcgtcactcaactcactat

SEQ ID NO: 679293 - DNA, 1363 bp, Homo sapiens
gagatctaatatactatgggaattctgaaaagaataacaataggttcaaggagtcctgaaagactttttggatggggtacacctggatgtgtgtggaaaaatttcaaactgtcctcaaaaatgcaaacggaattggaaagaggtgtctacagataagatgaggctgcatgatgagacacaaagkcatgccatgtgtacagtttctttgtaaatcttgtaaatttgtttaagttctttgtagattctggatattagccctttgtcagatgggtagattgtaaaaattttctcccattctgtaggttgcctgttcactctgatggtagtttcttttgccgtgcagaagctctttagtttaattagatcccatttgtcaattttggcttttgttgctattgcttttggtgttttagtcatgaagtccttgcccatgcctatggcctgaatggtattgcctagattttcttctagggtttttatggttttaggtctaacatttaagtctttaatccatcttgaattaaaaaattactgtttttttctattgaaagaaccaattttattttagactacctttcaaacaaagtataaaggaaatataatatagaaattgatacaggtggtggggtgcggtggctcatgcctgtaatcccagcactttgggaggcccaggtgggccaatcgcttgagcccaggagttggagaccagcctgggcagcatggtgaaaccccatcgctacaaaaaaataaaaataaaaaattagctgggcgtggtggtgcgcacctgtagtcccagctacttaggatgctgagatgggcagatcacctgagcccaagaagttgaggctgcagtcagctgagattgcccaactgcactccagccagagagacaggagtgagaccctgtctcaacaacaacaacagaaaaacccagtaattctaaaccaaaatctccatttatatacaacgaaactaataaagaggaagacaaactagaaatgctttctctaaacaagagtaacatctcactctcaatataaagatttcagtctctgatccctctcccccaataaaagtcttcaaaaaggtttctttaaaattataagacaagatataggtttatttgaagatgaaagagttagaggaaaatgttttgattgtcataacactatttccttaacactctacttataagcaaagaatcataatttctaactgaagcttaaaatattttgcacaaaagaactgacatcttaatgcatgcatgctgttgcacattgtcttttaagattgcatttttaaaaatagctgaagtaatgtctcatcttaaaacttttactatttttacattgtctttatttta

SEQ ID NO: 679294 - DNA, 2046 bp, Homo sapiens
ttgccctcatgtagcactctcaagacatcagtggtggtttgccctcatgtagcactctcatgacatcagtagtggtgatgatggtgcggacaacaatggcagacagggcaatgaccccaacacatgccccatgcacatctttgccgcgggacttcacggcccctcataaaggtcctgctctgactctgggcacgaccatgtgacatggccaacagagacctttgcatgtctctgcttattcttctgcacttccactgtcgccaagagaaggccattggcccaggctaggctgctagtcccaggaagagaaaaagaggtgcctggagcacagctgcccccgccaagcccagcccgaagcagggatctagtcaatctgcacacacgggggacagtctggccaagaccagctgggaaagaatcagggccttgcccaaaatcaaaattcagacctaagtctttataactggtcccctcctccagcagagcctaccagtgcccacctacacccctcagctgccctagaggtcacctgcagcgctggtgagggcttctgacctcaagcacctgcacctgcttcccacctggccacagaggaacaggcccagaagtgcagggagccgacgccctgagccacacccaaccactaaaggacaagagttggcacctgccccccacacgccaaagaaggctcctggctgtgttcatgtcgtctctcaagggatcctggcaggctgagccccagggttccacagaggaacccctttcctggcttcttccccccttgccttctgagaccacctcccacctgactagcggaggcccactctctagtacgaaagcacacccgctcacatgcctgggcaggccctgagagaggcgacagtcatgaggactctggatctgagaggcctgatttggaaaccagctcggctgcctccagacgacgggacactggacaagatctgcccctctatgtgggttcctcatctggaaggtgaggacagtgatgaactcaatgtaattccccacagagcaccctccaggcatcagcagcagcgacgatggtgcggacagtcacagtggacgaggcactgaccccactcatgaccccggggctggcaccacccaaagccaggcccattggaaggaggtggcagcgcagggagatgccacctgcagagttgggctggcctaggccagtttcttctcagggtcttggttccttacccaaaaaatggcctatttcatggcaaagttgtgaggatggggaggataaaacaaagtacttggcacaaagacaggaaacccgctttcctccctggttgttctgaggcttgagcaggacaaatgccaaccacctagtccaatgcccctgccgctggtggggtcaacaggtcccaggagagtctggctcatttcaagctgagccaagtcctgaagcccaagccagggcctctggctcaccagcccccacaaaatgactggtttagcttccagaaaatgccagcaagtctccaaagcatgctttagggaggcttccacctctcaatgggccctccactctcctctcrctccctccagaagcccacgctaggagcccgctccctgctaaccataacacagtcacactgtgcaacatcctgtcccacatcccaggagctacagacatgcccaccacctgatctagtggtcggagatcaggagggaccactagggccacttccccctagatgcaggacactggaaagagctgcccccacactaacagggagaggtcagataaaatacaagatcctagtttcactcaaccaagatgggcccttccacagagtggcaggaggcaagcaccagctcacttgagacagggccctggaggaagagaagccagcccatgcaggtggcgagaggaattcaggtaaaatgtttccatgctggtaaaagccaagggtgagcccatgtgacagcacagaacctctgaagccagagaagccagagaatctcacactgagcagagttcacacccaaacacaggctcttctccagacc

SEQ ID NO: 679295 - DNA, 574 bp, Homo sapiens
gtgattgcgcctgagcgagacgaaattacgcgatcgctgttaaaaggacaattacaaacaggaatcgaatgcaaccggcgcaggaacactgccagcgcatcaacaatattttcacctgaatcaggatattcttctaatacctggaatgctgttttcccggggatcgcagtggtgagtaaccatgcatcatcaggagtacggataaaatgcttgatggtcggaagaggcataaattccgtcagccagtttagtctgaccatctcatctgtaacatcattggcaacgctacctttgccatgtttcagaaacaactctggcgcatcgggcttcccatacaatcgatagattgtcgcacctgattgcccgacattatcgcgagcccatttatacccatataaatcagcatccatgttggaatttaatcgcggcctcgagcaagacgtttcccgttgaatatggctcataacaccccytgtattactgtttatgtaagcagacagttttattgttcatgatgatatatttttatcttgtgcaatgtaacatcagagattttgagacacaacgtggcttt

SEQ ID NO: 679296 - DNA, 680 bp, Homo sapiens
taagagaaaccaactgagaccaccgttttcagaatcacattgattttaaatcagttatacccagtttctaaataacttatgttctttgactgggtattatctttattttcttcctctttctcttcatactcagaatcacatggaatcctatttcctacataggaaatattcctgtctcttgaatgtgacctttwtcctcaccatctcctttgcttaaaccgggttactatctaccagttctcatgtgggccatcacaggccatattcttaattagcctctctctctccacattcccacctcaacctccttcacaaggcaaacatctttgttgtttaaaaatacaaatatattcaagtccaccattgctagcttaaaatgcttcagaggtttcccatggccttgaaattcaaaccttaacatcattctcttcatgctttttagctttccctcacactattctgtacctcaaattcccttttgtccgcaaaataaagcccaaaactcaaggcctgtcataatctgatcacagcctgtttcttcagcttcattttgtactactctcttctttaccatctatatccaggggtgaaatcattgaggctccagggaaatatctttgtggcatgtgagtaagaggaaattatagaagacattagttacaactgagctaccaaactag

SEQ ID NO: 679297 - DNA, 1348 bp, Homo sapiens
ctgatcattccctctcctttatttctgtataaactgtttacagaaaactatgcggcagagtgtctgagaatagtgactttctaatccctagtaattcctaggaaatgtaattgtaggaacaaatttcataaagtatcttcagtcttacataaatctgtgtaaatcacagatccctttaaatgccgtttggatagcagagctctagctggaactgcaacctgacttccctctggagcttcctgaaggcagcttgctgattccctggtggaacccttgccttcccagactgaccaacccttgccaacagccatcagttctttccagataattcgggacaatgtcaccccctttgctgtgtcaagaacttgccccttgaattttaaaagcatctgcctttcataagaaaactcaattttctgctgctgacttatttacmcacagagttgcagatgcctaaattgaagtgacttgttgctattcttggctgtgaacaggctctctctgttgaaaactgaaaacctgtgtggtggatggcacgagtcctgttgaatggtgcaaacgtcccctgcacaaaagcactattaggatgaatgagaaatgacaaagtgagaactggacataatttgttaacagcttccgaagttgatgaggatcaatgaagatcctcttggaatgcagggtatccatgttcttctttcaacttgcacatcataataaaataatagtttgtgtttgtacaaatgtataaaataagtaagtatcatgttaaagacatagatctgtgaacacagagctggtaaagttttctttctgctgttcacatggggaaaatcagatggcccaatgtagaaatggacactgaatttggttgtcatccaaatgggtccatgtcactcttcaaaatgtatctccagtcctgcccccttctccatttgtgctgtcactgacccaccctaggcctctaggatctctcacctggatgatgtctgtaccctgctaaattgtccctctcattggcttccattaatttatctttttggaccattgtcaaattgtgatccatatattacccatacctattatgtcattcccgtttataaccttttggagttttttctcaccttacagaatgaagtccaactaagactctcagtgtcacctctgcctgttgctccaggctcagtcccacgcttctgtgggcatcctatgctaataggtttgcattcctcatgctaaatgatctctgtcacctctgtgccttcgtttctgttgccctctctacctgagacattttcccctttctcttggctggcctaactattgattatccattaaaattcaactccta

SEQ ID NO: 679298 - DNA, 604 bp, Homo sapiens
ccctccctccccctcacttggcttttcgcagataatgtacagaaagcccctttttgttgttggagcggtttactgggggaggccttcagaatcaacatccagctctcccagtgtgacctcccccttcccctgccaagtcagagatgggctttctttgtctgtgacttgagatcttggagggccttgggttccaatctgagccctgtcactagccttgggyggatgatcactctaaggaccaatttcctttttcatctggaaaatggggatagtagtccctttctccgggggtcgttgtgagaattaagtgaaatgacacagggctttaatggatggtgctgcacctgttgtcatggccactgtggatgtgagcggcagagctgcaaacacgccttgctcctctgaggtcagcccatgccggctgccctttgggtgccagccaggccgttgtgctgcagggaagggaggagaggagcctctcttctgggtgagccagacaaaaaggaacctctcgtggcgtttgtcccagcatcctctgaccgtgagccttccgatgtgcctgcctggtatgaacagaaacgtggatccaacccacactccttcc

SEQ ID NO: 679299 - DNA, 657 bp, Homo sapiens
cctggccctcactcaagatagagtcgctctggttagaacacctctgacaacagcagtgtgagaatggactaatatatatgggaaaaaataacactaaaccattaaatacagatgtgactgacacagacccttgatgaactcagctgctgcttcctcgtttataactacagagcccttttgggtgacaccatttctcctccaggtctgtccaggtttctgtcatctcttgccttaccatagatattttcagtccttaatggtcacctacaaaatattcattgatgtggccaggtgcggtrgctcacacctgtaatcccagcactttgggaggccaaggtgggcggatcacgaagtcaggagatcaagaccatcctggcagtggcgggcgcctgtagtcccagctactcgggaggctgaggcaggagaatggcgtgaacctgggaggcaaagcttgcagtgaaccgagattgcaccactgcactccagcctgggctacagagtgagactccatctcaaaaaaaaaaaaaaaaatcattgatgaaaagtggctgtgctctaccggcgggatttgactgcgtgatgtctcacagaaagttttctgctcccagacatgggtccctcggcttcctgcctcagaagcgcagcagcaggcatcgt

SEQ ID NO: 679300 - DNA, 1538 bp, Homo sapiens
caactctacatggaacttgttccaggtatctaaggcagtgaaaatttttaccacttattgagtgtgtactttgtgccagccacattctaagcgttttcatctattaaatcataaccctaccaggaaggcgctattactaccaccactttccaaataaggaagctaagttcagagaggttaatggggttgctgctcgagtaacacagctcataagtggagaagcctggacctaggaatctggcttcagagctcacactctcaactaccaccctacaccaccaggtgatcacacagagagatagcaaaacaccacagaccagacagctatgagcttcatagagcactttctacataccccaagcctccacattacctatcctctttctgtccttgatcttcccccttgccactgatcataggacatattgcatatttggcataagtattaaagcaccgcacatgcccctgctcactagaatgtaagatccacagggcagggattttggtctgatttgttcactgctatgtttctaggacttacaacagcacctggaacacagtaagtgcccaagaagtatttgytacatgaacgaataacttctaatcagggagacagataatgcacaaatgaatggataaatttatcattctaggtggagataagtatctaggaaaaaaataaagcagggtaagggatttgagagtacttgagcgagtggaggagtggtattttttctttgagatggagtcttgctctgtcaccaggctggagcgcagtggcgcaatctcagctctctgcaacctccacctcctgggttcaagcaattctcctgcctcagactcccgagtagctgggactacaggtgcacgccaccacgcccagctaattcttgtgtttttagtagagacggggtttcaccatgttggccagcatggtctcgatctcttgatctcgtgatacacccgcctcggcctcccaaagtgctgggattacaggcgtgagccaccgtgtctggcgaggagtggtattttaagaagtctttcttacaggtaacatttggatggaaactcaaataaatcaaatgaatgactgaaactaaggaataaaagaagagaaattaaatgttgggtgttggagagagagatggcttaaattgtggcctcaccactcactgagcaagttccttaagtggcctgaagctgagcttccatctctgtaaaatgaagggttgacactcacttcacacgagagcgacagtttgagtgccaggtagcatagttttctgggacatagtaagtgctcaataaatggagtctgctgttaacaataatgatagaatgttcataaaacaatatggtgcatctttatgactaatattataacataacaccatatcataatgttatataataacatgttttgttattatatattattaatagcatatattgtcactgtattatatattatatattacaaagatcaattattacatatatgtaatatcatatatcatatattacatgtaacatgtata

SEQ ID NO: 679301 - DNA, 1538 bp, Homo sapiens
caactctacatggaacttgttccaggtatctaaggcagtgaaaatttttaccacttattgagtgtgtactttgtgccagccacattctaagcgttttcatctattaaatcataaccctaccaggaaggcgctattactaccaccactttccaaataaggaagctaagttcagagaggttaatggggttgctgctcgagtaacacagctcataagtggagaagcctggacctaggaatctggcttcagagctcacactctcaactaccaccctacaccaccaggtgatcacacagagagatagcaaaacaccacagaccagacagctatgagcttcatagagcactttctacataccccaagcctccacattacctatcctctttctgtccttgatcttcccccttgccactgatcataggacatattgcatatttggcataagtattaaagcaccgcacatgcccctgctcactagaatgtaagatccacagggcagggattttggtctgatttgttcactgctatgtttctaggacttacaacagcacctggaacacagtaagtgcccaagaagtatttgctacatgaacgaataacttctaatcagggagacagataatgcacaaatgaatggataaatttatcattctaggtggagataagtatctaggaaaaaaataaagcagggtaagggatttgagagtacttgagcgagtggaggagtggtattttttctttgagatggagtctygctctgtcaccaggctggagcgcagtggcgcaatctcagctctctgcaacctccacctcctgggttcaagcaattctcctgcctcagactcccgagtagctgggactacaggtgcacgccaccacgcccagctaattcttgtgtttttagtagagacggggtttcaccatgttggccagcatggtctcgatctcttgatctcgtgatacacccgcctcggcctcccaaagtgctgggattacaggcgtgagccaccgtgtctggcgaggagtggtattttaagaagtctttcttacaggtaacatttggatggaaactcaaataaatcaaatgaatgactgaaactaaggaataaaagaagagaaattaaatgttgggtgttggagagagagatggcttaaattgtggcctcaccactcactgagcaagttccttaagtggcctgaagctgagcttccatctctgtaaaatgaagggttgacactcacttcacacgagagcgacagtttgagtgccaggtagcatagttttctgggacatagtaagtgctcaataaatggagtctgctgttaacaataatgatagaatgttcataaaacaatatggtgcatctttatgactaatattataacataacaccatatcataatgttatataataacatgttttgttattatatattattaatagcatatattgtcactgtattatatattatatattacaaagatcaattattacatatatgtaatatcatatatcatatattacatgtaacatgtata

SEQ ID NO: 679302 - DNA, 1619 bp, Homo sapiens
ctctttcctaaattccctgcattgaacatctatttcatttgcaaccagaaaaaaatatatcaaagtgaatcaaccgagattctgcaaggtaccacgcactctactgaatgtatgtattatccatggtgaggacaactgccctaggaggtgagggttgtcatcaactcccatttcacaaacgagcaccctgaggctcaggaagactaagtcacttgttcaaaaagatacgctgcagagaggcagcagggccaggtctgtgtagcctcatggctccggctcttgttcctgcagatctcaaatcaaccaacacatcttggttttttttttttttttttttttcaagtagcaacctctggaaagcagcaagagtagggatttgatggccgagcccatgccaggctatttgctaggtccctctagagacaggatcctgatgagtgctcacaaacagacctgggtaaagatctggaccatctccccattttatagatgggaacactgcagcccagggaaattatgaactttccgaatcacaaagctcagaagcaggagagccgcattggaactcaggtcatctggctccaagtccacatgcttttgactccatcacagggccccaggaggattcacacattgtttgattcataccaccaaagatcaaactatttttggattccttatttttaagtaacacaaaaaaatcagcccaggctggggcaatagggagcacttataaccatttgctacttttatctgattttaaaagtaatacacattctttgtgtataaaaaaacaaaaattccttggcatgtacaaagaagtaaacaaaatgctcataattttacaatgcagaggaaactcctaacaacctttgtatatacatttttgatccaatgatcaatttcaatgtatataatatgcattcacattcataattgctccatactttcttttgattttaatgttttccacataataatatagtgtatatatttttctctactaccaaaaatatcttctaaaatataatttttaatttctacacaatagttcmctgaatgatatatcataattaagtaaaccaatcatctactattatcatataagctatttccaatatttcatatacaaatcagtgccattattttaaattattttcataagatagatcctaagaagtgggactaatggattaaagggtgtaagctttttgtaagatacccaaaaaaagttccctttttaaggtacatctcacaaattgtttatgagaatgtccatctcattacagcctcaccagcactgcagtttttgaaaaatatttttttcaatttgacaacagaattccccccaaaagacaccctgtatcctgctattgttttagtttgcatttgtctgattctagtgaaattaaatgctttttattaaccatctgcattttctttcctgtaaaagtctgttcacatccttttccattcaaaacaaaatagggtctccagtttcctattgaggtgagttctgtgtattaaggatactgccctttatccatcatgtgtggcaatgtttttactagatgcttgcttgtctgtttctttttaatggatgtgcatcttaaaaaaca

SEQ ID NO: 679303 - DNA, 1619 bp, Homo sapiens
ctctttcctaaattccctgcattgaacatctatttcatttgcaaccagaaaaaaatatatcaaagtgaatcaaccgagattctgcaaggtaccacgcactctactgaatgtatgtattatccatggtgaggacaactgccctaggaggtgagggttgtcatcaactcccatttcacaaacgagcaccctgaggctcaggaagactaagtcacttgttcaaaaagatacgctgcagagaggcagcagggccaggtctgtgtagcctcatggctccggctcttgttcctgcagatctcaaatcaaccaacacatcttggttttttttttttttttttttttcaagtagcaacctctggaaagcagcaagagtagggatttgatggccgagcccatgccaggctatttgctaggtccctctagagacaggatcctgatgagtgctcacaaacagacctgggtaaagatctggaccatctccccattttatagatgggaacactgcagcccagggaaattatgaactttccgaatcacaaagctcagaagcaggagagccgcattggaactcaggtcatctggctccaagtccacatgcttttgactccatcacagggccccaggaggattcacacattgtttgattcataccaccaaagatcaaactatttttggattccttatttttaagtaacacaaaaaaatcagcccaggctggggcaatagggagcacttataaccatttgctacttttatctgattttaaaagtaatacacattctttgtgtataaaaaaacaaaaattccttggcatgtacaaagaagtaaacaaaatgctcataattttacaatgcagaggaaactcctaacaacctttgtatatacatttttgatccaatgatcaatttcaatgtatataatatgcattcacattcataattgctccatactttcttttgattttaatgttttccacataataatatagtgtatatatttttctctactaccaaaaatatcttctaaaatataatttttaatttctacacaatagttcactgaatgatatatcataattaagtaaaccaatcatctactattatcatataagctatttccartatttcatatacaaatcagtgccattattttaaattattttcataagatagatcctaagaagtgggactaatggattaaagggtgtaagctttttgtaagatacccaaaaaaagttccctttttaaggtacatctcacaaattgtttatgagaatgtccatctcattacagcctcaccagcactgcagtttttgaaaaatatttttttcaatttgacaacagaattccccccaaaagacaccctgtatcctgctattgttttagtttgcatttgtctgattctagtgaaattaaatgctttttattaaccatctgcattttctttcctgtaaaagtctgttcacatccttttccattcaaaacaaaatagggtctccagtttcctattgaggtgagttctgtgtattaaggatactgccctttatccatcatgtgtggcaatgtttttactagatgcttgcttgtctgtttctttttaatggatgtgcatcttaaaaaaca

SEQ ID NO: 679304 - DNA, 527 bp, Homo sapiens
tcctctatggcmgtacttcctctccagcattgacacaagctggtgaatggttatacaactgggcaagaaagaagcagaagaaaaatctcctgaatatgtctgcagttcagacacaagccagtttaagaatgtattgtttcattacagtaagtacatgataaaatgccttcaggtcagtgcaacaggaagtactctagtgagattagaaacaaataagaataaaatcccaatgagcataaagaggtctttagtcagcaaaatatgtttgcttttgctatcaatactatttgctcataggcaaaatctacaaaattgggaatcacaccatatccagtaaaaatgagaaacgttcactattgatgagttaagtagcattctgcattcctgttttttttaaaaaaacttttaatggaattaatttcctctaagaatactttttacattttcaagctagaagaacatttatttctgaatggatggaattttttttcaaaataatacttgtctaagaattcaactggagtaaa

SEQ ID NO: 679305 - DNA, 661 bp, Homo sapiens
tcactatatattatatatatcactatatattatatatatcactatatataatatatatatcactatatataatatatatatcactatatataatatatatatcactatatatataatatatatatatatawaatacatatatagtttgtttgttttttctttagacggagtttcactcttattgcccaggctggagtgtagtggcatgatctcagctcatagcaacctccagctccttggttcaagtgattctcctgcctcagcctcccgagtagctgggagtacaggcgcccgccaccacatccggctaattttttgtgtttttagtagagacggggttccaccatgttggccaggctggtctcaaactcctgacctcaggtgatccacccacctcagcctcccaaagtgctgagattacaagcatgagccaccacgcccagccttcccagctgatattgaaccaactgccagacacgtgggtggagctggtgtagatctcctgtggcaggtgagccagatcagaccaggaaaactgctcagccaagtcacagaatcattgaacagaaaaatggatgttgtggagtgattcactatgcccagaaccaagccgggtccggctgcattttctcgaggcccaataacgagaagcagagaaact

SEQ ID NO: 679306 - DNA, 645 bp, Homo sapiens
tacctgtcctccatattttaaaatttcccagacttttacatgttttcttcatttccatttcattctgcttacttctctccatcttgttctctatgtcctttacaatgttttcagcattaattgtcaatctttgcattgctttcaatttggctttcatttctgtgataattttatttgtttttcttccacttctttgacaagtgcttctgggtcatgtttagcttctattgacttctacatattcctgaatctcataactctgatttgttgtcttgttgtttagctgtgattccttcatattaaaaaattggttcaacaccagcctggccaacatggtgaaaccccgtctctattaaaaatacaaaaaaattagctgggcatggtggcaggtgcctgtaatcccmgctacttgggaggctgaggcaggagaatttcttgaacccaggaggcagaggttgcagtgagccaagatcatgccactactctccagcttgggcaacagagcaagactccgtctcaaaaaaaaaatttgatggtgatatgatatgatatatggtcatatgataggtcacatgtgtttcttggcaatatttttccaggaagtgctatttgctgtttttttctgtccttctccctctatggcag

SEQ ID NO: 679307 - DNA, 645 bp, Homo sapiens
tacctgtcctccatattttaaaatttcccagacttttacatgttttcttcatttccatttcattctgcttacttctctccatcttgttctctatgtcctttacaatgttttcagcattaattgtcaatctttgcattgctttcaatttggctttcatttctgtgataattttatttgtttttcttccacttctttgacaagtgcttctgggtcatgtttagcttctattgacttctacatattcctgaatctcataactctgatttgttgtcttgttgtttagctgtgattccttcatattaaaaaattggttcaacaccagcctggccaacatggtgaaaccccgtctctattaaaaatacaaaaaaattagctgggcatggtggcaggtgcctgtaatcccagctacttgggaggctgaggcrggagaatttcttgaacccaggaggcagaggttgcagtgagccaagatcatgccactactctccagcttgggcaacagagcaagactccgtctcaaaaaaaaaatttgatggtgatatgatatgatatatggtcatatgataggtcacatgtgtttcttggcaatatttttccaggaagtgctatttgctgtttttttctgtccttctccctctatggcag

SEQ ID NO: 679308 - DNA, 606 bp, Homo sapiens
atggcagttttgggggacgttctaaaatgtttaagggtttgagtacctaagctctgaaaaaaaattatttatacttaatagacagtctcctgagtattgtgagcagtaaaccttcatgttacatcattatattttctttaacgtatattctacatcatttatgtatgcttttgggataattaaatatgttgtatatcatgataattgggaagcaattccaggaggctttttttcttaaccagtgctcgtaattacttattttcatatgcttgcataggataacgcagtaggtgttttagccttaaaattctaatttcaacctttaaacgcatttaatagttgaaatttcacaagattttgcttagaaatttagcattgttaatgaagatctactggaatataaactagaccacagatatctgcattttcttgttctccactatattcccccaatttttttttttttttgggagtctcagtctgtcgcccaggctggagtgcagtggtgccatctcagctcactgtaaccttcacctcccaggctcaagtgattyttgtgcgtcagcctcctgagtagctgggattacagctgtgcaccaccatacc

SEQ ID NO: 679309 - DNA, 633 bp, Homo sapiens
aacttgttttttttttaattagttttggaattattttatcaaacactcctagtgcgaacactctaaaatgaacagacatgaaagaaagaagcaagtttgtattgtgattgagtatgatctacaaaataatcgagggagaattcaaatctttacaatattgagtgtatcaaagaacaatctatgattgacaaaaatgtgtgtagcgctctttaaaccctccaaattctgcatttaaaacacaagaagttatggacaaatagattacagccaaaattacacaaatttctgtcctctgctaaaacaaaaacccaaaaaacaaaacaaaatgaaaacactcataaacctacttaatgtacgattagtaggtaacagctagctgttctccttcatcccggggttaacaactacttttmtccactccttcattcactgctactattcttcataaccaaccaacatcacttcttgttgtatcacatcccagctcactttcctggtattttaaattagaaagtggaaaacaccatataggtaattttttactcaagagaacaccatggccattttattgtagagtgcattattaagtgtatagcttgaaggaatggtcatgggaatccacctttcatattc

SEQ ID NO: 679310 - DNA, 595 bp, Homo sapiens
gctttatttatttttctgaatttatcttccaaatgtcatgtacctctcctagtgtggtgtgagtaaagcagcaggataaaaggccaagagtaatcgtaataggtctccgttcacttagaagcaacagggatgagaaataggcagtctataagctatctaatcagaaatttgggctcgtcttgggaggatggcagggtgtgggtgrcaaatgagagtgaagagtattaagggagctaaatgttgtctttcataatgataaaacaatagaaaatgtgcaaacgtattgtttagagctgtagtgagttgaataccagataacatagcaaaatgggttgaatgtagaaatgtgtgagattgtacagtgggaagtgatgggatagagagctagtaatttttgttatgcaccttccagtagtgtgtatttattttggataattcaaaacatatgtatgtattatgttaataaaacattaaagatattttaaaagacttgtcaaaaacatgaccttgatataatgaaaatattgcccaagtatagctctactttaaaatctgagaggtaaaattcaaatattgttctgaaaatgtaagagca

SEQ ID NO: 679311 - DNA, 670 bp, Homo sapiens
aaaacaaaaacctggagatctggttarcaacaggaccaaactcctgcacagaattttgttggatctggatcttagctgcccttttctgctttctgatgatcagttcttactggaccaattttgttcactgaactacttatctggctactataggcatctgagtttgtgaactttgcgctagcataaagtggactttgttgtgtcttcccccaacacaccccaaaggatagcttgacactaataactaatatttactctaggctgtactttcactttgataataaaactgtcaagagctgagaaatgataaaagcttaagtcacttcctgtaagttataacataattctagtctataaaagaaaaaaagtttatggagaaagtctccactaataagcaggaagcattatctgtgaaagattacaaaagagctttggtaacaaagcacaaacaggactgataaggagagttgccctctcaggtcagaacttgtctattaactgaaattagcatggctagttgatgagctgcaccatctaccttgaatcaagcatgacagcccttcttcaatgcttcttgctacatggcctcataaagttgaaaaatgatgtttctggacaggcagcttccactgtttcaactgttaaaacatcacatggggtttctatagta

SEQ ID NO: 679312 - DNA, 670 bp, Homo sapiens
aaaacaaaaacctggagatctggttaacaacaggaccaaactcctgcacagaattttgttggatctggatcttagctgcccttttctgctttctgatgatcagtycttactggaccaattttgttcactgaactacttatctggctactataggcatctgagtttgtgaactttgcgctagcataaagtggactttgttgtgtcttcccccaacacaccccaaaggatagcttgacactaataactaatatttactctaggctgtactttcactttgataataaaactgtcaagagctgagaaatgataaaagcttaagtcacttcctgtaagttataacataattctagtctataaaagaaaaaaagtttatggagaaagtctccactaataagcaggaagcattatctgtgaaagattacaaaagagctttggtaacaaagcacaaacaggactgataaggagagttgccctctcaggtcagaacttgtctattaactgaaattagcatggctagttgatgagctgcaccatctaccttgaatcaagcatgacagcccttcttcaatgcttcttgctacatggcctcataaagttgaaaaatgatgtttctggacaggcagcttccactgtttcaactgttaaaacatcacatggggtttctatagta

SEQ ID NO: 679313 - DNA, 1402 bp, Homo sapiens
ttttgctcttaacggaatggaaatcttagaaatgttgatgggacaatgacatgaatcatgaaaagaaaggaatagtgggaatacgaatattagaaagccaatgttttgtggatgtttgaaactctcatatacattcatagggcttaccccactggtatgggcaacaggtaactctggtagtttctaaagatgctcccagtgaattatgcctcctggtatgtggtccttatgcagttcccttctacactgaatcgagactggcctgtaatttgtgttcacaacgaatagaatgcagcaaaagcaaagccctgtctcctagagattctggtatgttgtctctttgttctcattggttttaaggaacttatttatttctgccttaatttcattatttacccagtagtcattcaggagcaggttgttcagtttccatgtagttgtgtggtttcgagtgagtttcttagtcctcagttctaatttgatttctctgtggtctgagagattgttatgaatttcgttgataaaattttatatatttatggtatacataacattttgatatatgtacacrttacaggatgattaaatcaagctaagtaacaaatccataatctcacataaattttttttggttgctcttttaacactaagttttggggtggtttatttcagacaccccaaatgactgtctatctcatgtgattttaaggatgtctaaaggttccccagttgtgcaatatctacaggatcactgaatgccaagtccccagggaaaggaatgatgaaaggggaagttgctggaagaagagagaggaggaagttgaggccatagagaggaaggccctgaaagaaaactttaactgcttgccagtttggccagaggtctctttgagcaggaacaactgcatttagaccagcagttcccatgctctgttttacaggtctgagctttccagtaggtgaaattatgttttgaaactgtgtgccatgtagtaccagctagaataaagccaacattacacattcagttctaccatggttatttcagttctgttccatatctaatgaccaccaaccttgaatatcaatgtgtgcagtccttagggagaccaggacggattcacaatttcaatggggctactggaaagatgcttggctgtttttttactcatggaaagtcagaaaaatcattgttatatgggaaagacaggatattttaagtacttatttcatttgataatattgtttttctcttcactcaagaaaaaccattaaaaaatcatgtgtttgtgaaagttatccaggtctatcaattattatttaaagtaatatctgttttactagtgtgtaaaggatttaaaagagttataatgaagcattttaactacataaatattacttc

SEQ ID NO: 679314 - DNA, 2351 bp, Homo sapiens
caagggtctgaccaaggctgctgactttttccacgccaccttgcccgtccatctccctggctcccatgagacagccctggcttggacctcagcttcctctttggggtaggctgcacacttctcctgggtctcagcctccagcctctccctcccaatcccttctccatgggcagtggctgctgtgatgagtctggctggaacaggacatggcaccttggtcccacagggtctctggggtcaggtcccacctcctcactgtgcagtacccagcatgagcacagctctggaggccggggtggcggcggacggccctcagctgtgactcttgcccatctccactcggtcctcacaggcgcaggccacctccacctgctgccagccactgaagggtgatgtgtgggaggggacccctgtgctgtgattgacatggttgttttccagcaagaagaatttccagagctgacatcagcaggccataggttgacccgcttccgaaaggcctctgcaggcaggaccagtttccccgggaggtgtgcttcttggcccaagatgctgatgtttgtttttattaatagctggctgtttgttctactttggaccaagagtccaggttcacagttatttataacaactaaaaattacttctggatccagctctggctgctttgtgtttcccgcaaatatttcccgatttgaaacagagactccgtgttctgcttggacccacccatgttttcatggctgtcaagagcctactgtgtgtcaggccctccactggctccggtgtcccagctcccacggaaggtctagaaacagaggcagaggtgcccagcccatctyaggaagcgaactccacctccagcacggagagctcccacctggtcccagggggctgaggcccccaccgcctgccggctcctttcagaagggcggcttaggcagaaaagcctcttggctatctagcggctcttgcaaaattgcatttgatgagttaagtgtaaataaatgagaaccagatggattagattttgggtaaaatacacacgggtcttagagctttggggcctgggttctgccagatccagaacactctccgagctgtcaagagctgctggcacaggcggcaggaggtatgcctggggtctcccaggacctgtctgcttcctggtctgggcatcagctgaggtcttccctggggctcctgattccccagcaggttggccgtgtgcagaagacacagagccaacctcttggcctgggcctgagtccaagctcagggtgggagatgaggcgcatgaatggtaaggtcagctttccagaccagcaagctcactgctcacgtccaaacccagcaagccagcccagggaaggcagaggtggtgaagcctgctggccgctggggtctgctcactctgctctccgcaacctgagtcctgccttccagcccagccgctgccctgccgccccctgctgtgcatctctagggaaggacgggagtctaccgcccagtgcagaccgctggccagtcctcaaaggggtctgcgtgatgctgccctgtgaccactgcccatgggacctggctgttgctctacaagtcataccagatggagtacaagattcagtgagtcgactgggcttggtggctcacgcctgtaatcccagcactttgggaggctgaggcgggcggatcacaaggtcaggagatcaagaccatcctggctaacacggtgaaaccctgtctctactaaaaatacaaaaaattagccgggcatggtggcgggtgcctgtagtcccagctgcttgggaggctgaggcaggagcatggtgtgaacccgggaggcggagcttgcagtgagccagaccgcaccactgcactctggcctggggcgacacagcgagactccgtctcaaaaaaaaaaaaaagaaaaaagattcagtgagtctttgctggtcacttgctctgtgaccttgagcaggtcatttcaccattttgggccttggtttccttctctataaaacagggataaaagtccctgaggtgtttgggagtcaaaggaggtgatggaggtaatgtactctgcacagcgcctggcacacacagaccaccaccgagtgtgagcaggtgcagcacgaagccgctgctcatggcctcagggaatcacgggtacgaacgtactccagtgacagcaaagtcccttccaaaatgcaaaagcaacaacaaaccacatcagaggggagcactcagacccgcctcagccttctggtctccaagtgaagccgctcggctcctgacactgttccctcctgaataagcttctggcacactcaccacccaggtcgcccttctctgg

SEQ ID NO: 679315 - DNA, 636 bp, Homo sapiens
atgagaatagcccctgcataataacattcatgaaaatctcctagaaacatggatttggcttctaatgggacatttgcttactccaaccacatagagactggcctcttaagattaggaagcagctcactctatccatagctggcagtaccctgtgctgtagaaacttaattttactttgtgattgtgtggttaacttttctgtattaacctgactttgactttagacttcatatgacctatttacccaatcttacacagttttcagtttccagcctatctactcagtaccstactttattttgtttttcttagactgtccttgttttaaaactgtgatcttatttcaaccaaggtatagctgttcttagcttcctttgcatgctgagcctgtctttcttcacagtgaggaggaacccctgactactctttcctggaaatcttcattcccataggtcttctctgctgtccctatgatggtatggagcctgtttttattattttctactcacttaattgcatcttgatgaatttcagtacacaaagtcaccatattgtaggtatatctacaaaggtgttgttatactggaccagatgcagtggcttatgcctgtaatcccagcactttgggaggctcag

SEQ ID NO: 679316 - DNA, 611 bp, Homo sapiens
tcaagtgctttttatgtgtcagacaatgccaagcatgcggatactgcagtaatggcacaaaaaaatcccttttctcacaaagtttttgttctaatagaaagacagacaacaaatgagtaaaataagtactgtgagaataaggaagcaatatgagagatggggagtgctttgagaaggaagcctgtctgaagattgataaccttgaacatggcattaatgagtgctgctgctacatggtcaaaagaaatggttgcgctttaaacaaatactgttctgtgataggccaaagagaagttaagaatagcatgaagaatagaatatagttgtaagaatatttcaagataagattcttccagcaaatttagctttcttatgcctttggataacagtaacaacaatgaaacaccatccatatatcatccacaatttattcgcagaaatccaaattggtacttagttacctcagttatttgtgcttagtagtatttgtgcttgaawatctcattctcaaagagatcaaagcctaccttttcccacccacatttatagttgtaacagcctaacactcaattacttatcctactatatttggttttactttcttctgtaac

SEQ ID NO: 679317 - DNA, 726 bp, Homo sapiens
tttttcctaaacttgatgacctagggctaggggcatgttgaatctcagcctcgcccactggcgctggacttggtacacagggtggggcaaagtgggtactggatcctgatcatccctatccctggggtgtggcttcttgctgcacagtcagcttctagttctgtagccccagctgctcctgcggtggagggagctacacatcaggctctgaccccctccaggtggggccttcgcgtgaggggagtcagcacgcatcagcagctgggcccagggagttgccccactgagcactgcgggctgacctgctcccaaccagggagatggagcttcccccttgagtcgggctgctgaaggggggtaggggatggaaacagtgcgtttgcaggagtaagggtgcagttgggtccctgcgagaaaatgtctcagttgtggcaactgattggtgacctgggggrcgtttctgagcccacagtgctggcatcaggactcaggtgtgaggtgccccagaccctccccttgccagtaattagctgatggctcggtgatgcccagggtgaaggaagacttgattttgggaggggagttctctcgtaatgacactgaggatgccttcaagttgggcttctggcatgttctgccctcgctccccttctgtagtcaccttggccctcgtgttgctgagctgtgtgtgggagcgggaagcgcgtcagtgggcggagggagcgg

SEQ ID NO: 679318 - DNA, 646 bp, Homo sapiens
tgaagtcatttctgtgtggaagacttcctgatgattttgatgctttttccccaaggaatttttcttttttttccaggaaatatgtatgatatgaattatggtaaatggccctttcctttgacttttgaatctctggttttccttcatctccgctgacatcaggacattcctgagcatcacaaaggtcctgcaatcatagccatttagaactttgaaaaacgcagtcactctcttccaaaccagtatttgttaaagctgcagagagagtattttttggttcttgggagacagagaggatgaagggggtactcatgcacagaacatctattccaacactcccatcctcatcagcctttagttccttcctatacattataccaaaaaatttctcacatctaatcctgtttagtcaggccacgactaagtcaaatttaaaagcaactcaacatttagatccactctgagtgtggaaaatctcacrttgttttccactgctctcacaccacaacaactatcaacacagaagacttctctgaccaaatgtagggaatttctccaacaaacaagcaatcagttctgtgatggacaccagctgggtgtcctctaactgaattctgccactctttccctggagatagcatcgcat

SEQ ID NO: 679319 - DNA, 660 bp, Homo sapiens
gcccagtcctgacactaaaagacaacacaggagatttagggtcacactagctattgcagaaagtcagtccctaacttttctgtaatcaccacaattctataactttcagtcatctatgccagaattcccatttttgggaacagtaatagattgaaggctggctgccaagaagatatgtccatgtgtcagaatctatgaatattttctttggaagaaagatttttgcaaatgtaattaaggatttcaagctgagctcatcctggattatctgggtgggccctaaatcaatgacaagtgtctttttacaaaacagagagacaaggcaggcatatgaagacaggttgattagagggatgtggccgtagccccaagccaaggaaagcctgcagcccacaaaagctggaagagtcaaggaaagatttctctctagagactttggagggaatgcagctatactgacagcttgatttcagaattctggcctccagaactatgagagtaaatctccgttgtaagtcaccaagtttggggttatctgtttyattttgttttgttttttgagacgaagtctcgctctgttgcccaggctggagtgcagtgatgcgatctcggctcactgaaacctctgcctcccgggttcaagctcaggagcagctggga

SEQ ID NO: 679320 - DNA, 597 bp, Homo sapiens
ggtgaggtcttttaggaaagtgtgtgtgaaggaagaggggtaggagcaggagtaggcagggagagccttcagtcttggtagaggtgcacctgtgacgaggttggggaaggaggagggctgggtttcagtgcaggtctgagaaatggagtgggcctgaactagccccagagcattagttccgtgctctgccattccctggaaaaagcctcatgccacacactggtggacccagaggcagcagcacagcttccaagcggcaggcactcggccaccacgggactgctgagaagtatccttcccagtgtgctgcatctcagcaagtcagaaagcacagccagctttccttcccacaggcttcttccccacacacgggttacttagagcgttagtcctcggacagtctcctcactccactttttcattgtattctattgttcatattgccatggtatcttaaaaccatggtttgcggatggcgctctcctgccaggaactcttcctctgtcatgtgtgggattaatttaaactgttgagcatgacatcatcttccagccttacttctycaccttgaaatacgcacactatagatgtcattca

SEQ ID NO: 679321 - DNA, 1383 bp, Homo sapiens
taacttttttcagaaaccatcacgtccagccttccttccctgggcacagaggagacctgcctcaggcgaagttcttctgtggaattaaaaagtctcttgggctcagctctccccaggggccttcagaactcaccaaggatagagctgcagacctctggtggtcaaatagggactaaaaccgattacacctacaagtcaattgcaaatcagtctttctttctgttgcacctgtgcccctcacttagtcacctgtcttagatggaagcttcgggcccctcctgggccccaaccctgcggtccccaggttcccggtttttcacgtctaatctcaattggccccttccccacacaccgtgtttgaccacccagttcacagaacgccccgggcttcctagtgggccaggtcctccttagagaggcaagaaggtggagagggagcgtggacgccgagcgcctgctgggcaaacccgaatctggggcctgacctagccggtagccggtgacggggccggtggtggcttggagactcctctctggtcctctgctcttggccccagccccrcgctcacagccacctcctgaagccgccagtgctgcgtcctcttggccacgtaggggaagagcggactggacggaagcagcggactctgggcgctgtcaaggtcactgttgtgaaaagccgggagaccagatgtggacacagggaggcctggacccgaggcgcggctggccagaggcctcgtgtctgcccctcttcacagcttccagggaagctccccgcgtatcctcaaagcagagagcggtttccaaacggacccccacagcgcccgattgggccatcccgccccaggctggagggtgggtgctcatggggtcgccagtcaccaagggccccatctgagcgcacccggtccctcctccaggctcgcctgggcctcgagggcggcgaacagctcggctttgaagaaggctccggccggcgctgcccaagtcgggcagccttcctggcccacccgggagttgagtttcaaggcttcccggagaggccagcccagattcgcagcggagagtttctcaggccacaaacctcggagagaagcagccgtggttccctgtgccctgggccaccgctgggcggggcaggaagcctccctggcgtttcctcgcgggcgcgactacgagccgcggaaaccagtggccgctccacactatttaagctgaggttcctctgccatggctgcggtttgcggtttcagcttagtgtaccacttagtactaatattattacttagtgaacttagtgcacttagtgctctaagtttaccaagtttaccatttattgtacttagtgtacttagtgctctaagtttaccaagtttacca

SEQ ID NO: 679322 - DNA, 638 bp, Homo sapiens
tttgagggaaaagtaagtaagccagtgtagctgtcttcattgatcctggtgtccagtaggggagatggacaccttttttagtgtcatacctaatgttacacattttaaaagtaaattttttttaaatttgtatgtgttgtctcttgaactctcactatggagagacactctcagtgtgcattgttactgtaagaatccctatttttcatctatccaacaaatacagcttgaaggcccagaatatgccagcttctgtgctcctccttgaaaatagaacagtgaggagcataaacataggcatttatgttctgaagttacagtgtagtgagaaagaaatacatgagccagatgaatagaagctactacaaaaagtgctttgagaaggaaggaaaggatctgtgagaaaagaaaggagraagagcaaagccagtttcaggaaagcaggctaaacttccaacaggaatccaagtataaaaaaaaaaaaaaaaaagcaggaattaggcagacccaagcaaagggaacacctagtccgaccaaaaaatgaaaggctttgcagcatgtttgtgaaactgtaagcagaatcactggctagtgcaagaggagagagagagaaaattggaaaagtgtgcaaggtcctg

SEQ ID NO: 679323 - DNA, 3170 bp, Homo sapiens
tcccaccttagcctcctgagtagttgggactacaggagtgtggccatcacacatggctaattcttaaattttttgtagagacaatgtctcactatgtcgcccaggctggtctcaaatttctgggctgcctcagcctcccaaagtgctgggattacaggtgtgagcaactgcactgggtctataatacttaatacaatgtaattgctatgtaaataattgttctgtattgtttagggaataataccaagaaaaaaatggtgtatatgttcagtacaggcacaagcaaccgttttttcccccaaatctttttgatctgcagttgtttgaaaccacaaatgtggaacccagggttacagaggcctgactgtatctcagtggccattatgccagagagagagagagagactggttcatgttaagcgcattgtataatagcagctctgtttgtactttataaactgagtgtgtttgtgtggcttttggttgaagacattctaatattacccacttgagtagaggggattagagttttgaggcctttttctaaaatgaatacttaccacaggggcttttcactgtttaccatgaagtacacataatcagtcttcaacctgactttttttttctgtgtatcattttatatcaaattcattttaataagaggaaaacaggataaacttactccagtgtaaaaaataatacctcacttgagcccaggagtttgagaccagcctgagtaacatagcaagaccccacctttacaaaaaaaaaaaaagccagctgtggtggtacgtgcctgtagtctcagctacttgggaacttgggaggctgaggtgggaggatcacttgagcctgggattgtgcaactgcactgtagcctgggaggctagaaatatgtaaataattgttctgtaagaccctgtctcaaaaaataaaataaaaaacaataccagactttataccttcaagaacaatttggaaattcacatgtctattctaagctgtttctttccccacacctcgaatgggagcagattgagttttagaactaattgggctgggcatggtagctcatacctgtaatcccagcactttggaaggctgaggtggatggatcctttgaccccaggagttcaagaccagcctgggcaacatggtgaaaccatgtctctacaacaaatacaaaaattggcagggcatggcacacgcctctagtcccagctacttgggaggctgaggcgggaggatcacttgagcccaggaggttgaagctacagtgagctgagaccacgccactgcactccagcctgggtgacagagcaagacactatctcaaaaaaaaaaaaaaaaaaaaagttggatggatatttttgatagactcagaaaatgctgcttcttcatgacctagaatggaaaaatagagggagagtaataatctcttattttaaaaaagtgattaataaccttcctcattaaaatacatagggttcagaaaataattagctctgtttgagctgctagaatatttcagaaasttttgttgactgtcagtcatccaaatggcaggagcccaccttcatgaagagcacctggtacaacaaggtgttgtgttaataatacagtaatggtttagtagaactgtcaagtactttggccttgaagtagaccattagggaaaagagaattttagaagaatctagaaaccttttcattttctttaggacaaatataatttttttaaaaaatgagaattctttgttattctctaataaacactttgggtgtcgctaagccttgatctgtgcacctagcagtttctcttttgtcactagcatgtctctggcactgaacagtgcctgaggaagaatgaactgaacagtgtcaagaggaagaggtggctttgccatgtagcttgaacgcattcttgctagcatttatttcatcagttacttccatgaagacacctttctggctgcttctatgaaagttttttcctatttaatgttgtctttgattttattgagatgaggaaggtgatgaaaaaaaaggaggaaagaattaagggactgtatttaaaaacattcctctctaaacctacaattaattttagggagaccttttcagctgtaagactagtgaaatggttttgagtacctttattctctataggggaattttatatgaaaacgaattatttcaaacccaaactatttatttatttatttatttgtttatgacagacagggtcttgctctgtagcccaggctggggtgccctgatcatggctcactgcagccacaacctcccaggctcaagcagtctgcccacctcagtctcccaagtagcacgcactaccacacccagctaatttttgtatattttttgtagggatggggttttgccctgttgcccaggctggcattgaactctgctcgcctcggccttccaaaatgctaggattacaggcttgagccaccgcactcggcccaaacttttgttttaaccgtagattaaaaaaaaaaaagttgaagttgtatatattaatactcagtatttcaaactttcttaggggcagttttctgttttgtgttttttgttttttttttgagatggggtcttgcttggttgcccaggctggagtgcagtggcatgatctcggctcactgcaacctccacttcccaggttcaagcgtttctcctgcctcagcctcccaatagctgggattacaggcacccacaaccacgcctggctaatttttgtatttttagtagagacggggttttgtcatgttggccaggctggtctcgacctcctgacctcaagtgatccacccaccttggcttcccaaagtgctgggattacaggtgtgaaccaccccacccagccaggggcagtttttaaaacaggtttgggctatccaaattgttcttccagagttcttataaatgctaagagaatatacagaattactgttaattagatgttagaatttattatagctagtatgtgttttggggggtaacttaattttcatataatttcaaacttgcagaaaagttgtaagagtagtaccagggaatggacaattttcaagaaaatgacagtggtaagcagtgggtgccttgagggaacacggagaagccacttaagccaaattagggagtcagga

SEQ ID NO: 679324 - DNA, 1391 bp, Homo sapiens
tagcatttattgacttcaaactgtgtatgcttatttagatatttaaaaatttggctggcattcctgggtcacagtatcctctgcaagatgggttgatggagagcctgatttcgtggtagctgctatttactgggctgtcttccttcctctcctccactaggatgtattatttcacatacttggtttcatctcactatgttgacatattgctttcatcacagaatctggactgcatatttctaggtgaagtaatctaggtgatgatttacctatactaaaatccagtattgattttcaattttagattggcagtcaattgagaatattgctcaggaaatgctggcttttgctgtttttcaagtcctctgccttggtggttgtctttagcatctccagtaaagttttataaaaacacatgagcttttagtcatttgctactatctgtaaataaaggtctacaaaaaaaaactaaaactatgtttgattttggtggccagtcttggaagagaggaattgaggaaatacagtagttaatgagtagtggcataggataggggaggaaaataaattgaatcctggagtttcagtaggaatcaagtgcacttgggtagctgacaaagttgggatttgacttattgctccagtattctctcttagattagcctatgtacaactattacctccacatcgtaaacttgattggtctctttgcttctagtccattctatactcaaatgttacattaatgtccccaatatttcatcacctggaggactccagactgctaaaatgcccctttagcaattcctgacctcttctccctacaatatgagaagaaaaagttgctgtagggaaatctactaaaagtcaaggatgtgacagtattcctcactgaattaagcactaagtataagagagctattttattgctaagattgatgaatgggcattagtacattgttaatgcacttaaaagggtattgcactaaacttgagctctttgaggacagagaccaggctgtgtggtcttccagaggaggacacaatgtgcacagtggataattgaagaatgcatgcattaagaaattaatgaaagttgatcggtaaggacataactgtcatacacaaactcagcacagtaaatttgaagacttttatttaaagctttgaaagtctggccccttgctgggcttgtgtagatttctttagaaataggataacttacagcaaaaatttattaaatataagtagctcattgcagatattcatgatttggtagtayattgtaagaaataatagatttattctgagaatatgctgctgcttttcacctggtactataatctgctcatataattagaaccttttgtgttaacatttcaatatctgac

SEQ ID NO: 679325 - DNA, 641 bp, Homo sapiens
cccaagcagttttcctgtaaccagctcattatgcattaacctgtaagacaatatgttttaaagagaaccacattcatcacttcagaaaagtcatattaacataatttctgggaaagaacaatgggggaaaaatgttagtcattgttgatggaacaggtaagtttcagtagcatgatctgttgaatattcatacgatattgtttttgacatttaagaactcaattatccgatgactaatcagtcttttacagtatgttatttttgtgactagaactgaaatactgataagccccaagagagcacagtgttcagatggatttattagtatttttcaaccctggctttctctggcatgcatgtccaggggaattaatacctgtgacagtgaggygccgagggcctggctggagtcagccagttcatgcagaccagatgctgtgctgactgatttcgctccggtaattttttctgttagtgaggggcagccaggactgtgatgtggcctaaagctcccggctcagaatcagctcagctccttttagctatcacattcactacaggtcagggggaaggggacctatccaatcttcaccccaacctgtacccttgggcattgaatgatctgtacaggagggcagttg

SEQ ID NO: 679326 - DNA, 816 bp, Homo sapiens
tctaccactgcctttgacttaaccctttttatgtctgagcttcaatcatgaggttttcaaaaattatttctagaaagcaagttgggtttcttcaatagacagtggagtgttttgctccagagtactgaaatattctgttgtgatgttggaaactttcaccaattaaggacaaaaaccttctcataggtgtgtatatatatatatatatayacacctatgagtgatatacacacacacacacacacacacacacacacacacagagagagagtttgtgtcttttacaggaatcattttaggagttcatgtagacttattttattgaggctgttgagcaaaaattttttttctacttctccttgtgaattttatttgggtattatttgaatagtctcagaagtagcagatctttattttttaggataatttatttggaatcagcccaaagttatttggaatcatgctgttaaggtggacactgaagttgtggattttaaaaaagaaagcccagttgtagctatcaaacactagggtataggtgtgacacattgattgtcatagaaggaaaggatataaggagtagttgaaaatatgcaggaccaatgacagtaatgttggaataaacatatgacccttcaaggcaactattgtgaaaggtaatcctctcttaaaattttaaatctataaattccagtgatttttcttcaaagttttaaagtctcaccttacatagactcaaagactgatgtgcaacagcaggacaagaagaacctgaatacttaggatctagttaatcctaaagacctgaagcaacat

SEQ ID NO: 679327 - DNA, 816 bp, Homo sapiens
tctaccactgcctttgacttaaccctttttatgtctgagcttcaatcatgaggttttcaaaaattatttctagaaagcaagttgggtttcttcaatagacagtggagtgttttgctccagagtactgaaatattctgttgtgatgttggaaactttcaccaattaaggacaaaaaccttctcataggtgtgtatatatatatatatatacacacctatgagtgatatacacacacacacacacacacacacacacacacacasagagagagtttgtgtcttttacaggaatcattttaggagttcatgtagacttattttattgaggctgttgagcaaaaattttttttctacttctccttgtgaattttatttgggtattatttgaatagtctcagaagtagcagatctttattttttaggataatttatttggaatcagcccaaagttatttggaatcatgctgttaaggtggacactgaagttgtggattttaaaaaagaaagcccagttgtagctatcaaacactagggtataggtgtgacacattgattgtcatagaaggaaaggatataaggagtagttgaaaatatgcaggaccaatgacagtaatgttggaataaacatatgacccttcaaggcaactattgtgaaaggtaatcctctcttaaaattttaaatctataaattccagtgatttttcttcaaagttttaaagtctcaccttacatagactcaaagactgatgtgcaacagcaggacaagaagaacctgaatacttaggatctagttaatcctaaagacctgaagcaacat

SEQ ID NO: 679328 - DNA, 816 bp, Homo sapiens
tctaccactgcctttgacttaaccctttttatgtctgagcttcaatcatgaggttttcaaaaattatttctagaaagcaagttgggtttcttcaatagacagtggagtgttttgctccagagtactgaaatattctgttgtgatgttggaaactttcaccaattaaggacaaaaaccttctcataggtgtgtatatatatatatatatacacacctatgagtgatatacacacacacacacacacacacacacacacacacagagagagagtttgtgtcttttacaggaatcattttaggagttcatgtagacttattttattgaggctgttgagcaaaaattttttttctacttctccttgtgaattttatttgggtattatttgaatagtctcagaagtagcagatctttattttttaggataatttatttggaatcagcccaaagttatttggaatcatgctgttaaggtggacactgaagttgtggattttaaaaaagaaagcccagttgtagctatcaaacactagggtataggtgtgacacattgattgtcatagaaggaaaggatataaggagtagttgaaaatatgcaggaccaatgayagtaatgttggaataaacatatgacccttcaaggcaactattgtgaaaggtaatcctctcttaaaattttaaatctataaattccagtgatttttcttcaaagttttaaagtctcaccttacatagactcaaagactgatgtgcaacagcaggacaagaagaacctgaatacttaggatctagttaatcctaaagacctgaagcaacat

SEQ ID NO: 679329 - DNA, 1779 bp, Homo sapiens
tagttctatttctctagagaactctgggtaatacagctttgatacaaaaaacaacattgttgtattcacaaaaatgtatcctaagataagccaacacataaaagtgcataaagtatgattctatttctaggaattataaaaaatgaaaatgaatctaaagtaacaaaaaaagatcagtagttgcctaaggacagattggaaaattatatttttccaaatgctacaaatgatactctcacctactatgagcattgctctctcctcaggaatttcacccaagaaccgactctatagtcggagacatgcaaacaggttcctgttcatgtacgaactcttcctaacactttcttttcatgtacttccttgacttatttgttgatgaaggttgataccataaaaataactaaaccaggctcacattagagaaaaagaagagagtgatggaaagattaagccggagcatccagtttcagtgattctttgaccctgccctccctgaagtctagaggcagagggatgagccctgctgagcagttcacacttgtccacagggagaaagaggtgtaaatgtgccccccatccatgctcataaaatggcccatggacagcttatcccytgtccatgaaggggatgccacctgatgtcggtgcccttcctcagtgtccacaccttagggtctctgctaatctggggttctcttcttattctcagaggtagggtccctgtggatcaagcctagctgtggctgcttctcagcctgttccctctgtgtttgtaagagtcctacaagaagttcactggtggaatctggaagagaaatgatacagcctaactgttctcagagccttttttacaaagcctctgaatttaccttcattgactctagcatgagctcagcccagcaggcttcaggacaggggttggtgtgggaggcaaaagcgagggattcaagtggaatttgttagtggtaccctccatcaatacaaagaaaaatcataatcctcagggacacccttgtcagcacagtctccctcaaaatgaccaacctgagagccgaggagaaggccatgtattactgtgagagacacaggagatatccgtgtggcaacctaacacaggggacacctgtatttgtgtctgagcccagacacaaacctccctgcagggagacaggaggggaccgtgtgacagacactgctcagaaccaccaaggggagctcagaaccagcaggaggcagtggggacacaaaggaagactcaggagccaccagggggcgctcagaaccacctgggggtggtgaggacaccagggggcgctgaggacacaaggggaggatcaggacaccagggtcggctcaggacgcgaggaggtgctcaggacaccagggtctgctcagaaccaccagggggcactcaggaaccaccaggagaggctcagccaccaccagggggcactcaggacatcaggagctgctcagaatcaccagacggcggctgggcgcggtggctcacgtctgtaatcccagcactttgggaggccgaggcgggcggatcacgaggtcaggagatcgagaccatcccggctaaaacggtgaaaccccgtctctactaaaaatacaaaaaattagccaggcgtagtggcgggcgcctgtagtcccagctacttgggaggctgaggcaggagaatggcgtgaacccgggtggcggagcttgcagtgagccgagatcccgccactgcactccagcctggggtgacagagcgagactccgtctcaaaa

SEQ ID NO: 679330 - DNA, 608 bp, Homo sapiens
taacgttgatacaaacattccatgaaggtgctactgtgaacaagttttcaaattggatgaatacatgatttggagcaaggttatttgatcatgtggtgagactaagaatgattcttaaaaagtgccaaaagtttccttcaaatgtttctgtcactccttatcataaagtttattttacagcagttttaggattacaaagaaattgcacaggaggcgtgagaattcccaygactccctgccctacacaggcacagcctcctccactacgaccatcctgcaccgcagtcacaaatcagttacaatggaggaatctccaaggacgcttggttctttctttttctggtgatctcctaatataacaagcctaagtatctcaagattccacggttttttcagtgttttctagaactgatattagtcagagggaaagtgggtaaggctattactatttgaactctttcttccaaaatccacaaaatatatattaatttagagcttatcttacttctggtttacaatgctccttcccagagagtaagatttttaagcttttagaggccagttcatgtctctaaaagaccagaaagttctggggaatcccataatga

SEQ ID NO: 679331 - DNA, 595 bp, Homo sapiens
ttattatctgtaaactaaaactctcaaaatttattacaagcaaacaaatggaaacttagacaaagaaggagtgatagaaagatagaaaaaatgtatattaaatttcagaaatacctaagaacttatctgcctgaaccctagttctcaccatatttttaggtgaatgctagaatgcagcaaaatcacacgtgttctcactacagaaagtgggttccacaaccacactaggcacgcccagctctgtcctggagttggctcagggagtaattggggccagtgatgaggagcacaggctcaggtactggggcttactcatccagacgtgagctcttagacacatacttagccctttctccatgcgtggttkacttccacatctgtacatggagaaacaattgactccgacaaaacataatttgcacaaatatgtaaaaataaaataggatgatgaattcaaaaagtttatcacagcataattttataataagacagcatattttctgagtaccatcgttgtcaccaaattcttgcagggcacagtcattttatctgggtactgccttctcgtcaggcttcccaccccagagcttgctat

SEQ ID NO: 679332 - DNA, 1651 bp, Homo sapiens
gaagacatgtatccaaacctaacaaggtggtcaaggtggtaaggacagtttgaaagaaaattccaaggctgctgacatgcccagataactgcggctgtagttatgcctgctaaggtttgggcgcatgaggcttggcttttgtcagctccctgggatttattttcccaaacaaagaaacctccaggttaggggcaccctattcattcccatcacctggcatgatttaaaggataattgcttagaattaaaatattgatacagatttttttatattccccatcgctttttgtttcttctgggctgtagccagagatcattgattggcgctcaggaataagcagtcagtctaaaatgcaggcaaatacttaaacaactgaagagattagaatttaaagatgatcgtatgatatgttttgaaatacaatttttctctttccagttctggtttttgtcagaatcaagtaattgtaagactgagttgtttgcaaaataaactttagtcttaaacttggcctgattatttgcataaagtgcagcaagaatattaataataattctgtaggaaaagcctgcaagcaccaggagtttcacagtctaacactatgagcacgtgcatcctcacgcaactcgctgaatatttccaagccagcctgttcctatcttaaatgccatccagttgtatctgccccaggtacactaatatatgggtcctgcttctctgcagcctcctctctcctcagatttcaggttttgtttattgtttgttttctctctgatataaactcaaatatgttgaaggtttttttgtgtgtggttgttcaggtttgttgttaatgagatcagaataagataatactttactctttttatttatttatttatttattttttgagtcggagtctcgctctgtcacccagactggagtgcagtggccctatctcagctcactgcaagctccgcctcccgggttcacgccattctcctgcctcagcctccagagtagctgggactacaggcgcccgccaccatgcccggctaattttttgtagttttagtagagacggggtttcaccgtgttagccaggatggtctcgatctcctgaccttgtgatccgcccgcctcggcctcccaaagtgctgggattacaggcgtgagccyccgcgcccggcccatactttgctccgttttatattcccatgctttagtagctgcttttctctatcaaatccattaactgagagaacaaatcacatttagttacaggtgaacaattaaatagtttggcatatatttatgtactggaacataacgcagcttgaaatcaaggcatgcctcactcatataaacaacatggctaaattctcaagtaattctgtttagtgaaagaaactaaggagttaagagtaaattttatatgatacatttgtaggaattttagaagatgccattattgtaaattaacacggagaagatttgagtttgtctgacaatacgctgttgggagtaatgtggatgtgagttgaatttcagagaaataaaagaaagatttagggattaatttaattattcaaaacttgattgaagtgctgagcaaatggctgcaaacataggtcaacatttttcaaatccttcactataaatttgaatta

SEQ ID NO: 679333 - DNA, 1132 bp, Homo sapiens
tgcctgtttccatattatatttgctcacaggtattggtacatattttagctaatttktcattattttactctaagaaataactcaaaaaatcatttttattatgaattgaaaggtaacatcggcaaaattagcccaatcttaatctttcccagactttgaaacattattgaagacaatgaaggggaaagtcagctttagttgagcttctaagaggtaagtgaggtaaaaacccagggcttattggctacgactttgaatgttactgtcttcttttccataagccacatccagaccattttctaaatctaagaaaactaattttatctcactgcttcttagtcttgtttcctgcagctgacaaccaaaactgtcagcgatagagcccagtgtaaatcaccagcctttaattattgcagaactatgattttacaacaacattgtgagttacataatgatcctactttatggccgcggtgcaaatgcttaacttccactaaatcacagagctcagaatggctagcatggaggtgtatatgtatatgtgcattgttctagaaatttccaattactgtatattattgtttgcagtaattaggtcaatctgaactgacaaaagtctccatggccttataagcacagagaccacctccacggcaggtggaaatcaaggctgggaacaggctaccagctgctcccctgggattcctccaattaccctgtttaaagcctctgctcactcatgcgctggaagagggatgtcagagatgcagcctactcttcctaaagggctgacagggcataaagacaagactgattatccatggaacattcctataggaatgcacctatgtgcaggcacactaataagctgtgtgtcttgcagtgtgtaaatggctgagatgccatttacacttctttacacaatacatttttaaatgtttgggtgatgtattctctatcattcaaaaaaatcatcactttccccctaaacaaagaggatttttatcagaacacttatgggaagccccttgctctcccagattcccaccctcatttctcctgaaggaagaaagaaaaccatctctattgatttccactctcatcctctaggactaaaaccagaaagctgca

SEQ ID NO: 679334 - DNA, 1132 bp, Homo sapiens
tgcctgtttccatattatatttgctcacaggtattggtacatattttagctaatttgtcattattttactctaagaaataactcaaaaaatcatttttattatgaattgaaaggtaacatcrgcaaaattagcccaatcttaatctttcccagactttgaaacattattgaagacaatgaaggggaaagtcagctttagttgagcttctaagaggtaagtgaggtaaaaacccagggcttattggctacgactttgaatgttactgtcttcttttccataagccacatccagaccattttctaaatctaagaaaactaattttatctcactgcttcttagtcttgtttcctgcagctgacaaccaaaactgtcagcgatagagcccagtgtaaatcaccagcctttaattattgcagaactatgattttacaacaacattgtgagttacataatgatcctactttatggccgcggtgcaaatgcttaacttccactaaatcacagagctcagaatggctagcatggaggtgtatatgtatatgtgcattgttctagaaatttccaattactgtatattattgtttgcagtaattaggtcaatctgaactgacaaaagtctccatggccttataagcacagagaccacctccacggcaggtggaaatcaaggctgggaacaggctaccagctgctcccctgggattcctccaattaccctgtttaaagcctctgctcactcatgcgctggaagagggatgtcagagatgcagcctactcttcctaaagggctgacagggcataaagacaagactgattatccatggaacattcctataggaatgcacctatgtgcaggcacactaataagctgtgtgtcttgcagtgtgtaaatggctgagatgccatttacacttctttacacaatacatttttaaatgtttgggtgatgtattctctatcattcaaaaaaatcatcactttccccctaaacaaagaggatttttatcagaacacttatgggaagccccttgctctcccagattcccaccctcatttctcctgaaggaagaaagaaaaccatctctattgatttccactctcatcctctaggactaaaaccagaaagctgca

SEQ ID NO: 679335 - DNA, 1132 bp, Homo sapiens
tgcctgtttccatattatatttgctcacaggtattggtacatattttagctaatttgtcattattttactctaagaaataactcaaaaaatcatttttattatgaattgaaaggtaacatcggcaaaattagcccaatcttaatctttcccagactttgaaacattattgaagacaatgaaggggaaagtcagctttagttgagcttctaagaggtaagtgaggtaaaaacccagggcttattggctacgactttgaatgttactgtcttcttttccataagccacatccagaccattttctaaatctaagaaaactaattttatctcactgcttcttagtcttgtttcctgcagctgacaaccaaaactgtcagcgatagagcccagtgtaaatcaccagcctttaattattgcagaactatgattttacaacaacattgtgagttacataatgatcctactttatggccgcggtgcaaatgcttaacttccactaaatcacagagctcagaatggctagcatggaggtgtatatgtatatgtgcattgttctagaaatttccaattactgtayattattgtttgcagtaattaggtcaatctgaactgacaaaagtctccatggccttataagcacagagaccacctccacggcaggtggaaatcaaggctgggaacaggctaccagctgctcccctgggattcctccaattaccctgtttaaagcctctgctcactcatgcgctggaagagggatgtcagagatgcagcctactcttcctaaagggctgacagggcataaagacaagactgattatccatggaacattcctataggaatgcacctatgtgcaggcacactaataagctgtgtgtcttgcagtgtgtaaatggctgagatgccatttacacttctttacacaatacatttttaaatgtttgggtgatgtattctctatcattcaaaaaaatcatcactttccccctaaacaaagaggatttttatcagaacacttatgggaagccccttgctctcccagattcccaccctcatttctcctgaaggaagaaagaaaaccatctctattgatttccactctcatcctctaggactaaaaccagaaagctgca

SEQ ID NO: 679336 - DNA, 658 bp, Homo sapiens
gatgggatttaaatttgtttccaaaataaacatcataaacccaaactattataagtatctttgtacaagttcttctgtttatattcacacattttattgataaaatatgtagatatataggtatgcattataacttttcagctttatggagctatcactgacaaataaaattgtatatatttagggtacaccacttgatgtattgatgtacctggggagatgctcatcatgatcaaggtaatcggcatgcctgtcctctcagagagttatcattttatgtctttaatttmctgtgtgtgtgtgataaaaacacctaatatctactcttctggcaaaagatacctttataatacaatatttattagtatagtcacattgctttacgtttcatctccagaactatttcaacctgtgttttagtccattctcaccctaatgtaaggaactacctgagactgggaaatttacgaagaaaagtggtttagttgactcgcggttctgcaggcttaacaggaagcattattgggaggcatcaggaaacttacagacatcatggaaagtgaaggggaagcaaggaccttcttcacatgctggcaggggagagagagagaaagagcaaggcgagatgagccacacttttaaaccatgagaccttgtg

SEQ ID NO: 679337 - DNA, 658 bp, Homo sapiens
gatgggatttaaatttgtttccaaaataaacatcataaacccaaactattataagtatctttgtacaagttcttctgtttatattcacacattttattgataaaatatgtagatatataggtatgcattataacttttcagctttatggagctatcactgacaaataaaattgtatatatttagggtacaccacttgatgtattgatgtacctggggagatgctcatcatgatcaaggtaatcggcatgcctgtcctctcagagagttatcattttatgtctttaatttcctgtgtgtgtgtgataaaaacacctaatatctactcttctggcaaaagatacctttataatacaatattyattagtatagtcacattgctttacgtttcatctccagaactatttcaacctgtgttttagtccattctcaccctaatgtaaggaactacctgagactgggaaatttacgaagaaaagtggtttagttgactcgcggttctgcaggcttaacaggaagcattattgggaggcatcaggaaacttacagacatcatggaaagtgaaggggaagcaaggaccttcttcacatgctggcaggggagagagagagaaagagcaaggcgagatgagccacacttttaaaccatgagaccttgtg

SEQ ID NO: 679338 - DNA, 598 bp, Homo sapiens
atattttcttaaataaatatttcttcacttgctttatgctgttagatcctttccaaaccctgtaattttttcaaaataattttcactggtctcatgagggcatggattcattgagcccctcatgctgttaaagagaaatagaactgtttttttttttcactttttagcgaacatccatgggttataaaataattagttgacatttcttccaacactttacagataccatcaactttcctcttgcttgtgaggttttaaccagaagaatgctatcatcatcttttctgttcttttggaaggaatgccccctctactcacctccacttgcctgcatatatttctatttgtctttgcttttcagcagttttaataagatttacctaaatgtgtgtgggggaagcagggggtgttattctgttgttctgtgttctcygagatgcatggattcaccatttactctgcctccattttggggaacacagttagaaaaaatgtcagtgtgagcccagaaacaagcctccctgaagggggaacaggaccacccgggggcgctcaggacccactgagcacaagagccagcctcagggcaggtgcagac

SEQ ID NO: 679339 - DNA, 451 bp, Homo sapiens
atacatgtatcataactaaacaacatatgtcataaatatatgcaaaaattatttgtaatttataataaaataagtttcatatttaaataattacattaagaaaatgaacagaaactttcagatttcaagaatattttatatatatatatatatatcttaaaacaaacttgcaacagaatatagaaataagttttacgactcaatggaaaagaacagaattcaataaaaactggcyaaaagaaacaacagctgcatcattatagaaaattctggaataatcagccatataaagattctcactctcttagaactagaattccgtaggacttgtaattcctcctgacctgggtgggaggcaaaaggaagaacagctaatggtgattcagtgagttttatacctgtgtgtacttctgtgctcactcagcagaaagaaaagaagaaaagaaagaaa

SEQ ID NO: 679340 - DNA, 451 bp, Homo sapiens
atacatgtatcataactaaacaacatatgtcataaatatatgcaaaaattatttgtaatttataataaaataagtttcatatttaaataattacattaagaaaatgaacagaaactttcagatttcaagaatattttatatatatatatatatatcttaaaacaaacttgcaacagaatatagaaataagttttacgactcaatggaaaagaacagaattcaataaaaactggctaaaagaaacaacagctgcatcattatagaaaattctggaataatcagccatataaagattctcactctcttagaactagaattccgtaggacttgtaattcctcctgacctgggtgggaggcaaaaggaagaacagctaatggtgattcagtgagttttatacctgtgtgtacttctgtgctcactcagcagaaagaaaagaagaaaaraaagaaa

SEQ ID NO: 679341 - DNA, 633 bp, Homo sapiens
acatgtgattgcttttaaacgcaggaattgaatttttaaaacatgttaaagtaatctagaataattaagaatagccaaaaaaaaatttagaacagaaaaacattaagactacaattcaacaacgaaaataccaaaaaacccaatttaaaaactggacaaaggactcraatagacatttctcctaagaagacaacaaatagcccagaggcacatgcaaagatgctcaacatcactagtcactagggaaatgcaaatcacaatcgcgcgagataccactttgtacctaatgggatgctatcatcaaaaaaaaaaaaaaaaaaagcaaaaacaaaaaattaacaagtgttggcaaggacacggagaaactggaacccttgtgcaaggctagcgggaatgtaacatggtgtagccactgtggaaatggtatggtggttcctccaaaaattaaacctgaagttaccatataatccaacaactgcatgtctaggtacagatccaaaagatgtgaaagcaggccgggggtggtggctcgtgcctgtaatcccagcactttgggaggccaaggcaggggatcaccggaggccaggccaggagtttgagaccagtctggcgaatatggtgaaaccccatctc

SEQ ID NO: 679342 - DNA, 1061 bp, Homo sapiens
tgcaacaaatgtaataatatcttgctataatacatataagcccattatctgataactcattttaacaaacctacatataaacatctatgtgttatataactttataaacaaaaatgttcaaattctttcactatctagaatttactgtaacaaatatagacacagttcattctcctgatatcatttgtatatgtcctaccgaaacttacttaaaaattcatttattgataactcctttatcatttcctgagtcctgagtaacatttgcctctctttctagaatttctatgctaatcaaygctatttttaacacaatttcagagctttaaaactgttggtttataattatttacaaaatctgagaggtgagtcttttatattaatcttttggagaaaatattcttcaagattcttgctttttgcttataaatccgtaacaaaaatatcacagaatacatgtaattgtactaacaatgtttacttttgaagggaaggtaataggaatcagacagctaaaaagtatcctgaagcattttttatactttttaaccatggggtaaatatattacctattcaaaagttaaatataagaagtaaataaaatcacttttaacagacagttaaagtgaaattcgaggacatacattttttatataatacttagctatgaaggaaatagtctatgcagaatttttccttggggaaactacacaggaatctaaacattacgcagggtttgtaagtgattactcaggatagctttatgattaaggaggaaagaacacattgatgtattcgtctaagagtacgtgtcttcaaattttaaaatgagagcaaatgagccaacagactgccctctccgtggcgctggaaactcgtgctgtgcagtcaccatcttccgctccatatactgtgctccctaaggatgaagtgtgaccgcatggcagccgatgacccagtttccacatgcttcccactctcagcactcctggctcagctgaagatcagagatgatgcaaaaatctccaatgacgctcaaaaccccaaggctcatcaatacg

SEQ ID NO: 679343 - DNA, 1061 bp, Homo sapiens
tgcaacaaatgtaataatatcttgctataatacatataagcccattatctgataactcattttaacaaacctacatataaacatctatgtgttatataactttataaacaaaaatgttcaaattctttcactatctagaatttactgtaacaaatatagacacagttcattctcctgatatcatttgtatatgtcctaccgaaacttacttaaaaattcatttattgataactcctttatcatttcctgagtcctgagtaacatttgcctctctttctagaatttctatgctaatcaatgctatttttaacacaatttcagagctttaaaactgttggtttakaattatttacaaaatctgagaggtgagtcttttatattaatcttttggagaaaatattcttcaagattcttgctttttgcttataaatccgtaacaaaaatatcacagaatacatgtaattgtactaacaatgtttacttttgaagggaaggtaataggaatcagacagctaaaaagtatcctgaagcattttttatactttttaaccatggggtaaatatattacctattcaaaagttaaatataagaagtaaataaaatcacttttaacagacagttaaagtgaaattcgaggacatacattttttatataatacttagctatgaaggaaatagtctatgcagaatttttccttggggaaactacacaggaatctaaacattacgcagggtttgtaagtgattactcaggatagctttatgattaaggaggaaagaacacattgatgtattcgtctaagagtacgtgtcttcaaattttaaaatgagagcaaatgagccaacagactgccctctccgtggcgctggaaactcgtgctgtgcagtcaccatcttccgctccatatactgtgctccctaaggatgaagtgtgaccgcatggcagccgatgacccagtttccacatgcttcccactctcagcactcctggctcagctgaagatcagagatgatgcaaaaatctccaatgacgctcaaaaccccaaggctcatcaatacg

SEQ ID NO: 679344 - DNA, 1061 bp, Homo sapiens
tgcaacaaatgtaataatatcttgctataatacatataagcccattatctgataactcattttaacaaacctacatataaacatctatgtgttatataactttataaacaaaaatgttcaaattctttcactatctagaatttactgtaacaaatatagacacagttcattctcctgatatcatttgtatatgtcctaccgaaacttacttaaaaattcatttattgataactcctttatcatttcctgagtcctgagtaacatttgcctctctttctagaatttctatgctaatcaatgctatttttaacacaatttcagagctttaaaactgttggtttataattatttacaaaatctgagaggtgagtcttttatattaatmttttggagaaaatattcttcaagattcttgctttttgcttataaatccgtaacaaaaatatcacagaatacatgtaattgtactaacaatgtttacttttgaagggaaggtaataggaatcagacagctaaaaagtatcctgaagcattttttatactttttaaccatggggtaaatatattacctattcaaaagttaaatataagaagtaaataaaatcacttttaacagacagttaaagtgaaattcgaggacatacattttttatataatacttagctatgaaggaaatagtctatgcagaatttttccttggggaaactacacaggaatctaaacattacgcagggtttgtaagtgattactcaggatagctttatgattaaggaggaaagaacacattgatgtattcgtctaagagtacgtgtcttcaaattttaaaatgagagcaaatgagccaacagactgccctctccgtggcgctggaaactcgtgctgtgcagtcaccatcttccgctccatatactgtgctccctaaggatgaagtgtgaccgcatggcagccgatgacccagtttccacatgcttcccactctcagcactcctggctcagctgaagatcagagatgatgcaaaaatctccaatgacgctcaaaaccccaaggctcatcaatacg

SEQ ID NO: 679345 - DNA, 1999 bp, Homo sapiens
tgcaagctaatgacctagcctgccacagcttcctggatgctggcagactcctgggccaaaggcaaaggactgtattactctgggaatgccatttgccccccaccccaagtcccccaaggaggtgatgtatgacaacccaatttatgatgtatcatctgtatcacagctgaggaaccccaagctcaggaaacccctcgagttataagatgggctgcttctccaatcaactcatccaacctttgccctacaggtagatgatgatctttattaccgtagtcaggaaacaaatctgtcctctgcctagacaagcatccttgaagatgtccagaactgccacagagaattgcccaacgcacaccagtctagcatcccctgtgccacctggctgggaaacccactttatcaacataagagggacacagtgccctagggaaaaagagaggactgattttcatgtgagctgagcaacctccccaagttgtgaaggttgaggagcccagccacacttccccaggcttgtagacggggccagcatgcagctcggtgaggtctggagcctgctggtcacatctgtcatatgtgaggctaagctggcaagtattttgtaaattgtcaccaataaacaaaaactatgcttcactttgtgagactaacttcaataatgactatgtgaggttttatagtgactttttataaatttctgaactattcatatttttcacgtactcctgggtcacagccacagaaagactgaggagctcttaacgcattccccacaagctgagcacgattcagactcagggtagtcaaaaacaggtgacctgtcagctcctaacaccaaagggtttctgatccctatgggaacattaataattgacacagaacaagtagaaggcagtgacacagtggtgtccaggctcagctgggtggcctggtccatggcagcagaagtgtgggtctcataggacagagctgtttctcaatcctacttgtaaagtcaagaattcgggtgtcataagagcgcaggagttggacagacctggctaaaaccctggctctaagcccttctgttaatgcaactttcagcaagttacttccatggctggcaagtgtgattacaagtgataccggggtttgctgaggaggtaatctaggtcaagcaccttrtcaatcacaaggcctggtacataaatggataagcaagagctctaattaagatgagtgactgaggagctcgatgtgtgaaggaatacaggtaggattcagccttccattcacaatcaaactcccgaaaacttggcagggaaattagatggagcccatggtttggatccaacctggactttatttttttatagtatttctaaaaatagagtctcattaatgtccaatggctactaagttttgtcctctcaaaattaaaatagcacttgccattatccagtaggaactacagtcagcattttggttaatatcctcccagtcatcttttgatattctagatgtgtatctagttatgcataagtacatatataaagtgttatataaacaggctcatcctgtatatcctattttaaaactgctttaccactaaacaattacttcctaaaatcttaatacctgttatttcttgtaaactttgatttactccggagaaatcggtctgaaacaattagcatctcacctctttactatcaggcatatcaaaggttattacattaacaaaaaaatacatcaagttgacctgacttcatttatgtaagaggtagaaaatctgagtaaagtttttttttcattaattaaatcctattttaatgtaaatcctcttataattcctcgtttcactaaagtaatcttggaatcactaaagttttgtggaagcaccacctatctgggggaaaaactgcctttaaacacctgcaaattgggttgatagtatctggttaagaggtggtatcagtcatgtaagagtaagattgtgaccgtttagtcatattta

SEQ ID NO: 679346 - DNA, 1999 bp, Homo sapiens
tgcaagctaatgacctagcctgccacagcttcctggatgctggcagactcctgggccaaaggcaaaggactgtattactctgggaatgccatttgccccccaccccaagtcccccaaggaggtgatgtatgacaacccaatttatgatgtatcatctgtatcacagctgaggaaccccaagctcaggaaacccctcgagttataagatgggctgcttctccaatcaactcatccaacctttgccctacaggtagatgatgatctttattaccgtagtcaggaaacaaatctgtcctctgcctagacaagcatccttgaagatgtccagaactgccacagagaattgcccaacgcacaccagtctagcatcccctgtgccacctggctgggaaacccactttatcaacataagagggacacagtgccctagggaaaaagagaggactgattttcatgtgagctgagcaacctccccaagttgtgaaggttgaggagcccagccacacttccccaggcttgtagacggggccagcatgcagctcggtgaggtctggagcctgctggtcacatctgtcatatgtgaggctaagctggcaagtattttgtaaattgtcaccaataaacaaaaactatgcttcactttgtgagactaacttcaataatgactatgtgaggttttatagtgactttttataaatttctgaactattcatatttttcacgtactcctgggtcacagccacagaaagactgaggagctcttaacgcattccccacaagctgagcacgattcagactcagggtagtcaaaaacaggtgacctgtcagctcctaacaccaaagggtttctgatccctatgggaacattaataattgacacagaacaagtagaaggcagtgacacagtggtgtccaggctcagctgggtggcctggtccatggcagcagaagtgtgggtctcataggacagagctgtttctcaatcctacttgtaaagtcaagaattcgggtgtcataagagcgcaggagttggacagacctggctaaaaccctggctctaagcccttctgttaatgcaactttcagcaagttacttccatggctggcaagtgtgattacaagtgataccggggtttgctgaggaggtaatctaggtcaagcaccttgtcaatcacaaggcctggtacataaatggataagcaagagctctaattaagatgagtgactgaggagctcgatgtgtgaaggaatacaggtaggattcagccttccattcacaatcaaactcccgaaaacttggcagggaaattagatggagcccatggtttggatccaacctggactttatttttttatagtatttctaaaaatagagtctcattaatgtccaatggctactaagttttgtcctctcaaaattaaaatagcacttgccattatccagtaggaactacagtcagcattttggttaatatcctcccagtcatcttttgatattctagatgtgtatctagttatgcataagtacatatataaagtgttatataaacaggctcatcctgtatatcctattttaaaactgctttaccactaaacaattacttcctaaaatcttaatacctgttatttcttgtaaactttgatttactccggagaaatcggtctgaaacaattagcatctcacctctttactatcaggcatatcaaaggttattacattaacaaaaaaatacatcaagttgacctgacttcatttatgtaagaggtagaaaatctgagtaaagtttttttttcattaattaaatcctattttaatgtaaatcctcttataattcctcgtttcactaaagtaatcttggaatcactaaagttttgtggaagcaccacctatctgggggaaaaactgcctttaaacacctgcaaattgggttgatagtatctggttaagaggtggtatcagtcatgtaagagtaagattgtgaccrtttagtcatattta

SEQ ID NO: 679347 - DNA, 666 bp, Homo sapiens
tgagatatttctgtttacaaatgccaacaggcccaactgaagaaggacatgtttgcttccccttctgccgtgattgtaagtttcctgaggccactctagtcatgctgaactgtgagtccactaaacctctttcctttataaattacccaggcttgggcaaaatggcagactttacctagcctgagagacaggagtaaatagttaaaaagaggtaatttaggtagatatgcataagagaaaattcatggcaataaaaacaatataaatatgtatcttttatagggggagagagttttggggtgactgcaggtaggaaaatgttgtttcaagataagaatggagcagtgagggccaggtgtggtggctcatgcctgtaatccctttggggtgggaggccgaggcgggtggatcacctgaggtcacragttcaagaccagcctggccaacatggtgaaaccccgtctctactaaaaatacaaaaattagccaggcatagtggcgggcccctgtaatcctggctactctggaggctgaggcaggagaatcgctccacttcaacctgggaggcggaggttacagtgagctgagaatgcaccagctccagcctggtcaacaagagcagaactctgtctcaaaccctccccctcaaaacacaaaaaaacaaaa

SEQ ID NO: 679348 - DNA, 2515 bp, Homo sapiens
gaaaacctcttacatttaattcctaatagctaaggtatttctgcacaaacaaaacaaaaaaacctccaaaagaaaacaaaacaaaacaaaaaaaaccacacctgattggtctgttacacaattctgcagacaaaaggacaaaccagactgcagagtttatttagaaacattgtggaacattctgagctagaaacgcaacaaggagtatttcctttagggactgaaacagtattaacttatagcctgcaattagacccagtagctaagccataacctaattacttaaaagtaagtagcagtggttgccaaactggtagcgatcttctctgaggtagtttagggaaaaatttttcttgcatgttccacatgctatggaaagcctcttgaattccattctaactcactgtctttcagcaaacagactaacatcttatgaaattcttcttttgtcttctaagcatcatttaaaacactgaaatatacttaatcctcctgctctactacctctaaggacaacagtgaaaactgcccttgtgtgagtgtagcgtcacaagtaacaaccacttgtgttgatttataagattctccattagctaatcgggagttaatgctttgtgttaatgggtcttaagccaaacactagaagaagagaatagccaggcagtgtatgctgttacaatagaaacttttaagctccacatgttttataagactgttgacatttaactgcttctacctcccgacatgccactttcctcaactttagcttttcaaactgacttctgatcacactgcttcatcaaaacgcctgctgggaaagtcaccagtgaccttctgatcactagctgggttgattctttctccatccctgtccaccatataatttgtccttgcagccaggcttgtcayttattctccctcatgcaatccatgtaccagtcaaaactaatacatgctatttcccctggcctgtgcccatgctgtttctctgtgcagatcaccctttactctggtggttcaaattctaccaataccttggctcagctcagtggtaaactaggactcttaacactcagccttttattatcattattcggataaacatcttaattctgttataaaattaactccttgaagattatagcttattaatctctacatctttcctggttgtattaaatacactgctgtgcacataattactgtttaatacatatgtgagaaattgacttcaatttaattgaatttctagacggagcaaattatacccccaaagaacttgagtggatgcttcaaggtcacctgccagggagactttctaaaacgagctgttgtatctgaaaagtgcctctgagcagtgcccctgtagaagaacaaaagcatgtgaggctagacgcacacattttatcatcctcagtccgttctcatggggagcccaggacctctcttcaggggcgagtcttccatggtgttttattgtcaggcagagaacagtgctactgctgctgtagatttctctgactgggctctcctggctgtgacctgttagagcacacgtgcacacagagatgcacacacacacacacacacacacacacacacacaatgatcatgtgcacagcacaggatatgagcagaaatacatcacatttctttgatccttattgcagtcaaggcacatgggtgcagctgcaacttgaactttagaatcagggtgtctcgttcctcgaatgagttcatactatctagcattttcattcttgccatctgtcttctacaataggtccctctttttttccacctcatggaatgaatgttcttttatcatcctgtttattaaaaaacctccaacatatcactacacagaggaaaagcaaggctgttgtggatactcatgtgcttatgctgtgcacctacattcagccccagagccacataaagggctttctaataactgggatggcaattgcagatggccaacattataacactgaggcacagaaaatagtctcacctcttcccagtacttaggagcccagcgtggatagtggagagtgcacattccacatcttggttctgacactttcttgttgtatagtcttgtttcttcaccaatagaatgggtataagattatgtacctcatagatttgttgtgattatttaaacatatagcttcctaatccaatgcctggtccctaatgggtggttccttttaacaagcaaatattctcgactaccccataacatcagagaatagccttgaaacaatgttattgacattttaaaaatcaaacaatatgcaccccatattatagttatagtttcattgcaattacttaaaggagtgaatagacagactcaccttcatatccacttttaatctaactgagaatatctcaagacagtctattgagatggataaagtaagaaacagagacagagcttgttgatgtgtgtgtgagtcatcctccttgtgaggttctgtgtgtgatgaatggctcactggcgccctag

SEQ ID NO: 679349 - DNA, 2515 bp, Homo sapiens
gaaaacctcttacatttaattcctaatagctaaggtatttctgcacaaacaaaacaaaaaaacctccaaaagaaaacaaaacaaaacaaaaaaaaccacacctgattggtctgttacacaattctgcagacaaaaggacaaaccagactgcagagtttatttagaaacattgtggaacattctgagctagaaacgcaacaaggagtatttcctttagggactgaaacagtattaacttatagcctgcaattagacccagtagctaagccataacctaattacttaaaagtaagtagcagtggttgccaaactggtagcgatcttctctgaggtagtttagggaaaaatttttcttgcatgttccacatgctatggaaagcctcttgaattccattctaactcactgtctttcagcaaacagactaacatcttatgaaattcttcttttgtcttctaagcatcatttaaaacactgaaatatacttaatcctcctgctctactacctctaaggacaacagtgaaaactgcccttgtgtgagtgtagcgtcacaagtaacaaccacttgtgttgatttataagattctccattagctaatcgggagttaatgctttgtgttaatgggtcttaagccaaacactagaagaagagaatagccaggcagtgtatgctgttacaatagaaacttttaagctccacatgttttataagactgttgacatttaactgcttctacctcccgacatgccactttcctcaactttagcttttcaaactgacttctgatcacactgcttcatcaaaacgcctgctgggaaagtcaccagtgaccttctgatcactagctgggttgattctttctccatccctgtccaccatataatttgtccttgcagccaggcttgtcatttattctccctcatgcaatccatgtaccagtcaaaactaatacatgctatttcccctggcctgtgcccatgctgtttctctgtgcagaycaccctttactctggtggttcaaattctaccaataccttggctcagctcagtggtaaactaggactcttaacactcagccttttattatcattattcggataaacatcttaattctgttataaaattaactccttgaagattatagcttattaatctctacatctttcctggttgtattaaatacactgctgtgcacataattactgtttaatacatatgtgagaaattgacttcaatttaattgaatttctagacggagcaaattatacccccaaagaacttgagtggatgcttcaaggtcacctgccagggagactttctaaaacgagctgttgtatctgaaaagtgcctctgagcagtgcccctgtagaagaacaaaagcatgtgaggctagacgcacacattttatcatcctcagtccgttctcatggggagcccaggacctctcttcaggggcgagtcttccatggtgttttattgtcaggcagagaacagtgctactgctgctgtagatttctctgactgggctctcctggctgtgacctgttagagcacacgtgcacacagagatgcacacacacacacacacacacacacacacacacaatgatcatgtgcacagcacaggatatgagcagaaatacatcacatttctttgatccttattgcagtcaaggcacatgggtgcagctgcaacttgaactttagaatcagggtgtctcgttcctcgaatgagttcatactatctagcattttcattcttgccatctgtcttctacaataggtccctctttttttccacctcatggaatgaatgttcttttatcatcctgtttattaaaaaacctccaacatatcactacacagaggaaaagcaaggctgttgtggatactcatgtgcttatgctgtgcacctacattcagccccagagccacataaagggctttctaataactgggatggcaattgcagatggccaacattataacactgaggcacagaaaatagtctcacctcttcccagtacttaggagcccagcgtggatagtggagagtgcacattccacatcttggttctgacactttcttgttgtatagtcttgtttcttcaccaatagaatgggtataagattatgtacctcatagatttgttgtgattatttaaacatatagcttcctaatccaatgcctggtccctaatgggtggttccttttaacaagcaaatattctcgactaccccataacatcagagaatagccttgaaacaatgttattgacattttaaaaatcaaacaatatgcaccccatattatagttatagtttcattgcaattacttaaaggagtgaatagacagactcaccttcatatccacttttaatctaactgagaatatctcaagacagtctattgagatggataaagtaagaaacagagacagagcttgttgatgtgtgtgtgagtcatcctccttgtgaggttctgtgtgtgatgaatggctcactggcgccctag

SEQ ID NO: 679350 - DNA, 2515 bp, Homo sapiens
gaaaacctcttacatttaattcctaatagctaaggtatttctgcacaaacaaaacaaaaaaacctccaaaagaaaacaaaacaaaacaaaaaaaaccacacctgattggtctgttacacaattctgcagacaaaaggacaaaccagactgcagagtttatttagaaacattgtggaacattctgagctagaaacgcaacaaggagtatttcctttagggactgaaacagtattaacttatagcctgcaattagacccagtagctaagccataacctaattacttaaaagtaagtagcagtggttgccaaactggtagcgatcttctctgaggtagtttagggaaaaatttttcttgcatgttccacatgctatggaaagcctcttgaattccattctaactcactgtctttcagcaaacagactaacatcttatgaaattcttcttttgtcttctaagcatcatttaaaacactgaaatatacttaatcctcctgctctactacctctaaggacaacagtgaaaactgcccttgtgtgagtgtagcgtcacaagtaacaaccacttgtgttgatttataagattctccattagctaatcgggagttaatgctttgtgttaatgggtcttaagccaaacactagaagaagagaatagccaggcagtgtatgctgttacaatagaaacttttaagctccacatgttttataagactgttgacatttaactgcttctacctcccgacatgccactttcctcaactttagcttttcaaactgacttctgatcacactgcttcatcaaaacgcctgctgggaaagtcaccagtgaccttctgatcactagctgggttgattctttctccatccctgtccaccatataatttgtccttgcagccaggcttgtcatttattctccctcatgcaatccatgtaccagtcaaaactaatacatgctatttcccctggcctgtgcccatgctgtttctctgtgcagatcaccctttactctggtggttcaaattctaccaataccttggctcagctcagtggtaaactaggactcttaacactcagccttttattatcattattcggataaacatcttaattctgttataaaattaactccttgaagattatagcttattaatctctacatctttcmtggttgtattaaatacactgctgtgcacataattactgtttaatacatatgtgagaaattgacttcaatttaattgaatttctagacggagcaaattatacccccaaagaacttgagtggatgcttcaaggtcacctgccagggagactttctaaaacgagctgttgtatctgaaaagtgcctctgagcagtgcccctgtagaagaacaaaagcatgtgaggctagacgcacacattttatcatcctcagtccgttctcatggggagcccaggacctctcttcaggggcgagtcttccatggtgttttattgtcaggcagagaacagtgctactgctgctgtagatttctctgactgggctctcctggctgtgacctgttagagcacacgtgcacacagagatgcacacacacacacacacacacacacacacacacaatgatcatgtgcacagcacaggatatgagcagaaatacatcacatttctttgatccttattgcagtcaaggcacatgggtgcagctgcaacttgaactttagaatcagggtgtctcgttcctcgaatgagttcatactatctagcattttcattcttgccatctgtcttctacaataggtccctctttttttccacctcatggaatgaatgttcttttatcatcctgtttattaaaaaacctccaacatatcactacacagaggaaaagcaaggctgttgtggatactcatgtgcttatgctgtgcacctacattcagccccagagccacataaagggctttctaataactgggatggcaattgcagatggccaacattataacactgaggcacagaaaatagtctcacctcttcccagtacttaggagcccagcgtggatagtggagagtgcacattccacatcttggttctgacactttcttgttgtatagtcttgtttcttcaccaatagaatgggtataagattatgtacctcatagatttgttgtgattatttaaacatatagcttcctaatccaatgcctggtccctaatgggtggttccttttaacaagcaaatattctcgactaccccataacatcagagaatagccttgaaacaatgttattgacattttaaaaatcaaacaatatgcaccccatattatagttatagtttcattgcaattacttaaaggagtgaatagacagactcaccttcatatccacttttaatctaactgagaatatctcaagacagtctattgagatggataaagtaagaaacagagacagagcttgttgatgtgtgtgtgagtcatcctccttgtgaggttctgtgtgtgatgaatggctcactggcgccctag

SEQ ID NO: 679351 - DNA, 2515 bp, Homo sapiens
gaaaacctcttacatttaattcctaatagctaaggtatttctgcacaaacaaaacaaaaaaacctccaaaagaaaacaaaacaaaacaaaaaaaaccacacctgattggtctgttacacaattctgcagacaaaaggacaaaccagactgcagagtttatttagaaacattgtggaacattctgagctagaaacgcaacaaggagtatttcctttagggactgaaacagtattaacttatagcctgcaattagacccagtagctaagccataacctaattacttaaaagtaagtagcagtggttgccaaactggtagcgatcttctctgaggtagtttagggaaaaatttttcttgcatgttccacatgctatggaaagcctcttgaattccattctaactcactgtctttcagcaaacagactaacatcttatgaaattcttcttttgtcttctaagcatcatttaaaacactgaaatatacttaatcctcctgctctactacctctaaggacaacagtgaaaactgcccttgtgtgagtgtagcgtcacaagtaacaaccacttgtgttgatttataagattctccattagctaatcgggagttaatgctttgtgttaatgggtcttaagccaaacactagaagaagagaatagccaggcagtgtatgctgttacaatagaaacttttaagctccacatgttttataagactgttgacatttaactgcttctacctcccgacatgccactttcctcaactttagcttttcaaactgacttctgatcacactgcttcatcaaaacgcctgctgggaaagtcaccagtgaccttctgatcactagctgggttgattctttctccatccctgtccaccatataatttgtccttgcagccaggcttgtcatttattctccctcatgcaatccatgtaccagtcaaaactaatacatgctatttcccctggcctgtgcccatgctgtttctctgtgcagatcaccctttactctggtggttcaaattctaccaataccttggctcagctcagtggtaaactaggactcttaacactcagccttttattatcattattcggataaacatcttaattctgttataaaattaactccttgaagattatagcttattaatctctacatctttcctggttgtattwaatacactgctgtgcacataattactgtttaatacatatgtgagaaattgacttcaatttaattgaatttctagacggagcaaattatacccccaaagaacttgagtggatgcttcaaggtcacctgccagggagactttctaaaacgagctgttgtatctgaaaagtgcctctgagcagtgcccctgtagaagaacaaaagcatgtgaggctagacgcacacattttatcatcctcagtccgttctcatggggagcccaggacctctcttcaggggcgagtcttccatggtgttttattgtcaggcagagaacagtgctactgctgctgtagatttctctgactgggctctcctggctgtgacctgttagagcacacgtgcacacagagatgcacacacacacacacacacacacacacacacacaatgatcatgtgcacagcacaggatatgagcagaaatacatcacatttctttgatccttattgcagtcaaggcacatgggtgcagctgcaacttgaactttagaatcagggtgtctcgttcctcgaatgagttcatactatctagcattttcattcttgccatctgtcttctacaataggtccctctttttttccacctcatggaatgaatgttcttttatcatcctgtttattaaaaaacctccaacatatcactacacagaggaaaagcaaggctgttgtggatactcatgtgcttatgctgtgcacctacattcagccccagagccacataaagggctttctaataactgggatggcaattgcagatggccaacattataacactgaggcacagaaaatagtctcacctcttcccagtacttaggagcccagcgtggatagtggagagtgcacattccacatcttggttctgacactttcttgttgtatagtcttgtttcttcaccaatagaatgggtataagattatgtacctcatagatttgttgtgattatttaaacatatagcttcctaatccaatgcctggtccctaatgggtggttccttttaacaagcaaatattctcgactaccccataacatcagagaatagccttgaaacaatgttattgacattttaaaaatcaaacaatatgcaccccatattatagttatagtttcattgcaattacttaaaggagtgaatagacagactcaccttcatatccacttttaatctaactgagaatatctcaagacagtctattgagatggataaagtaagaaacagagacagagcttgttgatgtgtgtgtgagtcatcctccttgtgaggttctgtgtgtgatgaatggctcactggcgccctag

SEQ ID NO: 679352 - DNA, 2515 bp, Homo sapiens
gaaaacctcttacatttaattcctaatagctaaggtatttctgcacaaacaaaacaaaaaaacctccaaaagaaaacaaaacaaaacaaaaaaaaccacacctgattggtctgttacacaattctgcagacaaaaggacaaaccagactgcagagtttatttagaaacattgtggaacattctgagctagaaacgcaacaaggagtatttcctttagggactgaaacagtattaacttatagcctgcaattagacccagtagctaagccataacctaattacttaaaagtaagtagcagtggttgccaaactggtagcgatcttctctgaggtagtttagggaaaaatttttcttgcatgttccacatgctatggaaagcctcttgaattccattctaactcactgtctttcagcaaacagactaacatcttatgaaattcttcttttgtcttctaagcatcatttaaaacactgaaatatacttaatcctcctgctctactacctctaaggacaacagtgaaaactgcccttgtgtgagtgtagcgtcacaagtaacaaccacttgtgttgatttataagattctccattagctaatcgggagttaatgctttgtgttaatgggtcttaagccaaacactagaagaagagaatagccaggcagtgtatgctgttacaatagaaacttttaagctccacatgttttataagactgttgacatttaactgcttctacctcccgacatgccactttcctcaactttagcttttcaaactgacttctgatcacactgcttcatcaaaacgcctgctgggaaagtcaccagtgaccttctgatcactagctgggttgattctttctccatccctgtccaccatataatttgtccttgcagccaggcttgtcatttattctccctcatgcaatccatgtaccagtcaaaactaatacatgctatttcccctggcctgtgcccatgctgtttctctgtgcagatcaccctttactctggtggttcaaattctaccaataccttggctcagctcagtggtaaactaggactcttaacactcagccttttattatcattattcggataaacatcttaattctgttataaaattaactccttgaagattatagcttattaatctctacatctttcctggttgtattaaatacactgctgtgcacataattactgtttaatacatatktgagaaattgacttcaatttaattgaatttctagacggagcaaattatacccccaaagaacttgagtggatgcttcaaggtcacctgccagggagactttctaaaacgagctgttgtatctgaaaagtgcctctgagcagtgcccctgtagaagaacaaaagcatgtgaggctagacgcacacattttatcatcctcagtccgttctcatggggagcccaggacctctcttcaggggcgagtcttccatggtgttttattgtcaggcagagaacagtgctactgctgctgtagatttctctgactgggctctcctggctgtgacctgttagagcacacgtgcacacagagatgcacacacacacacacacacacacacacacacacaatgatcatgtgcacagcacaggatatgagcagaaatacatcacatttctttgatccttattgcagtcaaggcacatgggtgcagctgcaacttgaactttagaatcagggtgtctcgttcctcgaatgagttcatactatctagcattttcattcttgccatctgtcttctacaataggtccctctttttttccacctcatggaatgaatgttcttttatcatcctgtttattaaaaaacctccaacatatcactacacagaggaaaagcaaggctgttgtggatactcatgtgcttatgctgtgcacctacattcagccccagagccacataaagggctttctaataactgggatggcaattgcagatggccaacattataacactgaggcacagaaaatagtctcacctcttcccagtacttaggagcccagcgtggatagtggagagtgcacattccacatcttggttctgacactttcttgttgtatagtcttgtttcttcaccaatagaatgggtataagattatgtacctcatagatttgttgtgattatttaaacatatagcttcctaatccaatgcctggtccctaatgggtggttccttttaacaagcaaatattctcgactaccccataacatcagagaatagccttgaaacaatgttattgacattttaaaaatcaaacaatatgcaccccatattatagttatagtttcattgcaattacttaaaggagtgaatagacagactcaccttcatatccacttttaatctaactgagaatatctcaagacagtctattgagatggataaagtaagaaacagagacagagcttgttgatgtgtgtgtgagtcatcctccttgtgaggttctgtgtgtgatgaatggctcactggcgccctag

SEQ ID NO: 679353 - DNA, 2515 bp, Homo sapiens
gaaaacctcttacatttaattcctaatagctaaggtatttctgcacaaacaaaacaaaaaaacctccaaaagaaaacaaaacaaaacaaaaaaaaccacacctgattggtctgttacacaattctgcagacaaaaggacaaaccagactgcagagtttatttagaaacattgtggaacattctgagctagaaacgcaacaaggagtatttcctttagggactgaaacagtattaacttatagcctgcaattagacccagtagctaagccataacctaattacttaaaagtaagtagcagtggttgccaaactggtagcgatcttctctgaggtagtttagggaaaaatttttcttgcatgttccacatgctatggaaagcctcttgaattccattctaactcactgtctttcagcaaacagactaacatcttatgaaattcttcttttgtcttctaagcatcatttaaaacactgaaatatacttaatcctcctgctctactacctctaaggacaacagtgaaaactgcccttgtgtgagtgtagcgtcacaagtaacaaccacttgtgttgatttataagattctccattagctaatcgggagttaatgctttgtgttaatgggtcttaagccaaacactagaagaagagaatagccaggcagtgtatgctgttacaatagaaacttttaagctccacatgttttataagactgttgacatttaactgcttctacctcccgacatgccactttcctcaactttagcttttcaaactgacttctgatcacactgcttcatcaaaacgcctgctgggaaagtcaccagtgaccttctgatcactagctgggttgattctttctccatccctgtccaccatataatttgtccttgcagccaggcttgtcatttattctccctcatgcaatccatgtaccagtcaaaactaatacatgctatttcccctggcctgtgcccatgctgtttctctgtgcagatcaccctttactctggtggttcaaattctaccaataccttggctcagctcagtggtaaactaggactcttaacactcagccttttattatcattattcggataaacatcttaattctgttataaaattaactccttgaagattatagcttattaatctctacatctttcctggttgtattaaatacactgctgtgcacataattactgtttaatacatatgtgagamattgacttcaatttaattgaatttctagacggagcaaattatacccccaaagaacttgagtggatgcttcaaggtcacctgccagggagactttctaaaacgagctgttgtatctgaaaagtgcctctgagcagtgcccctgtagaagaacaaaagcatgtgaggctagacgcacacattttatcatcctcagtccgttctcatggggagcccaggacctctcttcaggggcgagtcttccatggtgttttattgtcaggcagagaacagtgctactgctgctgtagatttctctgactgggctctcctggctgtgacctgttagagcacacgtgcacacagagatgcacacacacacacacacacacacacacacacacaatgatcatgtgcacagcacaggatatgagcagaaatacatcacatttctttgatccttattgcagtcaaggcacatgggtgcagctgcaacttgaactttagaatcagggtgtctcgttcctcgaatgagttcatactatctagcattttcattcttgccatctgtcttctacaataggtccctctttttttccacctcatggaatgaatgttcttttatcatcctgtttattaaaaaacctccaacatatcactacacagaggaaaagcaaggctgttgtggatactcatgtgcttatgctgtgcacctacattcagccccagagccacataaagggctttctaataactgggatggcaattgcagatggccaacattataacactgaggcacagaaaatagtctcacctcttcccagtacttaggagcccagcgtggatagtggagagtgcacattccacatcttggttctgacactttcttgttgtatagtcttgtttcttcaccaatagaatgggtataagattatgtacctcatagatttgttgtgattatttaaacatatagcttcctaatccaatgcctggtccctaatgggtggttccttttaacaagcaaatattctcgactaccccataacatcagagaatagccttgaaacaatgttattgacattttaaaaatcaaacaatatgcaccccatattatagttatagtttcattgcaattacttaaaggagtgaatagacagactcaccttcatatccacttttaatctaactgagaatatctcaagacagtctattgagatggataaagtaagaaacagagacagagcttgttgatgtgtgtgtgagtcatcctccttgtgaggttctgtgtgtgatgaatggctcactggcgccctag

SEQ ID NO: 679354 - DNA, 679 bp, Homo sapiens
ggaccttcaacttaacaaataattcaaaatccggaggagtcctcacgccctggagaacccagctttagagggcggttattgtgatttttccctgtaataataatatttatttatttgtgtagcagtggtagcaagcataagaatagcaagcatcacgtaaggagtcgggaaacccagggttttttctagctctataactctgggcaaacctcagcacacaagcctaagccccatcttttacagaaaaggattggctctataacccttttacctcccaaatgcgaactctcatgcttatatagcactaagaagagtgagagaaaacatacacagtcctcaargggtttacggtctccccacacctctgggcaacacaatctcagaacaagtatgtacaacgctgtgttgatcttcttatattcctgctgccttgttttattaagttcaatatttctgtatcatattcatgattccttaatttttttgtagagagttttagttttctaaaatatttatttataattgacaaataatagtccacatttatggggtacagtgtgatgttttgatctatgtatacattgtagaaagagtcaatcaaggtaattaacatatctatcaccttattgctttttttttggtgtgatgagaatgttaaaaatctattctttttagcaat

SEQ ID NO: 679355 - DNA, 679 bp, Homo sapiens
ggaccttcaacttaacaaataattcaaaatccggaggagtcctcacgccctggagaacccagctttagagggcggttattgtgatttttccctgtaataataatatttatttatttgtgtagcagtggtagcaagcataagaatagcaagcatcacgtaaggagtcgggaaacccagggttttttctagctctataactctgggcaaacctcagcacacaagcctaagccccatcttttacagaaaaggattggctctataacccttttacctcccaaatgcgaactctcatgcttatatagcactaagaagagtgagagaaaacatacacagtcctcaaggggtttacggtctccccacacctctgggcaacacaatctcagaacaagtatgtacaacgctgtgttgatcttcttatattcctgctgcctkgttttattaagttcaatatttctgtatcatattcatgattccttaatttttttgtagagagttttagttttctaaaatatttatttataattgacaaataatagtccacatttatggggtacagtgtgatgttttgatctatgtatacattgtagaaagagtcaatcaaggtaattaacatatctatcaccttattgctttttttttggtgtgatgagaatgttaaaaatctattctttttagcaat

SEQ ID NO: 679356 - DNA, 597 bp, Homo sapiens
tggtataacacactttctagttcagatgtctgcaaactaaaaaaaaatgtgatgatcaaaaccattgaatgctagcaaagggattacccaatacttgtcatctcacagctattcattattgccaggaagttctcagacttcatgcaaaccttaccccctcatctttcacattaggaaactgaggcccagggaaattcagcactggctcagtgtgatggagagtgtttgtagccaggccagaagtgagatccaggtttatagtycctctccttatgatcttctcactaacgtttatagttctaatgctagattctgattctcctcattttatgttctccttgcagtttgtaaggtgtgttgggaagggtataggttttgaagccatttggatctcggtccaggttagagatctaccactgatttactctgtggccaagaacgagcttcctcctgggtttcaatgtcctgtcaaatggggtaaaacaatctctctctagtaggtttgtgataagtgttaaaaaaagtcacgtatagagtaactaggacagagttcaacatataatccgacctaatacatgttcgtttttcaacttccct

SEQ ID NO: 679357 - DNA, 597 bp, Homo sapiens
tggtataacacactttctagttcagatgtctgcaaactaaaaaaaaatgtgatgatcaaaaccattgaatgctagcaaagggattacccaatacttgtcatctcacagctattcattattgccaggaagttctcagacttcatgcaaaccttaccccctcatctttcacattaggaaactgaggcccagggaaattcagcactggctcagtgtgatggagagtgtttgtagccaggccagaagtgagatccaggtttatagtccctctycttatgatcttctcactaacgtttatagttctaatgctagattctgattctcctcattttatgttctccttgcagtttgtaaggtgtgttgggaagggtataggttttgaagccatttggatctcggtccaggttagagatctaccactgatttactctgtggccaagaacgagcttcctcctgggtttcaatgtcctgtcaaatggggtaaaacaatctctctctagtaggtttgtgataagtgttaaaaaaagtcacgtatagagtaactaggacagagttcaacatataatccgacctaatacatgttcgtttttcaacttccct

SEQ ID NO: 679358 - DNA, 597 bp, Homo sapiens
tggtataacacactttctagttcagatgtctgcaaactaaaaaaaaatgtgatgatcaaaaccattgaatgctagcaaagggattacccaatacttgtcatctcacagctattcattattgccaggaagttctcagacttcatgcaaaccttaccccctcatctttcacattaggaaactgaggcccagggaaattcagcactggctcagtgtgatggagagtgtttgtagccaggccagaagtgagatccaggtttatagtccctctccttatgatcttctcactaacgtttatagttctaatgctagattctgattctyctcattttatgttctccttgcagtttgtaaggtgtgttgggaagggtataggttttgaagccatttggatctcggtccaggttagagatctaccactgatttactctgtggccaagaacgagcttcctcctgggtttcaatgtcctgtcaaatggggtaaaacaatctctctctagtaggtttgtgataagtgttaaaaaaagtcacgtatagagtaactaggacagagttcaacatataatccgacctaatacatgttcgtttttcaacttccct

SEQ ID NO: 679359 - DNA, 1801 bp, Homo sapiens
atgaatacaaataaactgcaactatgaacattgtaggcaaacatcttggaaaagattgggtcggggggagaagaaacagagagagagagagagggaaggaatttgaaagcagccagaaaaaaaaaaaaaaaaaaagaaaagaaaccttgacacattacatacagttgatcaaataaacaaatgatggtgacattattagaagcaataatgctagggtgacgtgacaatagaagagcctcattaaagtaccaaaagaagaaacaaatctactactagctcataattctataagaagagaaaataccatccacaagtgaaggtgagggacttctgttgttgtctaaggtacagaaaactggaaaaaaagtgtaactttcatcctgataatgagaaaaataccagttaagccacaaaatcacagctttccttgaagccatcagaaagctgagttcacacagccaccaggtagctgacaggatcctctaagagacatgagatgggatcctctcagctgtggcacagcacagaagcaagaccttgccaccatacaagcagctaaaaaggaatcagataaagtagtaacaaagtggttcttaggatttgcttatttttaaaaaaagatttgcaaataataattgtatgtatttatggggtacaatgtcatgttttggtatatgtatacattatgaaatgatgaaatcaatctaattagcatatccttcatctcacctacttattattttttgtggtgagaatgtttaaagcctactttttagatcctggagcatgtgactgctgttgtgggccatgggctgctgactgtaagggatatttaacaagagagaggaagagaagatggcatttctgataaaggttgtgatacaaccacaggattaaccctccctcttgaagatcatcctgtaaatgagatgctatgtataccaacttcccaccacctttgtttttctgttcagtaatcctggtgtggataaatgaagtcttcgcgtgtatgttaaaaaaaaaaaaagtctacccttttagcagttttgaaatatacaaagccaagtgtgggtgagtgtgagagtatagaaaccctggaagcctcacattaagaaaaggattcacagccacttgctgggtcatttccatggaccatcacatggtgctcaggagacagaagaggggcaggatgggagactgaacagggcctccttttgcattgcaggcatgaagtaggagagggacaagctggacttcctgctcagaacctcttctcaaaatcattaagcctcagggggagtgcgagcatcttctatctctcctagggcatcagaaaagacccattgcttcttggaggggaaagtgtagcctagagcaaaaacattctctaccccagagagaaagaggtaagaaacagtttcatgttagaaggcttctaaggcagtgcctagagaaaataaaatagtttcaatgtttatactagaaaagtaaagatttagaatcaaygatctaaatgttcacattaacaagatatacaaataaactcgaaattagtaaaagaaaggtaacaaagttcagagcagaaatcagtaaaataaaaaatcaatagagaataaaaataaagtgaaaagtaggtccccaggaaagtgtaaaactttgataaatctctaatgaagactcatcaaaaataaaaacataaattccttatataatagagatgtaattactaaatgtcccatacatattccaagcatagtaagagaatattaacaacatgccaataaatacaacatgccaataa

SEQ ID NO: 679360 - DNA, 638 bp, Homo sapiens
gtaattttggcctgaaaaactccctttagtgctttctgtacagcagatctgttagaaatagattttctgtttttgtgaacttgaaaatttcttaatttattttttasatttattttttaattgacaaataaaaattatatatattcatgttatataacaattattttaaattcctatagctttattggtagagtttctggctatcacatcttataaaagaagggtacctagacatagaattgttaattgacaagaatttggcttccattgttcctaataacaagtcaactcttaatcttattgaaggtcccttgatacttttccttctgctgtcctcaagatcttatctttgtctttgatttttgttgatgtgactatgtttttttaggtgtggttatctatgaatttaatctacttgaagtttgttgaaattcttagatgaagcctcagatttggaaagtatttggtcactatctcttcaaatatttttctctcttttctttttctcttctccttatataattcccattatgtgtatgttagcacactttttggggggctgggggtgggtgtcactctatcacctaagcttgagtgcagtgaggtaattatagctcactgcaacctagaacttctgg

SEQ ID NO: 679361 - DNA, 1003 bp, Homo sapiens
aaagaagcaggcaagtttttccatgcatccttagagttcatcaagatcctatccctcttttagcaaaagggaagacagattccagggaagtgaggagtgacttgtccaaggtgtcacagacagacagacagacattcaagtcttaccttttggttttcttgtttaactctaatacatttgtattttgcaatgtgctgcttaacagggtgtttgccaaagtgttgtctttttcttgagaattagaagagtgatgggatcatgtcccaaaaccttccaaataccactcagtagcctcacatgctgggagtttttctgtattcgcagacacatgcagtctgacccttgcttgctaaactgcccaattgtgacttttctctctccatctgctgtgttgtttgaatccttctttacaagaattcaattagacaataatgcaaatgcatatttcatctactcatgcacatttagtagacatgctagtcgattgtgggcatctttctcgctgagtctctaacttacttcaaaaaattgtcttaatacagttctctgattagttaacacatgtaggaattatttcagaagccattcactatgcagtcacagagagtagggtctcgacaatgttctcttttgaargaaactcacaaaaaatataattccaatataatagtgctagtggtgagtctagggctttggcacaaagcaggaactcaacaaatgtttgttgaatgaatgaatgacacaactgaataaatgtgataggcattagataagttttgccaactaagaattacagaatttcctggatagaaaaggatggatggattgttagagatgtagagaggggggaagcaacttgacaaggtttttattaagtgattataatcaaagctgaataacacatggacttattaatagaaagaaaaattaaaacatcagacactgagaaggggtgaggatcctacaaaattgatctctgttcatgaaaccaacatgctttata

SEQ ID NO: 679362 - DNA, 1120 bp, Homo sapiens
ggcatgtaatgtgtacttcaataaagctgttaagcaaactcataaaaatgacaattattatgagaaagatgatcaaatttggtcttacaatatttttaaataatgtaaattatttgatattcattaaatttgatatgtattaaagtgtaaaactagtgtatagcacacagagaagcacatataaaaacatggtgtcattttcaaggattctcatcttcctttcccatgttctagggaagcagaattgcatagtggaaaaaagatttggaagtataggtctaagtaatttcatttaagagctgtataaattatcaattaccagagtttcrtatttcccacctgtaaaatggtctcacatccttctaacagtaaagagtaagtgatgcaatatataacataaatattttgaaaactgtagagtactgtacaaaatactaaattgcaattgctaccatattgggatacattctatgtgccagggattttttttaggcattttacattgttatctcactaaatgacaaaaaaataaaacttatgagataagtaacaacctcttagtacaatgaggctgaaaactaacttcttcaagtttatgagacaatggatagcagggattggattcggcttagatttgctgcagtgagaaccctaactacaagagtgcagcctctatgaagaacagtatagaaattcctcaaaactacaaatataactgctgtatgatctagcaatcccactagtggatatttattcaaaggaaaggaaaacagtatattgaagagatgtctgcagcctcatgcttattgcagcagttttcacaatagccaagacattaaatcaacccatgtccaacaacagatgaagggataaagaaaatgtggtacatatacacaatgaaatactattcagtcataaaaagaatgaaatcctgtactttgaagcagcatggatggaactggaggccattattttaagtgaaataagccaaggacagaaaggcaattatggcatgttcttattcatatgtggaagctaaaaatgttgatttcataagagaaatagtagaactgaggtttccagaggttgggaagtgtagggagaataggggatagaggga

SEQ ID NO: 679363 - DNA, 1118 bp, Homo sapiens
tgtggttttgattgcatttctctgatgatcagtgatgttgcacattttttrtgtacttgttggctatttgtgtgtcttcttttggtttagttttagcaaaatccttcgttcgtgtaactgagctctggatttagtctcccaaggcacaaggaaatttaactgacagttctcatgctgtcctgccatcctcacttcagctctgagtgttccagtattctagcttagagctctttttgttctttcactagttgctcatataacattgtttctaggcccctttccatctgctccagttgtccaatgtcctttttgaacagtggtggccagaactgcaaaatccccatgtaattcccccatgcaatttatttgtgtccatctctgtgctaagcaaaaacaacaaggagatgtagaagacatggcctgtgtttttgaggagctcttctacaaaacaaagctatcaagtggcaggtaaacacagaaacagaaacaaaaggcaaaagttttaaggtgtttttccacagatgggacagaaattagcacagatagcagacaaaaggatcttagtactcatttgtgttgtcaagtttctgggtgttctcattttattcctaatacagtatgccattaaaatgcatgtctacatttattggcaatgaatgtgacccacatgaatattaaagggaaataaattcccagtggagagcaaggctggttatattctttcttttgtttcccccgctttcttcttttatttcagggatagccaagtgctcagagtagacattttgtttcattaatccctttcttttttgaatattgacacagctgagactcagcgagagaatggtgtttgcacccaacccagaatggaccaaagtgctagatttcctttgcaaagaaactcgtctttgcagtaaatgtttgtctcttttttttgttgctgattgcacttgtgagattatcaggctctgggtgtgaatgcagcttaatggcctcaacctttgtgtctttgctgactgagcactgctcttggctgttcaaggcataggtggagggaggaataattccccagctaattcagagatccctttgttttccctgtaattagtgtagaaccc

SEQ ID NO: 679364 - DNA, 618 bp, Homo sapiens
tcaatttcctctgcttctcttcagtccaggacagtgaaaattttcattcacaaaaaatgtaccccaaaccatatragatacaaaatgtttaaacaaaacttacattattttcaatataatcctctcccatgagtaaaaactggaattatgtggattttaaagatgctaaatatgttaatcaaagtttgattctctcagtttacaataacttatgcttgctgttaatttacaattgaccaaaagattttgaatataatgtatttaattcttccaggaatcacacaaggtagatattatcatttccactttacagatgcagaaagcaaggcgtagagatgatcacaaatttcccaaccattgagtgacagagctcagtcatgcagaactcaggtttgcatgactcaaattaggcacaagttcttggaattttccataagggataactgcatcttttgcaccttcacaactagaaacgactcagcgactttttctgtgagcaaatgtcgaggtcttaactgctttagttcgaggaagttccttttttcttttcaaaaatcaggttgctggagatggtacacaaaataagagaaagaaggcctgattcattctgtcagctca

SEQ ID NO: 679365 - DNA, 618 bp, Homo sapiens
tcaatttcctctgcttctcttcagtccaggacagtgaaaattttcattcacaaaaaatgtaccccaaaccatatgagatacaaaatgtttaaacaaaacttacattattttcaatataatcctctcccatgagtaaaaactggaattatgtggattttaaagatgctaaatatgttaatcaaagtttgattctctcagtttacaataacttatgcttgctgttaatttacaattgaccaaaagattttgaatataatgtatttaattcttccaggaatcacacaaggtagatattatcatttccactttacagatgcagaaagcaaggcgtagagatgatcacaaatttcccaaccattgagtgacagagctcagtcatgcagaactcaggtttgcatgactcaaattaggcacaagttcttggaattttccataagggataactgcatcttttgcmccttcacaactagaaacgactcagcgactttttctgtgagcaaatgtcgaggtcttaactgctttagttcgaggaagttccttttttcttttcaaaaatcaggttgctggagatggtacacaaaataagagaaagaaggcctgattcattctgtcagctca

SEQ ID NO: 679366 - DNA, 618 bp, Homo sapiens
tcaatttcctctgcttctcttcagtccaggacagtgaaaattttcattcacaaaaaatgtaccccaaaccatatgagatacaaaatgtttaaacaaaacttacattattttcaatataatcctctcccatgagtaaaaactggaattatgtggattttaaagatgctaaatatgttaatcaaagtttgattctctcagtttacaataacttatgcttgctgttaatttacaattgaccaaaagattttgaatataatgtatttaattcttccaggaatcacacaaggtagatattatcatttccactttacagatgcagaaagcaaggcgtagagatgatcacaaatttcccaaccattgagtgacagagctcagtcatgcagaactcaggtttgcatgactcaaattaggcacaagttcttggaattttccataagggataactgcatcttttgcaccttcacaactagaaacgactcagcgactttttctgtgagcaaatgtcgaggtcttaactgctttagttcraggaagttccttttttcttttcaaaaatcaggttgctggagatggtacacaaaataagagaaagaaggcctgattcattctgtcagctca

SEQ ID NO: 679367 - DNA, 1384 bp, Homo sapiens
ctcacagtgggccatcttttaatccatattttagctaactaagcaaataaactattagaaccctttttaactccccaagctgcaacattaaatgcagagtccctatttagtggggccaaatcaataaattcagcctgacctaactctatgttccttccaccattatcccacacccttcatatccattctaatgcctgttctccagatttctgtttatataaattagaaaattcaagcagttcttttcgagtgtagtacatctcctcatgggtcacactctcaacctcgcctctaggggccctccaggaaatgatacctaacagtgtacaggcttgacttgagacagggcagagatgatagaaacaggtgaagagctagtggttgccattggaattaaaatgtgtgtgatcagagaagacatgggggttagtacctgacacaactgttttggtgatggtctgagtagaaatgtcagtgaccttgttgggcacraaagtggcagagacagtggtggaggttgcagtggccccagaggctgtggtagaggccaagaagggcgatgaggccaaagcgaaggctgtggaggtcacagatactgctgtggatggcatggtggcctcagagcctgtggtggaagccatgctgcttccagaccctgaagtgacctcagaggctgtgctcacagccatgttgctcgtggatattgcagtggaggctgtggtggtctcagagtctgtggaggaggcggttgtgggcatagatactattatggaggcactgggggtctcagaatctgtgagggaagccgtggaggtttcagtggctgtagtggtctcagatcttgtagtggaggctgtggtggtctcagagcccatcatggataaaaatcctgcagtgttctcagaggttattttggaggttgttgtgggcacagatactattgtggaggtagtgggggtctcagaggttgatgtggcctcaaaggccatagtggaggctaggatgtggtggacacaaatattttgaaagaggatgtggtggactcagaggctgtggagaaggcctcagtagtttcagaggctgaggtgggagctacagtaggcacagaggttatcatccaggctgtggggatctcggaatctttgctagaggccaatgtagtcacagactgcagtggttcctgaggttatgatggaagccagagtgatctcagagcctgtggtggtttcaggcgctttgataaagactgcagtaggcacagatactatcttggagagagtggtgctcttggaggctatggtagagtccatggtgggcacagacttggtcacggagtctatagtattctgatagagtgtggtggaggctgtggtggacacagacg

SEQ ID NO: 679368 - DNA, 674 bp, Homo sapiens
accactgaacttgcttttgctgtgcactccagcagacttgccctgaattctttcttgcacgagatccaagaaccctctcttggggtctggattgggacctctttcctgtaacaggaccaccttccacaaatggacccaggttcagtgtccactctgattcactgtcccatgctgccttccctaaagcaggcactttgccactggtttcacacgtctggggtgaagaactcttcttggtttgtccggaacctttctggttttgcgtggaaagtcctgtgtcctgggaaactccacagtcccaggcatcctataccatgcttcatttgccaaaaactgtgacccaaaaaaattgtgaacaatgattttactgcaaaatgttggaaactctgtagaaagtagttgtatggtatgctgkgaaaatagggaattttttttgggtatttgattttgtaacacttttctgattataaaagcattaaatacacatttggaggtacttggagagacaaaggaaagcttaaagcaatgcttttcaagctttgttatgtgtaagaatatcttgcttgaaatgtagagtcccaggctgcaacgcaagagtgtgcatcaggaagagtggagtgttgcccagaaatctggaaggtaagagaaaaggctagccactaatagtagtttaa

SEQ ID NO: 679369 - DNA, 1426 bp, Homo sapiens
ctctgatgagtgtccaaacatctctgtagtactgtgactttcaaaatgatgtcatcagctatcattccactctgcaaggggagaggggcaggtgcccctcctcggtctgtctccaccaggccctgtgagggtgggtggaggctctctccaagccctcgtttggccccaccccagcatgtctccaggttcctctcagccctggttccttttggccctgcagtcacaatgggcaacactgtgacgcaccctgtcctgtgtcacagtgtcatacactcaggctcacattgcccctaggccacttgccagccaagggacatggccacattttgtgtcttctgcacctcagccttgctttcaagtgcaggtgatgatggcacccacgcagaacaaatgttatttgctatcttcgtcgagtttagtcatccaattttccaaccctcactgggcaaggaagagtgtggtttccaccaagaaggcaggatgtcagcagtcacaggggcaaccaacagggaaagccgccggaaaatagaccccacaggaagcacaggtgtccagtggagatgggaaccctgcagatttgaccgtctttaagcagattagagagattaccgttactaacaacttagccataaaagtttattagctattttcaaaaagcataaaattatgtaatataattttttttaaatttccatcaatacaaaactaatctgggcactgcaacttccggtgggcaactgggataggcggcatcatcaggaaggcgagccctgccgtgccccatgtgccagtgccccagatggcggcagcctccccagaagcaccttgtatctcccctgcacagggccagggtcccagcttcccatacaccttctcctgctttttcttttctgtcctttcctttttcaataaaccacctgcraaaagggaaaaccattctgaggacaagaaacatgtcaatgggaaatacacagttgccagagggtaaaaggccctgttcattctcattgaaaagctcaggtatttctgttaaagtctctccttttactttaggatgctgactcctgcgtccatctcaacctgggcatcgtgccaccaccttcaagaagagaaaaactaagtagtgctttgcaaaggggcagcagcatttctcatttctgaccatgtcaggcacatggccatgcagatgagcaggtgggggacacaggtgagtctccagacctgctctcctcccacagtacattcttgagtctttttaaacagttgtgaaaatgccacagatgcaagcacctgtgggccactcccatggggaccgttgcacaaggcagtgccactcattctcagaacctcctaccatgggctatgcttagtgacccgaggccaagccaaggaagacgccagccacagggtgccatcctcaggggca

SEQ ID NO: 679370 - DNA, 1426 bp, Homo sapiens
ctctgatgagtgtccaaacatctctgtagtactgtgactttcaaaatgatgtcatcagctatcattccactctgcaaggggagaggggcaggtgcccctcctcggtctgtctccaccaggccctgtgagggtgggtggaggctctctccaagccctcgtttggccccaccccagcatgtctccaggttcctctcagccctggttccttttggccctgcagtcacaatgggcaacactgtgacgcaccctgtcctgtgtcacagtgtcatacactcaggctcacattgcccctaggccacttgccagccaagggacatggccacattttgtgtcttctgcacctcagccttgctttcaagtgcaggtgatgatggcacccacgcagaacaaatgttatttgctatcttcgtcgagtttagtcatccaattttccaaccctcactgggcaaggaagagtgtggtttccaccaagaaggcaggatgtcagcagtcacaggggcaaccaacagggaaagccgccggaaaatagaccccacaggaagcacaggtgtccagtggagatgggaaccctgcagatttgaccgtctttaagcagattagagagattaccgttactaacaacttagccataaaagtttattagctattttcaaaaagcataaaattatgtaatataattttttttaaatttccatcaatacaaaactaatctgggcactgcaacttccggtgggcaactgggataggcggcatcatcaggaaggcgagccctgccgtgccccatgtgccagtgccccagatggcggcagcctccccagaagcaccttgtatctcccctgcacagggccagggtcccagcttcccatacaccttctcctgctttttcttttctgtcctttcctttttcaataaaccacctgcaaaaagggaaaaccattctgaggacaagaaacatgtcaatgggaaatacacagttgccagagggtaaaaggccctgttcattctcattgaaaagctcaggtatttctgttaaagtctctccttttactttaggatgctgactcctgcgtccatctcaacctgggcatcgtgccaccaccttcaagaagagaaaaactaagtagtgctttgcaaaggggcagcagcatttctcatttctgaccatgtcaggcacayggccatgcagatgagcaggtgggggacacaggtgagtctccagacctgctctcctcccacagtacattcttgagtctttttaaacagttgtgaaaatgccacagatgcaagcacctgtgggccactcccatggggaccgttgcacaaggcagtgccactcattctcagaacctcctaccatgggctatgcttagtgacccgaggccaagccaaggaagacgccagccacagggtgccatcctcaggggca

SEQ ID NO: 679371 - DNA, 1426 bp, Homo sapiens
ctctgatgagtgtccaaacatctctgtagtactgtgactttcaaaatgatgtcatcagctatcattccactctgcaaggggagaggggcaggtgcccctcctcggtctgtctccaccaggccctgtgagggtgggtggaggctctctccaagccctcgtttggccccaccccagcatgtctccaggttcctctcagccctggttccttttggccctgcagtcacaatgggcaacactgtgacgcaccctgtcctgtgtcacagtgtcatacactcaggctcacattgcccctaggccacttgccagccaagggacatggccacattttgtgtcttctgcacctcagccttgctttcaagtgcaggtgatgatggcacccacgcagaacaaatgttatttgctatcttcgtcgagtttagtcatccaattttccaaccctcactgggcaaggaagagtgtggtttccaccaagaaggcaggatgtcagcagtcacaggggcaaccaacagggaaagccgccggaaaatagaccccacaggaagcacaggtgtccagtggagatgggaaccctgcagatttgaccgtctttaagcagattagagagattaccgttactaacaacttagccataaaagtttattagctattttcaaaaagcataaaattatgtaatataattttttttaaatttccatcaatacaaaactaatctgggcactgcaacttccggtgggcaactgggataggcggcatcatcaggaaggcgagccctgccgtgccccatgtgccagtgccccagatggcggcagcctccccagaagcaccttgtatctcccctgcacagggccagggtcccagcttcccatacaccttctcctgctttttcttttctgtcctttcctttttcaataaaccacctgcaaaaagggaaaaccattctgaggacaagaaacatgtcaatgggaaatacacagttgccagagggtaaaaggccctgttcattctcattgaaaagctcaggtatttctgttaaagtctctccttttactttaggatgctgactcctgcgtccatctcaacctgggcatcgtgccaccaccttcaagaagagaaaaactaagtagtgctttgcaaaggggcagcagcatttctcatttctgaccatgtcaggcacatggccatgcagatgagcaggtgggggacacaggtgagtctccagacctgctctcctcccacagtacattcttgagtctttttaaacagttgtgaaaatgccacagatgcaagcacctgtgggccactcccatggggacygttgcacaaggcagtgccactcattctcagaacctcctaccatgggctatgcttagtgacccgaggccaagccaaggaagacgccagccacagggtgccatcctcaggggca

SEQ ID NO: 679372 - DNA, 880 bp, Homo sapiens
cttgagcccaggcgttctttgttgtctggacaacaaaatgagaaccatctctattaaaaaatatatatatacaaaaattaaccaggtgtggtggtgtgtacctgaagtcccagctacttgggaggctgaaatgggaggatcgcttgagcccaggaggttgaagcttgcagtaagccagggtctccagcctgggtgacagagcaagaccttgtctctgaaaaaaaaaaaaacaaggaaagaaagattagctgggcatgatggtgcacacctgcagtcccagctacttgggaggctgaggcagcagaattgcttgaacctgggaggcagaggttgcagtgagccaagatcacactactgtaccccaggctgggagacagagtgagactccatctcaaaaataaaaccagaaataaaaaaagaaagaaatatttttaaaaagtcatactgctaagaataataggttttcatttagttcatcaatagaattccaatgaccttaaatgacaacattgcaaatattttccacgtaggcacggaagacatatgcttgtgagacaaaggtgtctctgaaactatggatggtacaagaacttcacttgacattgaagagtactcggatactgaggtacagaaaaaccaagtactaactctggaagaatggcaagacaagtgggtgaacggcaagactgcttttcatcaggaacaaggacatcagtaagaaatatttggtatacaatagagaaatgttctatcaaaaagtgactttgagatagaaataataaaagtacacattatttgactaacttttaggatgcacatttaattctwcacatttttgtgtctcccgagtcacagtgcatctgtggcatgatgtagttta

SEQ ID NO: 679373 - DNA, 1509 bp, Homo sapiens
cggctaatttttttttttttttttttgtatttttagtagaggcggggtgtcaccatgttggccgggctggtctcgaactcctgacctcaggtaatctgcctgcctcggcctcccaaagtgctgggattacaggcgtgaggctctttctttctgtgatctgagcccagttctgttcccagacttaactctgcctctggtcatagaaggaaccccaactttggtcctaaactgaaccctgaagtcctggccacaggaagggaccccattctggttctaggctgagccctatccctggcttcagtcttggttctaccccagccatagaaggaacccttttcctggtccccagaattatccctgacctcactcatgaaccaagccctgaccctgtccttgccacaggctgagctgccccatgccaagcaggtggtcttaactgcagtttagttcagggtggagaacagctaccaacgtccattgggctgacgtggtcagaattttcaccatagctattccaaataaaataaaacccaaagaaaaaaacaaaaaaccccatgtagataattcagaatgaaaaggagagaaaccaaagccagaggcttccatagctcgttatctagtacgcaggggcaaggggttggggtcctgaggcccccacaaggctgggagacgtggctggacctgtgagaagcgggaaggttaaaaaccaagcccaaccactggaattagcttcgaaagaactggaaatcagagaagaatatgaaaaacattaaaataaagtaaattgtcacaaagattaaaagaactaacagaactaatgagagaataggacagaacaaacaagcaaaaaaagaataagcacattttagaatgattcttttttttttttttttttttttagactgagtctcgttctattaccagctggagtgcagtggcgcgatctcggctcactgcatcctccgcctcccgggttcaagtgattctcttggctcagcctcctgagtagctgggattacaggcgcacaacaccacacccagctaattttttgtatttttagtagagatggggtttcaccatgttggccaggctggtctcgaactgctgaccttgtgattcacctgcctcggcctcccaaagtgctgggattacaggcgtgagccactgcgcccagccagaaggattcttaaagaactgttattgaaacaaaaagtgtagtcactgagataaaaaagaaagccatgcctgggataaacagtacactagacccaggtgaagaaagaaacagcaagttagaagataaatctgaggttacccagaatatagcacagaaatataaggagatagaaaatatcaaagagcagttaggacacacacacacaaaaatcacatagatarttcaatgggactattgggaaaatcccagcatctacctaatgcaaggcgtggaagcaaaaataaaatgttgcctggaggcaatatttggagatgagatggcttaagaattt

SEQ ID NO: 679374 - DNA, 1846 bp, Homo sapiens
ttgaaacaacctttggaaactacacacatactttccttttaattatttcatgtattaatttatgtaagttttcatatccatttttacttctcattatgaatcaataaattggttttctgaatttaactcttggactagagattctgctctttgtgtgccgagaattagtttgcagagacccaggtctgcagccatcatgaggactcaacttcgccacacctcacggaagagccccctgtcttctccccagtgctgtgtgatgcagattccttttacagcctgcctgcctgcctccctccctccctctctctttccctttttccttccttccttctttgaatgttacttttttccttctctgaattgtaatacagacatatggtaaatggcataaacatggcacacgttgataagtaaggaaaaggagactcccctgtaagtgctcatgacctcaacaccaggtcatgaaatggaatattaccagcagcctggggttccctgtgtgcccccagctgtctgcagtcatttctgtctcacttgcctctaggtaacaactattgtcaccttagactcattttcttgcgtttctttatggttttagctttggacattcagttctgcctgtgctgtttcatgcaatgaaatcataggtgagtctcacatgagtggaattgtatctgtcttgtttcactcaacattatgttttgatgttttggggtttcatccatatttttggatgcacctgtactttactcatttttgcacagtctgggagtttgttgtatggctatacaaccatttaattttccactgttcagtcgatggacactggagttggtttctagtttggggcaattacaggccaggttgctaggaagggtttcacacgtgtgtcctagtgggtgtgccagtgagtttgcctagagtttgtacttagtcgtgaattgctgggtaggagctattacctgcaacttgactagataatatcaaatatgtccaaagttgacattccaatgagatctccagggtttgtgagctgttattgttccgcgaccacactgatattcatatttccagttgtttactaaagggctaataagttataaatacattcatttgcttttcagtctagtgggcacgtgttgccatgactttattttgccttcccctgattagtttgttagtcatttttatcctctctttctaartatctgttcctatatttttgtctaccttttggggttgcttgtctttttattgatttgtgtgagttaaaaaaaaaaatgcggccgggcgcggtggctcacgcctataatcccagcactttgggaggcgaaggtgggtggatcacgaggtcaggagatcgagaccatcctggctaacacggtgaaaccccgtctctactaaatatacaaaaaaaaaaaaaaactagccgggcgtggtggtgggcacctgtggtcccagctactcgggaggctgaggcaggagaatggtgtgaacctgggaggcggagcttgcagtgagctgagatcacgccactgcactccagcctgggcgacagagcaagactccatctcaaaaaaaaaaaaagcagccgggcgcagtggctcacacctgtaatcccggcactttgggaggtcaaggtgggcggatcatgaggtcaggagattgaaagactgtcctggctaacacagtgaaaccccatctctactaaaaatacaaaaaattagccgggcgtggtggtgggtgcttgtaatcccagctactcgggaggctgaggcaggagcgtgaacccgggaggcagaacttgcagtgagccgagatagcgccactgcactccagcctg

SEQ ID NO: 679375 - DNA, 1846 bp, Homo sapiens
ttgaaacaacctttggaaactacacacatactttccttttaattatttcatgtattaatttatgtaagttttcatatccatttttacttctcattatgaatcaataaattggttttctgaatttaactcttggactagagattctgctctttgtgtgccgagaattagtttgcagagacccaggtctgcagccatcatgaggactcaacttcgccacacctcacggaagagccccctgtcttctccccagtgctgtgtgatgcagattccttttacagcctgcctgcctgcctccctccctccctctctctttccctttttccttccttccttctttgaatgttacttttttccttctctgaattgtaatacagacatatggtaaatggcataaacatggcacacgttgataagtaaggaaaaggagactcccctgtaagtgctcatgacctcaacaccaggtcatgaaatggaatattaccagcagcctggggttccctgtgtgcccccagctgtctgcagtcatttctgtctcacttgcctctaggtaacaactattgtcaccttagactcattttcttgcgtttctttatggttttagctttggacattcagttctgcctgtgctgtttcatgcaatgaaatcataggtgagtctcacatgagtggaattgtatctgtcttgtttcactcaacattatgttttgatgttttggggtttcatccatatttttggatgcacctgtactttactcatttttgcacagtctgggagtttgttgtatggctatacaaccatttaattttccactgttcagtcgatggacactggagttggtttctagtttggggcaattacaggccaggttgctaggaagggtttcacacgtgtgtcctagtgggtgtgccagtgagtttgcctagagtttgtacttagtcgtgaattgctgggtaggagctattacctgcaacttgactagataatatcaaatatgtccaaagttgacattccaatgagatctccagggtttgtgagctgttattgttccgcgaccacactgatattcatatttccagttgtttactaaagggctaataagttataaatacattcatttgcttttcagtctagtgggcacgtgttgccatgactttattttgccttcccctgattagtttgttagtcatttttatcctctctttctaaatatctgttcctatatttttgtctaccttttggggttgcttgtctttttattgatttgtgtgagttaaaaaaaaaaatgcggccgggcgcggtggctcacgcctataatcccagcactttgggaggcgaaggtgggtggatcacgaggtcaggagatcgagaccatcctggctaacacggtgaaaccccgtctctactaaatatacaaaaaaaaaaaaaaactagccgggcgtggtggtgggcacctgtggtcccagctactcgggaggctgaggcaggagaatggtgtgaacctgggaggcggagcttgcagtgagctgagatcacgccactgcactccagcctgggcgacrgagcaagactccatctcaaaaaaaaaaaaagcagccgggcgcagtggctcacacctgtaatcccggcactttgggaggtcaaggtgggcggatcatgaggtcaggagattgaaagactgtcctggctaacacagtgaaaccccatctctactaaaaatacaaaaaattagccgggcgtggtggtgggtgcttgtaatcccagctactcgggaggctgaggcaggagcgtgaacccgggaggcagaacttgcagtgagccgagatagcgccactgcactccagcctg

SEQ ID NO: 679376 - DNA, 596 bp, Homo sapiens
aaaaacccatatatatatgctttggagatgagctctgttttttgattataagtgcaggaaataccttctcctgctccgtgtcttgtttctcactcttgcctaatgtcttttgatgaccaaaagctcctaatttcagtgcagtcaaattcatccactttttttatgtctgagaaaatcttatcttaccctagtattaaataatatgttagcttgatataacaatctgggcacaattcttttcttaatatttaaaaattattgttaygctattgcttggcttccattgttgacaattgtgataccaactcgattcttatttatatttattgctatttttttcctgataacttttagattttttccttatttctcatgttttaaaaatttcttttacctttatctagttttgcttttttctttctttttttggaccctttgagtcttttaaattcaaggtcttgcatttcctttatttcttgctaattgttggtcatcaatttttaaggcatcctctaatctctgttcatttctctgcccttctggcaattctgttgcatgcacttggcacttccctcctccagcgtccctccttgcat

SEQ ID NO: 679377 - DNA, 661 bp, Homo sapiens
aacattagccaggcgtggtagtgctcacctgtagtcccagctacttgggaggctgaggtgggaggatcacttgatcccaggaatgcagtgagtcaagatcatgctactgtgttcsagcctgtgttacagagtgagaccctgtctctaaaataataataatagtaatagtgagaacatctcacttaatgagtgcttactgcatgctagacatcatgttgagcactttacatgagtaatttcatttaatcctcataacaacccactaaggtaggtgttcttatccccgttttgcagaggagactgagacctgagctgttccttcatgtcctcaatgtcttacagctatgaagtggtagagctaaatttgtaagctagaaagaggtcatgttgttgcacttatcaactggtctttttattctatcttctgacaagcctgcattattttagatgtttcagtcataatctaagcctgtgcagctatttagttgctaatgtctagagaagctttggctacctctaaggataaaattagaggttcaagaactacagtgcccccaaaacccttaccagatcaagttaattaatctgtaacttgaacaccctaaaggccccatttaaatacaatttcactgttactgagaagctccagaaccttcattaa

SEQ ID NO: 679378 - DNA, 661 bp, Homo sapiens
aacattagccaggcgtggtagtgctcacctgtagtcccagctacttgggaggctgaggtgggaggatcacttgatcccaggaatgcagtgagtcaagatcatgctactgtgttccmgcctgtgttacagagtgagaccctgtctctaaaataataataatagtaatagtgagaacatctcacttaatgagtgcttactgcatgctagacatcatgttgagcactttacatgagtaatttcatttaatcctcataacaacccactaaggtaggtgttcttatccccgttttgcagaggagactgagacctgagctgttccttcatgtcctcaatgtcttacagctatgaagtggtagagctaaatttgtaagctagaaagaggtcatgttgttgcacttatcaactggtctttttattctatcttctgacaagcctgcattattttagatgtttcagtcataatctaagcctgtgcagctatttagttgctaatgtctagagaagctttggctacctctaaggataaaattagaggttcaagaactacagtgcccccaaaacccttaccagatcaagttaattaatctgtaacttgaacaccctaaaggccccatttaaatacaatttcactgttactgagaagctccagaaccttcattaa

SEQ ID NO: 679379 - DNA, 661 bp, Homo sapiens
aacattagccaggcgtggtagtgctcacctgtagtcccagctacttgggaggctgaggtgggaggatcacttgatcccaggaatgcagtgagtcaagatcatgctactgtgttccakcctgtgttacagagtgagaccctgtctctaaaataataataatagtaatagtgagaacatctcacttaatgagtgcttactgcatgctagacatcatgttgagcactttacatgagtaatttcatttaatcctcataacaacccactaaggtaggtgttcttatccccgttttgcagaggagactgagacctgagctgttccttcatgtcctcaatgtcttacagctatgaagtggtagagctaaatttgtaagctagaaagaggtcatgttgttgcacttatcaactggtctttttattctatcttctgacaagcctgcattattttagatgtttcagtcataatctaagcctgtgcagctatttagttgctaatgtctagagaagctttggctacctctaaggataaaattagaggttcaagaactacagtgcccccaaaacccttaccagatcaagttaattaatctgtaacttgaacaccctaaaggccccatttaaatacaatttcactgttactgagaagctccagaaccttcattaa

SEQ ID NO: 679380 - DNA, 661 bp, Homo sapiens
aacattagccaggcgtggtagtgctcacctgtagtcccagctacttgggaggctgaggtgggaggatcacttgatcccaggaatgcagtgagtcaagatcatgctactgtgttccagmctgtgttacagagtgagaccctgtctctaaaataataataatagtaatagtgagaacatctcacttaatgagtgcttactgcatgctagacatcatgttgagcactttacatgagtaatttcatttaatcctcataacaacccactaaggtaggtgttcttatccccgttttgcagaggagactgagacctgagctgttccttcatgtcctcaatgtcttacagctatgaagtggtagagctaaatttgtaagctagaaagaggtcatgttgttgcacttatcaactggtctttttattctatcttctgacaagcctgcattattttagatgtttcagtcataatctaagcctgtgcagctatttagttgctaatgtctagagaagctttggctacctctaaggataaaattagaggttcaagaactacagtgcccccaaaacccttaccagatcaagttaattaatctgtaacttgaacaccctaaaggccccatttaaatacaatttcactgttactgagaagctccagaaccttcattaa

SEQ ID NO: 679381 - DNA, 897 bp, Homo sapiens
tgaatgcagaacctgtggatgctgggggcctactgtagttcaatgcccttttaattctcatttatgcatgaggaaactgaggcctagagaggtttggtaacttctccacagctgggatttaagccaaggtctctgattcccatggcaatattcacagcttgtgcactatatatcactgtttactctttctgaattagtttcccgatttgtaaatggagtcagcacaaaaatttctgtgatggttaatttcatgtgttaatctaactgggccatagaatgcccagctatttgattaaacattatttctgggtgtgtctctgagggtatttattagcatttgaattggtggactgagtaaagcccatagcttacctcagggaaggtgggcatcatccaatcagttgagggcctgaaaagaacaaaaagaaggaggatgattagatttggtttctctctgcctgattgcttgaactgggacatagatcttctcttgtcccctgtgctcctggtttttaggccttcaaacttagatggggatatacaccattgctctccarctctcaggcctttgaatgatcccaccagctttcctggatctgcagcttgcggatgcagatcatgagattttcagcctccataatcacatgagccaatacctcctaacagatctctttctatatatattcctatgagttctgttactctgaagatcactgactaatacaactccttttaggattttggttagctcttaataaatattagcttttgttgttattcgccacaaaaaaggacattaatgagatggaaattcctactttatagggttactgtggaattcctcagctaagaggcctacagcaccagcacaaggctccccacacactggctgctcaa

SEQ ID NO: 679382 - DNA, 1840 bp, Homo sapiens
ttaatagaatgttaggaagtggtttgattaacttacttttacagatgggaagtaaagtaacatctaaggaaacacagatgagtaagtggctaagctgatttgtctgacttcaatgaacagcaatatagaaaaagtgttttagaaagactaatttggcaggggtttactgagtcaataagaagggatggaaaccaagccaaggaggtcaactgggaagtcagtgtacaagtaagatgacaagggcctcaactaggtgggacaaggaaatggctagagatgcaaagacatttagaagaagatgatcagaacttgatggaaatgtgaacatgacttgagaggagaagcatgattttaagtttgtattatattattagtaaagtctggcagaatgagatagatggaggtggtggggagaggagattagaaggtaactgatttagttttaaatattttccttgtataataaaattatataaaacatttcactgaaattggagaatgaataatatgcaaaaaaggtagtttggcatacctatgtatatacccaaaagcattaacatacaggtccacataaaaacttgtacatgaatatttatagcagcattattcataatagccaaaaagtggaaacaatcctaacgtccatcaactgataaatggataaacagaatgtggtatggacttacaatggaatatcactgagtcataaaaagaatgatatactgagactacctggaggacccttgaaaccattatgctcagtaaaagaagccagtcacaaacaaccacacataatgtgattccatttatatagacaatgtaaatttatacgaacagaaagtagactggtggttgcctgggactaggggatttgagggaactgactgtatacagactgaaggtctgtgcccctgaaaatttcctgtgttgaaatcctaattcctaaggtgatggcattaggaactggggcctttgggaggtaattatgtcataaaaggcattagtgcccttataagagagaccctggaaggctcccttgtccctttcaccatatgaagacacagcaagatgacgatcatcaatgaatgaggaaatgaaccctctccagatactggctctgaccttggacttcccagcctccagaactgtgaggaagaactttttgytgtttataagccaatccagttcatggtattttgttagcagcccaagctgagtaagacagactgctaatgggtatggcgtttctttttggggagataaaaatgttctaaaatcgactgtggtggtagtggtacaactctgtgaatatgctaaactgaaaaaaacactgaattgtactatttatattggtgaattgtgtggttatatcaattatattttgatagagctgttaaaaaaggtggttaagaaattatatttccaagcaaacattacggattcaggaggagggtaaaaaaactgctaaatatttggaaaccatccacatacacacaaaaataaattaaaaaaaaaactgctaggaaaactgttaggtctacatatatgaaaggctttaagcatgcggtattaaagtatagtgacaaacattttaccatatattcaatcaagtacttgtctggagacatgtgctccgcaagttttgataatctattgttatgatctgaatctttccaaacacctgatttatcagattagggttaaataataaaccaaaaatgtctatgcatgcaaaaaaaggcactggtatgaaactattatcttatacttcactttggatggtgagatgatgaatgatttgctttctgcatttttctacttttctatactgcgttttatg

SEQ ID NO: 679383 - DNA, 1876 bp, Homo sapiens
tggggaataacaaccatataaaaggcttagcatattagagacttaatacaaatcaatttcttgcattttgcttatcctggatatatcgtgggtttgcttcatattggaaaacaagacagcaacaaagatccatgtttcattcttcagtgacttaaaatattagttgttctggccaggtgtagtggctcacacctgtaatcccagcacttcaggatgctgaggtaggatgattgctggagcccaggagtttgggaccagactgggcaacaaagtgaggccctgtatctacaaaaaataaaaatcgtagccaggcatggtggtgtgcacctgtgatcccagatacacgagaggctgaagcaggaagattgcttgaccttagaaggttgaagctatagtgagccttgtttatgccactgcattccatgtattagttgttctacaaataaaaatattttactttcaaaacatgttttactaaaagtttttcagtaaggatgtaaaaactattaatggtcaactttgactacttccaaaatgctttttttgagtgaaatgttacacctctttgttagttcattgcaataatacttaaatatttaaaattgaaagtcagtaatggtaaatatagaagaattagaggataaaatgagtggagatatggaaaggtacagattgaatataattatttaagtaaaatcctttcctagagaaaatagaaaatagaactttgaggttgaatctcttttaatgtaatgtttttctcgaatccaagtgtttttacactatacaataggagtagaaatttgtcaccactctgtggccaaactcactttttctttctttttttatttttacattaaaaaaaaattttactttaagttccaggatacatgtgcaggatgtgcaggtttgttacataggtaaatgttttattttaaatttaatttaacactttttatttttaagtcatacaactctcatagccagtagttaatattaccttgmaagtttggtatggttgatgaattgcatcctgttaataattgctacagatttttgaataattgcagaccagtttgatggtcctgggttggcataagtacatgaagatttactttttcctgtgagctttcttgggatgaagaaatttagtgtttttttttaatttttaagaaatatttattattttttacatgatttatttcccactgaaaaataaatcccaccgggcataaagtgtatttttttaagtcacagagtaacccaacttgaagctagtttttcagacttaggcagttcatgctgtaagcccgagatctcatggtcacccttgcaagagaaatatctaattgaaaaaaaatatgaagagtattaattttgatagtgctaaaatgacataaagggatctcactgggcttgagatattaagtattaaaattgttaaaggtttaaattgttagtaacttgttattgcatagaaaatgtgccaaatgtcagtaaataaaaaaactttttttaaaataaaaatttacagaaaaattatgacgatactacaaagaggttctgtacaaccccctcccagtttctcttactattaacatcttaaattagtatgttacatttgtcacaattagtgaaccaatattgatacattagtactaactaaagtcagtgttccttttactggagaatggtgttagaaactaaggtctgggcactgtggtatggtggttgctattgagatgttgttatttttaggttctttctcagctgacagagcaaagaaatatatgtgtgtatattaacctatgtgtacacatacatctatgattatttcgatatgtaacatctgtatctttattaagctaaatatgag

SEQ ID NO: 679384 - DNA, 1823 bp, Homo sapiens
ccctgcctttctaaatataactcttctatgtagcatgtaaattaccacagaactcatctcagaaaaaagatcactacttttctttttagaattcaaatttataatatctaattctataggtggcatctggcctttagcatgatatcaccaatgaaaatttaatctgtgttatgaattcccttgtttctagaaaagcttcagcaggaaaatgagaagagaacccataaaaaccataaaacatttcatgaatggtagctttagaaaatcttacaggatttggtagcttttacatttatgacaaagtgatatttttgatgttgttcataattatttcagttcattagcagcattaataagctcccgttttgtacagcttgaagatctttaagacttccttaatgagaaactacctttaagctacggaagacccatcagggtgccaaattccatctggacacagttacaaatacaccactgttgatgagctgaaaattagagcaaccaaacaacagagctttaaaatgttatttcaatgcaaagggacattttcaccatagaaaaatagaagtttgcctctaaataaaaatgattttacaattgcaagagtacttgatttacccctttacatttagttcaaataccaaaaatttcttaaggaatgagaaattccaatgttcctgagaattctgatagcttttagagagttcagttttctgtagcattccattttgcaatcctatacaaatttctaatttataaccagtggtatgtaatgataatttctaatatttattaagtgtttattgggttctaagtgctttaygtctgatatatgtatcacatttaatttatttcatccagtggttcttaactggggacaactttgtacctctctccccaacatatttggcaatctctggagatagtcctggatctccagatctatctgtcacaacctaggatgtatgtggtcctacgagcatccagtgaatagaagctagagatactgctgaacattccacagtacaagggcaacccccacatcaaagaattatccacacccaaatgtcagtagtactgaggtagagagaccctaacttaatctgttcaacaatcctatgaggtgattttttttttttttttgagataaggtcttactctgtcacctaaactggagtgcagtggcatgatcacagctcactgcagcctcgatctcccaggctcaagccatccacctgcctcagcctcccaagtagctgagatcagaagcatgcaccaccacacctggctattttttttatttttttgtagagacaaggtcttactgtgttgcccaggctgatctcaaactcctgagctcaagcaatcctcctgcctcagcttctcaaagttctgggattacaggcatgagccatggcacctgaccaaggtgagtgtatttaacctcattttcaggcaaggaaacaaaagacagaaaagttaagtagcttacttaaggtcacagagctaagtgtggtgccaggattgaaaacctagttctttattgctttagcacaagctatttccactatactctgtcatgttcagagaatgttgatgtccatcagtggattctaaattttgaaggatggagatactgccttattctgtacatctgctttagcacccaagctcttgcttggtgaaaaattaatagtaaacattcatcttttgagcatcttcaaatatcccctttagaatgacattcaattattaggtcagtaaccccaagagaaaacggttgtttgagtgtatatactgtattacaaaataaggggtgaatt

SEQ ID NO: 679385 - DNA, 819 bp, Homo sapiens
cttctttgcttcaatgaacttaggattgcatctctgtgcattttccccacaattttcacagtgaaaataattatgctatccatacacatcattaccatttgtctagatggtaggcaccttaagagcaggaattatgattgatgatgtatcctttcacaaaaatgaaacagaccatgatataccaagagagccttctgtagaaaaacatctttgagagctaggcagaaagtgtgcaggcattttaggtaagaaaggccagataatacccactgcctccatcttttttttcctcttttttgagatggagtcttgctctgtcgcccaggctggagtgcaatggcacsatctcggctcactgcaagctccgcctcccaggttcacaccattctcctgcctcagcctcccgagtagctgggactacaggagcctgccaccatgcccggctaaatttttttgtatttttagtagagatggggtttcaccatgttagcagggatggtctcaatctcctgacctcgtgatccacccgcttcggcctcccaaagtgctgggattacaggcgtgagccaccgcacccgccaccaactgcctacatcttaaatcctcatgcctttttggctcccatcactttagagacaaaatcaacgctacaggcagtgaattcgtgatgggtgtagaaaataatcctatgtcattttcctccttccaggtttaattcagatgtaattaggcaaaaatatctgtcagtgttaaaggtaggagaagagatttctctactaagcaattgtatgctcttgggaaagtccctttgtctttcaa

SEQ ID NO: 679386 - DNA, 819 bp, Homo sapiens
cttctttgcttcaatgaacttaggattgcatctctgtgcattttccccacaattttcacagtgaaaataattatgctatccatacacatcattaccatttgtctagatggtaggcaccttaagagcaggaattatgattgatgatgtatcctttcacaaaaatgaaacagaccatgatataccaagagagccttctgtagaaaaacatctttgagagctaggcagaaagtgtgcaggcattttaggtaagaaaggccagataatacccactgcctccatcttttttttcctcttttttgagatggagtcttgctctgtcgcccaggctggagtgcaatggcacgatctcggctcactgcaagctccgcctcccaggttcacaccattctcctgcctcagcctcccgagtagctgggactacaggmgcctgccaccatgcccggctaaatttttttgtatttttagtagagatggggtttcaccatgttagcagggatggtctcaatctcctgacctcgtgatccacccgcttcggcctcccaaagtgctgggattacaggcgtgagccaccgcacccgccaccaactgcctacatcttaaatcctcatgcctttttggctcccatcactttagagacaaaatcaacgctacaggcagtgaattcgtgatgggtgtagaaaataatcctatgtcattttcctccttccaggtttaattcagatgtaattaggcaaaaatatctgtcagtgttaaaggtaggagaagagatttctctactaagcaattgtatgctcttgggaaagtccctttgtctttcaa

SEQ ID NO: 679387 - DNA, 819 bp, Homo sapiens
cttctttgcttcaatgaacttaggattgcatctctgtgcattttccccacaattttcacagtgaaaataattatgctatccatacacatcattaccatttgtctagatggtaggcaccttaagagcaggaattatgattgatgatgtatcctttcacaaaaatgaaacagaccatgatataccaagagagccttctgtagaaaaacatctttgagagctaggcagaaagtgtgcaggcattttaggtaagaaaggccagataatacccactgcctccatcttttttttcctcttttttgagatggagtcttgctctgtcgcccaggctggagtgcaatggcacgatctcggctcactgcaagctccgcctcccaggttcacaccattctcctgcctcagcctcccgagtagctgggactacaggagcctgccaccatgcccggctaaatttttttgtatttttagtagagatggggtttcaccatgttagcagggatggtctcaatctcctgacctcgtgatccacccgcttcggcctcccaaagtgctgggattacaggcgtgagccaccgcacccgccaccaactgcctacatcttaaatcctcatgcctttttggctcccatcactttagagacaaaatcaacgctacaggcagtgaattcgtgatgggtgyagaaaataatcctatgtcattttcctccttccaggtttaattcagatgtaattaggcaaaaatatctgtcagtgttaaaggtaggagaagagatttctctactaagcaattgtatgctcttgggaaagtccctttgtctttcaa

SEQ ID NO: 679388 - DNA, 1354 bp, Homo sapiens
ctttcaagagaagggaagtagacccactaggaaagtgtctttgtgttaccttgcgctttcattcacatactgattactcagtaacagcatctgaatttgtgaagaatatttaagtatgtgattttttaagaaagctctgtaaggaaaacgtttttcctgttaacaaacattttatagggacctgttgccctgttatagactagaattattctgactttattctatgtaagcctatggtaacttgattcattgataccttccaaggggttagcaggcatcacctaaaatatattggctaccttggtgttgtatcttctttcttccctataactgaaagtgttcaactatctcttctataactatccgtaatacagtttctggtctttttttttttwaaaaaaattatactttaagttctagggtacatgtgtacagcgtgcaggtttgatacataggtatacatgtgccatgttggcttgctgcacccatcaattcatcatttacgttaggtatttctcctaatgctatccctcgccaatcccccaccccccaccgaccccctgacaggccccagtgtgtgagttccccgccctgtgtccaagtgatctcattgttcaattcccacctatgagtgagaacagtttctggtcttttaaaaaaaattttttttggagatagggtctcactgttgtcacccaagctggagtgcagtggtgtcatcacagcttactacagcctcgacttcctgggcttaaatgatcctcccaccacagccacccgagtagctgggactgtaggcgcatgccaccatgcctggctaaatttttaattttttgtagagacaggatcttgctatgctgcctaggctggtctctaactcctgggctcaagcaatcctcctgcctcagcctcccaaagtgctgggattataagcatgagccactacacctggcctccagtcattttgaagtactcttaactgaataatgagccaaaaagacacttgaggaacttctgtaccatgacatagagaagctgaaacaaataagttggggtaggggagacttggatgattttcagtaattcaggtagtagaagaaaacttttattttttaaattctcatacagtaaaatggacatatttggatatacagttctatgaattttaacacatgtatagattaggataaccaccatcataatcaggattcagacagttctgtcaccccaagaaaactcccttgtcctgtccctgtatagtcgtaccctctgccactcgctagcctttagcaaccactggtctgtcttccatcgctatagttttttttttttttttttttttttgagaatgtca

SEQ ID NO: 679389 - DNA, 585 bp, Homo sapiens
ataccaacatctaaaatataataaaattgaataaaccagtgagttttatactatgattgaaataaaatgccactatgttcttaagagtgctagtttaacaggaaatctccaatgcattattatctagactcatctcaaaggctcacttttcatttgcatgggcccttgctatttgtagggtaggaggcagcacctcgttctggtggctgccaccttsatgaggagacactccttgttaacaggatggttagcccacggctcttcccagcccccttttccacacccagtaaattgttttagtttatggccctcagctgcagttgcaatcatcatcaaattccagttttgaatttaaaggtgaataatgaatgcaatgaactttctagaatttatgaagggcagtgatgttcctttttatctaataattctacatgtgtagcctttcagtatgctattctgtggactgaatttacaaattgtcatttgtttaatgaactgttaatataacatgatgactaactgaaaacacatacaatttgctggtattccagaagtctatggatttcgttgttttgtttaaataaa

SEQ ID NO: 679390 - DNA, 647 bp, Homo sapiens
tacttgcctagatcagaggcatggggagtaaatcatgaaaattcctggacagatcaaagctatgggactcaacaaataaatcttatttggtccaagaacactaatcaattgctttattttttaaaataagatttttcctttttcaagaaataatcttttaaaataggtcttacagattttatcttaaaacctctctgaatacaacacataaattaattcatattgcctaatactattacaatttaattattcagtacttctcagagtaaaatcaaatacatgttatattacatattttatatgggggtgggggtaacagagagagagagagagacagcatcagagctagccaaatacctgctcccaaatgaaaaactgaaataggtaggtattatcmtaaattacataataaatgaaaagaatccatgtagtagtataatacattgattctatttattcttcctggtaatcccttcaaagtctatggcttcaacaactacatgaatactaatgacttctaaatctctagcccctgggcaatttctctcctgacctctaacctgtatattctactcctattaagcatctccaattagatatccctctaccacctcaaactcaacatacctaaaacttaattcagcatt

SEQ ID NO: 679391 - DNA, 1127 bp, Homo sapiens
ttatagactaaattctaagcaaaaccctactatcatttggaaatcaggagaactaaaattgatgctgtgttcccacttcagcagccaatcaattcttgatatatcccaaggcagtggttccgacatgaggttaatcattacaatgagctgggaataaagatgtacacagccctcccctagaggttcagatttaatagatttggagtaggacagaaaaattaaatgttcccccattattccctggcaaactttttggctggttctttgaagctcttttctgtattaggaagtaagcaaggagtttttcaatacattttccccttattccttaaagaaggtcaaaactgtattacaggattgcctgtgayttttctctttaaattcagctcaaattacttcaggttctgggccaacatgggattatggctatttagcgtgattctctacgaagtagagaatctttgtctatactgagacataattttgaactatgcttacgcctcttgacagcactataaatttattcaaagcctttctcccttaaaacaccccaattacaattaagtattgatataattactagtttaatgcctatcttctctactagattatacactccaaagcagccaagaataagcctatcttatttacaagtgtaacgtattcagctcttacaatgctcaaaaacaatttgttgaagaaacgctactaatctagggaacctaagtactatgaaagaatatctttaggcagagaaaaaataaatggtaaaaagcacctgatctttaaaaataaaaacagccaccagaaataaaatacaaacggaaggtctttagtcactactttcctacagctctttgccacaggtaaggtggcaaaactgatctgcagtaatttactaattaatgtacctttactttcctcaaattaaaacttttttaaaatgacaatatattgacttgaacaggaaaagacccaagtaccctgaaaaatatccttaagactgtctaggtgcaaagtgttgtgtcatttaagaagcatttaaccacctattaggctctgggactactaaagagtataaactatcttagaagtataattaatatagtagggtctataaaagttaa

SEQ ID NO: 679392 - DNA, 1127 bp, Homo sapiens
ttatagactaaattctaagcaaaaccctactatcatttggaaatcaggagaactaaaattgatgctgtgttcccacttcagcagccaatcaattcttgatatatcccaaggcagtggttccgacatgaggttaatcattacaatgagctgggaataaagatgtacacagccctcccctagaggttcagatttaatagatttggagtaggacagaaaaattaaatgttcccccattattccctggcaaactttttggctggttctttgaagctcttttctgtattaggaagtaagcaaggagtttttcaatacattttccccttattccttaaagaaggtcaaaactgtattacaggattgcctgtgatttttctctttaaattcagctcaaattacttcaggttctgggccaacatgggattatggctatttagcgtgattctctacgaagtagagaatctttgtctatactgagacataattttgaactatgcttacgcctcttgacagcactataaatttattcaaagcctttctcccttaaaacaccccaattacaattaagtattgatataattactagtttaatgcctatcttctctactagattatacactccaaagcagccaagaataagcctatcttatttacaagtgtaacgtattcagctcttayaatgctcaaaaacaatttgttgaagaaacgctactaatctagggaacctaagtactatgaaagaatatctttaggcagagaaaaaataaatggtaaaaagcacctgatctttaaaaataaaaacagccaccagaaataaaatacaaacggaaggtctttagtcactactttcctacagctctttgccacaggtaaggtggcaaaactgatctgcagtaatttactaattaatgtacctttactttcctcaaattaaaacttttttaaaatgacaatatattgacttgaacaggaaaagacccaagtaccctgaaaaatatccttaagactgtctaggtgcaaagtgttgtgtcatttaagaagcatttaaccacctattaggctctgggactactaaagagtataaactatcttagaagtataattaatatagtagggtctataaaagttaa

SEQ ID NO: 679393 - DNA, 640 bp, Homo sapiens
gtggtaaaatgtgaggtaaaatattttctgcattttcagaggatcttttcctacttttatgtaataaacatatttatcataggcttaaaaatgaatatgcaagtctaaattgttctaaccctgaaaaagctttgcttcagatatatcagttgtttgctgaccaggtgtgagtaaaaaaaaaaaaaaaaaaaaaaaaaaaaaaacacacaaaagtatgttttgtgagcaaatgtagtgttatttatattcgaatgcaaagtggtcagtaccagagggtcctcaaaattgcttgctaacagagtaagtttagacaatctttgaaaaattagaattagagtcaagatgaaatgtgcatgtcggtaaaacaaatattaaacatatctgtataaaaacgaaataatccaattgaacctgggaggcggaggttgcagtgagccgagatcacgccactgcactctagcctggcaacagagtaagactctgtctcaaaaaaaaaagaaagaaagaaagaaaaaagaaaagaaagaatcataaaaattgagacccagagagattaagtaatgtgctagwcagtaggaacttggggtcaggacctagattactccctactataattaacagtactactatttgacatgta

SEQ ID NO: 679394 - DNA, 2375 bp, Homo sapiens
tgtatatatatwtttttttccttttttttttttttttttcttgagatggagcctcgctctgttgcccaggctggagtgcagtgatgtggctccagtggctcactggagcctcaaactcctgggctcaagtgatcctcccacctcagcctccctagtagctgggattacaggcatgcaccaccatgcccagctaatcttttttctttttctttttttcctttatttatttatttatttattgagaaggagtctcgctctgtcgcccaggctggagtgcagtggcgcgatctcggctcactgcaaactccgcctcccgggttcacgccattctcctgcctcagcctcccgagtagctgggactacaggcgctcgccaccacacccggctaattttttgtatttttagtagagacggggtttcaccgtgttagccaggatggtctccatgtcctgacctcgtgatccgcccgcctcggcctcccaaagtgctgggattacaggcgtgagccaccgcgcccggccccggctcctgctcctctaaatattagaggcaagcctcgaaccggagctccgggatgcatgccaatctccggttgcgcctgcgcgtcgggctcccgtggggtccacgcatttcctacccggcccccgcgaacaggcgtaaagctctttcttcagtgctcgctctagtgcgcgcgcccggacggcgcctgcgcagagggcaaggaacctggtaccccggtgcggtcccggcgcctgcgcgctgcggactgtggggcttctcggcccgaggcagaggaacagggaagatggcggctgtggtggagaatgtagtgaagctgtgagtggtcgtttctttctctcctagggcggcaggttttgtaaagggcctgggagtagggggcggtgggggaagggactaggcggagagagggacatccccgggaaagccatgttgcgactcctggtggggagggcaacaggagactccggagaagacgttgcgcttctttggaaacttgtggaggccctggtgggggcacactggagccccgacgggcggcatccctgcggggctgtgtggcctcagcgttcctcggggctgacggtttccagagcatggcgccctgcctgcacgcgagactcaccgtcccggtcctctcccgagacgcctcagtccggaggagcggggccgaggcccgggcggccctacggctggcccgccgcccaccccgccccgtcccgtcccgttcgctgcagcaacaggctcggcggcccctgcggagtgcactgcggggctggctgtttcagttccaggcagccccgtgatgtttgggaggatcttgggtggcaggtacctaagactacaaatattcttgggaagaatttatcgaggagcggatccagaagggaaggaacttcaggggagtgggccttggccccgtccagtagcagccatcaaaaacctgcaactggaccgaagccgttcaggacagcttagcctaaaggggcatctaggtgggcattcttcctattatacgataccattgtgctggtcagatttcaagcaaagttaaagttaatagctgttggggccatggacgctggcctatgaactgcttcctgtgagttaaagatgctttgggacttgatttattcctacagaagaatcagaatgagttttagattgggttaatgcatggtgggcgaatagagcttcttttaatgggtatgttgggcttggtgcaagggtgggaaaattgagtggtgtctagctgtccagtcagggtttttgcattttgactggatgacgaggtaaaggttcggtaactcttctaagggactcacagcttctcatctgtctttgtcgtggcctgagccccactcttcctaagagcctttttaaagagtaagttgcttctccctcctgcctgaagccttttctttgagaatgctttcccacttccattaagctaagtgcctttcctcctcttgtggtttgtttttttttttttttaagttgctttctgctctatcctgctgtctctttcagccacccctcctcccaacactattgtctttctctctgatctgcccactccagtttccccagctctttcttcaggctgacatttttctcaatttagaaatgacactgttgatctaccatttatccagttatccttcctgactcagatgttctttctttgtttccctgcgtctttgttgacttccctcatcccattgtaaggggatgttttacacaggtttctccaaaaataaaaaggaagattctcattgtactgggggagtatcagacttgcctaggttttgggagttaaacgtagtgaggttcttcgtgttggaagattttcctca

SEQ ID NO: 679395 - DNA, 1145 bp, Homo sapiens
tccaggcaggagccttgcctctcaggtggcgggctctgcgaccctgcgaggtgagagcacagcgacgtctggcccgggcctccgtccccggctgggggtgcgccttgccctgcctgggcatccaggtcgacccccggttcttgaccgtagcaacccgcacccctcccaccagcgcccggtctgcactcttggcccctccaggcagcgccgctcaaccttgcggacccagcctgggatcccttaccgtactcaccgagagcttgaggagacctccagccccccatccctggctcccggtaactgctgtttctctttgcctttgcagatggacgggacagaaggcagtgccgggcagcccggccccgctgagcgatcccaccgaagcagcgtgtcctccgtgggagcccgaggtgggtcccacccgcatctcctcttccacaccctcctgggaccccagccctggagaagtagctctggcttgtcttctttttcattaaagataatttatgtatcgactaagaaataataaggtacattcagatgtggaaaactcacagaagtcagaggctctgtcactagtttactggccaggttgggtcctcgctctcatttgtaaaatgagcttgtttaacatagctgtgaaattcaaatgagattatatgaatgaaaagtgaaggctgatgtggttcatgcttgtaatcccagaactttgggaggccaaggtgggcagaccacatgtgcccaggagttcgagaccagcctgggcaacatagacaaaaaagaaagtgacacgttcactttctttgtgtcatttctttttttctttctttcctttctttctttctttgacagagtctccctctgtcgcccaggctggagtgcagtggtgcgatctcagctcactgcaagccccgccttcggggttcacgccattctcctgcctcagcctcccgagtagctaggactacaggcgcccgccaccacgcctggctaattttttgyatttttagtagagacggggtttcatcgtgttagccaggatggtctcgatctcctgacctcgtgatctgcctgcctcagcctctcaaagtgctgggattacaggcgtgagccaccacacccggctgtgtcctttctttctccca

SEQ ID NO: 679396 - DNA, 1591 bp, Homo sapiens
tttccattctggttacttgaaccggggtcctttttcatcctctacctcaggggccagagcttcctcatcaccctgcaccccctagcaagggaggtgcccgctacacggtccaaagtcctctccagacattcgggccctgcccgccttgctggagggctcaggagttcaccaggtttgcttccagaagagccaggctggggatgcctgcttgcaaatgcagcaaataaaaaataaataaataaataaaaatcacctttctccccacccccacccaaatgtaaaatgagccgacagcctgtccctcggctatgtcagatactgctttccgcacaatatcttggttttacattattttgcaacggcctcttcccacttaatccatcctgaacacacttcttgaatgttctaccccggcagggatgcgcattctcaggaaacacgtcccctcgccaggcccctgggaagagtcaaaaccacgatgcctgcccctgaagcgcccgcgcggctccacggggctccatgttgtcacccactagctcctggacgctatcagcccgcagcagggtttcctggccagagaaaccgcctgttggggtgcggagcgttccacgtcccctcgcagcaccccgctggccttctgggccgccccgcccccaacccgcgcccgggcgctgacgtcatcggccgagcccgactcggaaccaccgcccgaaagtcacgcgcgcctcccggcgggacgcgccctctgcagagatccctccgccgccgcctggaattttccagatgtcctgccggcccttctttcgggcctcggctgggcgtggtgacctcaagcgaccccggcggctcccgtcgcccactcaagagggcgcccccgcccgccacgcccccagcccctctcggggaagcgcgtcccccgcccgacctcaacaacatccgggaagaaaaggggtcttcttcctcatggcattcgcctcccaaatgtcaccttgagcgctgtccgcgatcccaaaaagcactgttaaagagaagcggggatacactggggtccttgcgtgggggccgcctgggagaccatgcaccgcccgggagtctctccgggcagggtcggggagggacttttttgccggtggccgtggaggaatcgtcccgttgagcaatgaccccggtgacgcggctgagggctataaaagcaaaagttgtggcaagtccagccggagttagcgacagggagggatgcgcgcctgggtgtagttgtgggggaggaagtggctagctcagggcttcaggggacagacagggagagatgactgagttagatgagackagggggcgggctgggggtgcgagaaggaagcttggcaaggagactaggtctagggggaccacagtggggcaggctgcatggaaaatatccgcagggtcccccaggcagaacagccacgctccaggccaggctgtccctactgcctggtggagggggaacttgacctctgggagggcgccgctcttgcatagctgagcgagcccgggtgcgctggtctgtgtggaaggaggaaggcagggagaggtagaaggggtggaggagtca

SEQ ID NO: 679397 - DNA, 1870 bp, Homo sapiens
tgcaacattgttcatcttgctaccataatattttaaaacattataaatatcagagcagtgctcacatatttcctggtctgttaactgataggcattttcttatatacaaaaaaagttaagatcttaacataaaatgtaggcaagacatacatcttctggacataaaaaacattttagctaagtgaaaagtctatcaaaatttcacctagcttcctcctgagctctgaacataagtctgcaactttcacaaagacctttaaaacagctaacatttctgcaaacttcataaacaatttttaaaaatgtattaaacacatgaataacagaaatttaacatgatgaaaatataataggcaaaaagatttttatgtttaacacatcattgctaaaaaatgatgtgttaaataattctaatcataaaaatatgactacctgtcttttttttagatcaatgatttagactttactaatttggaattagagaagatttgggctgagtcagggtttatgtttytatcatccattcaaaaaggaagtttactcagtaaattcatatgatgaaaacattttcaggaaaaaaaatatttaacccattcaaaagaaactattttgtgaaatctaagaatgcccatttccatataaataaatctgagctttgtgtaaaactaattataaatctttttttcactattcactaaagcaggtgtacagaaatctaaccaaaaatgttcaaaattttaggtggtgtttgagctattatagatatttgaaaataatagaactacaatttaaaatatttataataaagacattttactaattccaactgatctttccccaccttccctccagatttaacattgttctgtagttaaggatgggaataggtgagaagaggctagttagaaagtcagagttgacagcttaagaattaatgagatcgcgccactgcactccagcctgggcgacagagcgagactccgtctcaaaaaaaaaaaaaaaaaaaaaaaaaaaaaaagaattaatgagtaatttttttcataaaccgggcatgaaactgttacatgcaattgggcagagagattatatttacattcgcctacaatcgtttttcttattcctaagaaaaatttaaatatgataagataggtcattttctccatttggtttgctccaaggaggttgttgatttctggcaaatagatcttaactattattatttcattagatagtaatttctaaaaattgagaattatttttcctcttcaaaccaactacatcttgcacaatgctctggatattgtaggagtcccacagaagttcatcaaattcaattgaaagactgaaattattcagtaatcttagattcttcaataccaaagcattaagataaaatcagacaagagcactgaattctgaactaattcaataaaagtcatcaattatgaagcactttcactaacacatggctacatatgggcacctaatttaaaaatggcttagttattaaaggacaaaaataacatgaatgtcacagaattttcaaaggagctttataatatgtgtaacttgctagaattggggttatcaaatttaatatgaacagctctcatcaaatttgaacttaatgaatgcagttgtgaaacaggcaaatccaatacactgcgaatagtctaactcttaattcattccacagatatgatttacccctaatagccagaagcatcacttctaatagctcacgttatggcagaatggattatgttgtattcattctacctcctggaaggaagctagtatccataatagtaccattcaactgtgtgttataaagcacaagccagcagaacttttataacataaaatgtga

SEQ ID NO: 679398 - DNA, 643 bp, Homo sapiens
tgttaagacataccttgcttccccttccccttctgccatgattgtaaatttcctgaggcctccccacccatgcagaacagtgagtcaattaaacctcttttgttcataaattacccagtctcaggtagtatctttatagcagtgtgaaaacggactgatacagagactaagcaaaaggcttatactatagtatctgccattacctcttagtgatatctgaactcagacctcaaaaaacttcagctccagaatcatcatggtagactttcttgtccaactcaaaagcttagagtatccatatagattaaatttgaaaataattccataatttttccaggtgtatctaatatactttgagtgacttargaataatccaattctttgcttagagcagatcccatcattcaaactacatgtttgacagctgctgggtggtagctggatgttaagtgagagaggtgagttagcatgagataattctgtttcttagagtatttgcctgtgattaagttgacttttttcccctgtatttagaaactaaaagagagcttcaggaatggcttaattaattcttcaatcatgtcaattttatcctccactagataggcattaaaaatttcaatttaataaaagtcttttctgt

SEQ ID NO: 679399 - DNA, 992 bp, Homo sapiens
ggaaaaagcctgctggactactgcatgtactatatgcctcttctgtaagaaatcacctttaaaaagaaaagtttcaaagtttatccaatttggatggagaacggcattgcaagataagtagtggctttaaagcatgtccatacttctttgacactcctcccatcaacaggggaagtctacttcttttccccttgagcatgagctattcaactggcttgctgccaacaaacagaatgaggaggaagtgatactgtgtgacttccaaggctaggtcataaaaaattatgcaggtcttgagatgcttactcttggaagtcagccaccatgctataaggaagcccaagccacataaagaagacacataggtgttctggctgacagccccagctgagatctagccaagagccagcatccagacatatgagtgagaaagccactcagctgcctccagccccagccactatctgatggctaatgcattacagatcctgagtaagaactggccagttgagcccatcaactcccagaaccacgagaagaaacaatmatcaactattgttgttttacgccactaagtatggatgactgttacacagcaatagctggaacaaatgcttctggctaatttgccctttacagtaatcactccagtcgtcttatcttccatagagaaatagttctgcttatgctggagctaagggctggctcccttcaaccagattactctctacaacataggacaaaaatgaatataagtgcaatggactctgtaggcctcagagctgctgggttcacctcttagagggtaaaaggagagccatggtcttagtaaagtccccagaacagctaaagttcagtggccactgagaatcctatgtaggcactgaaagaacataataagcgtatatgttatcagcacagtccccaacttgccctttgactagaaaaggcccctctcctgccataccagctaaaggttcaacatctaactc

SEQ ID NO: 679400 - DNA, 1384 bp, Homo sapiens
gtctggcgggcattgtgggcagcagtgggctttgggccaaattttaagtttgaaaatcaagattccctcttttcaaggggccgccggactgagcagatacaggcaccgtgaaaagagcgtgccatgttcagattcaggaaacaaggatggtttctgttcagttcctccatcatccttcaggtcatgckattcccatttccctctgtggaccaaacaattcagtggggtttctgccttttaaacatttcattatcaacatatcatccttttagcctccagaaagcattttaacatggagattctggcttaagacttttgtgggtctgtctctctctcttttccttgaaacggtctcactttgtcacccaggctggagtgcagtggcatgatcacagctcactgcagcctgaccttctaggctctagcaatcctcccacctcagcctcccaagtacttgagactgcaggcactcaccaccataactgcctttttttttttttttttttttttttggtagatatgaggcttcaccatgttgcccaggctggtcttaaactcctgggctcaagtgatccccccctttcggcctctcaaagtgctgggattattggcttcagccaccatgcccagccaaggaccttgtctcttgtgacgtactccagaacaaaacatcactgcaaaaacacaccaaggcatgagttttagtactaagtcccacttatccaccatacgctatgtgccaggcacaacgctaagtgcttctatggacgagcttcccttaatctcagcagcaacaaccccaggcaatggagcctgttgacagatccatttgccactgaagacagtaaggctcagagagggtaagtggcttgtgccatgtcagccagctaaggaggggcagaaccaggatgcaaaccccagccgcctggctccagaatcgcgttccaaaggtctcactacacttggtcactccaccgcattctggtatcctggtctttggcagagtccacgtaaaagagggaggtagagggagtgagagggacttcatgcaataaagtttcccggcgttacactgtcaccgtaattgtgtccccaaccaggacctctcccttctcatcctttccgtgatcggccctggaaaaccttccaaagaactgtcctccttctcccgggatctcagagaaaattcacctgagttcagtgtccaggtgacccaagctctgaatgcggtaacgtggacggggagaagaggatgtcaccatgagcaagcctcccagacagcatccaggagcaaccccaagactgggcaggagtgctctgatgccgcccatggcgaggagggctgcccatgctgcctaaatgggttcagaatgaagaccgccct

SEQ ID NO: 679401 - DNA, 1384 bp, Homo sapiens
gtctggcgggcattgtgggcagcagtgggctttgggccaaattttaagtttgaaaatcaagattccctcttttcaaggggccgccggactgagcagatacaggcaccgtgaaaagagcgtgccatgttcagattcaggaaacaaggatggtttctgttcagttcctccatcatccttcaggtcatgcgattcccatttccctctgtggaccaaacaattcagtggggtttctgccttttaaacatttcattatcaacatatcatccttttagcctccagaaagcattttaacatggagattctggcttaagacttttgtgggtctgtctctctctcttttccttgaaacggtctcactttgtcacccaggctggagtgcagtggcatgatcacagctcactgcagcctgaccttctaggctctagcaatcctcccacctcagcctcccaagtacttgagactgcaggcactcaccaccataactgcctttttttttttttttttttttttttggtagatatgaggcttcaccatgttgcccaggctrgtcttaaactcctgggctcaagtgatccccccctttcggcctctcaaagtgctgggattattggcttcagccaccatgcccagccaaggaccttgtctcttgtgacgtactccagaacaaaacatcactgcaaaaacacaccaaggcatgagttttagtactaagtcccacttatccaccatacgctatgtgccaggcacaacgctaagtgcttctatggacgagcttcccttaatctcagcagcaacaaccccaggcaatggagcctgttgacagatccatttgccactgaagacagtaaggctcagagagggtaagtggcttgtgccatgtcagccagctaaggaggggcagaaccaggatgcaaaccccagccgcctggctccagaatcgcgttccaaaggtctcactacacttggtcactccaccgcattctggtatcctggtctttggcagagtccacgtaaaagagggaggtagagggagtgagagggacttcatgcaataaagtttcccggcgttacactgtcaccgtaattgtgtccccaaccaggacctctcccttctcatcctttccgtgatcggccctggaaaaccttccaaagaactgtcctccttctcccgggatctcagagaaaattcacctgagttcagtgtccaggtgacccaagctctgaatgcggtaacgtggacggggagaagaggatgtcaccatgagcaagcctcccagacagcatccaggagcaaccccaagactgggcaggagtgctctgatgccgcccatggcgaggagggctgcccatgctgcctaaatgggttcagaatgaagaccgccct

SEQ ID NO: 679402 - DNA, 1384 bp, Homo sapiens
gtctggcgggcattgtgggcagcagtgggctttgggccaaattttaagtttgaaaatcaagattccctcttttcaaggggccgccggactgagcagatacaggcaccgtgaaaagagcgtgccatgttcagattcaggaaacaaggatggtttctgttcagttcctccatcatccttcaggtcatgcgattcccatttccctctgtggaccaaacaattcagtggggtttctgccttttaaacatttcattatcaacatatcatccttttagcctccagaaagcattttaacatggagattctggcttaagacttttgtgggtctgtctctctctcttttccttgaaacggtctcactttgtcacccaggctggagtgcagtggcatgatcacagctcactgcagcctgaccttctaggctctagcaatcctcccacctcagcctcccaagtacttgagactgcaggcactcaccaccataactgcctttttttttttttttttttttttttggtagatatgaggcttcaccatgttgcccaggctggtcttaaactcctgggctcaagygatccccccctttcggcctctcaaagtgctgggattattggcttcagccaccatgcccagccaaggaccttgtctcttgtgacgtactccagaacaaaacatcactgcaaaaacacaccaaggcatgagttttagtactaagtcccacttatccaccatacgctatgtgccaggcacaacgctaagtgcttctatggacgagcttcccttaatctcagcagcaacaaccccaggcaatggagcctgttgacagatccatttgccactgaagacagtaaggctcagagagggtaagtggcttgtgccatgtcagccagctaaggaggggcagaaccaggatgcaaaccccagccgcctggctccagaatcgcgttccaaaggtctcactacacttggtcactccaccgcattctggtatcctggtctttggcagagtccacgtaaaagagggaggtagagggagtgagagggacttcatgcaataaagtttcccggcgttacactgtcaccgtaattgtgtccccaaccaggacctctcccttctcatcctttccgtgatcggccctggaaaaccttccaaagaactgtcctccttctcccgggatctcagagaaaattcacctgagttcagtgtccaggtgacccaagctctgaatgcggtaacgtggacggggagaagaggatgtcaccatgagcaagcctcccagacagcatccaggagcaaccccaagactgggcaggagtgctctgatgccgcccatggcgaggagggctgcccatgctgcctaaatgggttcagaatgaagaccgccct

SEQ ID NO: 679403 - DNA, 1384 bp, Homo sapiens
gtctggcgggcattgtgggcagcagtgggctttgggccaaattttaagtttgaaaatcaagattccctcttttcaaggggccgccggactgagcagatacaggcaccgtgaaaagagcgtgccatgttcagattcaggaaacaaggatggtttctgttcagttcctccatcatccttcaggtcatgcgattcccatttccctctgtggaccaaacaattcagtggggtttctgccttttaaacatttcattatcaacatatcatccttttagcctccagaaagcattttaacatggagattctggcttaagacttttgtgggtctgtctctctctcttttccttgaaacggtctcactttgtcacccaggctggagtgcagtggcatgatcacagctcactgcagcctgaccttctaggctctagcaatcctcccacctcagcctcccaagtacttgagactgcaggcactcaccaccataactgcctttttttttttttttttttttttttggtagatatgaggcttcaccatgttgcccaggctggtcttaaactcctgggctcaagtgatccycccctttcggcctctcaaagtgctgggattattggcttcagccaccatgcccagccaaggaccttgtctcttgtgacgtactccagaacaaaacatcactgcaaaaacacaccaaggcatgagttttagtactaagtcccacttatccaccatacgctatgtgccaggcacaacgctaagtgcttctatggacgagcttcccttaatctcagcagcaacaaccccaggcaatggagcctgttgacagatccatttgccactgaagacagtaaggctcagagagggtaagtggcttgtgccatgtcagccagctaaggaggggcagaaccaggatgcaaaccccagccgcctggctccagaatcgcgttccaaaggtctcactacacttggtcactccaccgcattctggtatcctggtctttggcagagtccacgtaaaagagggaggtagagggagtgagagggacttcatgcaataaagtttcccggcgttacactgtcaccgtaattgtgtccccaaccaggacctctcccttctcatcctttccgtgatcggccctggaaaaccttccaaagaactgtcctccttctcccgggatctcagagaaaattcacctgagttcagtgtccaggtgacccaagctctgaatgcggtaacgtggacggggagaagaggatgtcaccatgagcaagcctcccagacagcatccaggagcaaccccaagactgggcaggagtgctctgatgccgcccatggcgaggagggctgcccatgctgcctaaatgggttcagaatgaagaccgccct

SEQ ID NO: 679404 - DNA, 583 bp, Homo sapiens
tgtcccctaaaagttcacatgctggaaacttgtaacagtattaagtggtggggcctctaggaggtgattagtttccaccctcttgaatggattaatgccaatatcactggaatgggtttgttttcacaagagtgggctcctgataaaaggataagtttggcccccaatttctctctgtcttgtgtacttgacttgcccttccaccatggtataaatgcagcaagaaggcccttaccaggtgcctgtgccgtgctgttggacttcgcagcctctggaaccatgagccaaatacatttctgttccttaaaattattcagtttgtgatatgctgttatacagcagaaaacagactaatgcaggccattatcttgaacatgatgctattgctcctctgtctttagaagaggagaaacccctgcccaactggtcctggctccttccccatgggcttgcttgcttttctttctctctctctttctttctttctttttyttagggtctttctctgtcacccagcttggagtgcagtggtgtgattatggctcactgcagcctcaccctcccaggctccagcaatcttcct

SEQ ID NO: 679405 - DNA, 583 bp, Homo sapiens
tgtcccctaaaagttcacatgctggaaacttgtaacagtattaagtggtggggcctctaggaggtgattagtttccaccctcttgaatggattaatgccaatatcactggaatgggtttgttttcacaagagtgggctcctgataaaaggataagtttggcccccaatttctctctgtcttgtgtacttgacttgcccttccaccatggtataaatgcagcaagaaggcccttaccaggtgcctgtgccgtgctgttggacttcgcagcctctggaaccatgagccaaatacatttctgttccttaaaattattcagtttgtgatatgctgttatacagcagaaaacagactaatgcaggccattatcttgaacatgatgctattgctcctctgtctttagaagaggagaaacccctgcccaactggtcctggctccttccccatgggcttgcttgcttttctttctctctctctttctttctttctttttcttagggtcyttctctgtcacccagcttggagtgcagtggtgtgattatggctcactgcagcctcaccctcccaggctccagcaatcttcct

SEQ ID NO: 679406 - DNA, 612 bp, Homo sapiens
caagggttggggcataagcaaaggaacagcaggtacagcccgttcacataagccagagaacagcaggtgcagcccgttctcataagccagagaacagcaggtgcagccagttctaggcaggattggggagcacacaggccacatcctcactgctgtgataacaagtcaggagcttccacttcaacctctgattgaccctgggccaatcctccacttcagcctctgattggtcccaggctaatccttcatagggtgtaaccaattggaggcctctaaagggcatctggggtgttctttataaaaaccctgagaagcattgcaattgggaggtccttgagccgtttgcttgggcccgctcccaccckgtgggttgcacgttcgcttcaatcaatctgtgcctttggtaagctgttttcttgttgctttgtctttttttttttttttttttttagtggagtttcactctcattgcccaggctagagtgcaatggcacagtctgggctcactccaaactctgcctcctgggttcaagcgattctcctgcctctgcctcccaagtagctgggattacaggtaccggccaccacgcccagctaatttttttgtatttt

SEQ ID NO: 679407 - DNA, 3698 bp, Homo sapiens
tccgttataaccacaaatacccaccttagcatcatcccgagcaattgtgtctgaggaatcacaggctcgtgctggttggattggctcagataaacattgactggctaatgaccagaatgtacaaagttcacccactcccacctggaaccatctagcccctggccagtgttgcgtgggtgaaacaccctgaaaaaagatgatggaaaagacactggcctggaagtctgagtacttgtgtgtgaccatggacaagtctctctgcttctctgagcctcaaaagtgagaatacggcctttgttggattgctatgcaaatgacatgagaacatgttctttgtctgtataaatgttaataaatattaatataagcattaatagctaacccctattaagcatctactgtgctaaatacttcactgtctcattaatccttacaaccctatggggtaaagatgatcctacacccatcatatgagtgatgaacttgaggcccaaagtctgtagcaaatttgctgctgttaaatggcctctgcgctgggatgccagctcagagcatatactcctagccacgacagcagtccctctttatccttggggagacattccaagacacttagtggaatgtctgagagggaggatagtatcaaaccctaggtagactatgtttttttctctacctacatgcctatgataaaatttaatttataaattaggcacagtaagagattaacagtgataactaataataaaatagaacaattaaaacaatatcctgtaatgacagttatgggaatatggtctctcctctctctcagaatatcttactgtactgtaatgtgggtaactgaggtcatggaagatgaagcctcggataagcagggactgctatactatattatcctaatgctatacagtacatactatgctgtgtataggacttctttgtcattaacccatttctctctctttttttttttttaattttattttttgagacagggtctcactctgtcacccaggctggagtgcagtgacgcgatcttggttcactgcaacctccgcctcccgagtttaagcgattcttgtacctcagcctctcgagtagctgggattacaggcatgtgccgccacacccggctaatttttgtattttagtagtggcagggtttcgccatgttgctcaggctggtctcgaagtcctggcctcgagtgatccacctgcctcggactctcagagtactgggattacaggcatgagccactgcgcccagccattattgacccatttcaaggtgttagtttagtgcttctctgatatctgcctgttgggtacattattagacaaaaatcgtttaaagtgaggagaactggaaagaagagggtgctcagctcctccagggtggatcccttttaagatcgctcagcagctacagcaaggtcttcagcactcagttcctgtctgtttgtcccatccgtggctgggacaggcctggacttccccatagctctctcccgcccgcttcaaatcagggcaagatcagtatgtggtgatgggggccttggaggcaggggcacgatgtgtgagactgataacattcttgcagcctgagacatgggctttagagcagtttcgaaactctgtgttctctctcttcacaagtacaatgcgtttccctggcatttacaggccaggacctgggagaacgccgtgtcgtcttaaacctcagaaattgccaagtgacagtgccaagggacgggtttactggtttcccctccatcggactgagtgcagctgcccttccccaccctcctgcagttagggaggcgtgtccctcttttgactggctgagtcagaaatcagccaggacttagcgctttttgatttgaacagaaacggtggggggaaaaaaacccaaaccttgtggtattttataattcgggaaagttggtctagagagggccagcgaattggctgtgggaccctgttagggaaaggtctgggcctcctgactcctgctttctcttttcctgagccagaggagccccaggcctgtgcatgaaacatacttgacaaaactaaatttttactgaatttccaccccttgggtgctgactaacaccacttccccacatataactctgcgtccgcataattaacatataatttgatacctggaaattcatgcagggtggagctggaatggattactcagcttttggcaattcttcctgggctgtagaactctgtgtgctgcatcttgcttctcctgttactgctaactcrtttggcccatattcttcccacttatttcttccttctgccctggaaagatgagtgaaataagtatgtggtatgtttttgtcattgaagcaactgaaggattgttgacttatccatgtgcactgtccacttacctagtatgcgtgttcttagcctgcttctcgcattggctggtggagtttgatagtgccatggtttcttttttttttttttgagacagagtgtctgtcgcccaggctggagtgcagtgacacaatcttggcccactgcaacttccacctcctgggttcaagcaattctcctgcctcagcctcctgagtatcttggattactgtcatgcagcaccacgcctggctaatatttgtatttttagtagagacagggtttcaccttggcctggctggtctcaaactcctgacctcaggtgatccacccgcttcggcctcccaaggtgctggtattatagtcatgaacagccgcacctggctctgttttaatttttttttttttttaatttgagacagcgtcttgctgtcttgcccaggccagagtgcagtgatgtgatcttggctcaccgcagcctcaaacttctgggctaagtgatcctcttgccttggcctctcttagctgagaccacaggtgtgcaccaccacttcctactaatatttgtattttttgtagagatggggtctccctatgttgtccaggctggtctcaaactcaggggctcctgtgatcctcccactttggcctcccaaagtgctggaattgtaagtgtgatctctgtgcctagccagtaccgtagtttatttcattgcctgcttcctcatcaagatgatgccatcagtattaaaaaatgcagtcagtaattatcagtgaagaataaagatgaaaaattatgatgattttgcaatttaaatttatagcatatgctgatggttataagttttgttggagaaattatttattgtgttgacacatgtattaatgtgggggaatcatggctcttaatgtacatgatacctgcctttatagattgaaagactgggtgaaccctgacctgttgcagggacccagttagtgcaattgaattccaatcaggatcacttggaaatgaatccagaaatccgcgttatttgaaaagaagtgatttagagcagtgcagagggaagattgtatatggtgtgagctcagaggaaggctggagtgaatcccttaatcagaaatgtttggcgggttccagcctgcatatcgacccctcgatggccacagcttcctgatccagtggctggagaaggatcttgggtccgtgtaccagctaagcatgcacccttcagtcagctgcaggaaaggtgggagcgggaagagtagctccgggactggctggctgttccctgccctagactgtgcttatgagc

SEQ ID NO: 679408 - DNA, 985 bp, Homo sapiens
ctgcttgtgagagtttggcctgaccctcaggaaggtgttggtaccaactggttctctcctttaccttcctagacctctgcctcttcatctatccaggagagagagggagaagaacatctgtcctagagggttaggtgaggaccagagtctgggcatggtaagcacctagcacagtgcctggcacatagtaggcactcaataaatggtaagtgccttcaggatcatctctatgactggctggaggacatctttacaactgttgtatagtggcctccycttttcttgtttgttgacatttggaaggggatcccaaggggctgtggagattggttgtaaggatgtttattctgcatccctggaagactttgctgtaatccatagagaagcaccgaggtgccttgttggttcagagtccaacgatgtctcccacccccggccgatgctctcctaggccagcagcgtggcgctggtcttttatttttctgggaggagagcacttccaatcctctgggcagtgtggacttagcccagaggaaggcgagacctcggtcagggagtgggggaaggggtcctgggtgtggctgggaagttgaggcttatggcctgcaagttttcttctaatggaatttcccatcacttactgccctgctgatttctgatcaatgaaaatgaaattgcatcacctcctcagaggctccacgtatgcctgctgcttccagctgtgtcagttccggtaaaataatctcatcaggcgtgtgagagggtaataggaaataaaaataaaaacccacaattaacaagaggccttgtagctgagtaacactttccatcccagagcagaaagggctgggtcgtgaatgctcgggaaagagttccttagaaagaaaaaaaatcccaggctgggtgcggtggctcacgcctgtaatcccagcactctgggaggatgaggcgggcaggtcacctgaggtcaggagtttgagaccat

SEQ ID NO: 679409 - DNA, 1755 bp, Homo sapiens
ttatctcttttacgagatgtttttattttattaacagcgtaataaccagaaggtggagcttcactcccctgcccttaagtgtgggctgggcttagtgactctttttaatgagtaaagtctggagaaagaaaagtgttaacttacccttggagaaacccagcagatgtcaccttaacaaagtgatcaaggtcaacatcaccagtgatgggtcatgttgatgtcacatagcccctgatgtgatacggtggatgggaagggtccttccccttggtggcattctctccagaaatccataatctcaatctaattgtgagaaaacatcagacaaacccacactgaggggtcctctactgacctgcccctgtcagaagcgcccaggtctttcaggacaaggaaagacagattggaggcgatggaggagaatgacatttcagtgctatgcagggacatggtttggatcctggaccagagaaaggccttgagtagaaaaactggtggcatctgaataaagtctgtagcttggtcatagtattgtagcaatgctcatttctttgctttgacagtgtcccagctgttaagatggaagatgttgacattagaggcagctgtgtgaagggcacatgggaactcattgtatctttacaactcttctataaatctaatgttatttcagacacaaaaatttcaaaatcagaattcaaaaaccaggcctgttttacaaatctttaattagggctgggcgtggtggctcacgcctgtaatcccaacactttcggaggctgaggtaggcggatcatgaggtcaggagattgagaccattctggccaacgtggtgaaaccccgtctctactaaaaatacaaaaattagccaggtgtggtggtgtgtgcttatagtcccagctacttgggagactgaggccgggaagtcgcttgaacctgggaggcagaggttgcaatgagctgagatggccccactgcactctaggctggcgacagagggagactctgtctaaaaaataataataaaataataataaaaatctttaattcatttagaagaaaaggaagtaaaagtgcaagccccatccctgctccccattcgctcctatcctccctcccaaggacagcaacccttaggagctgctgtttctcccagacctctaagtgcacgtaaacagttttattcaaagtcttaaaaagcctttttgactcccattctgatcatacgccttagaagcttccaaccttttagctttcctgcaacaattttccaaataagtttcttttcagatgtattttggctcttccataagacttatttaagagcagcgtttggccagcgcttaatgttatttccactcatacctccaacccacccaggtcccatttatattgccactgcccttgccagtctttctaaagcctcccaaattagcatcatctgagaatttaattaacttgctgtttactaaccctctcctttcaagataattaatgaggatgttaagtgacactgggcctgacattgctcccagcggcacctgagcaggcacctccccgcgcggagcctggcagggtcgagctcctgcctttgtctacccttcagccagcgtctgggctgcatggccatgctgggtacaggcagcratggcacatgtttgctgaaaatcagcctttcctgcctcgccttttatcctcccgttttctgctttgttaattaaaaagcctcattttacttagaatggaatgcttatt

SEQ ID NO: 679410 - DNA, 1524 bp, Homo sapiens
atgggggtggtgggtaagaggcactcaattccctggccattaaataagccatgcctgcaagaaatgcaagcatggggtggggtggggggattgttcagccgcgcatccctccgttatcgcacgcctgcgtgtctgcgtgtcaacaatgcacgtgccaccgtgggcaccgtctcccggcgctggcccaggagggctatgtgcagatgggagccaggtctcagttgcccactcacagccctgctcccaagcccgccgcccgcccatcgcagggtttccttttttcctggctccggctggcaagcaagaagtctctaccattcccccaagttatgcccttggaaatccctaaagcgaacacagcccgaccgagggtctcttgccctcaagttgttcactttgttgcgctgtgatgaagttagttctctctcttcttcactcgccccaggctttacatgtggtgcaaacttctagtacctaccaggtcaccaaaagggaagtcaggcgctagccagcggtgcaggcggtgtggaacccgggagagccaccggctccgcgcctcctgccccaaggttggatttcagatttccattgcaaaggagctgaggaaactgggaatctgactcaaaccctggaactgactaattgccctgcattttcacaatgcgccatgtattcaaaatgaagggcaggctttatcatttggaactctttcaaggatccgggcgctccaagtttggggctcattctttaaaggttttacttctgagaaacaggaaaaaagaaagaatgaaacatacccacaatccatgtactggagatgacactcaagagtaggttgtggtctcttttgaatcgggagttcaaaagaaaaaaaaaaaaggcttgttccctcccccttgccccagggatgaaacctctctagatttgagcggccaatttggtttgatttccgcggtttggaggctctggcagggttaggggcggcagggctcagaagacagacctcagctgccttctagaccagctggtctgctcttggccctggaagcagaagctaaaatcggggtgattcaccctcaccctggtagctggagtgagagtcaggggagggcgtcgcggaacctccctggccgcgccccacactccctgtccgtgtacttcccggctcatctccttatcttctcaccgcacccccsacctgcctcctgccccccagggatctagttcccttttctctctgtcatttcgagccagttttcttttcccaccaaaaaactcctttttcttggagtaactttccgaaagagctgtcgtcctaaatgccatcctcatggagttggatttgggaagctcgttctcaattaaagcgccttttgtgggcacggtgcgcatccctacagcccccagaacgtcacctgggcgcggggaccctcaacctggcgggccggacactgaaccataacaaaaggggacttcagaccctctgctcttttccagtgaaaaaaccctagaaacacatctgaa

SEQ ID NO: 679411 - DNA, 629 bp, Homo sapiens
tttaggcttgaaatatcctttttttcttcagtcttgcatttccatgttgtgcaaaacaccatgctgaatgagataacttgatggtaatgttttttttactgaacgaaagtggccctatggtgatttaaagcagggaaattagtacaaatgagattttccccactttgcttagtatcgcttcagggccttaaaatccaaccttatgctttcaggttaaatcatagaataactctatcgagatacaagcagttcgtgaaagagacagcaccaatcattgatctcttacctttaatttgcttttcttattagacacagtaattttagcagaatgctaataggacaaaactgaawattacagatgacgggagaccacttactatgaaaagcagctactataaaaggtaagctctatgaagtgagtaattttttcactggtgtgaacaaacagtgactggcatacaatttgccctcgatacatatttgttgaattcatgagggagaaaggatgggaaaggcactagagcagagccctgaggaataaggagacagcttggaagtactgggatatggaaatagagggtactcaagaggcacagcaaagggagatgaaggaatgtttcagaaaaaaa

SEQ ID NO: 679412 - DNA, 2415 bp, Homo sapiens
agaaatattggggcagcaggatttgacaaagcttttgagaagagctctcagttcagggtccagggcatgatctagaggactcagatgttcctggatctctgtccccagggaaccaactacattcttgccccacatcttcatgcctcactgtggtaactctgggcaagtcactcaaaacgtctaagttttaattcattgaattggaaaatacgggttgtagcccctgctctgcccgtccctcggggctaatgtggggatcaaagaaataacacatctcggccgggcgcggtggctcacgcctgtaatcccagcactttgggaggccgaggcgggtggatcacgaggtcaggagatcgagaccatcctggctaacaaggtgaaaccccgtctctactaaaaatacaaaaaattagccgggcgcggtggcaggcgcctgtagtcccagctactcgggaggctgaggcaggagaatggcgtgaacccgggaagcagagcttgcagtgagccgagattgcaccactgcagtccgcagtccggcctgggggacagagcgagactccttctcaaaaaaaaaaaaaaaaaaaaaaaaaaaaaaataaaaaaaaagaaataacacatctctttcatgagctggaaagcatcatgcccatggaaacagtgaagtcaccttccaccctcccctgcccgggagccatacacgctccctctctgtattctatacactaccaagtatctggattattcttccagacattgaatgattgaacactgttgggcatttacaactcatgagtcttcttaagcctttatctgtatctcatcctttttagccctatagatcttagtaggtctatagcagagatctactaacattcccacatctcagaatagggaactgaggcacagaggggttcatttcactctcccaggtatgtgcagattctaagtagcatttgaacccaggccattcttggtgacttggatctgctgcttttctatattgtctcatctaaataaaggtatctgcctgcacagtctgttttaagtgcaacaaaccttgcaaaatcttcctagaacccaaatctaattcaggtagagttgaaaagcagacggtgcaaaccgggatcaaaactttcatctgtgaataagtttttactaatttctctgctatcctctgccagcaacatgtcaagcactgtctttattataatacatttcctggaatctataagaagtctgctctaccttgcaggtttggacgcccgctccaagcgctggttaaaaataatatggagacggcacgggatttggcctctagaaaatataggtaatgtggaaattaaatcattaagttcatttaagcaaataattccagtttattcattcagtgctccatattagagaaactcagtaaatgctatgtcatgttcttcatttatttcatttgtgccaatttaaatgcattaaatcaatggtagatgatacaactacacaagtaaagtaatattgacaagttagagttgttcttttgtgtgtgtgtgtgtgtgtgtgtgtgtgtgtgtgtgtgagaaaaggtctcatttgtcacccaggagtgcattggtgcaatcacaactcactgcgatcttgacctccccaggttcaggggatccttccacctcagcctcccaagtagctggccataaggcacgtgccactataccaagctaattttttttttttcgtagagatgggatttcaccatgttgcccaggcttagttcaactttgatagtaaaggacatctcaaatatttagacatttgctttcagtttagtcaattatgaatacagctattataaaccttcctgtgtcttgtttggaaacacaatttttaaaatgtaactgaggaaatacttaggattatgattacttgcttgtatggtaagactacatttttctttgtaagaatttcagtagaatttaccagtgaaatcatctgaatatactgttttagttttttgaaaagatattaatcattgattyaatttctaaaataaatataggcctattcagatgatctatttctcctgagttttggtcttctaaaatagattttaacagttagcccatttcatctactgtatccaattgtgagcacagatgtgttcaggatattcctttattatttactattttttgatttgactcttcttaaacagatattattagtatactgtgacttctttctttcctttgtgggtagccaaggtagaggtttatcaatgttactgatcttttcaaacaactgacttttggttttgttgattttctctgaggattttctgtttcctattccattgtattctgcaatcgttatttatttttcctctgttctatatcacactgctgtttttctctcattgcccaagttgaa

SEQ ID NO: 679413 - DNA, 646 bp, Homo sapiens
cgtcctcatgttgccatggcatttgtaaactgtcattgtgctggtgggagtgtagcagtgaggatgaccggaggtcacttttgtcagcatcttggttttggtgggttttagccgscttctttactgcaacctgttttatccgcaaagccttaataacctgtatctgtgctgaactcctgtctcatccgttgacttcgagcgccttaaccttctggaaatgcagcccagtaggtctcagccttatttcacccagcccctattcaagatggagttgctctcattcaaacacctctaacaaaataatctcaactgcaaagatgagatataatcaataattatccaatgtttaaagtgcaccaacatcttgaaacagcaatgtcgacaaggcctgtaaatattttacagagtttcattctgagcccaatataattgaccaaggcctgaggcacggttttttgttgttattgttgttgttgttgttgtttagacggggtctcattctgtcacccagcccggggtgcagtggcgtgatctcagctcactgcaacctcctcctcctgggttcaagctattctcctgcctcaggctcctgaataactgggattacaggcgcccaccaccatgcccggctgattcttgtattttt

SEQ ID NO: 679414 - DNA, 646 bp, Homo sapiens
cgtcctcatgttgccatggcatttgtaaactgtcattgtgctggtgggagtgtagcagtgaggatgaccggaggtcacttttgtcagcatcttggttttggtgggttttagccgccttctttactgcaacctgttttatccgcaaagccttaataacctgtwtctgtgctgaactcctgtctcatccgttgacttcgagcgccttaaccttctggaaatgcagcccagtaggtctcagccttatttcacccagcccctattcaagatggagttgctctcattcaaacacctctaacaaaataatctcaactgcaaagatgagatataatcaataattatccaatgtttaaagtgcaccaacatcttgaaacagcaatgtcgacaaggcctgtaaatattttacagagtttcattctgagcccaatataattgaccaaggcctgaggcacggttttttgttgttattgttgttgttgttgttgtttagacggggtctcattctgtcacccagcccggggtgcagtggcgtgatctcagctcactgcaacctcctcctcctgggttcaagctattctcctgcctcaggctcctgaataactgggattacaggcgcccaccaccatgcccggctgattcttgtattttt

SEQ ID NO: 679415 - DNA, 646 bp, Homo sapiens
cgtcctcatgttgccatggcatttgtaaactgtcattgtgctggtgggagtgtagcagtgaggatgaccggaggtcacttttgtcagcatcttggttttggtgggttttagccgccttctttactgcaacctgttttatccgcaaagccttaataacctgtatytgtgctgaactcctgtctcatccgttgacttcgagcgccttaaccttctggaaatgcagcccagtaggtctcagccttatttcacccagcccctattcaagatggagttgctctcattcaaacacctctaacaaaataatctcaactgcaaagatgagatataatcaataattatccaatgtttaaagtgcaccaacatcttgaaacagcaatgtcgacaaggcctgtaaatattttacagagtttcattctgagcccaatataattgaccaaggcctgaggcacggttttttgttgttattgttgttgttgttgttgtttagacggggtctcattctgtcacccagcccggggtgcagtggcgtgatctcagctcactgcaacctcctcctcctgggttcaagctattctcctgcctcaggctcctgaataactgggattacaggcgcccaccaccatgcccggctgattcttgtattttt

SEQ ID NO: 679416 - DNA, 646 bp, Homo sapiens
cgtcctcatgttgccatggcatttgtaaactgtcattgtgctggtgggagtgtagcagtgaggatgaccggaggtcacttttgtcagcatcttggttttggtgggttttagccgccttctttactgcaacctgttttatccgcaaagccttaataacctgtatctgtgctgaactcctgtctcatccgttgacttcgagcgccttaaccttctggaaatgcagcccagtaggtctcagccttatttcacccagcccctattcaagatggagttgctctcattcaaacacctctaacaaaataatctcaactgcaaagatgagatataatcaataattatccaatgtttaaagtgcaccaacatcttgaaacagcaatgtcgacaargcctgtaaatattttacagagtttcattctgagcccaatataattgaccaaggcctgaggcacggttttttgttgttattgttgttgttgttgttgtttagacggggtctcattctgtcacccagcccggggtgcagtggcgtgatctcagctcactgcaacctcctcctcctgggttcaagctattctcctgcctcaggctcctgaataactgggattacaggcgcccaccaccatgcccggctgattcttgtattttt

SEQ ID NO: 679417 - DNA, 3048 bp, Homo sapiens
taccagtgttttttcagtgttttcaaatacacgggaacaaagaatttgtttttctttgtactccatcaacctgttaagaaacagtttgtgaagagcttgaccatatgaaaacccatagtcatttattaataacttctagtttcttcccctgatattaaaagataagggccacgttagacaaggagcaaagataagcatttttaaagaactatgtattatttggaggtaacctgaagaagtctagtgactcatggaccattgttytgcagaatgagcagatgtgagcaagctaggccttccaatagagacagtgccatctagcagctgtgaagaatatagccccttactagcctcaattctaactggaatccatagtcaggatgatatgggaggaaacgtacaattttgtttcaataaaattttgagagagattctcacacagagttctagcccgctccctgtccgtgattctatgattgccactattcttgattttattaacagaataacaaacctactttgatttagcaaaagtgctaaaattatttgtgccccttaacctccctgaaagttagttcatttctctcttttcgatttctttacctgtaaaacagagataacaacattatatatcttattgtattgttggaaggattaaatgagtgattgtatgtctgtgtgtgcatctaagtgtgcatgcatacatatatattatagattaaatatagtgcctaacatgattcctgtatttactgttattatgaatattattgctagaatatatttaatgctgattcaaccaaattaattgcaaattacagatattatttaatgaagattttatatcaatttcaatctttcacatttgcctgtctcctgaagtagagaaataaaaaaactcatttccttgagtgttttgcttaatacaactctgctgaaatataaagtatgtaatgataactgctaataatggttaaatgttaatgagagctgactatgtaccagggagtctcatataactcataataaccctttgcaggtaatattattatcctttcattttataaaaggaaactgatgatgttcgcaattaaaacaaaagcttacatatttcctttgctatattcaaataacagtatactgtaaaagttaatcaacaaaaagtatttcacatagaagaattagattatggaggccattgctctggatggaattttctatacctaaattttggtgtactgaaaactacttgtagcaaaataaaggaaatatgctttataataggagaatttttttgaatccttaaatactcttttatggatgatgattgccacaaaaccaaattacatcttgttttattttcatatgtgattgtcatttgcagttaccatcagttactctcttaataacaaagagattacagttagtatgaatctttacaagccttaataaagcatataaattggaaagatcctgtaattacagtgaactctgtataacactatcgagcttcgccacttaaaatgaacatcttcacttatttgtgcaaatctttttccaactcagccacatcagtcacattttggtcatgatatatgtttataatgacttcagaattatattaaatcttttactttttatccttttaaatttctaatgtttgaaaatatagtcattacaatgggtgtccattttaacaggagattttcctgactctgagtttagaagaaacttaatgataatagaagtgtttctctcttttttttttgaagacaataattcttaatatttattgcaacttttttccttttctgtttccttgctaaagttgaaccaaaaaaaattctgtaatctaatacttggaataatggttgaattttgtgataatcccaaaactgcagctcatgtcaatgcttggcaagggaagaaggatcagacagctgctagtcttttaattaaattgtggagaaaggaggaaaaagaactaggagtaaaacgtgataaaaatgggaagatcattggtgagtatatttataattgttagtagaagcaattaatgtatatattttaaaagatctttaaatggtattaagaaagcatcaggcctttcacccctttgtctaaagttttttttttttttttacaagggtttgaaaaatttgctatcctaagtgactggaagaaaactaagtaaattagtagtaggttcatatttttagagaatatttttaagaaatggtatttaattatattcttttaactaaaaaaaaaattaaagtagttcctaaagatgcttctttgggttttctgcttttatagatagattcaataatatttcattgagatgtaaatagattgcttcaaaataatattttggtattttatacatttctgttcatttttcctttttctaaatccattaggcaacatgatctgattaatgtttatagagtttactttttatatgaaagaagatattgtttcctaaataaaaatagtccaaatgttcaaaaattttaattactagattctaaattaatgagacttacagtatcataatttttagttcatttacatattccatactgctatattacatttttttcttttttttttcttttttttttgtgagacagggtttcactcaggtcacccagactggggtgtgatggtgcaatcttggctcactgaaacctctgcctcccaggctcaagcgattttcctgccttagcctcccaagtagctgggactacaggcatgcactaccacacccagctaatttttgtattttttgtagagatgaggtttcaccgtgttgcccaggctggtctcaagctcctgggctcaagcgatccactcacctcagcctctgccaagtgttgggattataggcatgagccaccacacctggccaatatattacattttctttttttcttttttttttggagacagagtctcgctctttcgcccaggctggagtgcagtgacatgaactcggctcactgcaacctccgcctcccaggttcaaatgattcttctgcctca

SEQ ID NO: 679418 - DNA, 3048 bp, Homo sapiens
taccagtgttttttcagtgttttcaaatacacgggaacaaagaatttgtttttctttgtactccatcaacctgttaagaaacagtttgtgaagagcttgaccatatgaaaacccatagtcatttattaataacttctagtttcttcccctgatattaaaagataagggccacgttagacaaggagcaaagataagcatttttaaagaactatgtattatttggaggtaacctgaagaagtctagtgactcatggaccattgttttgcagaatgagcagatgtgagcaagctaggccttccaatagagacagtgccatctagcagctgtgaagaatatagccccttactagcctcaattctaactggaatccatagtcaggatgatatgggaggaaacgtacaattttgtttcaataaaattttgagagagattctcacacagagttctagcccgctccctgtccgtgattctatgattgccactattcttgattttattaacagaataacaaacctactttgatttagcaaaagtgctaaaattatttgtgccccttaacctccctgaaagttagttcatttctctcttttcgatttctttacctgtaaaacagagataacaacattatatatcttattgtattgttggaaggattaaatgagtgattgtatgtctgtgtgtgcatctaagtgtgcatgcatacatatatattatagattaaatatagtgcctaacatgattcctgtatttactgttattatgaatattattgctagaatatatttaatgctgattcaaccaaattaattgcaaattacagatattatttaatgaagattttatatcaatttcaatctttcacatttgcctgtctcctgaagtagagaaataaaaaaactcatttccttgagtgttttgcttaatacaactctgctgaaatataaagtatgtaatgataactgctaataatggttaaatgttaatgagagctgactatgtaccagggagtctcatataactcataataaccctttgcaggtaatattattatcctttcattttataaaaggaaactgatgatgttcgcaattaaaacaaaagcttacatatttcctttgctatattcaaataacagtatactgtaaaagttaatcaacaaaaagtatttcacatagaagaattagattatggaggccattgctctggatggaattttctatacctaaattttggtgtactgaaaactacttgtagcaaaataaaggaaatatgctttataataggagaatttttttgaatccttaaatactcttttatggatgatgattgccacaaaaccaaattacatcttgttttattttcatatgtgattgtcatttgcagttaccatcagttactctcttaataacaaagagattacagttagtatgaatctttacaagccttaataaagcatataaattggaaagatcctgtaattacagtgaactctgtataacactatcgagcttcgccacttaaaatgaacatcttcacttatttgtgcaaatctttttccaactcagccacatcagtcacattttggtcatgatatatgtttataatgacttcagaattatattaaatcttttactttttatccttttaaatttctaatgtttgaaaatatagtcattacaatgggtgtccattttaacaggagattttcctgactctgagtttagaagaaacttaatgataatagaagtgtttctctcttttttttttgaagacaataattcttaatatttattgcaacttttttccttttctgtttccttgctaaagttgaaccaaaaaaaattctgtaatctaatacttggaataatggttgaattttgtgataatcccaaaactgcagctcatgtcaatgcttggcaagggaagaaggatcagacagctgctagtcttttaattaaattgtggagaaaggaggaaaaagaactaggagtaaaacgtgataaaaatgggaagatcattggtgagtatatttataattgttagtagaagcaattaatgtatatattttaaaagatctttaaatggtattaagaaagcatcaggcctttcacccctttgtctaaagttttttttttttttttacaagggtttgaaaaatttgctatcctaagtgactggaagaaaactaagtaaattagtagtaggttcatatttttagagaatatttttaagaaatggtatttaattatattcttttaactaaaaaaaaaattaaagtagttcctaaagatgcttctttgggttttctgcttttatagatagattcaataatatttcattgagatgtaaatagattgcttcaaaataatattttggtattttatacatttctgttcatttttcctttttctaaatccattaggcaacatgatctgattaatgtttatagagtttactttttatatgaaagaagatattgtttcctaaataaaaatagtccaaatgttcaaaaattttaattactagattctaaattaatgagacttacagtatcataatttttagttcatttacatattccatactgctatattacatttttttcttttttttttcttttttttttgtgagacagggtttcactcaggtcacccagactggggtgtgatggtgcaatcttggctcactgaaacctctgcctcccaggctcaagcgattttcctgccttagcctcccaagtagctgggactacaggcatgcactaccacacccagctaatttttgtattttttgtagagatgaggtttcaccrtgttgcccaggctggtctcaagctcctgggctcaagcgatccactcacctcagcctctgccaagtgttgggattataggcatgagccaccacacctggccaatatattacattttctttttttcttttttttttggagacagagtctcgctctttcgcccaggctggagtgcagtgacatgaactcggctcactgcaacctccgcctcccaggttcaaatgattcttctgcctca

SEQ ID NO: 679419 - DNA, 3048 bp, Homo sapiens
taccagtgttttttcagtgttttcaaatacacgggaacaaagaatttgtttttctttgtactccatcaacctgttaagaaacagtttgtgaagagcttgaccatatgaaaacccatagtcatttattaataacttctagtttcttcccctgatattaaaagataagggccacgttagacaaggagcaaagataagcatttttaaagaactatgtattatttggaggtaacctgaagaagtctagtgactcatggaccattgttttgcagaatgagcagatgtgagcaagctaggccttccaatagagacagtgccatctagcagctgtgaagaatatagccccttactagcctcaattctaactggaatccatagtcaggatgatatgggaggaaacgtacaattttgtttcaataaaattttgagagagattctcacacagagttctagcccgctccctgtccgtgattctatgattgccactattcttgattttattaacagaataacaaacctactttgatttagcaaaagtgctaaaattatttgtgccccttaacctccctgaaagttagttcatttctctcttttcgatttctttacctgtaaaacagagataacaacattatatatcttattgtattgttggaaggattaaatgagtgattgtatgtctgtgtgtgcatctaagtgtgcatgcatacatatatattatagattaaatatagtgcctaacatgattcctgtatttactgttattatgaatattattgctagaatatatttaatgctgattcaaccaaattaattgcaaattacagatattatttaatgaagattttatatcaatttcaatctttcacatttgcctgtctcctgaagtagagaaataaaaaaactcatttccttgagtgttttgcttaatacaactctgctgaaatataaagtatgtaatgataactgctaataatggttaaatgttaatgagagctgactatgtaccagggagtctcatataactcataataaccctttgcaggtaatattattatcctttcattttataaaaggaaactgatgatgttcgcaattaaaacaaaagcttacatatttcctttgctatattcaaataacagtatactgtaaaagttaatcaacaaaaagtatttcacatagaagaattagattatggaggccattgctctggatggaattttctatacctaaattttggtgtactgaaaactacttgtagcaaaataaaggaaatatgctttataataggagaatttttttgaatccttaaatactcttttatggatgatgattgccacaaaaccaaattacatcttgttttattttcatatgtgattgtcatttgcagttaccatcagttactctcttaataacaaagagattacagttagtatgaatctttacaagccttaataaagcatataaattggaaagatcctgtaattacagtgaactctgtataacactatcgagcttcgccacttaaaatgaacatcttcacttatttgtgcaaatctttttccaactcagccacatcagtcacattttggtcatgatatatgtttataatgacttcagaattatattaaatcttttactttttatccttttaaatttctaatgtttgaaaatatagtcattacaatgggtgtccattttaacaggagattttcctgactctgagtttagaagaaacttaatgataatagaagtgtttctctcttttttttttgaagacaataattcttaatatttattgcaacttttttccttttctgtttccttgctaaagttgaaccaaaaaaaattctgtaatctaatacttggaataatggttgaattttgtgataatcccaaaactgcagctcatgtcaatgcttggcaagggaagaaggatcagacagctgctagtcttttaattaaattgtggagaaaggaggaaaaagaactaggagtaaaacgtgataaaaatgggaagatcattggtgagtatatttataattgttagtagaagcaattaatgtatatattttaaaagatctttaaatggtattaagaaagcatcaggcctttcacccctttgtctaaagttttttttttttttttacaagggtttgaaaaatttgctatcctaagtgactggaagaaaactaagtaaattagtagtaggttcatatttttagagaatatttttaagaaatggtatttaattatattcttttaactaaaaaaaaaattaaagtagttcctaaagatgcttctttgggttttctgcttttatagatagattcaataatatttcattgagatgtaaatagattgcttcaaaataatattttggtattttatacatttctgttcatttttcctttttctaaatccattaggcaacatgatctgattaatgtttatagagtttactttttatatgaaagaagatattgtttcctaaataaaaatagtccaaatgttcaaaaattttaattactagattctaaattaatgagacttacagtatcataatttttagttcatttacatattccatactgctatattacatttttttcttttttttttcttttttttttgtgagacagggtttcactcaggtcacccagactggggtgtgatggtgcaatcttggctcactgaaacctctgcctcccaggctcaagcgattttcctgccttagcctcccaagtagctgggactacaggcatgcactaccacacccagctaatttttgtattttttgtagagatgaggtttcaccgtgttgcccaggctgktctcaagctcctgggctcaagcgatccactcacctcagcctctgccaagtgttgggattataggcatgagccaccacacctggccaatatattacattttctttttttcttttttttttggagacagagtctcgctctttcgcccaggctggagtgcagtgacatgaactcggctcactgcaacctccgcctcccaggttcaaatgattcttctgcctca

SEQ ID NO: 679420 - DNA, 621 bp, Homo sapiens
catacactccctccccttttgaaaatcactaataaaaacttgctggttttacggctcagggggcatcatggaacctgccaacatgtgatgtctcccccggacacccagctttaaaatttctctcttttgtactctttccctttatttctcagaccatccgacacttaggaaaaatagaaaaggactcatgttgaatatcgygggctggtttcccccgatagacaattgtttattgtattagagcagagactgacaaacttttattgaaagggccaaatagcatatactgttaagtttgggggaccatacagtttgtcaaaagtactcaactccaagaaagcagccatagacaatacataaatgagttggagtgctgcgttcaaataaaactttatttaccaaaacagacagcaggccccaagccacagtttgcctccctctgtattaagagtttctcacgtaaatgccaagctctcatccactaaacatggttgcattgttcaattattgtgatgacaaaagccacttccatggagcaataattacccatccctcccactctatcaattgagaactcctgatcttaactattcctcctgttcactgcacttggcaaaggca

SEQ ID NO: 679421 - DNA, 621 bp, Homo sapiens
catacactccctccccttttgaaaatcactaataaaaacttgctggttttacggctcagggggcatcatggaacctgccaacatgtgatgtctcccccggacacccagctttaaaatttctctcttttgtactctttccctttatttctcagaccatccgacacttaggaaaaatagaaaaggactcatgttgaatatcgtgggctggtttcccccgatagacaattgtttattgtattagagcagagaytgacaaacttttattgaaagggccaaatagcatatactgttaagtttgggggaccatacagtttgtcaaaagtactcaactccaagaaagcagccatagacaatacataaatgagttggagtgctgcgttcaaataaaactttatttaccaaaacagacagcaggccccaagccacagtttgcctccctctgtattaagagtttctcacgtaaatgccaagctctcatccactaaacatggttgcattgttcaattattgtgatgacaaaagccacttccatggagcaataattacccatccctcccactctatcaattgagaactcctgatcttaactattcctcctgttcactgcacttggcaaaggca

SEQ ID NO: 679422 - DNA, 657 bp, Homo sapiens
ctgaaatctttaaaataatttcctttctgtcagatcatctccccaacatcaacagtgtctaccatacaatcttgcactgaattactctatgcaaattgcaatcctagatttttaaggtacctgccatctctccattgttayaattcctactagtagtacagtatacttcctttgtatgagccagtgctaaatagactgggagcatttgactaaaactcactgacaccgcaacctgttagctttgagctctaacagcacctaatttcacccaaaccccaccttgttaattctttcacatttccagcatttcagctatcttgaattactctaagcctaacatttatgttacgagtagtaaggcacctgagtaggtcatttgaattttagattgattagttcctatttcacaaaaatcatgtctaattgccagacctttctgtctaagaactgtacataaagttcattaacctcccacgaaacttttaaaatcaattcacaaatctgcattacagattcaacagcactcataaactgttcaaaaatgctcccacagattcactgacattaatggctctaaatactcagttggatcccacaataacatattccaatcaaatttcggtttttggcaaaatattttaccaagttccagaaaaa

SEQ ID NO: 679423 - DNA, 657 bp, Homo sapiens
ctgaaatctttaaaataatttcctttctgtcagatcatctccccaacatcaacagtgtctaccatacaatcttgcactgaattactctatgcaaattgcaatcctagatttttaaggtacctgccatctctccattgttacaattcctactagtagtacagtatacttcctttgtatgagccagtgctaaatagactgggagcatttgactaaaactcactgacaccgcaacctgttagctttgagctctaacagcacctaatttcacccaaaccccascttgttaattctttcacatttccagcatttcagctatcttgaattactctaagcctaacatttatgttacgagtagtaaggcacctgagtaggtcatttgaattttagattgattagttcctatttcacaaaaatcatgtctaattgccagacctttctgtctaagaactgtacataaagttcattaacctcccacgaaacttttaaaatcaattcacaaatctgcattacagattcaacagcactcataaactgttcaaaaatgctcccacagattcactgacattaatggctctaaatactcagttggatcccacaataacatattccaatcaaatttcggtttttggcaaaatattttaccaagttccagaaaaa

SEQ ID NO: 679424 - DNA, 835 bp, Homo sapiens
cacaaggccctactttatctgatcactcccctctcagtctccacacatcagcttccagccttacttgcttttcacttgtcttcaaggaagtcaatctatatgtctgacatactcccattgttttaacaaaacaaatgtatttgataatcatggctttgttctctaataatacctactaccactgttgattaatatatctttcaaagtaatttgtaggaaaatgtagtaattgtacatatgctaaatgagagatacaaagtagagacataatttcctcgaattgcttccatcttattttcagatcatttacttaataaatgtccttacaataaagtttcagaaggccactgatattttgagcctaagaccatatgatgacaaacatcaagagctaataatttatttaagcaccaccaaggggtcttttagtcactgccagaacagccttttattaaggcaattgggtaaattggtctaaatggttttaaattgttgttagaattattagagctactatgaaatatccaaagtttacattcttacaggaatttgaaaggaaatgcaagccaatttataaaaggtatgaggggtttgttcattttcaccctaaaaacaaatttgaccaaaatgattgggtctatttttaagtcctttcttaaaaatcttgccrgcttcgaaagtagaaggggagatacaagctacataaaaggctatttaacattatacatttttgaagccatactaatgattcatacactaaaataaaccttgcaatactagtcagactatctggtgctttatccaacaataaatcaaggataccaaccacatgctg

SEQ ID NO: 679425 - DNA, 626 bp, Homo sapiens
ttctagaagaaaatttrgaaaatgctgcctaatttcttcagttatctgcaaaagcaaatacttttctcgaaggatctttttcaatgagaaaacagtccctctgtggtagaatttcctctttttacatttgaaggtgaaatgtatatcatccagattatcatcaaatgttttaactgtttaaatatcaatttagaaaaaagtacctatttagaaatattttttcttactctctaaatttaaatgatgcgtgttataaactagaagaaactgcaaatgtccttttgggaagaaaggcgttaagttagcaggtctgagacttcaattctccaaaaagcctacttgcaaggcggctgatgtctgagaatttgaatttggaggtgttctcaccaattctcttagtgataaagttggtttgctgtgcctagactgaaacacagcgtggtgtatgccaaacacctgctttccttctggtggtctggaagtttggtacatggtaagcaggggctgtctacatgacaagctccgaataaaaaccttgggtactgatatggttaagctttgtgtccccacctaaagctcatcttcaattgtaatccccataatccccacgtgtcaaaggagagacc

SEQ ID NO: 679426 - DNA, 613 bp, Homo sapiens
ggaatagacagtagctctgactataagttaaaatgggctacattaaaccctgccaggccttgcatttctctcatttggtccttcactgacaaattcacatagtgcaaaggtcatgggcaagctataactcttctctggagctccaagctggctgcccctggggatttatgttccactctcctaactgggcttaccaagccataaattcctgattaaagcacagaccgcttgagagacagggaggttggaagagtatcgatgctcaggtctccagtcacccacatrtttgtatgagagccttggactcctggacccaaagccagtgtaattactttataacttaaaaatcatggttttcaattttaaaaattcatgtaaaaatggaagtcactgtgctggaaatgagtctttcctttctgagttctgtaatgctatgttatctttatatgtttacaatagaaggaaatggtcctactggctgccagtgagtgaggtagcagagtagagctgcattctaaaatcagaactaatattcagcaccagcttctatggtcttgtgttttgatgtgctggctattgggcctacagaaatgcaccttctgtttatgcttcc

SEQ ID NO: 679427 - DNA, 1787 bp, Homo sapiens
agtttagaataatagatcaaagaaagtaaaacactgactgaaaagtatccactggattgtataaaaagcaaatcattttttacatgcaagataatgataaagttgaacatgtttaaatgctgcagaaaaaaagccagagagagagagagacagagagaatcttctctggaagatacagggaataaaaataagagtccttaaagctagctctctgaggatgttcgataggaaaaggattctgcacaatggtagatggactaaccttaaaataagagaatttcttccattgtaataaaacaaaacaaaacaaaaagatgcagttgaggttgtgagtttagcatttataacagaaaaacaataaccttagatttctcagcccttctttccaccctacaagaagctaattacattttatactttcaacatctattcagtaaaactacagacacttttatgagagttcagtggccaaaatagagaatattcttattcatattctctcgctctccctctctcattatgtataggaagagagaacctctcccaggtgggtctgcactgttatatgtgagccttcaatgtgaaaacgaagaaggtcrtgaaagctcttctcagacaatacaatactttttgaacggcaaggccctaaaatctagagatcaattcagggaagatgcaaattttggtctcatccctgaactggtcagatgagtgtccagcccaagagctcttatattacttggtgcaagtgcttatgccctcaatgttctgctttttctagtgggtaaaattaggcagttggtcatctccttgtttgccttttctgcagacaaagaaggctgtactggaatgtcagtttgtgaatccttcaacgttttaccactggaatttgtttgttcttgcttgtctaataaagtgctttctttacatatttactcaacccatgattcctgacctcatcatgtatatccagcatgtgacctttgaaacatttgagtggtacataattatagagtggtttgttatgatagtgatatatttttaaaatgtcaatatataacaaataatataaatagtaaggaataccctgaagtgagcattttatacaataatcttaacccaatattggcaggaacttgagttaattacaaacagcaacttgattagcttgtgaaatagaaagcagtcatatgaaaagagtgagcaagaaagttgtgcatttggaaatttcaggatgatagaaaacattaaaatggcattgaggagaaagctctagaaaggtaaacaagattgctgagcagcttcaaacaccagttgaggttggaaactatgaagatatagttaacttactgtgtgcaattataaaatataccgtgtgggtggtgcatttgtggggccattttgtggtttttgaatgccgttttctacttcatctgttcattcatgtagagaaacttaatcctttaagaatcaactcatgtgcctcattctctgtgatttcttctctaatcatcgagcagggcatgccatacagtaagcgtgccataaatgtttcttgaaatgattaaaattatgctttgtttgtgctgacccttttacagtgattttagtcaactacttatgttctttgttcttcagcttccttacttgtcaaacatgaataataacaatgcctatttcatagggttgttttgtggattaaatgagttcacacatataaagaacctgaagtagtacctggaacaatttaagtgctcaattaaaattaatcatgataattattatta

SEQ ID NO: 679428 - DNA, 1787 bp, Homo sapiens
agtttagaataatagatcaaagaaagtaaaacactgactgaaaagtatccactggattgtataaaaagcaaatcattttttacatgcaagataatgataaagttgaacatgtttaaatgctgcagaaaaaaagccagagagagagagagacagagagaatcttctctggaagatacagggaataaaaataagagtccttaaagctagctctctgaggatgttcgataggaaaaggattctgcacaatggtagatggactaaccttaaaataagagaatttcttccattgtaataaaacaaaacaaaacaaaaagatgcagttgaggttgtgagtttagcatttataacagaaaaacaataaccttagatttctcagcccttctttccaccctacaagaagctaattacattttatactttcaacatctattcagtaaaactacagacacttttatgagagttcagtggccaaaatagagaatattcttattcatattctctcgctctccctctctcattatgtataggaagagagaacctctcccaggtgggtctgcactgttatatgtgagccttcaatgtgaaaacgaagaaggtcatgaaagctcttctcagacaatacaatactttttgaacggcaaggccctaaaatctagagatcaattcagggaagatgcaaattttggtctcatccctgaactggtcagatgagtgtccagcccaagagctcttatattacttggtgcaagtgcttatgccctcaatgttctgctttttctagtgggtaaaattaggcagttggtcatctccttgtttgccttttctgcagacaaagaaggctgtactggaatgtcagtttgtgaatccttcaacgttttaccactggaatttgtttgttcttgcttgtctaataaagtgctttctttacatatttactcaacccatgattcctgacctcatcatgtatatccagcatgtgacctttgaaacatttgagtggtacataattatagagtggtttgttatgatagtgatatatttttaaaatgtcaatatataacaaataatataaatagtaaggaataccctgaagtgagcattttatacaataatcttaacccaatattggcaggaacttgagttaattacaaacagcaacttgattagcttgtgaaatagaaagcagtcatatgaaaagagtgagcaagaaagttgtgcatttggaaatttcaggatgatagaaaacattaaaatggcattgaggagaaagctctagaaaggtaaacaagattgctgagcagcttcaaacaccagttgaggttggaaactatgaagatatagttaacttactgtgtgcaattataaaatataccgtgtgggtggtgcatttgtggggccattttgtggtttttgaatgccgttttctacttcatctgttcattcatgtagagaaacttaatcctttaagaatcaactcatgtgcctcattctctgtgatttcttctctaatcatcgagcagggcatgccatacagtaagcgtgccataaatgtttcttgaaatgattaaaattatgctttgtttgtgctgacccttttacagtgattttagtcaactacttatgttctttgttcttcagcttccttacttgtcaaacatgaataataacaatgcctatttcatagggttgttttgtgsattaaatgagttcacacatataaagaacctgaagtagtacctggaacaatttaagtgctcaattaaaattaatcatgataattattatta

SEQ ID NO: 679429 - DNA, 1079 bp, Homo sapiens
ccatagacaattacattttgggggaagaaattacatgtgaatgagcattttggagaaatatgatggtgaaaggagtattttagaagacgagattttacctaaattttcaataagtgttctaaactagatatcacattttttattagacaatattttgaaaagacccacctgctgaaaagaaagaacaaacatggttactgttataattattgattcagaggggatgttatgtatgtaggaaaatcacaggcaattcattaaaaaactcttttggtagcttctatcaccagcaaagaaaatagtttaatttcattttactgtagttcaaaatcctccccagggtgtaattctgattttttgtcacaggagccaattgtgttattagaataagaaaatggtgtattttaaaaaaatcagctacgttggctttttattctgatgataggaaattatgtgtgtgtgtgtatrtttcacacatgatggaaaaaaatgagtaagacataaatcttcagaattaaagcccggaagcaaagtgtatgttccagtgaagactttaagtgacagcgtgacgaacttttgatcagtgtttcttatcatggagtaatttcttgatcaattaacaatcaattagaatttcagacatggcttagatggcatgatcctatttcaaaaatgtaatgagccaaaaaaaatgggttggcagattccaaaatctatgaatatactgatttaagaacaggaaaaacattcaaatgtcatatttttgttagtacattggacccgtagggtatgggaaaaataatatactgggatatttgcagtcattccaaatatatatattatattatatattcatatacattatattattatatatttatatattatatataatatattaatatattatattatatatttatattatatacaatacatattatatattgtagtatagtatatattatatgatatattaatatatagtatatattaatatgttatatatatataatccaagttaaagcaatagaacaaaacacagtatgtggtacctgcagtgctcactgcaattgaac

SEQ ID NO: 679430 - DNA, 1079 bp, Homo sapiens
ccatagacaattacattttgggggaagaaattacatgtgaatgagcattttggagaaatatgatggtgaaaggagtattttagaagacgagattttacctaaattttcaataagtgttctaaactagatatcacattttttattagacaatattttgaaaagacccacctgctgaaaagaaagaacaaacatggttactgttataattattgattcagaggggatgttatgtatgtaggaaaatcacaggcaattcattaaaaaactcttttggtagcttctatcaccagcaaagaaaatagtttaatttcattttactgtagttcaaaatcctccccagggtgtaattctgattttttgtcacaggagccaattgtgttattagaataagaaaatggtgtattttaaaaaaatcagctacgttggctttttattctgatgataggaaattatgtgtgtgtgtgtatgtttcacacatgatggaaaaaaatgagtaagacataaatcttcagaattaaagcccggaagcaaagtgtatgttccagtgaagactttaagtgacagcgtgacgaacttttgatcagtgtttcttatcatggagtaatttcttgatcaattaacaatcaattagaatttcagacatggcttagatggcatgatcctatttcaaaaatgtaatgagccaaaaaaaatgggttggcagattccaaaatctatgaatatactgatttaagaacaggaaaaacattcaaatgtcatatttttgttagtacattggacccgtagggtatgggaaaaataatatactgggatatttgcagtcattccaaatatatatattatattatatattmatatacattatattattatatatttatatattatatataatatattaatatattatattatatatttatattatatacaatacatattatatattgtagtatagtatatattatatgatatattaatatatagtatatattaatatgttatatatatataatccaagttaaagcaatagaacaaaacacagtatgtggtacctgcagtgctcactgcaattgaac

SEQ ID NO: 679431 - DNA, 1079 bp, Homo sapiens
ccatagacaattacattttgggggaagaaattacatgtgaatgagcattttggagaaatatgatggtgaaaggagtattttagaagacgagattttacctaaattttcaataagtgttctaaactagatatcacattttttattagacaatattttgaaaagacccacctgctgaaaagaaagaacaaacatggttactgttataattattgattcagaggggatgttatgtatgtaggaaaatcacaggcaattcattaaaaaactcttttggtagcttctatcaccagcaaagaaaatagtttaatttcattttactgtagttcaaaatcctccccagggtgtaattctgattttttgtcacaggagccaattgtgttattagaataagaaaatggtgtattttaaaaaaatcagctacgttggctttttattctgatgataggaaattatgtgtgtgtgtgtatgtttcacacatgatggaaaaaaatgagtaagacataaatcttcagaattaaagcccggaagcaaagtgtatgttccagtgaagactttaagtgacagcgtgacgaacttttgatcagtgtttcttatcatggagtaatttcttgatcaattaacaatcaattagaatttcagacatggcttagatggcatgatcctatttcaaaaatgtaatgagccaaaaaaaatgggttggcagattccaaaatctatgaatatactgatttaagaacaggaaaaacattcaaatgtcatatttttgttagtacattggacccgtagggtatgggaaaaataatatactgggatatttgcagtcattccaaatatatatattatattatatattcatatacattatattattatatatttatatattatatataatatatyaatatattatattatatatttatattatatacaatacatattatatattgtagtatagtatatattatatgatatattaatatatagtatatattaatatgttatatatatataatccaagttaaagcaatagaacaaaacacagtatgtggtacctgcagtgctcactgcaattgaac

SEQ ID NO: 679432 - DNA, 627 bp, Homo sapiens
taccccagcaactaaatttaaataaagcatttatgataagggtaaaacggaaattagttaatatgatttttatttaagtgtggtwtttgaaaaagacaaatgattgtattttacaaaactatgtttcttttatcaactctatacagaaactgagaccttagtcttaatgtataacttagaaaagagtttttcatgacaaagtgctgaaacaatatggtgtggacacctgatttcctggtaatctaatttaatacagtggtaaaacttggatgttggacacattatgctgtcccttccaatcactaggagtctgaagtagctggtgttgggttggactcacttccaagctgaatttttttgaataaagggccaatattgtttgatgactatggtaaggtctgtatgcttaaattgtcagacaataaacagtcagagttggcattctgttgtgaagatgtggaaatcaaaattggttcttgctatgatgtttaatctactttttcacatcagtgagtctccaaaatgcctctgggtatagctgacattttcctgcagaatgaactttaaatctttttaattacttgccacattacacgaatgagacaattttaacctaaagaaaatgta

SEQ ID NO: 679433 - DNA, 627 bp, Homo sapiens
taccccagcaactaaatttaaataaagcatttatgataagggtaaaacggaaattagttaatatgatttttatttaagtgtggtttttgaaaaagacaaatgattgtattttacaaaactatgtttcttttatcaactctatacagaaactgagaccttagtcttaatgtataacttagaaaagagtttttcatgacaaagtgctgaaacaatatggtgtggacacctgatttcctggtaatctaatttaatacagtggtaaaacttggatgttggacacattatgctgtcccttccaatcactaggagtctgaagtagctggtgttgggttggactcacttccaagctgaatttttttgaataaagggccaatattgtttratgactatggtaaggtctgtatgcttaaattgtcagacaataaacagtcagagttggcattctgttgtgaagatgtggaaatcaaaattggttcttgctatgatgtttaatctactttttcacatcagtgagtctccaaaatgcctctgggtatagctgacattttcctgcagaatgaactttaaatctttttaattacttgccacattacacgaatgagacaattttaacctaaagaaaatgta

SEQ ID NO: 679434 - DNA, 2660 bp, Homo sapiens
tatatcattgtctatacctctgaacttccatcccaaatcttaatactacagtgtagacattaaatttatttatcttcgtggggccaagaaaatgagaaaatatttatatttgcaaaytggaattgcacatagcattgtttacctgcaataagagacaataataatagtgtgccaagagaacaccaattatgaactaagcaggaaatatatcctgtgagttgaacactaaaataatccattttatttataaataagtagtggagtaattttctttaaaatacaaaattgaaaggaaattagcaacagttcttttattcataagagagaagttaaatacgttatctataaataaaaatttaggcaataatggaaacagcagtataaagaggaaaaatactgccaccagcacagtggatctagtcaaggcttgtgaagcaagtttttttatatgcaactttacctctttgcctcaggaataaccatcctattctagagaggcaatacatttttccagaataatctgattatcattgtcgatttaaaggaatcttttaaaatggcctattctttaaaatgtgctttaacaatttctgaataattccttctgtatgtttgacttgttacgaagtattacatatagagcaataaccatttattgaaagcctactatatgtctagaatttataaaccaaagcttctgtatactttcaattactttatgttagttctaattttctttgatgttgactaaacatcatctcaatagacccaacatagtcaaatacccctgcggttaaaacatcaaagtaaaaatatcctgctttgctcaactactgtgcaaggggctaagctcattatatattataaatcttgctatcccagagctcacagtgttgctgggaggcaagaggcaagggattatggtagttggccatcacatatagccagaagaaaaccgacatgttgctcaggtactcaactcattaaccaccttcaagttgacttgaatgagaaattctaagctctaataaaattaattttgaaaaaaataattttcaaagccaagactgtcgtctggactgacctttttatagtagtctacttcatgagttccattttgcctctatcatcaagtaacttgtttataaacccagagttttggagaaactttcttaatgcaaggtacaaattcttctttttagagatctatctttaagaaagtgttttacatccctaagtatattcttaaaccctcaatccatcatctaatagctataaaattcataattcttaacaatagctttaaaaaacaatgggtaaagtgcatttattctgttccaggaagtgtgctatgaattttacctctaattgcatattttgaacactatacgaaccacattaaattgattatactattacaataatactgtaaaattacaatcccaatcttatagatgaggaaactgaaccaaaaggcacagagatggtgtaaacttaaaatttggtctaagcaatctcgcttcacagcctgtgctgttaataaatatattatttcctcctaagagttgaacaaggtatagagtgaagtagttttataatacatggcacatagatagatgattgacagatagatagatagccttataatcctttaaatttacttagatatttctatcatacatgagcttgactgagttgccatgacctgctagaaaatactaggtccatgctatctattttattgtatacttgagaaactattgaacatctgctttcttcttaccaaaggttttatgttctgagtattatctacctggccaaaattaatactgcaaatggaaatgttaataactcttttaatctcatttatatttattacctaatattacctaatgtaaattctacattccaaatattcattccagaaaagctccttttgtcatatccaggactgaactttattgaaagagaaataaaagaacctacttattctacattagaggatagataataattataaccaattttagaagccaactaaaatctactaaaaattggcagtaaatatgagtcttagctgtctcctgccatgccccaagcttatttaaagatcaagtgtatggggaagtattttcctatcagttttgtttcttaaaaccctgtttcaaaaatctgatgcctttgctaaaactaacattagtcctcctaaaaccgtacagccatcatctaaaaccacggttctcaaagtgtggtcttgggactctcaggacactgtctaggggtctaggaagttaaaactactttcaaaataatactatttttactcattcttccttaaatgtacatgaagtttcatagagactacataatgtatgatatcataacagagtgcagaaggtaatgtgagaattcagctgtcttctatcagccagatattaaagagaatttcaaaaatattttaaaaagccctcatcctcactaattgtttcattatcactatagtcatttttaataaaaatgtattattcatgttaacaggtatgggcttattgctctttttagattaataaacacatacatgtatattcaattttcccagctccaattaccataataaagatagatattatgtacataaacaaaagttcttttaagagtac

SEQ ID NO: 679435 - DNA, 594 bp, Homo sapiens
atgtccccactttcactaataagaaaggcaaagtaaaataaggtttcattttcttcttctcctttttaatttgttaaggataatagcaatttgacaggagaataaaacaactttacttataaatactcctggtaaaagcataaattggtgtaacctttttaaaaagatgacaatatgaaacaacagcattagaaatgattatgctctatgatacggtaattcataaaatctatcctacaaattatcaaaaattaagaaagatttaggcacaaagatgctatttctgaaatatttatataattgaaagctttatagtaatctaaatatctaatacagttttaaagtttgatatgattttcccctaaatggtactatggcagtaaggagaaatggctgcttccacttytagataagaaatacaaaagaataggaatatttttctttgtgtcagaaagcaaaacaaacatccagtataagtggcatcatgtcaacgggacacagaaaccaagctaaagggactcccactaaacaaagatggcagttgaataatcaaaaaactctagtataaaaactctttcatttataatgaaatta

SEQ ID NO: 679436 - DNA, 615 bp, Homo sapiens
cctgtcatctacatcaggtatctctcctaatactatccctcccctagcccccaacctcccaacaggccccagtatgtgatgttcccctccctgtgtccatgtgttctcattgttcaacccccacttatgagtgagaacatgaggtgtttttggttttctgtacttgtgttagtttgctgagaatgatggtttccagyatcatccatgtccctgcaaaggacatgaactcatccttttttatggtggcatagtattccatggtgtatatgtgccaccaacacaaatgtaaaatactttttgccgtcattttatcctttggacatatcccaataagtctgtatcatcatattattttgacttaaagttctttggcattgttccttttcttgggtctatgtcatcaattggatatagtattaggctccttttctccatgttacattctgtttttataagttgcttttaaaaattgaattttattttataataatataaaatactggcatggcttcaaagtcaaagctacaaaataagatatattcaaaaccaagatatattccatgaagcaaatctacaaaacaagaagcttagcttctattactatctaatactatg

SEQ ID NO: 679437 - DNA, 591 bp, Homo sapiens
ctggacttttagcaagggatttcagccacaggttatcagcctcaggaacacccagatgacctctgcccatgcccagccattgctctgtggttctgccagcaatgcgtactccagatcatcagtttttttcgggaaccatattctgtccttaagttggattcttcaagctttgagagtgcctgggagaaaacacctttgggtttacagatttatattgtgcccaaggccccactaaccagatagcattgtccttcccaatggtcactcttctacgacatcccccacatgcagaagcaagaagaaactggtcttctcctctcaagcacttgtaargaaacacaaggggtggggtgacttgcattcatttcttcccattgcaaaggtggcacccagcactgaggaaagcaagccaggatacccaggctatggaagtattcatatagagaggatgaaagggtagggctcctaaggaatgactcagctggcatgtgagagccaggccaggaaaaggtcatagtcagtcacacctgctgcaaggaaggggctgcctcaggtgggatgtacatattctctagagcagatgggtgtctg

SEQ ID NO: 679438 - DNA, 597 bp, Homo sapiens
cctcgggcatggccttggtgccagagctcacctcacagagaacgatcccaaaggagaagatatccaccgtctcatcatagctctttccttggggaacacaggagagcacactgttaagtttacatcccttacctgctctgcactgggtctagggtcaatctaagccacagctaagaactagggctagaacaggttctgtagggacaccccacaggctgtcctgcgcagacaccacctgaaaatagtccttcctcagcygtaggtgaactgccttggagagcccttataacataacactgcctaggatgaaactgcacgttaaagtggaaaagaaccagactagggttcatctagcctctgccattaggcagctgtatgctcctaggcaattcactgaacttctctgggcctcagactccaaaatggattgtattcagaccatttctgaggcctcacaaccctgatttcaagaatcccaaccagcatctctggttggtttgagcattatccaccagagggcaccacacttcagttctcaccatggagagagaaggctaaagctgggacaatagcctgagctcttagcgatccctgagg

SEQ ID NO: 679439 - DNA, 586 bp, Homo sapiens
cgccgtcttgcagaatggatatcctagaatcctggacctgagtttgggtcctggctcagccactgatttgttgtgacaatggcaagctgctgctcttgctgagcctcagggatgctatctaatgagcaaagctatgcaggaggcatagcctgaatgtttgtttgtttttttcctgccagggggaaggatttgaaagaacagcatgatcagaaagtatgtgagagggagatgcagcgaatcactctgcccttgtctgccttcaccaaccccacctgtgagattgtggatgagaagactgtcgtggtccacaccagccagactccagttgaccctcaggagggcascaccccccttatgggccaggccgggactcctggggcctgagcccccccagtgggcaggagcccatgcagacactggtgcaggacagcccaccctcctacagctaggaggaactaccactttgtgttctggttaaaaccctaccactcccccgcttttttggcgaatcctagtaagagtgacagaagcaggtggccctgtgggctgagggtaaggctgggtagggtcctaacagtgctccttg

SEQ ID NO: 679440 - DNA, 610 bp, Homo sapiens
agagaagagactctttcattcagctcaagttaatttaaatattttagtggtgatttctaaatctatcatttttaaggaagtaaaaatattggagtggagtgggaatragcaaaacgctgctgtttaaaatataagtatcagtcactgttttctgtgattttctagctcccctttagtgcatctgaaaacaatgcttttcaattaggagaaagtgcttatctaaatgatcagatttttcccgcctgtgaataatgaagccaaagtaaaggctgtggtttttaggacaaatgaaaacaagaaagtcattcaaattaataataattttagaaaactaaagggggaaatttttatcacgatgggaaaatgaaaaataaaaaggagaagaagataggatttgccgggaaataagcagagataaaacaaagcccaagaaaatgagtataataaaaagaaaaataaggaaaaaataactcattcctctgaaaagaagagcttgtaaaaatacaagcaggataaaattagacaggggccctttcttccccagtaagtagcctttcactcatttttcaagcttgtcttgagagccccacgcacgcagagaacactagag

SEQ ID NO: 679441 - DNA, 1546 bp, Homo sapiens
ctggaagcctcgtcaacttccccaagcagaacaagtgactttttaactcccttagaccttgttaatacattgttcactgcattaaggaaaaatatctttgttttaaagagctaatgcattattttctcaggtaagttatagtaacctctacccatgcatgaattgtccctatatcaaattttaataaacaaggtatttcagtatatgcagtttatttttgtatactttttctcaaccacaagaattttagttccagtatataagaattatgagttactccttttggggataattagaaaaagaggaaattgggtgatgggaataaaaaataaaggaaggcagatggcatgacagtaacagaggtttttgccttgaggctttagcaaattagggaatctgaggagacgtcaaccaggaccttaaaayggaactcccacagttgcaaggaaggagggaagtggtatttgtgtaagaggggcctgatggcatgtactttggggagttatctctgggattgaggatgcagaagtcaacaattccaaatcatcaaatcagaaaggcattgcacatttggatggagaatcaaattcagggggaaagatctttcacatgtatattactttggcaaagcaaagcaaatttatgggcattttattgaaatagcagaggagaaaggccctgagaaatttcacctgagcaagagatgataaatggaaagcagttgtactataaccattattattaatttaagatgtgaaaaatgttaccgatattctttgtttagcatgctgttctgatggttctattttagagataatacaaagaagatttatgcaagtttgcatttaatccccctaaaatcttaaatacctccaactgcaatatcttgttatcctcacaattagggagaatctactctatctgtaacagtctcctgagactggaatttctatcttattcctttttctattcccacatctacactgggcacataataagaacttaatcattatttgttgaacatataattcaaaataagatgcggcaggaggaattggcaaaacctatcctattctctcagatggagattctgagagcaaagtgaagattgggagcaggcagagcagaaatgcactcagctgcagacaataagccagaatggccatcagagaggtcctgcacgaaggaatgcagctgccgcaacaagtgtaggactgtagagtcctggggaagcactattggagatccaggcagttaggtctgcaacagtaactgacacgaatatacagacatggcactgaaatttaggagcagaactccagcctccagggtgtaaggaaggggtaataaatggctggttgccaagatcatagctcaggcccaattttttttctttctttctttattttctctctcccttttttcttttcttgagacaagatcttgctctgtcacccaggctggagtgcagtggcataatctcagctcactgcagcctgacctcctggctcaactgaccctcccacatcagccacctgagtagctc

SEQ ID NO: 679442 - DNA, 1546 bp, Homo sapiens
ctggaagcctcgtcaacttccccaagcagaacaagtgactttttaactcccttagaccttgttaatacattgttcactgcattaaggaaaaatatctttgttttaaagagctaatgcattattttctcaggtaagttatagtaacctctacccatgcatgaattgtccctatatcaaattttaataaacaaggtatttcagtatatgcagtttatttttgtatactttttctcaaccacaagaattttagttccagtatataagaattatgagttactccttttggggataattagaaaaagaggaaattgggtgatgggaataaaaaataaaggaaggcagatggcatgacagtaacagaggtttttgccttgaggctttagcaaattagggaatctgaggagacgtcaaccaggaccttaaaacggaactcccacagttgcaaggaaggagggaagtggtatttgtgtaagaggggcctgatggcatgtactttggggagttatctctgggattgaggaygcagaagtcaacaattccaaatcatcaaatcagaaaggcattgcacatttggatggagaatcaaattcagggggaaagatctttcacatgtatattactttggcaaagcaaagcaaatttatgggcattttattgaaatagcagaggagaaaggccctgagaaatttcacctgagcaagagatgataaatggaaagcagttgtactataaccattattattaatttaagatgtgaaaaatgttaccgatattctttgtttagcatgctgttctgatggttctattttagagataatacaaagaagatttatgcaagtttgcatttaatccccctaaaatcttaaatacctccaactgcaatatcttgttatcctcacaattagggagaatctactctatctgtaacagtctcctgagactggaatttctatcttattcctttttctattcccacatctacactgggcacataataagaacttaatcattatttgttgaacatataattcaaaataagatgcggcaggaggaattggcaaaacctatcctattctctcagatggagattctgagagcaaagtgaagattgggagcaggcagagcagaaatgcactcagctgcagacaataagccagaatggccatcagagaggtcctgcacgaaggaatgcagctgccgcaacaagtgtaggactgtagagtcctggggaagcactattggagatccaggcagttaggtctgcaacagtaactgacacgaatatacagacatggcactgaaatttaggagcagaactccagcctccagggtgtaaggaaggggtaataaatggctggttgccaagatcatagctcaggcccaattttttttctttctttctttattttctctctcccttttttcttttcttgagacaagatcttgctctgtcacccaggctggagtgcagtggcataatctcagctcactgcagcctgacctcctggctcaactgaccctcccacatcagccacctgagtagctc

SEQ ID NO: 679443 - DNA, 1209 bp, Homo sapiens
cttagcagagaaaggtcctttccaacacctcacaagattgctttccaaaacgtctttaatcaaagccaagtgctaaagttacacaaacacagagaaacacactgggctgagttacacctacagtttctgcttccctatagaactggaagttctttccctgcttacagtttctagcttctcaaatgaaatagcacaacgcttggagcctgattattttaggaaaggtcaagtgagcccaaatgctaatagaatttcatgaaaccaaagagatggcagcttcccaattctaggtgctaagctaaacacactggggttaaaacataaccacatccttgctaaggagaaaatggtcagagtggtcaggcttactgtgtaagctggtcatgtgatgcccacacagttttatggtcttcttatcattgttactggtctgcagttggagatgagtcagtggataggagtgggaaaagacttgtctctctcacacatagaaccctgaggaaggagtaatcagattcatgtaaaaaatgaagagaggaaaaggagaaggagtgtgcactgttaattttggaaccccaattgggataactcatcaatgctcatcatccactagcacgaagcctcatggctttaaccatcatatatccatgtggtagttcctttgcctgccaggatacgyactccaaccccacactctattactttctccccatatctagtcatccttattgcctcactcctcttaactcttccattcaccaaaatttcccccacctcctctccttttctaagctagacttgcttcctagcctcatttttagaattctcctttctcaaacgcctgttgctgagaagggagaagataatctttagttttggaggaaggagaggtggaaaaagtcactgaaatgttgcagtctcctggtggcagattattattttctttctttccttctgatagttacttaaatttttttttaaatgtgtatttttaagtcctttattatgctcgaagagtttttaaattttgttatgtttttgttctagtgaggaaatatattatattgtaaagttaattttaattatattatcccaatttaggaaataatttgtgagtttgttttccttgcttgcttgcttacggtaatttgtgggaaatatgtcattctatcacatcgattaattaaatatccctgtacatttgtacat

SEQ ID NO: 679444 - DNA, 1209 bp, Homo sapiens
cttagcagagaaaggtcctttccaacacctcacaagattgctttccaaaacgtctttaatcaaagccaagtgctaaagttacacaaacacagagaaacacactgggctgagttacacctacagtttctgcttccctatagaactggaagttctttccctgcttacagtttctagcttctcaaatgaaatagcacaacgcttggagcctgattattttaggaaaggtcaagtgagcccaaatgctaatagaatttcatgaaaccaaagagatggcagcttcccaattctaggtgctaagctaaacacactggggttaaaacataaccacatccttgctaaggagaaaatggtcagagtggtcaggcttactgtgtaagctggtcatgtgatgcccacacagttttatggtcttcttatcattgttactggtctgcagttggagatgagtcagtggataggagtgggaaaagacttgtctctctcacacatagaaccctgaggaaggagtaatcagattcatgtaaaaaatgaagagaggaaaaggagaaggagtgtgcactgttaattttggaaccccaattgggataactcatcaatgctcatcatccactagcacgaagcctcatggctttaaccatcatatatccatgtggtagttcctttgcctgccaggatacgtactccaaccccacactctattactttctccccatatctagtcatccttattgcctcactcctcttaactcttccattcaccaaaatttcccccacctcctctccttttctaagctagacttgcttcctagcctcatttttagaattctcctttctcaaacgcctgttgctgagaagggagaagataatctttagttttggaggaaggagaggtggaaaaagtcactgaaatgttgcagtctcctggtggcagattattattttctttctttccttctgatagttacttaaattttttttwaaatgtgtatttttaagtcctttattatgctcgaagagtttttaaattttgttatgtttttgttctagtgaggaaatatattatattgtaaagttaattttaattatattatcccaatttaggaaataatttgtgagtttgttttccttgcttgcttgcttacggtaatttgtgggaaatatgtcattctatcacatcgattaattaaatatccctgtacatttgtacat

SEQ ID NO: 679445 - DNA, 668 bp, Homo sapiens
gggagctaatggtggggtttgaaactagatgagaactaactgaagactgatgtgagaggggatggcaactggaagcacaaaggagaggagaatcactgggaggaggaagataccagggaagcttggtttgttgttttagatgggaaagatttgagcatattcatattcattaaatagaccctgtgtaaaaggaatattggaaaagaagcagaaataagaggtattggatagctaaaggctcctgggaaggacaaggtgatgtggaagtcagagcacaagtgatggcgttagtcacaggtacctcctctcacatgacgggagaggagaagcagagaatasggcaggcggaggtacgtgtgggagtcacattttgagagagttactcaaaagtcagatagcgtacacatgtgggattgtcctcacatgaacagcttgaggcttatgcgaaataagtctaaatttctgctctagagatgattaatatccaacactcctcccctgacctctatatatttttaaataatcagcagactctttctaatgtgctcttaggaaattagaagaaagcaggagtcagagggttctaaaatgttctggtcactttaaaacatccacaaggtgctcttttaaaatcataaagaaactgaatcctcttcaaattggcagaa

SEQ ID NO: 679446 - DNA, 1251 bp, Homo sapiens
actatatgtatatattgcatatatactttgtacacttctatgtaatggtacatttaaagaaaactttagaaagttatgttttataaaagaaataaatataatttcaagtgtctgagtcagaaaaattaggcaatattaagtcactgtaaagacagaacacatggcgaggcatatttcataaaactataatcatatgtgtatcactgggaagtcaatgtcactctaaaatagtaacagtggctttcctaaacaacgttaccaaaattaaagcattcttttaagttacttttcaagaaaagtttataatgtaggcaacagaaaagggatattagtgtctggtttgggaaatttaactgctttagaatattgcctaaattcaatgtaaaatacagagagctattcttcttgctaacattctgtggaaatatgcagtcccatatttcaaaatatctttcaaacgcaatctgttattgcagagaatgaataaactaaaaccttcatttaattctgaaatagcaccagatgtggaagggggaagcctttcatttgttttccgaagggtaatataaaattaacaaatagcttagatgttcacccacaacaatcactgtgaaatagaagaccacatgtaacatgtgccaaatgatctgtgataaagtgtggaaaacgttctgatgaaggttcagaacggcatatccctccaagaagaagatgggcttactattatggcaatataccccttaaaagtactgttttatamgtaaaataattatttttgatgatttatgtgaatataaggacaaatatttcaatagatatatacactataaatataggttactttttaggtaataaacttacaaggattatttctacatattttacagtaggcagacagatcttcctctttaaagaacaaaaatcctgtcatgatttgatcataaataaattctaaaaagaatcctcaatatttccattttgacactgtcgctcctttaaagtgcttttcattttgaagtagtacaatctagtgattgggagcttctaccaagaagtaaaattgacctaagtttggactcagttgcctttcttgcatgttatgtggtctttggtaaataatttagccttgctaatcctcgacattattatctggaagtagctgcaaattatttactttaagcttacagatataaaatagttagcacagtatccagtaattaacatgcatattagattgtcttactttcattg

SEQ ID NO: 679447 - DNA, 786 bp, Homo sapiens
tgtaaaatagraataaaaataatcctaaactcataggatttacctttagaattttcaataaaatcccttgcaggaaacagcttttaacacaatatctggcatggtgtttaagaaatgttacacacttcccaaacaaaacatccagttagctgcatttcagatatatgccactgggtatgagagtgagtaaacaacaggatgcatgtgtttagtttatttcaacttgttattgtaggaaaataactccaacactttcattcgtcatcatgttgggttaatattatagcacaatctttttgatgcaagatagcatgtttgaaatgaggaaacatggcagggaatcccttagctatccttgtcacctttaggaggttgtcctgcattaccctttgattaatttcagctgtgaaacaaggctacttctggtataagcatctggtctttgcaatctctgaaaaagagggaattgaagtcgatccaagaaagtataagttcccgagagtcataatttcaaattcagtagtaattaaagaaaaacaatgctaaaatgtcagtgtggcaaagtcactttggatgatcaaaatgtagtctctgatacatcttgctgaggtacttcagtcttcaacaaaaacactgttctgtaatgtctctaatgctcctccgaggttcaggatattttctatgacttctagttacttttcagagaaacttgactgttctgttagaagtaaatttttggaaaagagcttataatcactgtcctgttttattgtgtttcctttccct

SEQ ID NO: 679448 - DNA, 1019 bp, Homo sapiens
tgggtggttttattaagatctcctgatgaatctgtatggtttggaaagttacgtgaaaagattattattactgtatatatacattattttcttagggaaattggaagtctcaaacaacgtgttaaaattttctttgaagttttaaagaccatggattgatttttctctttttgtaacctaatctgattttatattcatatctcttaaggcatacaaaatagaaattatatgttgacactacctttagaacccaggctccttaacctatgcatgcatttgtaactgtatcttacctsttatttgatgctaagacacaaactgatatggttctagactacagtttttcaatagaggccagctgcttccctctaagtctaaaatggaggttaatctcatattaatcttgcatcgtttgcttagccagctcttttgatatttgataatgaagaggtctgccctctgttcttagccatcctctcctgggaattttttatctgaatcactgtactataattctcatgacaaattgatattatgcattgcatattaaaattaatctttcagctgggcgtggtggctcaagcctgtaatcccagcactttgggaggccgagggaggtggatcacgaggtcaggagatcgagaccatcctggctaacacggtgaaaccccttctctactaaaaatacaaaaaaaaaaattagccgggggcggtggcgggcacctgtagtcccagctactcgggaggccgaggcaggagaatggcatgaacctgggaggcggagtttccagtaagccgagatagcgccactgcagtccagcctgggcgaaagagcaagactccgtctcaaaaaaaaaaaaaaaattaatcttttaggataactttatttttacttgtaaaatacaaattcttttttcacatagagttcttagctataggttttcattttaaaaatatagtctcagtccttttttatttattgagtccattaaaggtagataaatgttagtatatcatca

SEQ ID NO: 679449 - DNA, 2764 bp, Homo sapiens
ttgtagtatctataataactcattctcattaatgacaccagaaaattttgttaaagagtcacatgttaaggttgtgtgggagtggtttttgttgccttgtagtcttacttcattttctttaacctagttatcccagtcctgaaataacaaattctgaacaaaccaaagtcactgacagttatagctctgtagcctgtgggacagtcatgatttcatttccttcttcctggaccatctttctctatacttccttcctgtgatttctctcttactcaaaacctgctgacaatctgtgttttaagcaacaggaattgtcccctactggtgatttaatcatgaattaagtcaataagaattctgaattatccaatataaacattttataagcactattcttgcctgcttttaaagtcaatttcattgtccagacaatttgttagttgatatgacagtttcaaagatgaacagatcttctggcttgggaaatttccaatacagcactgaaattaagacaaccatagaaattataataagagaaagtaaagtaatgttaaatgacttaagagatacacaaaatactcttgaggtagattgggagagaaagtctcatagaagagtaggatttcaaaaggctgaaaatggggtggggtggagtggagggagatttcaggtggagggatcagtatgaccaaattccagatggtgggaaaatgtccacgggaagtataataatagaggacatttattaggcttccttttatatacccatttgtgatctaagggattacaagtattcagataatctatcctaatcactagttttatacaaaaaaaaaaaaaaatgttcaaagagttgaagtcatttggtcatttgtccaaagttctcaatgacaaggtggaagagtcggggttttaacttcacattgctgggcttcagaatctgtctccaatggtaaactaaatgtcatagcaaatatttactttgtatttattttaatcggaggaaaggggccatactgaacacttcactaaataaatactaatttgcaggtggaaaacttctagaggcaaaccacaattaaataaacaaataaattgtagtatgccagatggtgacggtgctacggaggaaaatagagtgcgagagagagacaggaattgcttggtggaggttgggaggactgtatggagagggttttgtaaayttaaataggaggataaaaagcttttcttgaggaaaaatagataagacattcagtaactaatcccagaatcccttaatactcagagcatatttgatgaagacacgtggtggggtgtgttgctgactcttcagccagaagcccagagtcttgactgaagaaatttgtcaggtgacttctctgaaactttattttctccatttcaaaatgaagagtttagacaagagtcaacagatatttgttgagcatttatgatgatcagagtgggagggcattgtgctagaagccaaactttggtacaactttcagactcccttccagaccaaataatagataattttaatgttttttttaaagtgtgacaatcaattagtatttctgagtattctgatcactgaagtatacaaaatagcactgtaaatgtgagacagcaacaagaaaacactgaccacaaaagaggtttctggtttaggtaattacaacttgtcatttgttacagaagcagaggcaagttttctcttagtcattaacacaatggtagtgaaatgtgactcatgtaaactcaataggatgccagaaggacctgatgtaggggatggagatttctctctcatgtgtgctcaccttgttaaagaaaagactgtggtgttgagagtcttatgaggatagggtaaaacatcatgtatcttaaaggattttggaaattttgtctagatcctttctcagtaataatactagttaacacttattgtatcttaccatgggccaggtaatatgctgagtgttatagttgcattagtgtattacttaacccctacacaaaacagaagatataaccattattgtcttcatcctatgctaggagaaacaaatttagaaagaattaagtagcttatccaaagtgagttgggcagtaaagtggcagagccagaactgtctggctcctaagtgcatgcttataaccgtgattctgctgctggttaaattcaccgtgctccgtgaccacagactgaaccctcaacccagttggcattctggggaaaagtcacaagacagttgaactgcatatcagaaaaataagcttcctaattccttaaccaagagaaagtttgggaaacaaaatagaaacttaaccatacaatttctgggtagaaaattgtaagtgttgaaagggaagtgaaaaaacataaaacagtaaatatatgctgacaactcagaataatatagaatcatttataaaacatagttctttttaaagaactttaagcaatatttattggcaattatgtgttaaaccctgtgccagctatgttaagaaaaacatagaatgatgggttaccacaccccaatttttattaaaagtttacatctataaatttaaaaattcacgtacatgcttagtagtaatagtatgcatgagaaaaattcatattgttattaacatttgagatatttccaagaatttgtttaattttttttctttttgtttgtattatgaaatcacacagcctcctttgagctccttgaagggatttttgtcctctgggatgccctttaccagt

SEQ ID NO: 679450 - DNA, 2764 bp, Homo sapiens
ttgtagtatctataataactcattctcattaatgacaccagaaaattttgttaaagagtcacatgttaaggttgtgtgggagtggtttttgttgccttgtagtcttacttcattttctttaacctagttatcccagtcctgaaataacaaattctgaacaaaccaaagtcactgacagttatagctctgtagcctgtgggacagtcatgatttcatttccttcttcctggaccatctttctctatacttccttcctgtgatttctctcttactcaaaacctgctgacaatctgtgttttaagcaacaggaattgtcccctactggtgatttaatcatgaattaagtcaataagaattctgaattatccaatataaacattttataagcactattcttgcctgcttttaaagtcaatttcattgtccagacaatttgttagttgatatgacagtttcaaagatgaacagatcttctggcttgggaaatttccaatacagcactgaaattaagacaaccatagaaattataataagagaaagtaaagtaatgttaaatgacttaagagatacacaaaatactcttgaggtagattgggagagaaagtctcatagaagagtaggatttcaaaaggctgaaaatggggtggggtggagtggagggagatttcaggtggagggatcagtatgaccaaattccagatggtgggaaaatgtccacgggaagtataataatagaggacatttattaggcttccttttatatacccatttgtgatctaagggattacaagtattcagataatctatcctaatcactagttttatacaaaaaaaaaaaaaaatgttcaaagagttgaagtcatttggtcatttgtccaaagttctcaatgacaaggtggaagagtcggggttttaacttcacattgctgggcttcagaatctgtctccaatggtaaactaaatgtcatagcaaatatttactttgtatttattttaatcggaggaaaggggccatactgaacacttcactaaataaatactaatttgcaggtggaaaacttctagaggcaaaccacaattaaataaacaaataaattgtagtatgccagatggtgacggtgctacggaggaaaatagagtgcgagagagagacaggaattgcttggtggaggttgggaggactgtatggagagggttttgtaaacttaaataggaggataaaaagcttttcttgaggaaaaatagataagacattcagtaactaatcccagaatcccttaatactcagagcatatttgatgaagacacgtggtggggtrtgttgctgactcttcagccagaagcccagagtcttgactgaagaaatttgtcaggtgacttctctgaaactttattttctccatttcaaaatgaagagtttagacaagagtcaacagatatttgttgagcatttatgatgatcagagtgggagggcattgtgctagaagccaaactttggtacaactttcagactcccttccagaccaaataatagataattttaatgttttttttaaagtgtgacaatcaattagtatttctgagtattctgatcactgaagtatacaaaatagcactgtaaatgtgagacagcaacaagaaaacactgaccacaaaagaggtttctggtttaggtaattacaacttgtcatttgttacagaagcagaggcaagttttctcttagtcattaacacaatggtagtgaaatgtgactcatgtaaactcaataggatgccagaaggacctgatgtaggggatggagatttctctctcatgtgtgctcaccttgttaaagaaaagactgtggtgttgagagtcttatgaggatagggtaaaacatcatgtatcttaaaggattttggaaattttgtctagatcctttctcagtaataatactagttaacacttattgtatcttaccatgggccaggtaatatgctgagtgttatagttgcattagtgtattacttaacccctacacaaaacagaagatataaccattattgtcttcatcctatgctaggagaaacaaatttagaaagaattaagtagcttatccaaagtgagttgggcagtaaagtggcagagccagaactgtctggctcctaagtgcatgcttataaccgtgattctgctgctggttaaattcaccgtgctccgtgaccacagactgaaccctcaacccagttggcattctggggaaaagtcacaagacagttgaactgcatatcagaaaaataagcttcctaattccttaaccaagagaaagtttgggaaacaaaatagaaacttaaccatacaatttctgggtagaaaattgtaagtgttgaaagggaagtgaaaaaacataaaacagtaaatatatgctgacaactcagaataatatagaatcatttataaaacatagttctttttaaagaactttaagcaatatttattggcaattatgtgttaaaccctgtgccagctatgttaagaaaaacatagaatgatgggttaccacaccccaatttttattaaaagtttacatctataaatttaaaaattcacgtacatgcttagtagtaatagtatgcatgagaaaaattcatattgttattaacatttgagatatttccaagaatttgtttaattttttttctttttgtttgtattatgaaatcacacagcctcctttgagctccttgaagggatttttgtcctctgggatgccctttaccagt

SEQ ID NO: 679451 - DNA, 2764 bp, Homo sapiens
ttgtagtatctataataactcattctcattaatgacaccagaaaattttgttaaagagtcacatgttaaggttgtgtgggagtggtttttgttgccttgtagtcttacttcattttctttaacctagttatcccagtcctgaaataacaaattctgaacaaaccaaagtcactgacagttatagctctgtagcctgtgggacagtcatgatttcatttccttcttcctggaccatctttctctatacttccttcctgtgatttctctcttactcaaaacctgctgacaatctgtgttttaagcaacaggaattgtcccctactggtgatttaatcatgaattaagtcaataagaattctgaattatccaatataaacattttataagcactattcttgcctgcttttaaagtcaatttcattgtccagacaatttgttagttgatatgacagtttcaaagatgaacagatcttctggcttgggaaatttccaatacagcactgaaattaagacaaccatagaaattataataagagaaagtaaagtaatgttaaatgacttaagagatacacaaaatactcttgaggtagattgggagagaaagtctcatagaagagtaggatttcaaaaggctgaaaatggggtggggtggagtggagggagatttcaggtggagggatcagtatgaccaaattccagatggtgggaaaatgtccacgggaagtataataatagaggacatttattaggcttccttttatatacccatttgtgatctaagggattacaagtattcagataatctatcctaatcactagttttatacaaaaaaaaaaaaaaatgttcaaagagttgaagtcatttggtcatttgtccaaagttctcaatgacaaggtggaagagtcggggttttaacttcacattgctgggcttcagaatctgtctccaatggtaaactaaatgtcatagcaaatatttactttgtatttattttaatcggaggaaaggggccatactgaacacttcactaaataaatactaatttgcaggtggaaaacttctagaggcaaaccacaattaaataaacaaataaattgtagtatgccagatggtgacggtgctacggaggaaaatagagtgcgagagagagacaggaattgcttggtggaggttgggaggactgtatggagagggttttgtaaacttaaataggaggataaaaagcttttcttgaggaaaaatagataagacattcagtaactaatcccagaatcccttaatactcagagcatatttgatgaagacacgtggtggggtgtgttgctgactsttcagccagaagcccagagtcttgactgaagaaatttgtcaggtgacttctctgaaactttattttctccatttcaaaatgaagagtttagacaagagtcaacagatatttgttgagcatttatgatgatcagagtgggagggcattgtgctagaagccaaactttggtacaactttcagactcccttccagaccaaataatagataattttaatgttttttttaaagtgtgacaatcaattagtatttctgagtattctgatcactgaagtatacaaaatagcactgtaaatgtgagacagcaacaagaaaacactgaccacaaaagaggtttctggtttaggtaattacaacttgtcatttgttacagaagcagaggcaagttttctcttagtcattaacacaatggtagtgaaatgtgactcatgtaaactcaataggatgccagaaggacctgatgtaggggatggagatttctctctcatgtgtgctcaccttgttaaagaaaagactgtggtgttgagagtcttatgaggatagggtaaaacatcatgtatcttaaaggattttggaaattttgtctagatcctttctcagtaataatactagttaacacttattgtatcttaccatgggccaggtaatatgctgagtgttatagttgcattagtgtattacttaacccctacacaaaacagaagatataaccattattgtcttcatcctatgctaggagaaacaaatttagaaagaattaagtagcttatccaaagtgagttgggcagtaaagtggcagagccagaactgtctggctcctaagtgcatgcttataaccgtgattctgctgctggttaaattcaccgtgctccgtgaccacagactgaaccctcaacccagttggcattctggggaaaagtcacaagacagttgaactgcatatcagaaaaataagcttcctaattccttaaccaagagaaagtttgggaaacaaaatagaaacttaaccatacaatttctgggtagaaaattgtaagtgttgaaagggaagtgaaaaaacataaaacagtaaatatatgctgacaactcagaataatatagaatcatttataaaacatagttctttttaaagaactttaagcaatatttattggcaattatgtgttaaaccctgtgccagctatgttaagaaaaacatagaatgatgggttaccacaccccaatttttattaaaagtttacatctataaatttaaaaattcacgtacatgcttagtagtaatagtatgcatgagaaaaattcatattgttattaacatttgagatatttccaagaatttgtttaattttttttctttttgtttgtattatgaaatcacacagcctcctttgagctccttgaagggatttttgtcctctgggatgccctttaccagt

SEQ ID NO: 679452 - DNA, 645 bp, Homo sapiens
tacaggaacatgaaaatcatcccaatttaaagtgttctaaaataaggtcactgatctttttaaagaattttaataatatttctgtggagagtccatgttgttatatttatatattcattcattcattcattcaacaaatatttaatgggtgtttgctgtgttcaaggcattaggcttgctttggtgaaagaaattaagacaaagacaagctccctgatcatgaagaatttatcccatgtaagagcaataagctgagacatacaaatgttacctagatgtgttcaagttcttcttcaggtccgacttacacttttctttaacactccgttaacgacagcckgaatccctatcctcttgaccacatgaagtcctggtagttaacaatttcctctcccaaatctaattttctctgggaaacttagaggagagatcacatgttcctcaattccactcccactgtggttgtagcctccgcccacaatatggtgttcgtttctctccagctactgttgcgaccttgtggcctgatctagaacttccagtacaatgctgaatagcagtggtgacagtagatatccttgacttgtccctgattttagggagaagatacccagtctttcaccattaagtatcatgctagctgtg

SEQ ID NO: 679453 - DNA, 1603 bp, Homo sapiens
ggcttcctcatttggcttccaagaaatgatactattttctgtctcttcctaattctagagtttctccttctcaatcacattggattgtcaacaacttcaagtcaatgtttcaccctcagtaatcttctcttcttaatctataccatctcctttgattcattacatgtcttaattactgcctgtgtgctgtggtagacctttctcagacctactgtaatgcaaatgaaaacctgtagcactgtgcaagttatttaaataagcattcctaagatggatctgaagtcttttcccttattgattctgcttttgtcatttgttttttaaatgaaaacaaatttattatctcatttctgtaggaaaaaatgttcaaatatatatttctaaatctctgtgatggtctttcttagttttctcttatccacatgaatctattgcttttcagttaccatagtgtccaggttgctccaatcaccactggatacttcacaatttgtctatgtcttccttaagatgtgctgctaaaaaaataaaatacagtattccagacataaactgttcagcctagaagtcaagaaactattaatctcatgctcttgactctattcttttaaaggcggattgatgttctatgtgttgtttggcagcaaactcacattgcttgacactggctcacgttaagtttttttttttcctgtgtgaaaaacaacctctttccatactttcaaagcatacattttttaatgaaaaatacaggaattatcatttatttctactgaatttcacgctatagattttaatccagtgttctagctcatagggatactgaattgtaattatgtgatctatggtataagttctttctattgcataaatcatcattcctaattttgacctctgaaatcttgctttctgggagttcaaccaagtcactgatattgttgacttcagtcacttaagtaaaggaagagcctctaacacgctactggagatgckgctctattggcagtgctgtgtgtcaagattcactcaggaagtggcaaacgacatccacatgatgtcattcataagcacctacagtggttgtgaaagctcccatgactcacccatggtactgtcatgtcaacaacccactcatgagactgtcattaaaatacactttaaatatttattagaaatcaagatatatcaaatgtctatgctgtttctctgttctaccaaaccaaaatctcatccaaaagggaaaagactactataatatgattgttctttctgaactcatttctgtagccaatgagtactatgatttctgttaaataaatactctgttttgtcatgtctaagactttcactttaccttgattttaattttcagagaaattacaatttaactttttattttctttctcatttgcatacttgccttgaataattaggatagatcactggccagagagaattcctccatcaagaattgcttcacacagtcgggagccaagatggccgaataggaacagctccagtctacagctcccagcgtgagcgatgcagaagatgggtgatttctgcattcccatctgaggtaccgggttcatctcactaggga

SEQ ID NO: 679454 - DNA, 588 bp, Homo sapiens
cagaacacagagttactgtgagacttgkggtagaaaatctttaattcattccccacatatgtgctaacatttgatacagcttagaatttaaaaaaacataaaagaaggctataaagtaaaagttacaaaaaagggggaggaaaaggaaaaggagacagatgattttatcagaaacttggaatgaggcacttgtcacaactaaacactgaatttaccctgggcttcctgaccacaaatagtagtgatgaaactaagctcctcatttttatatatttataaccacatagacagcactttgtttatctcatttaatccccctggtttcacatattttgaaaccaagggaatcacatatgtaaagaattttctgagttgcatggttataagccaaaactgcctaaactaatgtaatgaaattacattatggactaattgaaggtctacgattacttatccaaaactactgggaacagaattcagaattattcaggattttaaaatgtaatcaattatatagaacctatgttaagtatcatatgttacatatcatattcagataatctagggtagtaccctataatcagacag

SEQ ID NO: 679455 - DNA, 576 bp, Homo sapiens
cctgtgtaacacatgtaaatctaatgtgttcatttaaacttctatgtaggattgtacacatatgaattttamcatgttttttaacccagtctcctattgctgagcattagactttgttgtgttatcgtttttagaaatgccccacctagatctcttttacccagacagagcatccaccagcagtcactctgagtgctggctgctgacagctcacagctgcccctttatccagacattgcccttggctggcaggagcttctttgccctggacatgacacctctccaccccacatacacaccttaggaaacctacaatccattgtgagtgactgactggtatgagatacaaaaagactccttgcctcaaggaagaaacccttgaatgggatttatattccaaagtttctcatggatccatccaaaataaggcttcttcacctgagaccatactcttgcttggcatttctcatccaaatcctcttccctcagcaggatccttacaggtttctccagaaaagtgtattgtcagtaagtggtatacaccagaatcatctcagactctgctcctaaggaact

SEQ ID NO: 679456 - DNA, 625 bp, Homo sapiens
aaattaaatatttaaataaataataaattatgtataataataaaatatatcttaatatattttattattttaaatataggagttaccatgtgccttataaatgttcagacactttactgatattaatttatctaatccttttaaggtacccatgaggcagttactattatgattatacccattttgcagatgaagaaactaagtcacagagagataagtaacctgatcaatgtcacacagatagaaaatagcagagcttatatttaaatcaaagcagtccagctaagcaatccatgtgtttaatcactatattcatgctatctattaacttcatcctttagtagttcttttaatactgatctgtgcctagtaatgctattggaatttgattctcttttttctaaaattattgttgtttaaataaataaataaaactttacctaccaagtgtggtcagctgaataatgtccccttcccaagatgtccacatcctaatccctggaacctgtgaatgttcatttactyggcaaagggaactgtgaaggtgtgattaagtcaagggttttgagatgaggagattatcctggattatccaagtaagctttaagtgtaatcacaagtgttc

SEQ ID NO: 679457 - DNA, 761 bp, Homo sapiens
ttgttcattatcacccatgtgaggccaagcaaaacaactcaaattaaacctccatattaacagcctctcaactgggacactaacatgtgcgtgcgtcttccctttccagcccaagctacgttagtttatttgactgttttcatgacatgataccaagccctgtcaacatcttagtcactctcttccgagctggctgcaacttgcctgtccctgtgcttctctgagtttgtgatgagtatcacaggtatcacaggyatcatgtgaccaattcagggtaaatcggaaccattcccttctgctatttactttctacatagctacaacgttatcatccttttgacacaaaagacttcctcgcacacgccattgctaagatacgtcttcccaattcaatccccttagaattgggtttttgagcccaagtacagatttttacatttatgaccatctcctttcatctgaaaagacttggctcatcagggctgtcagtaccttttaaattcctgattctcttgtccaatgtctccctgtttattttcctgagatccagacaaaggacaaaatatgcagataccacctgaaacttatctttcaggggttggcaatctattaatcaatatcacctgggtattactgttctaattccctttggagagttaaaaatcacagagccatttagtcctaaattaccttctgctaatcattattactaacacatgggagttccagaacaccctgaagtgggggtattgacctcaaag

SEQ ID NO: 679458 - DNA, 676 bp, Homo sapiens
gtagtcaccagctatggagctggaaatgtcctcggtgatgtttcctcgtttagtttcactgtttttcatctcatttcgctttttttctgaaatgtccggaccaaatctcatggcctcgcatgttaatcttttaatagtctgggccacgacaggcatctcactactgccatggtgtatgacagcacgtgtatgcrgggggtgcagggacacaggttgtggggagcatgctttcctgcttcccctgaagcttccctttcatcctctgggatcttgtgtacctcaactatggccatgccaccatctgtagacttggggtttcctcccagaactttggcctcaggaaaataatttttccctttacctttctaatgtaacatttgttcccctttctacatcaattcatggatctctgtttgagtctgtccaatgccactcttgttacccattaagagtcagatatcaagtcttttcatactacatctaaatcttcaacctccttccccttacatttcatgcgttcttccatcccggccctgtcctggacattgctatcaagatctcattgatgattgttatcaacacctcatcctgcttctgccaccaccggccccatctaacactgctcagtccactgctagtggaagacagccatggatctggggaactcagggaatga

SEQ ID NO: 679459 - DNA, 589 bp, Homo sapiens
gtctgttaaaaaaaattttaggacgaagataaacaggaatgacaatttatttttattttttattttttttgttctgtmccatgtctactcatacagaatgagaatctagtcatttaaatagtgttaaaactggtggtatgctttttcagaacacccttttgtggtggcagtttcacttgagagaccaaaatgtaaagtacaaaagtgtttgctgagcagaaagagaaagcatggagggaagttactgtcttgagggatatttccactactctaggactatatagctgtccaggtaatgagtacaatgctcctagaatcaaattcccacttttctgcagtggactgaattaatctctcatctttaattccccttttccagaatctcttcaaattgtcacatgaaaattacagtaaatatgataaactaataaaagttgtggcagatgcactctgaagtgtccctcaaggatttatggacttggatcatctctgcttctggagtggggcagaacctgtgacttgtttctaagcaccaggatatgaaaaatgagatgggatcagtctcctttgattgggttacattatttag

SEQ ID NO: 679460 - DNA, 589 bp, Homo sapiens
gtctgttaaaaaaaattttaggacgaagataaacaggaatgacaatttatttttattttttattttttttgttctgtaccatgtctactcatacagaatgagaatctagtcatttaaatagtgttaaaactggtggtatgctttttcagaacaccmttttgtggtggcagtttcacttgagagaccaaaatgtaaagtacaaaagtgtttgctgagcagaaagagaaagcatggagggaagttactgtcttgagggatatttccactactctaggactatatagctgtccaggtaatgagtacaatgctcctagaatcaaattcccacttttctgcagtggactgaattaatctctcatctttaattccccttttccagaatctcttcaaattgtcacatgaaaattacagtaaatatgataaactaataaaagttgtggcagatgcactctgaagtgtccctcaaggatttatggacttggatcatctctgcttctggagtggggcagaacctgtgacttgtttctaagcaccaggatatgaaaaatgagatgggatcagtctcctttgattgggttacattatttag

SEQ ID NO: 679461 - DNA, 589 bp, Homo sapiens
gtctgttaaaaaaaattttaggacgaagataaacaggaatgacaatttatttttattttttattttttttgttctgtaccatgtctactcatacagaatgagaatctagtcatttaaatagtgttaaaactggtggtatgctttttcagaacacccttttgtggtggcagtttcacttgagaraccaaaatgtaaagtacaaaagtgtttgctgagcagaaagagaaagcatggagggaagttactgtcttgagggatatttccactactctaggactatatagctgtccaggtaatgagtacaatgctcctagaatcaaattcccacttttctgcagtggactgaattaatctctcatctttaattccccttttccagaatctcttcaaattgtcacatgaaaattacagtaaatatgataaactaataaaagttgtggcagatgcactctgaagtgtccctcaaggatttatggacttggatcatctctgcttctggagtggggcagaacctgtgacttgtttctaagcaccaggatatgaaaaatgagatgggatcagtctcctttgattgggttacattatttag

SEQ ID NO: 679462 - DNA, 589 bp, Homo sapiens
gtctgttaaaaaaaattttaggacgaagataaacaggaatgacaatttatttttattttttattttttttgttctgtaccatgtctactcatacagaatgagaatctagtcatttaaatagtgttaaaactggtggtatgctttttcagaacacccttttgtggtggcagtttcacttgagagaccaaaatgtaaagtacaaaagtgtttgstgagcagaaagagaaagcatggagggaagttactgtcttgagggatatttccactactctaggactatatagctgtccaggtaatgagtacaatgctcctagaatcaaattcccacttttctgcagtggactgaattaatctctcatctttaattccccttttccagaatctcttcaaattgtcacatgaaaattacagtaaatatgataaactaataaaagttgtggcagatgcactctgaagtgtccctcaaggatttatggacttggatcatctctgcttctggagtggggcagaacctgtgacttgtttctaagcaccaggatatgaaaaatgagatgggatcagtctcctttgattgggttacattatttag

SEQ ID NO: 679463 - DNA, 596 bp, Homo sapiens
cacacacacacacacacacacaagctttaacatattgctaaatgaagaaactccataccagtttagaacactgagtagaagttactatgatatgttgtatgtcataaattaaagctaagagagttaataagggataatatgagagatatgctaaaaatactttgtacatggtatgtagtcaaacgaaggaagacactggcaattgttagctaaaaaatctgaagttaatcatgcaatgcagagaacagagtggcagttctttcttgaaagaatacagaaaatagtgagaagactgccaagtcatgtctggkagatagatgaacctcatgctgagcaaacactgtgtggtcatgttgacacctccatctctgctggactgccgaaaagccaccaggtcaccatgctgtgaacaaattgcctcctctgtacctggccccaaaaccttccacatcatggagcaacagggcctgtacttctccatgaaatagcaccacctacctccaccccttccatccatcagtcctctaccttgggggaggctctagaattggaggtttataggagtttttgttagtctagacaaaaggaagggccag

SEQ ID NO: 679464 - DNA, 1011 bp, Homo sapiens
cagrtaggaagcagaagcagaagagcacacacatttataaaattactagaattagacgtttaaaaatactttggtaacatttggagcaacagtttctttatccatggcaagagagtattatgttttttaccactgttcagctatttttcacattcgttaggaaagataaataaaaacagcataaagattatgaactccctcatgttgaagataaaatattcagtgtagtatatatatttttgataaatatttttattaataaataaataaattctttattaataaataaaattttgaaagaatatatatttaaaatatatattttgaaatacatacctttttttgcacaaagctcgctgtgtagcattgatgattaaataagctgcctatctgtgtttgagaatatcttttcttggagacagaggaagagactaactgaatcttccataaaattccaaactgtgattcactgattcggtaagttgggaaggatgaagaataataacagcgttaaatcactgaggatatatttaatagtatattaaaaaccaaataattttatagtgttgaaattataccatacaaactatgaaatattcattttcttctataccaatatatgaagactgaaaggtgtcaaaatataattgtgtaattggtcatttttagagacatccatagaattcataaacaatattcactgaaataaattcaggagagaattttcagaattaggcctcactggcagtttgaaagtgttgaattgttctcccacgttgtgtggcagttctggggctgtattcaaaacgttggtatctaggtaggaaatgagtcaaagtcgacgttactcttgaggttaaaggtctgtttctttcaatcagttcaaactgacaggcctcctgccatcacctcctccttagccaggcagacaggccctggccgtcagtgtgaaaacatctgttgaatggatttattgactggatcttgttttttctctccctttctctattt

SEQ ID NO: 679465 - DNA, 1146 bp, Homo sapiens
tcataaattgctatcatccaagggcctggaaaatacatcaacaggtgcatgagttttttggaaatgaaaatccctgcaacattctttagcagtgttcctcaatctctactcttaccttctgcccagtcactaggaaattgatgatgcttggcttcctcatttgactccaaagagtaccctttaaccagtttgtttttttgtttgtttgttttatttcactgttttcttctggttccccatgcaaatgactcatgggattctatagtaccaaagcaaacttcacttgattctatgtatgttactttcatttctattcattatggaatctctgggtgggcttttcgaccaacctcttcctttgtctacagctgtgtttgatatttcagaacctgactacagaggaaaacaagccagataattccaaggccaaaggaaggttaagtgtggaacacacacacacacacacacacacacacacacacacacacacacaaagggtgctattccctctgcaaaggaacagtgctgtacatatatgcgtggataattatttctttttgtgtactctactccattctagttccgtgttctcaaactgtggctaatcaaatgaaatatattgtagccctaagagactcataacttggatactgcagaaaacgaatttatatgtaccttccccaaaggctcttttgagttctctgatttattttaaaatccattttcaggattcagagcttgtttttgtggcttctgtgacctcatgcaagccttcgtgcttggaaaagttaaatctattttctaaaaccatattcccaagccttgatattatctttagtttaaaaattaatgaatgaaatagccaagttaattacctttggtaggcatctttaataagtatgcatagaagtgactttttataatgttttatgccataagaaaacattccatactaggagctatgagctgggtctatttctttctccgtactagccattgcctctgactcttctacttccaggagcatagcaaaactgcccagatattccggaaaacccaggaacactgcccagtgttagtggcagccttttgaatcaatcatgcctggtgctatscctgtggattcaccgagtttttgctcaaaac

SEQ ID NO: 679466 - DNA, 644 bp, Homo sapiens
atacgtgatatatattctaggtctatttctgatctgtctatagacactggtctgttttaatatcgatgagccaatactaccctcttttaattattgtagaggtataatatcatgatacctcaaaaggtaattgccctttttgttttcttcaaaattactttgtactttttttcttccatgtgaattttaggatcagattttcaagttccattaaaaatgctaattggattttattacaaatgacagattaatttgaggaatatggcaatacagtgatattcttgtgagcatgatttttataattttatattttattttgatgtttttgatgatgttttctcaactactcaagttagttacattataaattattggggagtttttttaagctccccaacatatgtgaatctttttaaatttttawtatctttcactctgattttctaatttaagaacataagtctgtctattatcaatcctttgaaatatgttgacatcttctttatgaaaaacgtatttatttgtttagtacagatttctaattatatatattagttaaagtttgtaattttgttagctatatcttctacgttctgcatatagaaagggagtagagagttcctgtgtacttactgcccccacac

SEQ ID NO: 679467 - DNA, 1177 bp, Homo sapiens
ttaagttacttataagtccactataaaatgttttgcagtattttgtaatgtcaagcagtattacccattgtcaaaatacaatttttgaacaaattgcattctatctttatataaaattggttataattgaagcccatgctacattgttcctgaagcatacattctcaggttgttttgaaattaaacaggtttatcattcagaagttttaagtccagccttatcaaggggcataagaattacttcttaaaccctttttccaacttcattatttccagcatataaatcaagataataatagctatatcatatgttcaataggaaaaaaaatattgcctatgagaaaaagataaaataaaaggagtgatacaacctagaaatatgctaaggtttgaaacatcttgttttcagtaacataaaaaatattttagcaaattaagtcttattttgatgtccccatagtaagtatctttaagtgtttgacagaatttagtagtcatttagtatatttttatttttatatgtaattgaatctttaatatgagtattttctagcataatttaaacaatgaggctgtaacataagttgctactaaggggatatgaaaagaaagctggagaacaagagaaaaaatgcactgaaaatgtatgaactgagtaatgttgggtgttggtggtgtatattagaagatgaacaggacacagattgcttacaatctggtggggagatacagacataacgtaaacaattaaaatacagtggacaagtagtaaaagtggggaaatcatatccaagtatctagcarcagggatacctaagtgagttctggtagaggaaagggtcactgggcaagatttcttatctaaaaaggaaggacaatgagtcaatagaaatacaaaatccattgtaaaaataaagacagcttcctacaactaaagcaatggattattcagaaggggaatggtgaggctaaagaaggaagcaaacctggaagaaatcttagccatgttaaatagtttaaatttcttctaaaagaataaaaaataaagtagaccaacaaccaccccaaagggttttaaatgggcatttaaaaaggtttgtattacattttgggatggtctttccggttacatttggagaatgagtggaaatagcataagaccacaaaatccaggaga

SEQ ID NO: 679468 - DNA, 1479 bp, Homo sapiens
tgtgtgtgtgtgtgtgtgtgtgtgtgtgtgtgtgtgtagtcagtggtcctaataagatctctcagcttttacagtgttataaggcaatttttatgaaaaaccagatataactatctatttcccatggaggaaagatccataaattacagctgaggttatttgtcagttatgtagtttaaaaattctttggcagataggattaaagtgtgagaattgatcctgaactccagctgaggggcctgagaaattatagagataatatgttcagtacaacatctcctgctgcccaatttaaaggtgctgsgtaggaggtcagtggaaagggaaggcagttggatggcactatttgaaatattttaaataaatgttttgtaagagactaaagtattatgtaaaggaatgaaaatttttttctaagcagaatctttatccaatcatttgatttatgaatgagagatttcacttagagtcttggggcttccagtcaatccagtcttcagctgagcattctcttccatggtatagtttttaatgccttgtctatttaaaaaaatgactaataagaaaggttgtatttttttcctacaattttctcagcaaaatcttctgtgatctaataattctcacatagagaaaactgtttacaactttctgcagggatagctaatctttttatgtcatagtcactgctcagaagcagtcctaaacctcttacggatcctaacaatgttataccataaattggctagctgaagaaaagcaagataaaatgtatggtatctctagattttttttttttttggaacagccaggtatccaggaatcaaatgattaactacatacaaaagctggagttgcatgattgatttgttccagaaagaatttaggtatttacaaatgtgcatatggtgtagcaaaataaaaataatttcaaacttacaggaaaaatgagagaaaaagaacataaagcaggaaaggaaggagatgccagaaataagggcaagacacagattcatgacgtggagtccacttgttagaggtgaactcaaaatgttctctaagcttgtaacatcaagggaaatcatatttaatgatgtggttgacagtatccaccaggaaaaaatgaagcactagtgcagaagtccgtcaaattttgatttgcaatctgagaggaagagaggggaatctttattttaaaatgaacagcaagttcccatcattacaggagacatagcgaggagcttccaccattgtatctaatgatgtccctcttcaaggcagatggcataatgtaagaggaatctcaagagtgagagagaattgggtttcaaattaccaatataactcttagccagtaaagattgatagccccaagatcactatagtttgttacttattgaaaaacagaaggtaataaaataaacagtatggtatgcaaagctttaatgttgtgcttaacaagcaggagtggccaaagtt

SEQ ID NO: 679469 - DNA, 669 bp, Homo sapiens
tgaaaaagatgctttaaagggcttgtgccacgtgtcaaagcgctgaatctgaaagctctyctccagatgccttcagtggtgtggttttatttccttagaggaaatacattaggacaatagccatatctttttttttccttattttttatttgagatggagtcttgctctgtcgcccaggctggagtgcagtggcatgatcttggctcactgtaacctccgcctcccaagtttcagtgattgtcctgcctcagcctcccgagtagctgggattataggtgcccaccaccatgcccagctaatttttgtatttttggtacagacagggtttcaccatggtggccaggctcgtcttgaactcctgacttcaggtgatctgcccatctcagcctcccaaagtgctgggattataagtgtgagtcaacacgcccagccaccatacctttttaaatttgaaatttgtgatcgtttggattcttattggactaaatgaatgggggcatgcgacactgaaggagaatgaagctaccaaaataatactgtcctaagatgttagaggaaagtgttttatatgcagtgttctaataactgttccctcttacccacttaagaagcctctttgcacttcattggtcactagtttagccacttgaaaacagcataaaatctct

SEQ ID NO: 679470 - DNA, 1997 bp, Homo sapiens
tatgaaagctatgagaacaacataattctgtgtggacctgtgtatcgctaacacatcccccaaatctataaaaagtgcactgtatttaatagaatctaagatgccatcaattgtaagatgcaccgttattttgtgtggcaataaggaagaaatattgttgcctattataattggaagatgccataaacagtaaaatgcaccttgatttcagtgaaattcatacaattagcacattcagtgctaaaatgtgaaaatatgtacatcttcaaattgatgaaatattttactatgtaatatatgtttgctacgggagggtatcatcttccctttgggcagaagtcagatgtactctttcctttctctcctcccaccccatctatatctgaggctcaaaaatcaaattaaacacctctcccttgacttgttaaggatcactctatcttcttcttccaggagctttctctgttttttaaattttattttttgtttttgtaaagacagggtctcactctgttgcccaggctggaatgcagtgacacgatcrtagctcactgcagcctcgaactcctggcctcaaagccttggcttcccaaagtgctgggattataggcatgaaccactatgcctggccagctttctttcttaacacattggttcaggcttttagctcaccagctgaggccaaacaggcattctggttctcagaggtcccacagggccacgcagctcagtcccttgggatgagcatctttgaagaaaggccaagtcagcacagcttgagtgctcagtggaacccaagctggggcttccaaactctaggctacccaggcaaaaaggatcctggctctcctcctctcccactcctcagccagcaggcccctgatggatggctaacacaggggtatggagcagcctgcacccctgccttctcatcctcatgccaacatcaaccccaaatgctcttgtcacccagtgccaccagttagcatccaacctattcttcttcttcttcttctttttttttttttgtttgtctgtttgcttgagatagggtctctctgtgtctgccaggctatagcgcagtgaagcgatcatagctcactgcagcctcgaactcctggggtcaagcaatcctcccacttaagcttctcgagtagctgggcaacctgttattcttgagggcaataatcaacagtgaatgggagggaggaaaggcaagcagggaggcagagactgtctgcttctactgcagcctgaggagggaagataatgaatcatccctctcgtaagctagagatgaaaggagggaggttcttaaaaccctaatgaggctcagcacacaaagaccccaagccttcctgccctcacagtcctggtttgtgaggcttcaaaaagcaggggagggagccctgaagcaagaaagtagcttgaccatccaaaactgtcttctttgtcttccacgggtccacaggcaaagacccacaccaccacagccacaacgaggaaacacggaagccagcgttctacaaacatccacggagcatctcccacgtgcagccgttctcatcatacatgcctcacttaattttccacactgggccaggcacagtggctcatgtctataatcccagcactttggaaggccaaggtagacggatcgcttgagctcaaggaatttgggaccaacctgggcaacatggcaaaaccctgcctctacaaaaaatacaaaaattagctgggcgccgtggtgctgacctgtaatcccagctacttgggaggcggaggcggaggattgcttgagcctgggaatttaaggctgcagtgagccatgatcacgccactgcactccagcctgagtgacagagcaagaccctgtctcaataataataataataataattccacacagctctatgggtcagtatgacagcccattttatgaatcaggagactgaggctgggttgggggacagtgtgatgctgcaggtcacacagct

SEQ ID NO: 679471 - DNA, 1178 bp, Homo sapiens
tgacctggttttcacagcgtagtcgaaccccaaacattgtaaaatgtgtccctggcttctgagcttgcccaaagtaatgtctgactgttggtttttcccttcacaggggacgacttagcttctgtattattgttgcttcctcagggggagacagtcaagaataaaaagtattctaccacctctctgcctgacttggtttcctgggatttatccctgaaagaaaacctacatctcccctaagacatcaaaggacactgggcagtaagcctcagcagacagcagagagagaggccaccctaggcaagggggcatgcctgtctcaagtcrgcttctaagaggctcatgcccaagctccagaggaccagcaatcagatcttcctccaaggatgggaagtctagttaagagacctagtcagataagaaaacctgaattttccagagaaattaaaaactgccgcctcccagccttagtctcaaaggagttgcttcaaccattaaaatgggcagagcagggtgggtgcagtggctcacgcctgtaatcccagcactttgggaggccaaggcgggtgaatcacttgaggccaggagttcgagaccagcctggccaacatggtgaaaacccgtctctactaaaaacacaaaaaaactagccggatatggtggcaggcgcctgtaattccagctacttgggaggctgagacaggagaatcacttgaacctgggaggcggaggttgcagtggagttgagaccaggccactgcactccagcctgggcgacagagtgagactccgtctcaaataaataaacaaaacaaataaaaataaaatgggcagagcaacgctgatttccagacacagccaggcagaggcaagcaattgaaagccacatcacaaatgaaattcatccctggtccttatatggaagtcccaggccaagagatcataagccagggtagatgtcaaaattgtgtaaaggcagtttccggccttcttctaaagcccatgaagggcacggagaagggaatgttgggagctgtactgtctccttggcacactcacattaacacaaccagcaaggctcaagagggcaagctctggagcactgaagtgtcagtgtggtgccaccaaaacatgggacacccaacatgccagcacggaggagccacacacccctgcag

SEQ ID NO: 679472 - DNA, 2880 bp, Homo sapiens
ggacccactggcctccgaaccaaagatgccagtaccttggttcaagctgtcaaagtgaacacagaaattggatcaggcatgaaatcctcagtatgataaccttgggttggatgagtaactaggccaaatgggatgagcagccagaaatggtgatggctcgattctgtgtgtccaggagggcttggccctaaagagaatccagctattaaccctcagggaggtggtagcaccaggtccgaaccaaatttggctgtggagcccaagcggcttgtccagcctgccggcaagcagcacaaccaccccagcctctcttttccagggctctccggccacccggctggctcccccagtggcactgtggggttcgagtggtctcaagtcggaaattggttgggttcattagcgccatcccagcaaacatccatatctatgacacgtaagcacctgcacctacccccaccccccacaacaccgccatcctgcttggtctgggagagagtagaaaaaggctgcacaatgtgccccatgaaaggaagagggaaggtctcaggaagggaggatgcccaggtgcggggactgcagattcatcctaggaaccacctgttctgctcagagtcccagccagctcccttgtttgtggcccaggttggaaggagcccaccctgaggcctggtgtgcctgctcagcagaggcttgtttttgtttttgtttattattttttacattttatagaggcaaggtcttgctatgttgcccacgctagtctcaaactcctgagctcaagtgatccactcacctctgcctcccaagagtgttgggaatatagacgtgagccattgtgcctggccagaggcttttcttagtctcactctgttgcccgggctggagtgcagtggtgcgatcttggttcactgcaagctccacctccagggttcaaacgattctcctgcctcagcctcccaagtagctgggattacaggcatgcaccaccacacctggctaatcagaggctcatttttgaacgcctgtaccagtcacacatggaagcacttgaacagcagcagaaatgggccagagcgagtgtgacccagattcagatagtccttggggcctgtgatctctgctcttcattttccctggaagtgttgaaaccatctgcctgccacagtcttcagggcttattaccagctgtgttcttgagggaatcagaacccttgaaaccctagaattgccttgacctgccccgtgggttccctgtgctgcttccctgcatgctaaaggtgggattccccagccaactcctagggactcatcagggagatgctggtggtaccttcaaataaaggtgtttgcttgggtcccaccttcctttggaaatagattctgttgaagtgaggcaggctccttgcctggtggagtgtggtggggagtcccagtactgagtgcaggtggcagctaaaagtacacccgtgctgcagacctggtccttctaggtgtggctgcacgtgcttgatgggatcaccattcccttccctgttaaaaaccttgtcacctggatttttccccctcttagagagaagaagatggtagagatcaacttcctgtgtgtccacaagaagctgcgttccaagagggttgctccagttctgatccgagagatcaccaggcgggttcacctggagggcatcttccaagcagtttacactgccggggtggtactaccaaagcccgttggcacctgcaggtaaaactgtcttcctgtaaggccccaaaaatgcgggtgtctgcactgtagttgaggagcatgtgccactgtgagtcacagctccgcccttagcatcccacctctggcgtatctggtaaggcgggcacttggtgcctgcaggagccagatggggagcatggagagggcgggagggttgtagggatggcagattggcaagtccctgccttgtctggagggctcttggtgtctgctggctgctgccatttggagatggtggggggcggtactggtggtttgtttttgtttttagggatgagcccaaatctggatttttatgggaaatgtcctaaagttttaaatggttggctcaaattgttttgaatattgtgtgcaccaaatagagcaagtcagctatgtgatctaagggcaacctctgccttagaaagttgtttaaaacaattgaataatctctccttagagaactttaaaagtaaaaacaccaggtgtgaaagcagaaggggaggagggaggagggtgagtgcctctgccatcatcttctgggcatgactacagtccttttccgttgacttgattctaggagtgaggattggtctccccagacaaccgctgtagcaaaggaatagtttttgaaattgagcaagaaaaatagggagaaagaaaatccaggaggagctttggcagcactcactgtggggaggrggaggctggcgagcagggtgacaccactgactccggaggcacctgatgtgtctctcacgccacctgctggccagctggggtctccctgccattgtccttgtaatagggattggccagaaccctgaggacaggacatttgtgtccccacaggtattggcatcggtccctaaacccacggaagctgattgaagtgaagttctcccacctgagcagaaatatgaccatgcagcgcaccatgaagctctaccgactgccagaggccagtgctgccccgggtggtgggcagggggcagagagagggcaaggagagcctggctgtcagcaggagagaagggctctgggtggagagggagctttctcctactggaaaagcgaaccagcccatagtcttcagatttcctggactttctatttctgttatctgaagcaggatt

SEQ ID NO: 679473 - DNA, 602 bp, Homo sapiens
tgcgcccagctagactttagtttttatagtgaggcttgagatttgcatctccactggtctctttgacatctcagaggatccattctgaacttgctaggtttctttcccctgctgaattgagttctgcatcttgagtctgcagcagtgtgaatcctatctttggctccatttaacagcctatggacgttcccaaacttgggacccagtttgtctcttcatgatagacaaatattattttcagaagtcattctaatcgcaccactgcactccagcctggcaacagtgagactccatctcaaaaaaaaaaaaaaaagtcattctagtgggtgagatttctgccagcattgagccactgctcaacatattcttgataatggtctctgaacagcatttgattttaycttggagttgcaaagtcaaagtctaactcgccaaacaaactcagtgtggaatatacacatttgtctcattccggttttaaggagtttagtataccagagcttttgtgacctctaaaaagcagttatcgtccatgacaagaattggctcgttcaccctcagtactctggcttactatcccagggagggccgagggtggcagc

SEQ ID NO: 679474 - DNA, 2119 bp, Homo sapiens
ttgtagctttttcttcgcatatcagggatgaaaaaatatggctcaggagctgtcttggctggcatgaggggcagatgttcagattgggtgtctacattttaagaggcgtattctattcgctccttcattctcctctttcccacatactcttgatctttctcagactcggcttctgggaaaaaaaccaggggcccacagatatgcctggagaagggtgaggatggactagaggtgcagagacggggcgcaccacagcagagcaccaaaagattcctgggcacttttacagatactcagaccccatcccagacctggaaagtcagaaattctggggtctatacccagggatctgtgctttttcaaagcttcccaaagtgattctgatcatcatcctggtttggagactcctgccctgggggggttgtctctgcatttcatccatggacttgacagagatgctcaccatagctgaagcttgctctgtgatgtgatmcaactgaggaagcaatgctgggactcacagatatttgagtaaagagagaccatgaaagagacacagactgtcttactcaatggcgagcagacagtgcaggcatccattcagtgcctatctaatgtgaacctactatataccaggtgcttttctagtgctgggcccatagcaacaaacaagacagatgacatcccagatgctgcaataatcagcaaaacatgctgtcgctccacgaggcaggggtttttgttttgttcacatttgtatcccaaagccaagacggttcctgtgtagaaggcatttgttaaagaaatgaagaaggtgtttccagtggagacgtgtgtgtgcaatggaggaaagcagaacaaagcaggaggcaagaagtctggggtgagaaggttgggaggagccaggcccacaggaaggtgcaggtcctgagcctggaaacagggcgaggggccatcgctccattctgaccagcagaggcaaattcatccttgatatatagatccaggaacaatttaggaagctgcccgcctatttacttccaaggcatgctccgagcaattagcatccaccaaaggttctgcggattaaaacattcctggaaaccttgctgtccccatggtaaatatgctcaccctctcttctagttaagggctgccatgtggcctctgctattctaggaccccatccgtcaccataaccagcctacagagagcagctggcacagacctcttcaggatgcgggggtctcctcacttctccatgcctcgggaagagtctgtgggagctctctgtgaatgtagtgatgtgtgtgtatttgtgtgtatgtgtgcatatgtgcatgtatgttgtagtccaatatttctattttcctaagcctttgggttcatcttctacagtattccagggaagttctggcatctcagcctcattaaaaacaggtcaccattgagttccaatttcagccagccagccagccaaccagtcacgtgttagagccacttccatctgcataaaataacgtattaaatctggaatctctcagcaatgcaccatgattaaaatgttaagaccaactcagtgttacatttcctgctccttagtcgaacatcattagatcctcatgcatgtttcttggttttttgctgatataaataagcaaaatcttgcaatgattttcaagtataagccttgtcctcccagtcacactttgtgtttgtgtccctggagcaggctgagatctgactttagatatgggaacaaggggtggttttgctatttgctttatggaacggttatcactaaccatcaggaaaaggacactttctaattctactattatctcactatgtttaatatgcagcagataggcagcaaagaatagttcctgtagttattcctcttagcattccattatacatagcagtggctcctgcctggggcgattttcctcctgccccaaggaaattgtcaatatgtgggtacaattttggttgtcataacctggggcatatggagggatgctgctggcatcttgtgagtagaggccagcgatactgctaaacaccccacaatgcacatgacagccctccaacaaagaattatcctgccccaaatgtc

SEQ ID NO: 679475 - DNA, 2119 bp, Homo sapiens
ttgtagctttttcttcgcatatcagggatgaaaaaatatggctcaggagctgtcttggctggcatgaggggcagatgttcagattgggtgtctacattttaagaggcgtattctattcgctccttcattctcctctttcccacatactcttgatctttctcagactcggcttctgggaaaaaaaccaggggcccacagatatgcctggagaagggtgaggatggactagaggtgcagagacggggcgcaccacagcagagcaccaaaagattcctgggcacttttacagatactcagaccccatcccagacctggaaagtcagaaattctggggtctatacccagggatctgtgctttttcaaagcttcccaaagtgattctgatcatcatcctggtttggagactcctgccctgggggggttgtctctgcatttcatccatggacttgacagagatgctcaccatagctgaagcttgctctgtgatgtgatccaactgaggaagcaatgctgggactcacagatatttgagtaaagagagaccatgaaagagacacagactgtcttactcaatggcgagcagacagtgcaggcatccattcagtgcctatctaatgtgaacctactatataccaggtgcttttctagtgctgggcccatagcaacaaacaagacagatgacatcccagatgctgcaataatcagcaaaacatgctgtcgctccacgaggcaggggtttttgttttgttcacatttgtatcccaaagccaagacggttcctgtgtagaaggcatttgttaaagaaatgaagaaggtgtttccagtggagacgtgtgtgtgcaatggaggaaagcagaacaaagcaggaggcaagaagtctggggtgagaaggttgggaggagccaggcccacaggaaggtgcaggtcctgagcctggaaacagggcgaggggccatcgctccattctgaccagcagaggcaaattcatccttgatatatagatccaggaacaatttaggaagctgcccgcctatttacttccaaggcatgctccgagcaattagcatccaccaaaggttctgcggattaaaacattcctggaaaccttgctgtccccatggtaaatatgctcaccctctcttctagttaagggctgccatgtggcctctgctattctaggaccccatccgtcaccataaccagcctacagagagcagctggcacagacctcttcaggatgcgggggtctcctcacttctccatgcctcgggaagagtctgtgggagctctctgtgaatgtagtgatgtgtgtgtatttgtgtgtatgtgtgcatatgtgcatgtatgttgtagtccaatatttctattttcctaagcctttgggttcatcttctacagtattccagggaagttctggcatctcagcctcattaaaaacaggtcaccattgagttccaatttcagccagccagccagccaaccartcacgtgttagagccacttccatctgcataaaataacgtattaaatctggaatctctcagcaatgcaccatgattaaaatgttaagaccaactcagtgttacatttcctgctccttagtcgaacatcattagatcctcatgcatgtttcttggttttttgctgatataaataagcaaaatcttgcaatgattttcaagtataagccttgtcctcccagtcacactttgtgtttgtgtccctggagcaggctgagatctgactttagatatgggaacaaggggtggttttgctatttgctttatggaacggttatcactaaccatcaggaaaaggacactttctaattctactattatctcactatgtttaatatgcagcagataggcagcaaagaatagttcctgtagttattcctcttagcattccattatacatagcagtggctcctgcctggggcgattttcctcctgccccaaggaaattgtcaatatgtgggtacaattttggttgtcataacctggggcatatggagggatgctgctggcatcttgtgagtagaggccagcgatactgctaaacaccccacaatgcacatgacagccctccaacaaagaattatcctgccccaaatgtc

SEQ ID NO: 679476 - DNA, 613 bp, Homo sapiens
ggttcaggaataagcaattaatttgtctctcttaagacaagaataagtgatagtaaaagttcaatgttgttctaagcctcacaatgagtacttgatttttttaatttaaataacaatatttgtactatttttattattatagaagagccatctgctcagtgtagagaaattttaatgttgttttgtttctgcctcctagagacaaccactactaactcatttattgarttccagggtttttctagatgtgtgtgtttgtgtgtgtgtatatatgtgtgattttaacgtaactgggttcatactataaatacattttatatcctaaatttgtgctctactttttatcacttgatgttgtattgtgagcatattttcgtgtttttgtttcacagtttatgtaagtagtctcattggctgtgtgatgatttatttaactcttcccttgctagtggtggttcaagtggtttgtagtttcctcatttggttttaaacaggtgccataaataattttatacataaaccttggtcaaaatctcaggctctttctttagacatggcttctagaactgaaattgctgtatcctgtgccacgttctcttgtttgatatatcta

SEQ ID NO: 679477 - DNA, 1982 bp, Homo sapiens
attctcccacatcagcctccctagtagctgggattacaggcactcgccaccatacccaactaatttttgtctattttgtagagacagggtttctccatgttgccaggctggtcttgaactcctaggctcaagcaatcctcctgccttggcctcccaaacggttgggattacaggcgtgagccactgtgtccggcctatttttatttttatttttagagatggggtcttgctatgttgtccaggctggtctcaaactcctgggctcaagtgatcctcccacctcaacctaccgagtagttaggactacagtcatgtgccaacacacccagctaaggctttttttttttttaattaggaattttctcacccagttcttaattcagaacacattttcatatacttatttttaaacgttttagaagaatcagtctgtggtgaagctgggttttcctgcttgaatgcagtaaatacccatttgctgccagtaattacataattatgtaaaattatgtgctcaggagagctgtctactagtgttctggaattatcatcaaaatgaaataaagtttatttaatagtaaaattaattatgaaaataatcctttaatcaggcataaataagctaaatttagtcggaaaaaccctaatgtgatgggtaccgggcctagcacggtaattcaaaatgactgctgaggccaggtgcggtggctcgtgcctgtaatcccagcatgttgggaggctgaggcgggctgatcacttgaggtcaggagtttgagacgagcctggccaacatgatgaaaccttgtctctactaaaaatacaaaaattagccagacatggtggtgggcgcctgtaatcccagctacttgggaggctgaggcagcagaattgcttgaacctgggaggcagaggttgcagtgagccgagattgtgccactgcactccagcctgggcaacagagtgggactctgtctcaaaacaaaataataataataataaaataaaaatacataaaataacagactaataggacattttctctgtacctgtgacttgtaaactgagaccagaaatcttttttcagtaatgaggttggtggcggcatctttctcatctctaagtcctcattgctcgccctccccgggaccctagtgcagactggctggctggcacttagggaccatgagtgccagcccatgggcccctgcaagccagtgggtcagggctgttgaagccccacccttcccctaggaccctgccctcccaccccccagtctgtttttctcctctctctccgacctctctcctgtgacctgccagggttttaaccacccaatcagccagcccatcaaaacctcagcacggtgacacctccagcccagacctctctgctgagctcaaccagtagcctcctccaggctctcctgggagaccctagcactcacccatcatcccatacccttccaggtggttcaggcccttcccagtctcacagtcagcccccaacttggttctgcaccctgcaggcatagctagagaccatccctccacctccccacagctcagctctctcctcagccctccctgcacscaaccactggagtctcagaggtcttcctggacctttgggctcttcatcaatgaccccaccaccccccaaaaccccccaagggaaaaggtggtggaggggtgcatctctccacctaaggctcccagaggtctgtccagggatgttctgatggccctgccctccacccagcctcctgtctcagggtcagggctctgcagacatctgcaagaattttctggagtcttccatcagctccttcttttcccttcactggatttacgattctcgaactcaagaaccctgataaaatcaatgcagcctccctcctcattcccgggagcctgtgccttcatctcctacggcgtcctgcacctccgcctgggacgacgccccactttcaataattccggcc

SEQ ID NO: 679478 - DNA, 1982 bp, Homo sapiens
attctcccacatcagcctccctagtagctgggattacaggcactcgccaccatacccaactaatttttgtctattttgtagagacagggtttctccatgttgccaggctggtcttgaactcctaggctcaagcaatcctcctgccttggcctcccaaacggttgggattacaggcgtgagccactgtgtccggcctatttttatttttatttttagagatggggtcttgctatgttgtccaggctggtctcaaactcctgggctcaagtgatcctcccacctcaacctaccgagtagttaggactacagtcatgtgccaacacacccagctaaggctttttttttttttaattaggaattttctcacccagttcttaattcagaacacattttcatatacttatttttaaacgttttagaagaatcagtctgtggtgaagctgggttttcctgcttgaatgcagtaaatacccatttgctgccagtaattacataattatgtaaaattatgtgctcaggagagctgtctactagtgttctggaattatcatcaaaatgaaataaagtttatttaatagtaaaattaattatgaaaataatcctttaatcaggcataaataagctaaatttagtcggaaaaaccctaatgtgatgggtaccgggcctagcacggtaattcaaaatgactgctgaggccaggtgcggtggctcgtgcctgtaatcccagcatgttgggaggctgaggcgggctgatcacttgaggtcaggagtttgagacgagcctggccaacatgatgaaaccttgtctctactaaaaatacaaaaattagccagacatggtggtgggcgcctgtaatcccagctacttgggaggctgaggcagcagaattgcttgaacctgggaggcagaggttgcagtgagccgagattgtgccactgcactccagcctgggcaacagagtgggactctgtctcaaaacaaaataataataataataaaataaaaatacataaaataacagactaataggacattttctctgtacctgtgacttgtaaactgagaccagaaatcttttttcagtaatgaggttggtggcggcatctttctcatctctaagtcctcattgctcgccctccccgggaccctagtgcagactggctggctggcacttagggaccatgagtgccagcccatgggcccctgcaagccagtgggtcagggctgttgaagccccacccttcccctaggaccctgccctcccaccccccagtctgtttttctcctctctctccgacctctctcctgtgacctgccagggttttaaccacccaatcagccagcccatcaaaacctcagcacggtgacacctccagcccagacctctctgctgagctcaaccagtagcctcctccaggctctcctgggagaccctagcactcacccatcatcccatacccttccaggtggttcaggcccttcccagtctcacagtcagcccccaacttggttctgcaccctgcaggcatagctagagaccatccctccacctccccacagctcagctctctcctcagccctccctgcacccaaccactggagtctcagaggtcttcytggacctttgggctcttcatcaatgaccccaccaccccccaaaaccccccaagggaaaaggtggtggaggggtgcatctctccacctaaggctcccagaggtctgtccagggatgttctgatggccctgccctccacccagcctcctgtctcagggtcagggctctgcagacatctgcaagaattttctggagtcttccatcagctccttcttttcccttcactggatttacgattctcgaactcaagaaccctgataaaatcaatgcagcctccctcctcattcccgggagcctgtgccttcatctcctacggcgtcctgcacctccgcctgggacgacgccccactttcaataattccggcc

SEQ ID NO: 679479 - DNA, 1531 bp, Homo sapiens
caaaggtctatgatcacagggcttgaaggctgcagctgattttctaaccagagaccctgcttgttcctcctgttgcctgtgctgccctcacagctggtttgagwgacatctctccaggaagagccacagaggatgtaaatttgcataaacgcttaacactgactgcccccgaaagcctgagagggaataagagaggcctgcggagcccaactgttctgtgggtccaggaggcacagctctgggaatctcaccatggcctggatccctctcctgctccccctcctcactctctgcacaggtgctgaccccaggcccttccccaggctcagtccccacagattccaagttgagcctgacctgaatcctgagcaaagcccagacacagcctctgggtgggactcctggaaatgggtcctttgtcttcaagccccctctcttgttcttccttgcaggctctgaggcctcctatgagctgacacagccaccctcggtgtcagtgtccctaggacagatggccaggatcacctgctctggagaagcattgccaaaaaaatatgcttattggtaccagcagaagccaggccagttccctgtgctggtgatatataaagacagcgagaggccctcagggatccctgagcgattctctggctccagctcagggacaatagtcacattgaccatcagtggagtccaggcagaagacgaggctgactattactgtctatcagcagacagcagtggtacttatcccacagtgacacaaggagacagggaagtgaaacataaacccctccccctctatttcatccccttccttctgccccaggaggactgtggacaaagccatgagcaggcttggccaaattcacccaaatttgaacccccaggctgcccttccctccagccctccaggcaggcgctgcaaaggagtcagtctgcagtggatttgtgcctggcaggcctggcagtcctgtgtttctttgcctggggtttgagttgttgatggagggtctgactggaaagacagacacagggagacatccatgcaggcatgtccagagggatgtggggaactctcaggtctcagttcagtgcagtcattgttgtatcctctgggaaagcattcctccagtgcacctaagacctctagacccacagagcctgaggtcgggatgagagaatgtcaaatttttgctgatggatcactaaaggcatttttgagtggagccactacaatttactccttgattctggactcgtggatcctgactgtgggagaaacagcaccatctattgggcactgatgcacagcacatgccccatcctggaagacattgcccaaccctacacatacttgccacttgcctggtgcagtaatggagtctccatgcagtcattaaaccattcatataagccacatgtctcagaatgttggggacaagagtaagaatcttgaatgccaggagaaaaggcccatagccctttatttgcggtgaaacgagttccttggtcagaacctcctgtggaa

SEQ ID NO: 679480 - DNA, 1531 bp, Homo sapiens
caaaggtctatgatcacagggcttgaaggctgcagctgattttctaaccagagaccctgcttgttcctcctgttgcctgtgctgccctcacagctggtttgagagacatctctccaggaagagccacagaggatgtaaatttgcataaacgcttaacactgactgcccccraaagcctgagagggaataagagaggcctgcggagcccaactgttctgtgggtccaggaggcacagctctgggaatctcaccatggcctggatccctctcctgctccccctcctcactctctgcacaggtgctgaccccaggcccttccccaggctcagtccccacagattccaagttgagcctgacctgaatcctgagcaaagcccagacacagcctctgggtgggactcctggaaatgggtcctttgtcttcaagccccctctcttgttcttccttgcaggctctgaggcctcctatgagctgacacagccaccctcggtgtcagtgtccctaggacagatggccaggatcacctgctctggagaagcattgccaaaaaaatatgcttattggtaccagcagaagccaggccagttccctgtgctggtgatatataaagacagcgagaggccctcagggatccctgagcgattctctggctccagctcagggacaatagtcacattgaccatcagtggagtccaggcagaagacgaggctgactattactgtctatcagcagacagcagtggtacttatcccacagtgacacaaggagacagggaagtgaaacataaacccctccccctctatttcatccccttccttctgccccaggaggactgtggacaaagccatgagcaggcttggccaaattcacccaaatttgaacccccaggctgcccttccctccagccctccaggcaggcgctgcaaaggagtcagtctgcagtggatttgtgcctggcaggcctggcagtcctgtgtttctttgcctggggtttgagttgttgatggagggtctgactggaaagacagacacagggagacatccatgcaggcatgtccagagggatgtggggaactctcaggtctcagttcagtgcagtcattgttgtatcctctgggaaagcattcctccagtgcacctaagacctctagacccacagagcctgaggtcgggatgagagaatgtcaaatttttgctgatggatcactaaaggcatttttgagtggagccactacaatttactccttgattctggactcgtggatcctgactgtgggagaaacagcaccatctattgggcactgatgcacagcacatgccccatcctggaagacattgcccaaccctacacatacttgccacttgcctggtgcagtaatggagtctccatgcagtcattaaaccattcatataagccacatgtctcagaatgttggggacaagagtaagaatcttgaatgccaggagaaaaggcccatagccctttatttgcggtgaaacgagttccttggtcagaacctcctgtggaa

SEQ ID NO: 679481 - DNA, 1531 bp, Homo sapiens
caaaggtctatgatcacagggcttgaaggctgcagctgattttctaaccagagaccctgcttgttcctcctgttgcctgtgctgccctcacagctggtttgagagacatctctccaggaagagccacagaggatgtaaatttgcataaacgcttaacactgactgcccccgaaagcctgagagggaataagagaggcctgcrgagcccaactgttctgtgggtccaggaggcacagctctgggaatctcaccatggcctggatccctctcctgctccccctcctcactctctgcacaggtgctgaccccaggcccttccccaggctcagtccccacagattccaagttgagcctgacctgaatcctgagcaaagcccagacacagcctctgggtgggactcctggaaatgggtcctttgtcttcaagccccctctcttgttcttccttgcaggctctgaggcctcctatgagctgacacagccaccctcggtgtcagtgtccctaggacagatggccaggatcacctgctctggagaagcattgccaaaaaaatatgcttattggtaccagcagaagccaggccagttccctgtgctggtgatatataaagacagcgagaggccctcagggatccctgagcgattctctggctccagctcagggacaatagtcacattgaccatcagtggagtccaggcagaagacgaggctgactattactgtctatcagcagacagcagtggtacttatcccacagtgacacaaggagacagggaagtgaaacataaacccctccccctctatttcatccccttccttctgccccaggaggactgtggacaaagccatgagcaggcttggccaaattcacccaaatttgaacccccaggctgcccttccctccagccctccaggcaggcgctgcaaaggagtcagtctgcagtggatttgtgcctggcaggcctggcagtcctgtgtttctttgcctggggtttgagttgttgatggagggtctgactggaaagacagacacagggagacatccatgcaggcatgtccagagggatgtggggaactctcaggtctcagttcagtgcagtcattgttgtatcctctgggaaagcattcctccagtgcacctaagacctctagacccacagagcctgaggtcgggatgagagaatgtcaaatttttgctgatggatcactaaaggcatttttgagtggagccactacaatttactccttgattctggactcgtggatcctgactgtgggagaaacagcaccatctattgggcactgatgcacagcacatgccccatcctggaagacattgcccaaccctacacatacttgccacttgcctggtgcagtaatggagtctccatgcagtcattaaaccattcatataagccacatgtctcagaatgttggggacaagagtaagaatcttgaatgccaggagaaaaggcccatagccctttatttgcggtgaaacgagttccttggtcagaacctcctgtggaa

SEQ ID NO: 679482 - DNA, 1531 bp, Homo sapiens
caaaggtctatgatcacagggcttgaaggctgcagctgattttctaaccagagaccctgcttgttcctcctgttgcctgtgctgccctcacagctggtttgagagacatctctccaggaagagccacagaggatgtaaatttgcataaacgcttaacactgactgcccccgaaagcctgagagggaataagagaggcctgcggagcccarctgttctgtgggtccaggaggcacagctctgggaatctcaccatggcctggatccctctcctgctccccctcctcactctctgcacaggtgctgaccccaggcccttccccaggctcagtccccacagattccaagttgagcctgacctgaatcctgagcaaagcccagacacagcctctgggtgggactcctggaaatgggtcctttgtcttcaagccccctctcttgttcttccttgcaggctctgaggcctcctatgagctgacacagccaccctcggtgtcagtgtccctaggacagatggccaggatcacctgctctggagaagcattgccaaaaaaatatgcttattggtaccagcagaagccaggccagttccctgtgctggtgatatataaagacagcgagaggccctcagggatccctgagcgattctctggctccagctcagggacaatagtcacattgaccatcagtggagtccaggcagaagacgaggctgactattactgtctatcagcagacagcagtggtacttatcccacagtgacacaaggagacagggaagtgaaacataaacccctccccctctatttcatccccttccttctgccccaggaggactgtggacaaagccatgagcaggcttggccaaattcacccaaatttgaacccccaggctgcccttccctccagccctccaggcaggcgctgcaaaggagtcagtctgcagtggatttgtgcctggcaggcctggcagtcctgtgtttctttgcctggggtttgagttgttgatggagggtctgactggaaagacagacacagggagacatccatgcaggcatgtccagagggatgtggggaactctcaggtctcagttcagtgcagtcattgttgtatcctctgggaaagcattcctccagtgcacctaagacctctagacccacagagcctgaggtcgggatgagagaatgtcaaatttttgctgatggatcactaaaggcatttttgagtggagccactacaatttactccttgattctggactcgtggatcctgactgtgggagaaacagcaccatctattgggcactgatgcacagcacatgccccatcctggaagacattgcccaaccctacacatacttgccacttgcctggtgcagtaatggagtctccatgcagtcattaaaccattcatataagccacatgtctcagaatgttggggacaagagtaagaatcttgaatgccaggagaaaaggcccatagccctttatttgcggtgaaacgagttccttggtcagaacctcctgtggaa

SEQ ID NO: 679483 - DNA, 1531 bp, Homo sapiens
caaaggtctatgatcacagggcttgaaggctgcagctgattttctaaccagagaccctgcttgttcctcctgttgcctgtgctgccctcacagctggtttgagagacatctctccaggaagagccacagaggatgtaaatttgcataaacgcttaacactgactgcccccgaaagcctgagagggaataagagaggcctgcggagcccaactgttctgtgggtccaggaggcacagctctgggaatctcaccatggcctggatccctctcctgctccccctcctcactctctgcacaggtgctgaccccaggcccttccccaggctcagtccccacagatyccaagttgagcctgacctgaatcctgagcaaagcccagacacagcctctgggtgggactcctggaaatgggtcctttgtcttcaagccccctctcttgttcttccttgcaggctctgaggcctcctatgagctgacacagccaccctcggtgtcagtgtccctaggacagatggccaggatcacctgctctggagaagcattgccaaaaaaatatgcttattggtaccagcagaagccaggccagttccctgtgctggtgatatataaagacagcgagaggccctcagggatccctgagcgattctctggctccagctcagggacaatagtcacattgaccatcagtggagtccaggcagaagacgaggctgactattactgtctatcagcagacagcagtggtacttatcccacagtgacacaaggagacagggaagtgaaacataaacccctccccctctatttcatccccttccttctgccccaggaggactgtggacaaagccatgagcaggcttggccaaattcacccaaatttgaacccccaggctgcccttccctccagccctccaggcaggcgctgcaaaggagtcagtctgcagtggatttgtgcctggcaggcctggcagtcctgtgtttctttgcctggggtttgagttgttgatggagggtctgactggaaagacagacacagggagacatccatgcaggcatgtccagagggatgtggggaactctcaggtctcagttcagtgcagtcattgttgtatcctctgggaaagcattcctccagtgcacctaagacctctagacccacagagcctgaggtcgggatgagagaatgtcaaatttttgctgatggatcactaaaggcatttttgagtggagccactacaatttactccttgattctggactcgtggatcctgactgtgggagaaacagcaccatctattgggcactgatgcacagcacatgccccatcctggaagacattgcccaaccctacacatacttgccacttgcctggtgcagtaatggagtctccatgcagtcattaaaccattcatataagccacatgtctcagaatgttggggacaagagtaagaatcttgaatgccaggagaaaaggcccatagccctttatttgcggtgaaacgagttccttggtcagaacctcctgtggaa

SEQ ID NO: 679484 - DNA, 964 bp, Homo sapiens
aaataaaataaaatggtatatattagtcagaagaatgcaaagttggcatggatattaaaaataaagcatgtctgggccaagtgcagtggctcacacctgtaatcctaacattttgggaagccgaggtaggaggatcacttaggccagaagtttgagaccagcctgggaaacatagtgagaccccgtctctacaaaaaattacaaaaactagccaggtgtggtgatgcacacctgtggtcccaggtactagagaggctgagaggcaaaaggattgcttgaacccaggagttcaaggctgccttgaactacgatggtgccattacactctagcctgggtgacagagtgagaccctgtctctaacaaaataaaataaagcaggaaacttgaaaaattttcatgcttaaagatatcatgttgccgggcgcggtggctcacgcctgtaatcccagcagtttgggagaccgaggcaggcggatcacgaggtcaggagatcgagaccacggtgaaaccccgtctctactaaaaatacaaaaaattagctgggcatggtggcgggcacctgtagtcccagctactcgagaggctgaggcaggagaatggcgtgaacccaggaggcggagcttgcagtgagctgagatagcgcctctgcactccagcctgggtgacagagcaagactccgtctcaaaaaaaaaaaagataccatgttggccgggagcggtggcacacgcctgtaatcccagcactctgggagcccaaggcgggtggatcacctgaggtcaggagtttgagaccagcctggtcaacatggtgaaaccccatcactactaaaaatacaaaaaattagctgggcgtggtggcrggcacctgtagtcccggctactcaggaggctgaggcaagagaatcagttgaacctgggaggtggaggttgcagtgagctaagatcgcgccacttcactccagc

SEQ ID NO: 679485 - DNA, 671 bp, Homo sapiens
cacctcctggtcaccaggctgacctggcctctgtggactactcactgccttaggtgccttttgctccccaggatccaaaggagtagctgactttttccaaggagcactgcccatggggacggagccctgacaccaaagggacggctgccctctgtgcgcttccctcacactttcccagatatgagtcacagccacctgtgccaacgagcacccttagaacacccattcacccagcaggtgtgaccgctgcaaagctgaaccttccatctggccaccaggcccccagcatggagcctgggaccagcagcagcccctactccaaggctggaaccagctcagatgcaaccctctcaatccaaggagtctgggactccacattctgggactccagctaattttatgcataaaaattatgggcccagaacttgtgcatttttagaaaaatgggttaacctaactaaagaaaacttagaattaagatggctgcaatggggaagttttaatttggataaaattgtttatttatgaggcatattagaaaagggggaatgaaaaaccccataaaacagtgggatgtgtattcttttattggtatgcagaagcccctaaaagagtaaatgaatmaaaaattgactccttaaaagattctttgcaaaaagcaaacgaaaagc

SEQ ID NO: 679486 - DNA, 640 bp, Homo sapiens
agtctctcggccagagagcggtgcagctgtggttcctgcccagctcgggctgcctcggcacagagcctgaagcgaatgcaccaggagctttgtaagtagaaaaaccccagcacagccaggggctgcatcctctctgcctccctggggtctccgcacgcatccccccttgtgagaggctggagtaagtagcctcctcgggccaggaaagctcagccgggagggcacctggtgcctgagaggtaaccgtagtgcctggtcaagctcggagcagcgggctgggtgagggagctgcctagtacagccaggccagacgcaggtgtagtcatctaccagctgccatcagtgtgtgccgggggctggagcgcaaaccgtgtcatctgcaaccaagcctctgargtggagaacgtggttcccccatgctctaagtgggaaatggaagcacctcctggccagtaagtagcagtgctggggatttagccaggtctgtctggctcaaagacaagctccccactctcctgggaacggggagccctgagcaaggatgtcagaggccaggaggcggcctctcctgtacaggtgtcctgggctaccccaaccccctcccacacctgccacacctggcctgtcccccatctagaac

SEQ ID NO: 679487 - DNA, 1501 bp, Homo sapiens
tgaggtgtacaaccagccccagaaatttagaaaatcttgagttaaatacgtgcagttttttgataagtaaattttttcctaaattaatgcaaacttatgaataaactcatccagccacagtctaagacataaaaagcaaaataatgccatcttatcaacaatgcaaattaacgtgtagaattgggtcaattttactgagcaatttccaaggaaagaaaagcaagaagtaaagggcatttgggagagcttcctctgaactaaggaagatgaattgttatttccacttctgctatgggtttctsattcttactcatcagtcctgtctctcattctcccagctttttcatcctaatcttccaatcctgtgagacagtatgtaaaagacacagagtcacctatgaaacattctgggcaaaaaatgtttaagtttttaattttaattttcagtttctaagaaatacaaagaacagaggaacaagttaaagactcccacaaggaagtatgtagagaaatccaaaatgtagttcatgttataagataagagggagagatgctgttccagattaaaaggaaaataaaaaccaaatgggaactgtcacagctaagaggagtctaaggggacatgatgactaaatgtaatgtaggatcctgggtaagaccacaggacagaaaaaggacattaggtaaaaaccaacaaaatctaaatgaaaaattgactttagccaataataatgcatgaatgcatcaatattggttcaataactgtgacgaaagttccatactaatgcaggatgttaataataggggaggccaggcgcaatggctcacacctgtaatcccagtactttgggaggccgaggcaggtggatcacctgaggtcaggagttcaagaccagcctggccaacatggtgaaaccctgtctctactaaaatacaaaaattagctgggtgtggtggcgtgtgcctgtaatcccagctacttaagaggctgaggcacgagaatctcttgaacctgagaggtggaggttgcagtgagccgagatcgtgccactgcactccagcctgggcaacagagtgagactctgtctcaaatcatcatcatcatcatcatcatcatcatcatcatcatcataggggaaactgggtatgtggtatatgagacctcttatgctatcaattatttctgtaactctaaaactattctaaaataaaaaggttattcaagaacaaatgtagatacttggaagatttttttaacgtgaactggatgttaaataatattagagcataggtattattagatgggaaaaatctgttgagttataaggataatgcccttactttttggcaatttgtgctgtaagtatttaaggataaagtggcttggtatatgaacttactttaaaatgattcagcccaactcctggggaatgactgtctgtgaaaacctattaggttaaaagctgtcagggactttacaatgggtagattaaatgatgca

SEQ ID NO: 679488 - DNA, 1501 bp, Homo sapiens
tgaggtgtacaaccagccccagaaatttagaaaatcttgagttaaatacgtgcagttttttgataagtaaattttttcctaaattaatgcaaacttatgaataaactcatccagccacagtctaagacataaaaagcaaaataatgccatcttatcaacaatgcaaattaacgtgtagaattgggtcaattttactgagcaatttccaaggaaagaaaagcaagaagtaaagggcatttgggagagcttcctctgaactaaggaagatgaattgttatttccacttctgctatgggtttctgattcttactcatcagtcctgtctctcrttctcccagctttttcatcctaatcttccaatcctgtgagacagtatgtaaaagacacagagtcacctatgaaacattctgggcaaaaaatgtttaagtttttaattttaattttcagtttctaagaaatacaaagaacagaggaacaagttaaagactcccacaaggaagtatgtagagaaatccaaaatgtagttcatgttataagataagagggagagatgctgttccagattaaaaggaaaataaaaaccaaatgggaactgtcacagctaagaggagtctaaggggacatgatgactaaatgtaatgtaggatcctgggtaagaccacaggacagaaaaaggacattaggtaaaaaccaacaaaatctaaatgaaaaattgactttagccaataataatgcatgaatgcatcaatattggttcaataactgtgacgaaagttccatactaatgcaggatgttaataataggggaggccaggcgcaatggctcacacctgtaatcccagtactttgggaggccgaggcaggtggatcacctgaggtcaggagttcaagaccagcctggccaacatggtgaaaccctgtctctactaaaatacaaaaattagctgggtgtggtggcgtgtgcctgtaatcccagctacttaagaggctgaggcacgagaatctcttgaacctgagaggtggaggttgcagtgagccgagatcgtgccactgcactccagcctgggcaacagagtgagactctgtctcaaatcatcatcatcatcatcatcatcatcatcatcatcatcataggggaaactgggtatgtggtatatgagacctcttatgctatcaattatttctgtaactctaaaactattctaaaataaaaaggttattcaagaacaaatgtagatacttggaagatttttttaacgtgaactggatgttaaataatattagagcataggtattattagatgggaaaaatctgttgagttataaggataatgcccttactttttggcaatttgtgctgtaagtatttaaggataaagtggcttggtatatgaacttactttaaaatgattcagcccaactcctggggaatgactgtctgtgaaaacctattaggttaaaagctgtcagggactttacaatgggtagattaaatgatgca

SEQ ID NO: 679489 - DNA, 506 bp, Homo sapiens
tgcagtggcgccatctcggctcactgcaacctcttcctgagttcaagtgaacctcctgcctcagcctcctgaatagctgggattacaggcgtgtgccaccatgcctggctaatttttgtatttttagtagagatggggtttcaccatgttggctaggctggtctcgaactcctgacctcaagtgatccatccgcctcggcctccgaaagtgttgggattamaggcatgagccaccgcacctggctgggtttgtattattttaaaagaggagaagatgtctatcaagtggaattttaaaggacattttcaaatggataaaagaaaaaaaattaaatgcaatcactgatttagggactgccatcaaatagatacagagaatttgataagttaatcacgcactattttctataaatatcccactggttctgtgttagaccgtgcatagccgcggctgggcatggtgcctcatgcctgtaatcccagcactttgggaggctgaggcaggc

SEQ ID NO: 679490 - DNA, 597 bp, Homo sapiens
tgaggccatacagaaaaaagagctagccaaagcagtgttgctggatgcagtattctcttgctaagaggaaggaaactgtctcgcataggagcctatataaatataaacatatatacgtgcactctacagaatggccttcataccatgagaacatttctgttttggatggggatgttacccttgcgttcaaccaaaattgattcttggaactgtaaagattacaacccaaagtctcccaggaagctgtggggagaccagaggatcaagctgaagtgaagccagtgaagagcccacctgtggaaggacatggcggggcgaggcacagccagtgcattcctgcctgcgracaggccctcccagcagctttgccgcctctccatcgtcttgggcccttgctcaaatagctgtgggactgaatttcacagaaaagaatataatttccatagtgctcttgcttgcctcttcttgagttctttgctcttctgagttcttggtggctaataacagtcagattagggtctctgccattcagagttgatgcttgaaaactttagttttccttattaatgaatatcactatcagatttgactaatgaa

SEQ ID NO: 679491 - DNA, 603 bp, Homo sapiens
gcgggcacagaggaaccccaatcaatgccccgataggccacaaataacagcagctctcggggactcacaaacacaaaataagagagttggcttttttatggcttgtctactgacctctcgaggaatcaataactcccaggacttgcaaaatgggattgaatgcttttaaggatcaaattgtaattcttttctcttgttcaggcagctgggaaaaagaatgtttttgttttcaccttttgaacttgcaaatttaaaacctttctttctgtgctgttgggttaggtgtccccctcctgaagtgggcagtccccaaatcagggtcagcacaggagggagagtggttagaggcaggaactctggagtcagaatgcccaagttcaactccccaagttcaacgcccaagttcaactccggctctgccttctgtgtgtgtggctgtgtgatcttgggcaagtgacccaacytctctgagcctcagttgcctctcctgtaaaatggggatgataataatagtatccacttgacagagtggttatgagaattaaataatacatatgtagagtaccgaatcatttgctgttattgaaagtcagagagaagtgg

SEQ ID NO: 679492 - DNA, 1142 bp, Homo sapiens
tattcaattagcctcataattatattaactccataggtctcctaactgtcagatcaggatagaagtccaggttccctacttgggaaatatttttagcactcattttaatatcaaaataaatatttgtcttttctgactattacttatctgactattaccattgaatttgggtcttggtgttgaattatcagtttattaattctccaaatcacattaaactataaaagtatgttgtgaacaattggttattatctaattggttattacaaatatacagaataaagattaacttcataattgatatttcataaatttggatgaccttagtaatgcccacgaatatatcccaaaacaaataagaaaatacttgtacatttctcacttgttttgtgtttgtatgttgcctatgttgttctttttctgaaagctggattgtcagttgtaaacgtggcacctccataaaccccttctaaggctgggaactacatttcccagaatcacctcccctgtatggttttgggttggtttgccaatcagagaaattcacaacatttagaagatagcagtgaaaaaaaaaggcccttgttcctgtggcagtcaaatgcatgacttgacttaacagacttctctatgagctctcaccgtatggtcatggcaggcaggcataatgccttcttgggcttcatcaccaaatctggcttctggttgacatcagtgattgagtgattgcttctccagttctgtggtgctggcttacagacctttgttttcccacsttttcccacttcataagttctggttcctacattaaataacctattatcataattctggtagtggctatattttccttagtaaatgatgactgataatagggaagaaaaataaacattaaaattttgggatccatagagaaagtttaaatttaaagaatagaaaaattactaaaataaaagaaaaatcatttaaaaatgtacaaaatggagtggtttaatgaaaaataatattttacctggactgcgaaacccagaataaagactgtcttaaacttaagtaataatgtagatacaaatattattaataaataccaccaggtggatgtataccaatgatttcaataaaagatatcattaaaccagaga

SEQ ID NO: 679493 - DNA, 615 bp, Homo sapiens
tataaccatagcacctggcacgttgccagatacatagtaagggtcaagatctcatgatgaaaaagtgtttgaggactatgttagtaagatcagtttcttcagaaatggcactcatcagctggtctaactgccagactcttaacagttaccagtatcacttccatttaagcggggaagtctttcctcttttgcaagatttgccagtataattagcagtccagtctgttgcttgtaatttgcattgaatccagctgtctgggagaaactacctttgacaaagcttggaagtgaaggstggggacagatgactgacatgtgtttagtggggactaaaattagaagttgttggctgggtgtggtggcttactcctgtagtcccagcactttgggaggccaatgggggaggattgcttgagcacaggcgtttaagaccagcctgggcaacatggtgaaacccccccatctttacaaaaaaatacagaaattagctgagcattgtggtgagcacttgtggtcccagctacttgagaggctgaggtgggaggatagctggagcccaggaagtcgaggcagcagtgagctgtgtctgtgtcactgtactccatccctggtgac

SEQ ID NO: 679494 - DNA, 615 bp, Homo sapiens
tataaccatagcacctggcacgttgccagatacatagtaagggtcaagatctcatgatgaaaaagtgtttgaggactatgttagtaagatcagtttcttcagaaatggcactcatcagctggtctaactgccagactcttaacagttaccagtatcacttccatttaagcggggaagtctttcctcttttgcaagatttgccagtataattagcagtccagtctgttgcttgtaatttgcattgaatccagctgtctgggagaaactacctttgacaaagcttggaagtgaaggctggggacagatgactgacatgtgtttagtggggactaaaattagaagttgttggctgggtgtggtggcttactcctgtagtcccagcactttgggaggccaatgggggaggattgcttgagcacaggcgtttaagaccagcctgggcaacatgrtgaaacccccccatctttacaaaaaaatacagaaattagctgagcattgtggtgagcacttgtggtcccagctacttgagaggctgaggtgggaggatagctggagcccaggaagtcgaggcagcagtgagctgtgtctgtgtcactgtactccatccctggtgac

SEQ ID NO: 679495 - DNA, 598 bp, Homo sapiens
ggattctgtgaggggagcttgggccatgcctcctgttctctgcctctcctgttctctccctgcctccccctgttctctycctgcctctgctcttctctccctccaggtccagtcacatgctgaagtcagaattcttttgaggtgtcaaccttgaccttgtagtgaactgaaacagaagcttaaatggtgtagactttaggtgattcagacacataatcgctgagaatcactgctttaaataatttatttgatgagtttctatgttgtacgtatgggtaaggcactgtagggaagatatggcttctgcccttaaggtttcattctctttaggtaggacaagacatgtctacatattacagtaaaagccagagactgtacgtaataataaacaattatcctttgtagacctcttactgcatgctgctgtactaagcattttagacccttcccctttaaatcacatgacagtcccatgaggaaggtactattttccttgttttattttttgtaaacatatttgtagagatggggcctcactatgttgcccaggcttgtcacgaagtcctgggttcaggcgatcctcctaccttggcctcca

SEQ ID NO: 679496 - DNA, 653 bp, Homo sapiens
gacctcacagagcaaagcttcacatatggaagggcctcttagctggatgaataataagctrtatgccaggcactgtttacaggcattatctcatttaattctctattttattattcttagcctcatttcatagataagaaaaccgagactcagggatcattctcaactgcaaatctgaccttattacttccttgctcacagcctttcaatgggctattttttttttttttttttttttttttgagattgagtctccctctgtcgtccaagctggagtgcagtggcacaaccttggctcactgcaaacttctcctcccaggttcaagcgattctcctgtctcagctttccaagtagctgggataacaggcatgtactaccatgcctggctaatttttgtaattttagtagagacagggtttcaccatgttggccaggctggtcttgaattcctgacctcaagtgatctgcccgcctcaacctcccaaagtgcagggattacaggtatgaggcactgtgctaggccatcaatggctctcttcttcttactggagcctttccagttgtcacaagtcgattgacttttgcttaattctccagactcctctctctacattcccccatgcagctcccagccatacctgtctgctgcctt

SEQ ID NO: 679497 - DNA, 540 bp, Homo sapiens
caggtcagaagctgcctgtcatagcctcatgggaattctgtgttccgttccagctgtgttaacatggggctagtgggagtgggatagggggaagggaagggagggaatactcgcttccaaaagagtcctgaaagagaatttctgatgttgtcagagaaaatattagtatatccagtaggtggcacccatcactgtgaacaagggtccccagccccttgagaatagcacctaacacaacaaactctggtaataaagatttaagcagccaatcaaatattcttgttaatagggaatttttgcgtattatgcaattgttctttaaaaaattatgattaatttccgttctgttaccattctaagtgatttagatgattttcaaattttcttgcagattttgacacgtatggtggcaaattataacgacatgtaaggtttttgcacgcaagccaggatgttttactaagagarcagtcattctacactaagggtcccttaagttagcatcacaactgataaattcaacatgtgatcatttgtgcc

SEQ ID NO: 679498 - DNA, 1516 bp, Homo sapiens
tatttccatttttttataataaccatcctggtgggtatgaagtaacatctcattgtggttttaatttgcatttacctaatgactaatgacgttgagcatcttttcatgtgcttttggtccatgtctaagtcttctttggagaaatgtctatttaagtcttttgcccatttaaaaattgggtcgtttgcttgtacttgagttgtaggagttctttatattttttggatattaaaccctcatcatatgtatgattttcaaaactttcccccatcttttcactttcttgataatgtcccctgaaacatgcaagcttttaatttagatgaagttcaatttatctattttttcttttgtttcttgtgcttttagtgccatatttagataaatgaatgtcttcatgaaatacaatagaaaaatcacaatgtggccaggcacagtgtctcatgcttgtaatcccagcacttaggccaaggcgggtgggtcacttgagctcaagagttcgagaccagcctgggcaacatggggaaaccttgtctctacaaaaaaaatataaaaattagccaggcatgatggtgtacacctgtaattccagctactcaggaggctgaggtggctgaggtaggaggatcatttgtgcctgggaggcggaggctgcagtgagctataattatccaactgcactccagcctgggcgacagaggagaccctgactcagaaaaaatcagactgggcgcggtggctcatgactgtaatccctaatcccagcactttgggaggccgaggcaggtggatcacctgaggtcaggagttcaagaccagcttggccaacatggtgaaaccgtctctattaaaaataaaaaaaatgagcctggtgtagtggcaggtgcctatagtccccagctactcgggaggctgaggcaagagagtcgcttgaacccgggaggcagaggctgtagtgagccgagactgtaccactgcactccagcctgggcaacagagtgggactctatctcaaaaaaaaaaaaaaaaaaaattcacgatgccttacacatagggtaaacattgtttaatgaaactcttgtctcagttacctgtatcatgaatgaacatctatgtaaaatgtatttcttcttacaggtcacagtgaacattttttgaaattcatcaaygtggagtaattccctgtcacatacttaaatattctccttcttccttctacttaaacacagaagcctgtcacggtggggagcttgcgcccttccaaggcagcctcctggcatttagatacaaatttcaaatggatcacatgcacctaaatcccttccaaatgactgaaatcacaggaaaaaaattttttaattatttatgtataataccactagaaagccaaacactataaaccaaaagatttgaggaactcttgaaggaaaaacagaaggtgagaacaaacccaagaggaaactgaggaaggagactggaaaaattggggagcaatagatggagtgtgcaggggtca

SEQ ID NO: 679499 - DNA, 595 bp, Homo sapiens
tcagggactcttaaaatgcatgaggttccactgagtccagacaactatctatcttaacggtctggaacaatgaccacccacataagatcaaaaacctgagatctgatccttctagttttgtcaaatggctcagattattttaagcttcctctttagataaaatgcagtttgactcaccrgttttttttcttttcataaaggctactgtgagggagtagggcatcctcctgcaacaagcagcggagagagaaatcagtccccagccctgaccctcggatctctggtaaaacactcagtcatgagacacgagacctctggccacatgccctgatccatggactcagacagaaagtcctctcctgcatcttggggtccagaagaggccaggaagcaaaatctatacaaggaatgctggtttcttgccccaggatctaggtaaacattgaataaaattatttaatctgccatttaagcaagaagtatttctaaagccacatgctggtgaccaggcagagaagatggctaagctgggaaagaactggtgtgtcagtaccacgtccatctacagttaatactcactggcataggatcctga

SEQ ID NO: 679500 - DNA, 639 bp, Homo sapiens
gtctctgtattcaaattttccttttcttataaggacaccagtcattggaatagggcccactctaatccactatgacctcaaattaacttggttacgtctgcaaaaaccccgtatctaaataaggtcatattcatcccacagcaggaggacatggacagacgctgagatcaatacctgacgctacacagccaagtggggtccrggcttctgcccatcctgtgtccctccctgctccttccacaatctgcctgtctaatattccatttctgtcacttaatcttagtatctcctggacccctgaccctaagccttcctggccaaccatgtttttgtgctaccatgtctagtgcctggcactgcatccggcacatagtaggcctacaaaaagatgaatgcatgacatccaaatagtctctttccagagatgagaccagtggccctaaactggtctataaaaaagtatctttatattactttataatataattttataatataatttatatttataatctataatataattttataatataaattaatatcaaatattaatatattgatataaaataatttatattataaattaacatttatactataaaataatataaagagacccttacaaaagagtctctt

SEQ ID NO: 679501 - DNA, 2680 bp, Homo sapiens
gatctggtggttttaaaaatgggagtttctctgcataagccttttttttgcctgctgccatccacgtaagatgtgacttggtactccttgccttccaccatgattctgaggcttccccagccacgtggaactgtgagagctccattaaacctctttcctttgtaaattgcccaatctcaggtatgtctttatcagcagagtgagaatagactaatacaggcactttctaagtaacacaagttttatttacatacttactggtaaaatgttgaaaacttttcctccaagattgagaatgagacaatggtgctttctatacctaccatcaatttcatattatactaaaaggcatagtctatgtaatagggcaggaagaaatataaatgtataaggattggaaaggaagaagtaaaattatcatttttcacagtagatatgattttgtacatagaaatctcagaagaatccacgaaaataattaataagtaaattagcaagattgtcacatacaaggtcaatatgcaaaaatcaattatagttttaaataccaagaaaaaaaacaattcgaaaatacaatttagaacaataccattaagctcatagcttagtttatgccctgcctcctgagggtaggccaaacttagtgacatatttaaagaatagagagaaaggtaaaaatagtaaattcacagtgaagaaatctgacaagcaccaccaatgataaaggttaaaatcatcactgatatcatgtggttgcattgtaccctctaatataatgtaactttacctctatataatcttttaaataaacccatatcaccagtccaataatgaggaaaacatcagccaaatccagattggaagatttctacaggatacctggccagtaatcttcaagattgccgacatcacaaaaagaaagagtaaagaaagacacagattccagacaaaggagacacaactaagtgcaatgtggtttcttgaatttgctcctgtaacagaaagaggtcatctactgaaaaaagtaatgaaatccaagtaaagcctggtgtttacagtgtttagttaataacagtgcaaaaaacaaacaaacaaacaaaaagctagcatttctagtcaagagcattggtggaagggaaggtgacatttatgaaggccaaaccctccacctaaagttttatctcctggccttaccattaagaggttacctaacattaacttgccttcttacagtgacaaggaggtcaccacctgtaagtgcctggtcattaggaagttcttccttatgttttcctaactatctttgatcatgggttcttgttctactctctgggtgctgatgggcatgtagggctaggtgctgagaatataataccaattccctgcaatcttctagataggaatcttccccaagactgtctttgaatcgctgtcacaagtattttcattgctgacagcttggaagctttgggatcttggaatgcataatgggccagaggagtacaggatgcagcctttattagtacagccagagtcactcaagggacttcatggcacgtctaagaacacataagtaatttgggctgctttctttttatcctggaagcttgtaacacctcctgttgctgtcagacaggaaatacaaactcatttttaacagtaaactgaacaaaacataatgtggaaagaaagtcagatttgaggattattgatattttgattttatttgtacattttcctccttaattccaatgtcttaaaaagaacttttaaagaagtaactgtagtgtatatcttaagagaaaatgatttgatgataagatgctaaaattaacatatgtcatcagtagtggtcttgaaattaacagatgctttgaaaatgaacatgtagtgtctgaaaatgactaaatatgaaaacttcattaataaatactctgtagggggtatgcccattctgtatgaacttgaaattctcagaaaagcaactggaaatgacccttaaagccaatccaatccaaacatctactttttagaaagtcattattagttgtgttattgttggtatttgtgttcattcacatggttttgccttccatactataagtgaatttgaacggtaactatcaacttcaagtacttggaaaatactttcatgcaaaatgtattctatcaacctccacccttcttttccctcccctccctttttctcctctcagttttaatattaaatgtattctatctctctttttattattatttttaattgacacataataattgcacatatttacagggtacagtgtaattttttttctacatgtgtacaatgtttaatgaagccacctcctttaatggaggggagaactgggattcagaaaatgaatggagtttgcctagggtcacatagtgagctactaatacatacagtactagagctcatttcctgctattccaagtccagggcccattttaggtggcctccagatacaatagaaaatatgggtttctaattattttctatcgataattggccactgccaggaatggcaaaggaaaactttccctctcaccctagttttttttcttgacctcttgggattgctccttttcttccataaatttttacaatgtctgacaaatcaaacaaacaaaaccaacaaataaratgaaaactaagaaa

SEQ ID NO: 679502 - DNA, 636 bp, Homo sapiens
ggctcttggctgtcactgtatgttgcaggcccgcatcttgctctgagccatgatgccagggagcccctctgcactaatttccttctctgtgtgccaacaagcctcccacactttagagtttgcagccaatggtttgcaggccttggagtgcccaagctactgacatttctggcactcctacactttttcaattcttttttctattcctcacaactgcatgccccccaaccccaagctttctgataggattgatctcatgaacaactcatcctatggtgttaacagctgagtgtgactcacaaggagcaggggaggcaaagtgacatgcttttttgttttgttttgttttgacatggagtcttgctctgttgccaggctggagtgccgtrgcatgatctcggctcactgtaacctctgcctcccgggttcaagcgattctcctgcctcagcctcccgagtagctgggattacaggcaagtgccaccatgcctggctaattttttgtattttagtagagacggagtttcaccatgttgtccaggatggtctcgaattcctgacctcgtgatccacctgccttggcctcccaaagtgctgggattacaggcgtgagccactgcacccggcccaaaaatg

SEQ ID NO: 679503 - DNA, 1971 bp, Homo sapiens
aggaggctgaggtgggcagattgctcgagctcaggagttcaaggctagcctgggcaacacggcaaaatcctgcctctaccaaaaacacacacacacacacacaaaattcactgggcgtgatggcctgcgtctgtggtcctagctactcaggaggctgaggctggtggatcacttgagtctaggaggctgaggttgcagtgagccgagatcgcaacattgcactccagccttgggcaacagagtgagacactgtcttaaaaaaaagaaaagctcgcagagatttccttctgtttttagttgtagtattttgcttggttggattaaaaaacatcaaatgaatatacctgggaagtttccatgaaaatctggaaatcagagaagactgaaaataaaatcaaatataaaaatatatattagtacatgaaaatgttcttatagaacttgagacatttgatttcaaataattagtagcaagtgaattttccaataaaattatatgaatgccattaaagtaaaagttataggctgtgattttatattatrtaatatttttatcttaagtaaacactctgttagccccaaaagtagagaataatttatttgtttggtttcagcactttaccatattcttcctaacttccccatttatttcattatttttaaaatttatatgaaatgaaattgtgttgtacttaattttttaccttttcaccacaccacctaagaaaacctaagacccttcagatattcctggggattcatggttcatcgttgtggagacagaatagaaacatgtaactgttggtcaagaagtcttcagccacttcatatactttacccctagtttcccccgggggacggcactttcctttcctccttctctgggagcagtctctcctcccactgcatacctactctagtgacagagggagggacatttcttactctccagcagcccgcttcttcagcaaacacctcctgagtatttatttactacatgaaaggcagaaggaaggggtgtgaacaaccagaaaaaaagcagtataaatcaaggagtgtttagttcaaaaagaaggtgacagcagacttggctttggaggaagtgtgggggaacttgacagtgaacagaggagggacattccttgttaaggaaatagcacatgccaaggatcctatggacacatagtttaccttgagtttcattgagagcagaaaacagaactgcttcaaatgcgcagtttctcatgatagacagggtgaaccttgattttatgtttatctcttttaggatgataatccaactccttttcatttttgacatgggtattatcttctatgcatttaactttttttttttttttgtaagtctctacagcttttcttcaactttcttctaacagaaagatcacacctacgtaaaatcttcctctgaaggttttagaagtgctggcgtctagcatgaacggcagaagtaagtgaggaccaacatcttgtaacaagttcatggtactctttccacttgttcacacttagatcccagggtaagcaaccctgtattatcttccatgtcaaaagtaggaggaagggacaggctccaggcctccatccctgttttcaaatatcataacctgaatgaggaaacacagaatatcacacatgcaaaggtaatctcctccagagctagtcatctactgctgttctatctcaatcattttcttcatgttgtttgtggattgccttttagtcactttgtaatggaactagggcaaagagagggggcatctgagaaactgttccagtaaaagcaataactaacattgttgatgctttatagtatataaagcatttccacatgtattgtctcatttaattctcacatccatcctacatttcttatcctatttttcaaaagaaaaaactgagacagagggataaagtaaattcccagcatcttccagccattagcaagaa

SEQ ID NO: 679504 - DNA, 1971 bp, Homo sapiens
aggaggctgaggtgggcagattgctcgagctcaggagttcaaggctagcctgggcaacacggcaaaatcctgcctctaccaaaaacacacacacacacacacaaaattcactgggcgtgatggcctgcgtctgtggtcctagctactcaggaggctgaggctggtggatcacttgagtctaggaggctgaggttgcagtgagccgagatcgcaacattgcactccagccttgggcaacagagtgagacactgtcttaaaaaaaagaaaagctcgcagagatttccttctgtttttagttgtagtattttgcttggttggattaaaaaacatcaaatgaatatacctgggaagtttccatgaaaatctggaaatcagagaagactgaaaataaaatcaaatataaaaatatatattagtacatgaaaatgttcttatagaacttgagacatttgatttcaaataattagtagcaagtgaattttccaataaaattatatgaatgccattaaagtaaaagttataggctgtgattttatattatgtaatatttttatcttaagtaaacactctgttagccccaaaagtagagaataatttatttgtttggtttcagcactttaccatattcttcctaacttccccatttatttcattatttttaaaatttatatgaaatgaaattgtgttgtacttaattttttaccttttcaccacaccacctaagaaaacctaagacccttcagatattcctggggattcatggttcatcgttgtggagacagaatagaaacatgtaactgttggtcaagaagtcttcagccacttcatatactttacccctagtttcccccgggggacggcactttcctttcctccttctctgggagcagtctctcctcccactgcatacctactctagtgacagagggagggacatttcttactctccagcagcccgcttcttcagcaaacacctcctgagtatttatttactacatgaaaggcagaaggaaggggtgtgaacaaccagaaaaaaagcagtataaatcaaggagtgtttagttcaaaaagaaggtgacagcagacttggctttggaggaagtgtgggggaacttgacagtgaacagaggagggacattccttgttaaggaaatagcacatgccaaggatcctatggacacatagtttaccttgagtttcattgagagcagaaaacagaactgcttcaaatgcgcagtttctcatgatagacagggtgaaccttgattttatgtttatctcttttaggatgataatccaactccttttcatttttgacatgggtattatcttctatgcatttaactttttttttttttttgtaagtctctacagcttttcttcaactttcttctaacagaaagatcacacctacgtaaaatcttcctctgaaggttttagaagtgctggcgtctagcatgaacggcagaagtaagtgaggaccaacatcttgtaacaagttcatggtactctttccacttgttcacacttagatcccagggtaagcaaccctgtattatcttccatgtcaaaagtaggaggaagggacaggctccaggcctccatccctgttttcaaatatcataacctgaatgaggaaacacagaatatcacacatgcaaaggtaatctcctccagagctagtcatctactgctgttctatctcaatcattttcttcatgttgtttgtggattgccttttagtcactttgtaatggaactagggcaaagagagggggcatctgagaaactgttccagtaaaagcaataactaamattgttgatgctttatagtatataaagcatttccacatgtattgtctcatttaattctcacatccatcctacatttcttatcctatttttcaaaagaaaaaactgagacagagggataaagtaaattcccagcatcttccagccattagcaagaa

SEQ ID NO: 679505 - DNA, 1971 bp, Homo sapiens
aggaggctgaggtgggcagattgctcgagctcaggagttcaaggctagcctgggcaacacggcaaaatcctgcctctaccaaaaacacacacacacacacacaaaattcactgggcgtgatggcctgcgtctgtggtcctagctactcaggaggctgaggctggtggatcacttgagtctaggaggctgaggttgcagtgagccgagatcgcaacattgcactccagccttgggcaacagagtgagacactgtcttaaaaaaaagaaaagctcgcagagatttccttctgtttttagttgtagtattttgcttggttggattaaaaaacatcaaatgaatatacctgggaagtttccatgaaaatctggaaatcagagaagactgaaaataaaatcaaatataaaaatatatattagtacatgaaaatgttcttatagaacttgagacatttgatttcaaataattagtagcaagtgaattttccaataaaattatatgaatgccattaaagtaaaagttataggctgtgattttatattatgtaatatttttatcttaagtaaacactctgttagccccaaaagtagagaataatttatttgtttggtttcagcactttaccatattcttcctaacttccccatttatttcattatttttaaaatttatatgaaatgaaattgtgttgtacttaattttttaccttttcaccacaccacctaagaaaacctaagacccttcagatattcctggggattcatggttcatcgttgtggagacagaatagaaacatgtaactgttggtcaagaagtcttcagccacttcatatactttacccctagtttcccccgggggacggcactttcctttcctccttctctgggagcagtctctcctcccactgcatacctactctagtgacagagggagggacatttcttactctccagcagcccgcttcttcagcaaacacctcctgagtatttatttactacatgaaaggcagaaggaaggggtgtgaacaaccagaaaaaaagcagtataaatcaaggagtgtttagttcaaaaagaaggtgacagcagacttggctttggaggaagtgtgggggaacttgacagtgaacagaggagggacattccttgttaaggaaatagcacatgccaaggatcctatggacacatagtttaccttgagtttcattgagagcagaaaacagaactgcttcaaatgcgcagtttctcatgatagacagggtgaaccttgattttatgtttatctcttttaggatgataatccaactccttttcatttttgacatgggtattatcttctatgcatttaactttttttttttttttgtaagtctctacagcttttcttcaactttcttctaacagaaagatcacacctacgtaaaatcttcctctgaaggttttagaagtgctggcgtctagcatgaacggcagaagtaagtgaggaccaacatcttgtaacaagttcatggtactctttccacttgttcacacttagatcccagggtaagcaaccctgtattatcttccatgtcaaaagtaggaggaagggacaggctccaggcctccatccctgttttcaaatatcataacctgaatgaggaaacacagaatatcacacatgcaaaggtaatctcctccagagctagtcatctactgctgttctatctcaatcattttcttcatgttgtttgtggattgccttttagtcactttgtaatggaactagggcaaagagagggggcatctgagaaactgttccagtaaaagcaataactaacattgttgatgctttatagtatataaagcatttccacatgtattgtctcatttaattctcacatccatcctacatttcttatccyatttttcaaaagaaaaaactgagacagagggataaagtaaattcccagcatcttccagccattagcaagaa

SEQ ID NO: 679506 - DNA, 2107 bp, Homo sapiens
tggctagagtcattggcataaaatttgttgtacagggtcttatactttttatttgtttccaaatcaatgtgctaatttccaatcttctattaccctcccccaccccatttccctttttttctggttctttagtggatgtgaagtcagaagttcctgtgggcctggagcccatctcacctttagacctaaggacagacctcaggatgatgatgcccgtggtggaccctgttgtccgtgagaagcaattgcagcaggaattacttcttatccagcagcagcaacaaatccagaagcagcttctgatagcagagtttcagaaacagcatgagaacttgacacggcagcaccaggctcagcttcaggagcatatcaaggtagcaaatgcttctttgtctgtgaccttactcaggagtctgcaccgtggtgggcatgaacagtgcccatgggaacactttgcgggtagattcactgtgattaagacatggatatatggcttgaagggaattgtgattttactagtgaaaactttgggtaagtacctgttaaaaacctgttttgcttctcagagggaccttctttatcctttagcacatagaatcaatagcagggaatagtaacttcctatcctaattttagattctctcctacgtgattttgttcatttgccccatctgctctccaccaagaagaagcatgagcctagaagacccatttyatatttcatttctgaagagtctacatgtactatttgtgagaaaggataaattagtcaccttatatgaagagagctgtttttaaaaaacaaacatggtgtataagtagatgttctgagtatgtccgactcttccttatagaaaagatctcataatgtacacattcaaaataatagtataataaaaagcttaagggagttataaatggagaaactggtgcaaatgtttttatagactgtagataagaatttattgaaagtatttgggagtagttgacaatttgagactaaagttgtttaaattattttagcacaaatatatccatattccagaatttttaataataacttattttattatctaataatattagatgtgtctgtttttttaaattttgtatcttcagagataaatattactttagctttatttgtaaaacatcttgcaacttcttgacaaagacagttgaaacaaggctatttaatttgaatttattgtgacagaaaagcagcaaagatttacaacaaaaattttatttttatatctaactttcaaagatgacaaacacttgctaatttgtgaatgtaataaattatgttatctcatactttattgttttgtattataggaactttattacttgcatatcaagtacaagcacattgatagagggttgatacagataactgatgttactagtatgtaattttaccacattaatatgacagtttctaaggaagtaaaaatgctatcttcttctctatattacttggtttacaagatgtttcttaatcctaaaagaactttattatcgtatattcctaaaaaggctctttgacaagtgatataaaatatatttatttcttttagtagtgaactttccaaaaagaactcttgtatattattgatgtacaaaataccttaaagtgagagtattttcttttgtcccaaatggaatcagtagctcatggctacattttgaagtatgggtagcctttctttagtttttagacttatttttgaatgaatactgaagctttatttaaatttgacctttgaaacaataatagaaacattgatatctagatctgtttctttccttccagcatgttaagatggcaaagagaaatgagtaaaatgtacatttttcaccatactttaagatgtaagggactgtgtagttcattttgctgctttaagtgagacatgtttccctaaatacagggcaatactgataagttactgctttagatacttcttttcatttatattgctgcctttgatagctataaagttaatataaattgtttagaaagaaatttattgcttaattttactcaaaaggtaatagtagcaagtagataattaattgttcatttggcacaagcaaaaca

SEQ ID NO: 679507 - DNA, 2107 bp, Homo sapiens
tggctagagtcattggcataaaatttgttgtacagggtcttatactttttatttgtttccaaatcaatgtgctaatttccaatcttctattaccctcccccaccccatttccctttttttctggttctttagtggatgtgaagtcagaagttcctgtgggcctggagcccatctcacctttagacctaaggacagacctcaggatgatgatgcccgtggtggaccctgttgtccgtgagaagcaattgcagcaggaattacttcttatccagcagcagcaacaaatccagaagcagcttctgatagcagagtttcagaaacagcatgagaacttgacacggcagcaccaggctcagcttcaggagcatatcaaggtagcaaatgcttctttgtctgtgaccttactcaggagtctgcaccgtggtgggcatgaacagtgcccatgggaacactttgcgggtagattcactgtgattaagacatggatatatggcttgaagggaattgtgattttactagtgaaaactttgggtaagtacctgttaaaaacctgttttgcttctcagagggaccttctttatcctttagcacatagaatcaatagcagggaatagtaacttcctatcctaattttagattctctcctacgtgattttgttcatttgccccatctgctctccaccaagaagaagcatgagcctagaagacccatttcatatttcatttctgaagagtctacatgtactatttgtgagaaaggrtaaattagtcaccttatatgaagagagctgtttttaaaaaacaaacatggtgtataagtagatgttctgagtatgtccgactcttccttatagaaaagatctcataatgtacacattcaaaataatagtataataaaaagcttaagggagttataaatggagaaactggtgcaaatgtttttatagactgtagataagaatttattgaaagtatttgggagtagttgacaatttgagactaaagttgtttaaattattttagcacaaatatatccatattccagaatttttaataataacttattttattatctaataatattagatgtgtctgtttttttaaattttgtatcttcagagataaatattactttagctttatttgtaaaacatcttgcaacttcttgacaaagacagttgaaacaaggctatttaatttgaatttattgtgacagaaaagcagcaaagatttacaacaaaaattttatttttatatctaactttcaaagatgacaaacacttgctaatttgtgaatgtaataaattatgttatctcatactttattgttttgtattataggaactttattacttgcatatcaagtacaagcacattgatagagggttgatacagataactgatgttactagtatgtaattttaccacattaatatgacagtttctaaggaagtaaaaatgctatcttcttctctatattacttggtttacaagatgtttcttaatcctaaaagaactttattatcgtatattcctaaaaaggctctttgacaagtgatataaaatatatttatttcttttagtagtgaactttccaaaaagaactcttgtatattattgatgtacaaaataccttaaagtgagagtattttcttttgtcccaaatggaatcagtagctcatggctacattttgaagtatgggtagcctttctttagtttttagacttatttttgaatgaatactgaagctttatttaaatttgacctttgaaacaataatagaaacattgatatctagatctgtttctttccttccagcatgttaagatggcaaagagaaatgagtaaaatgtacatttttcaccatactttaagatgtaagggactgtgtagttcattttgctgctttaagtgagacatgtttccctaaatacagggcaatactgataagttactgctttagatacttcttttcatttatattgctgcctttgatagctataaagttaatataaattgtttagaaagaaatttattgcttaattttactcaaaaggtaatagtagcaagtagataattaattgttcatttggcacaagcaaaaca

SEQ ID NO: 679508 - DNA, 612 bp, Homo sapiens
tattttaatgcgtattggaaaaatataaccagtagttacaatgatgtaatagcaacgatatatgcttttaaaataaatctgtgcaaaaaggacaattttcagaaatataaatagtacacaacttaaaggatatggcaaaaattggggaggtggttccagaatgactgaaatttgagcaatcttgccccagtrtgtgtggttggggaggggtagaggtgggtgatgaaaacttgtccttgaccaggaattatcttgttttgtttttcaaaaacgatcaggtgggaagatcgcttgagccaagaagttcgaggctgcagtgagctatgatcgcatcagtgcactccagtctgggcaacaaagcaagaccttttctctaaaaaaattatttaaaaaaatttaaaaaacaaatgttgcagttttcccatagtattcctggcatattgatctagactgcatcctgaggactatgggtctagtatggacaataaagatggaggaggagaagatgtgcagagttccaggctaatttttcttcacccatttgcaatgcagaggacagacagagggttattagctataatataaaaagtgcttttataaattgacaaaaaa

SEQ ID NO: 679509 - DNA, 1324 bp, Homo sapiens
tgcaatttctctcttaggaaacttggtgctccaggcttgtgtgtcagaaagaatgttgagcatccgtttctgagtttctcatattttgccttatttaaaagccagaggtggaaccccaggaatagtggtattaggctgcaaaaagtctctgaaactttcacaaataaaaaactcaacatgctttatcayataagtaactttagaagaaatcgttttgatgtatagtgttaattcccctccccagactgtactacacaaatagataagatttgaaatctttttttgatttcaatatagaagatatgttggaaagatgccaaatttattatgatgtccctacattctgaattcatatgaaaaaggattttccagagttctaataaaaataatattttcccaacagtgcactgatccttttctgttgttctgcagtgatgtgatagtctattgtgtcacaattcgatgttctacaaatcctttggcttaaacactgtcaatggtttctgttaatgttttcttagtatattataattgtatttatctgttctctacctgtccatgttttctgttaatctgagctatttctccatgggtttcccctcttgggaggagacaactatattcctcatgactatattatattcagattttgctacaggagtgtcagcgaacttcttcagaatgttcttccaggatataggtggttacatcaaacaaggagatgagatagatagatagatgatagatagatagatagctagatagatagatagatagatagatgatagacagatagataggtagatagatagatagatagatagatctcctatatcctaattacgtgtgtgtgtatgtctttgtatcagtacaccattaacagtttattattttgtggaatctctttatacttagctcaccagcatataataaaataatatacttagctcaccagcatataataaaaatctgtacttctagctgagttggaagcaaccagaagatacaaaatgcaaactggaaaatgacatcaacataatttttaaactaagggaatgttgttgacatgttgcatatataaacataaaaagtgattgtaggatttttattattctcctttgatgaggttcaatgtaggatattagtttttcttttgctggagttttttacgtacatatatacaccagtttctcccattaccttgtaagatttcctggaccataaactatccctgagaattgattccacactccctcagatatgacttttcataagccaagtcctttaaaaatacatttcatatatttctcagactacatgtcaa

SEQ ID NO: 679510 - DNA, 1324 bp, Homo sapiens
tgcaatttctctcttaggaaacttggtgctccaggcttgtgtgtcagaaagaatgttgagcatccgtttctgagtttctcatattttgccttatttaaaagccagaggtggaaccccaggaatagtggtattaggctgcaaaaagtctctgaaactttcacaaataaaaaactcaacatgctttatcatataagtaactttagaagaaatcgttttgatgtatagtgttaattcccctccccagactgtactacacaaatagataagatttgaaatctttttttgatttcaatatagaagatatgttggaaagatgccaaatttattatgatgtccctacattctgaattcatatgaaaaaggattttccagagttctaataaaaataatattttcccaacagtgcactgatccttttctgttgttctgcagtgatgtgatagtctattgtgtcacaattcgatgttctacaaatcctttggcttaaacactgtcaatggtttctgttaatgttttcttagtatattataattgtatttatctgttctctacctgtccatgttttctgttaatctgagctatttctccatgggtttcccctcttgggaggagacaactatattcctcatgactatattatattcagattttgctacaggagtgtcagcgaacttcttcagaatgttcttccaggatataggtggttacatcaaacaaggagatgagatagatagatagatgatagatagatagatagctagmtagatagatagatagatagatgatagacagatagataggtagatagatagatagatagatagatctcctatatcctaattacgtgtgtgtgtatgtctttgtatcagtacaccattaacagtttattattttgtggaatctctttatacttagctcaccagcatataataaaataatatacttagctcaccagcatataataaaaatctgtacttctagctgagttggaagcaaccagaagatacaaaatgcaaactggaaaatgacatcaacataatttttaaactaagggaatgttgttgacatgttgcatatataaacataaaaagtgattgtaggatttttattattctcctttgatgaggttcaatgtaggatattagtttttcttttgctggagttttttacgtacatatatacaccagtttctcccattaccttgtaagatttcctggaccataaactatccctgagaattgattccacactccctcagatatgacttttcataagccaagtcctttaaaaatacatttcatatatttctcagactacatgtcaa

SEQ ID NO: 679511 - DNA, 1324 bp, Homo sapiens
tgcaatttctctcttaggaaacttggtgctccaggcttgtgtgtcagaaagaatgttgagcatccgtttctgagtttctcatattttgccttatttaaaagccagaggtggaaccccaggaatagtggtattaggctgcaaaaagtctctgaaactttcacaaataaaaaactcaacatgctttatcatataagtaactttagaagaaatcgttttgatgtatagtgttaattcccctccccagactgtactacacaaatagataagatttgaaatctttttttgatttcaatatagaagatatgttggaaagatgccaaatttattatgatgtccctacattctgaattcatatgaaaaaggattttccagagttctaataaaaataatattttcccaacagtgcactgatccttttctgttgttctgcagtgatgtgatagtctattgtgtcacaattcgatgttctacaaatcctttggcttaaacactgtcaatggtttctgttaatgttttcttagtatattataattgtatttatctgttctctacctgtccatgttttctgttaatctgagctatttctccatgggtttcccctcttgggaggagacaactatattcctcatgactatattatattcagattttgctacaggagtgtcagcgaacttcttcagaatgttcttccaggatataggtggttacatcaaacaaggagatgagatagatagatagatgatagatagatagatagctagatagatagatagatagatagatgatagacagatagataggtagatagatagatagatagatagatctcctatatcctaattacgtgtgtgtgtatgtctttgtatcagtacaccattaacagtttattattttgtggaatctctttatacttagctcaccagcatataataaaataatatacttagctcaccagcatataataaaaatctgtacttctagctgagttggaagcaaccagaagatacaaaatgcaaactggaaaaygacatcaacataatttttaaactaagggaatgttgttgacatgttgcatatataaacataaaaagtgattgtaggatttttattattctcctttgatgaggttcaatgtaggatattagtttttcttttgctggagttttttacgtacatatatacaccagtttctcccattaccttgtaagatttcctggaccataaactatccctgagaattgattccacactccctcagatatgacttttcataagccaagtcctttaaaaatacatttcatatatttctcagactacatgtcaa

SEQ ID NO: 679512 - DNA, 612 bp, Homo sapiens
ggccaacatggtgaaaccccggctctactaaaaatacaaaattggccgggcgtggkggcggacacctgtacttccagctactcgggagactgcggcagaatcgcctgaacccaggaggcggaagttgcagtgagccgagattgcgacactgcactccagcctgggcgacagagcaagactccatctctcacacacacacacacacacacacatacacacacacacacacacacacacagagagagagcgagcgagcaagcaagcaaaaaaaacaaacaaacaaacaaaaaaaccccacatattccttaggataaattcctgagtagaaatcctgggtcaaagattatgctcatgtttagagctactgatacagtagtgacagcctattactgagaaccaagatccaagctagaattcctcaagtagttttcaattttgcagtaactaatttcattttttcgtattttcaagtcaaaatttttttaggaatatgaacttattactagaaaataccaattgaccttcaaaggcttaccactgtctaaacattccttatcagtcatcgaactttttgtatttatattacatttgtgtgaaactaaataggtcaaa

SEQ ID NO: 679513 - DNA, 612 bp, Homo sapiens
ggccaacatggtgaaaccccggctctactaaaaatacaaaattggccgggcgtggtggcggacacctgtacttccagctactcgggagactgcggcagaatcgcctgaacccaggaggcggaagttgcagtgagccgagattgcgacactgcactccagcctgggcgacagagcaagactccatctctcacacacacacacacacacacacatacacacacacacacacacacacacagagagagagcgagcgagcaagcaagcaaaaaaaacaaacaaacaaacaaaaaaaccccacatattccttaggataaattcctgagtagaaatcctgggtcaaagattatgctcatgtttagagctactgatacagtagtgacagcctattactgagaaccaagatccaagctagaattcctcaagtagttttcaattttgcagtaactaatttcattttttcgtattttcaagtcaaaatttttttaggaatatgaacttattactagaaaataccaattgaccttcaaaggcttaccactgtctaaacattccttatcagtcatygaactttttgtatttatattacatttgtgtgaaactaaataggtcaaa

SEQ ID NO: 679514 - DNA, 605 bp, Homo sapiens
ctcaaaataagattaatgcagtacttttgaaatatcacaatgacatctatactttttctatcaaagacttcaaaattcaaacctgtacccattactcattccaaagccagttctacatttttatatatttgttacatcagcaacccacttcccattgcaaaaatctttactagttttctatggctgctgttacatagtattacaaactaggtagcttaaaacaacagaaaattattatctcatagttctgaaasctagaggtccaaatcaaggtttcagcaaggtcatggtctctctgaaagatctaataaaaaatctattccacgcctttgtcttagaataaattagagcttagaggttaaaaatccaaactgggaatgccaaaacctggatttaagttctatattctttattttctactgttctgatgtcaagtatgttaactacatcatagatccaatgtagttacatcattgtcagcagcaaaaatgatataatttctctaaaataaatatttaatgcctaacacatagtattcagtcaatgcatgtgaattgttatatgtcaccaattcaatatttttagatcatatttgtgaagaaata

SEQ ID NO: 679515 - DNA, 1102 bp, Homo sapiens
tcatagggaaaatagctgaagaatatagagtttaaatgggttcttgttgtttccattggagtcttaacatttacttgcttttattgatctaaggcttattaaataagtctagtaacttagtattgtacggtctagtgatttatgcctgtagtctttaaatagtgtgagagtccttggagaatgctaagcctgaaggctattaataatattcttaataatttgctttgttctaatttttgatgttttctaaattaaaaggaagatgagtactttaaaatctatagctttgtcctaaaacacatgattaagcatggatatccgtttttctcaaaaacatatataaaatgatgtaaatcaatttatttttgtggcacatattgtcatctgggtatcttaatgttccttcttgcttttttccttgataacctgagagaggagctatgtgccaccttcctaattgccttacatatagcttatgcatttgccatcacacattagaaatctgctgaggtttcttcttaagcygtgttttcctgatagaaaggaaatgacatgaattttcccttatcctcttccctttctaacttaaggtcaacctgatacctgactgaagcagctttcaggaaacaaggagacagcaaacctgaggaaaataatcatagaaatgttagccacaatagtgtcgagtcactcaatcagtagcagccctggttttgcctgattttattattctattaaaaaaagcaccctgattttctaagaggcaacattaaggctttctgtttcttgcagttataactaaactgctgtttttttaatgaaaagatattgattgatgttttgtatgtatcccatagagtctacaactgacatgtgccgatagtagctattttttttaattgttcaaattttatagctgtaacatgcacatggatccattggctgtgtgactacaggagggcaggcagggatttggtgaccttcttgtactgtgtgtggtctgcaccatgatgctgctactgctctcttggcttctaactatgtgatagtatcccagacagtcccagcagctacactcaaatttagggaagagttgatggcc

SEQ ID NO: 679516 - DNA, 646 bp, Homo sapiens
tcagctcactgcaagctccgcctcctgggtttacaccattctcccgtttcagcctccggagtaactgggactacaggcgcccaccaccatgcctggctaattttttgtatttttagtagagatggggtttcaccgtgttagccaggatggtctcgatctcctgaccctgtgatccacccgcctcggcctcccaaagtgctgggattacaggcgtgagccaccgctcccagcctaagtgcagatttttgatggcatgggarccagttttcctacccctccattgttcaagggtcaattgtatatataaagaatgtgtgtgtgtgtgtgttgtgttatataatttgttaaattaacaaaataaatattatcatttatttcaaaaccattttatttgactcgaatgtaagtttcagtccttctcccttaaacacaaaatagtacactaattaccatcaagcggatacatacaaagtctcctaaatgtgtttcctgtataagctgtatagtagtaatcagaaagtaatcagaaatttaaaaatgaatttccttaaacaggtatcaagcagtgggggaataattcaaggaggttaagccttttcacatcttgtaggaggttatgaatagaaatcttttcacagagcacagt

SEQ ID NO: 679517 - DNA, 646 bp, Homo sapiens
tcagctcactgcaagctccgcctcctgggtttacaccattctcccgtttcagcctccggagtaactgggactacaggcgcccaccaccatgcctggctaattttttgtatttttagtagagatggggtttcaccgtgttagccaggatggtctcgatctcctgaccctgtgatccacccgcctcggcctcccaaagtgctgggattacaggcgtgagccaccgctcccagcctaagtgcagatttttgatggcatgggaaycagttttcctacccctccattgttcaagggtcaattgtatatataaagaatgtgtgtgtgtgtgtgttgtgttatataatttgttaaattaacaaaataaatattatcatttatttcaaaaccattttatttgactcgaatgtaagtttcagtccttctcccttaaacacaaaatagtacactaattaccatcaagcggatacatacaaagtctcctaaatgtgtttcctgtataagctgtatagtagtaatcagaaagtaatcagaaatttaaaaatgaatttccttaaacaggtatcaagcagtgggggaataattcaaggaggttaagccttttcacatcttgtaggaggttatgaatagaaatcttttcacagagcacagt

SEQ ID NO: 679518 - DNA, 646 bp, Homo sapiens
tcagctcactgcaagctccgcctcctgggtttacaccattctcccgtttcagcctccggagtaactgggactacaggcgcccaccaccatgcctggctaattttttgtatttttagtagagatggggtttcaccgtgttagccaggatggtctcgatctcctgaccctgtgatccacccgcctcggcctcccaaagtgctgggattacaggcgtgagccaccgctcccagcctaagtgcagatttttgatggcatgggaaccagttttcctacccctccattgttcaagggtcaattgtatatataaagaatgtgtgtgtgtgtgtgttgtgttatataatttgttaaattaacaaaataaatattatcayttatttcaaaaccattttatttgactcgaatgtaagtttcagtccttctcccttaaacacaaaatagtacactaattaccatcaagcggatacatacaaagtctcctaaatgtgtttcctgtataagctgtatagtagtaatcagaaagtaatcagaaatttaaaaatgaatttccttaaacaggtatcaagcagtgggggaataattcaaggaggttaagccttttcacatcttgtaggaggttatgaatagaaatcttttcacagagcacagt

SEQ ID NO: 679519 - DNA, 605 bp, Homo sapiens
tatatacacacacacacaatacttaaatcaaatctccagttctacaatgtatccttctttattttgctgcacatttttgaaggcttaactgtatggactactttagtggacctcccatccttccggcttctagtggagtttgatgaatggaaggctctgacaaaaaaaatcggaaggtgggagaaaaaagagttacttattcctctgctttcttctccattgctttatggcagatagttttgttcctctatcagagaccacaaatcctagcagtctctctctctctctttctcactctcgcgcacctctcattagtttgtttttgttttttggctttttaaaatttttaattctgtaaatgctctttgacttaccttttcattcttaatggtggtaatcacttccmtcttggtttctccaaactgtattcatatttttgaaattagttttaatattaaatttctgagaaactagtttaagtgtaatgtcagatttctgagatccttaccgatacagtaatttaccccaaaagtggtcccataaaacagattctcaaaatgagattctgggattggtttgctcacatatttgaggacccccccccc

SEQ ID NO: 679520 - DNA, 1851 bp, Homo sapiens
ctccctcttcggcatcccaaagtgctggtattacaaggatgagccactgtgcccagcccacagagttttaattatacctccttagtatctctgataaagaattcctcagccgggtgcggtggctcaagcctgtaatcccagcactttgggaggccgaggcggtcagaacacaaggtcaggagatcgagaccatcctggctaacacagtgaaaccctgtctctactaaaaatacaaaaaattagccggttgtggtggtgggcacctatagtcccagctacttgggaggctgagggaggaggatggcatgaacctgggaggcggaacttgcagtgagccgagatggcgccactgcattccagcctgggcaactgagcgagactctgtctaaaaaaaacagaattcctcaaaaggcaaggtaatttgcatattgtgtcagactacctacagtgattacattataccatcacataatagacctttgcatatttattaataaggtatattgggaataatattttccctctaaaattttagctgcatacatataattataaatataaatcaatatgaatccataagtgttcttttgataagtgataagaatgttatgaatccattatttactaatttgaaactttcaaaaagtcgataactgtccaaatgtatatattataatacactgacagccaatatattacattatctgtatgttcccttgttttcatttacaatttttatttcaattgtttgtaaaattatcacattgacaataaaacagactacttactgcatgtttttcattgaatgtgtaagaarcaaatggtaatatttatatgaaaggataatgagtaatctacttcatgcatttctgtatagttatctttttaaaatattaattaatgatggttctaatgttgacacatatctcaggattatttcaggtttaaaacaaataaagcctgccttactttatattgttgacacgcattttgtcacataattttttttattcatcttgttatttaatgcaactctaggctttaaataggtatttcactgaagcaatcattgtactaaaggaattttgtttagtaactagattgtatacccttcttgaatattacactggttagtataaattaatttgaagtaatatttcagcatacttttaatgtgattttgtggtaggatgcaaaacaaatgataattgaattattttatttaaatgagagcagagcttaacttctcgtcatggacatgctttatattttttaaaccagaggaagttaaagtttgaaactcagtacatatatatctctaatactttttataaattgtaagttagaacaattgaaatatagatggcaaaccttttataatttgattaaatctaatagttattttattttatctttcatgcactgaaaatcaggcagaaatcaaagtaatatccttatgtagatatttcagatcaaagaagacagatcttgttattcatagtagtaatatataaatataaaatacagactcatgatcaataataagggaaaaatatatgtaatacacacaaacatatacatacatgtgtatacataattgtacttgaaaacccaatatgttttacaagtgattgaaagaaatgattttattttgagacatcataaaaaattatattcttcacaatctatcactttcttggaatgtatttgtcatgatatagaattttatactgttcaacagagttttaatctcaagccccattaggtttgtttaaaagatgaagagaatatatttttcaattagaaacctgcattggtttttaaatggtgtcaagcaattccatgattcca

SEQ ID NO: 679521 - DNA, 898 bp, Homo sapiens
tttaaaaaacaaacaaaaaaaaaaacaaaaaaaataaagtgtgtagagacagagtctcactgtgttgcccaggctggtctcaaactcttgggctgaagcattcctcctgtccccgcctctcaaagtgcttgggattacaggtgtgagtcactgtgccctgctcaaacattttataattaagtagaataaccgacatgtcagctggggtcccctgaatcctcaaagatctaggtaagatcttctatgcaggctacttcctgctaatctggggagggcgaccttctcaaggtcgtatctgcctctggccctggtgcccccaacccacgctggctctgctttttcccctacaggagcttaagtgcagaactttgcgtctcccattgcctgcaggaaacctactcagctagtgagttcatagggcttcactgaagactgggggactctggaggggatgattttctggcacattcaggcttctagaaccctctattctttccccagctctgcttctcrttttttttcttgtctggctccaaaaccttactccttttattgagcacattatttctctccagttcccacctctgcatttcctttcctgaatgcttctagggcctcagcagaacaaggaacgcctcattgatgacgttaaaaaacaacaacaacaaaacaacccaagacacaagacacagacaaaacttttttttttttttttttttttttggtattctccagacaaaacgtttgcagcatgagatgaggtcccctttggaaacatctccccacattctgtgattctgccaagtcctctaaattttgtttcctccttcatccaccaggtggatttcaggactcctactgtcagaggcttggaataaacctctggcatgctttgctt

SEQ ID NO: 679522 - DNA, 420 bp, Homo sapiens
taaataaatcagccgggaatggtggtatacatctgtggtcctagttactcgggaggctaaggcaggaggaccgcttgagcctaggaggttgaggctgcagtgagccatgttcatgccactgcattgtagcctgggtgacaaagaaagaccttgtctcaaaaaaaaaaaaaaaattataggaatttcaaaatgccagcatcacagtggggtcgtcttattatggggccttgtgcagttaccccaggcagcatagcaggaagcctggaagagctttgctgcaggattcagatcccagaccatggtgccyatgagtttcaagatcttgtaacatgaaggcgtgtcttcaacagactctctccaaagaaatcctctcttgctcttggcccttctttgtgcctgaaaagcatgagaagagggtgt

SEQ ID NO: 679523 - DNA, 626 bp, Homo sapiens
ggttcataatagtatcaccccttgagggcagataaactgatgtatgtttatgcatacataaactgatgtatgtgatgtaatttagcacggtgctggtccacaggtgaatggagatgatttttgactttctgtctcgcagaaagtctgtacctccccaaggacatctcatgcccacagcagcccagcagtgagtcctcaccaacccagactgactttccagcctcatatcctcaaaggatctgacattttccagccaccaaccttggtttgcactatgcccttcatcaaaaatgtctttgcttctctttgatgcmtgggtatctattcctttagaacccatttcaaatttctcctccttaaagatgccgttggtcactgttccaatctgtaggatactctgttttgcccagatcccttttgcactgccttctgggactcagatacagagggggcaaaacatcccggaaggggtggggcccatggactgctcttggagtggggacagagatcaccacgagatggcgctattgagccatcactgtcaactggtttttctctgttttcattttcttacttgatgagaaatgtgtgatttccaaatagtcccagaaggaatagaactgtga

SEQ ID NO: 679524 - DNA, 652 bp, Homo sapiens
tactatgttccagatattgttcatataactcatctaattttcatagcagttttacaagatgagtactatttgtttttgtttttttgttttttttttttgagatggagtctcgctctgttgccaggctagagtgcagtggcgcaatctgggttcactgcracctctgcctcctgggttcaagcaattctcctgcctcagcctcctgagtagctgggactacaggcacataccagctaatttttgtattttcagtagcgacagggtttcaccatgttagccaagatggtcttgatctcttgacctcgtgatccacccgcctcagcctcccaaagtgctgggattataggcgtcagccacagctcccagccaagatgggtactatttttatacctattttatagaagaggaaactgaggcatagagaagtcaagtcacttgatcatacagctagtgtgtggaggaggcagattcaaaccctggcttcggtcttagtcactgcattggcttcatgggcttatcatgaggattaaacgcgtgaacatgctcagtgtttagttcagtgtctggcacaggatcaatgttcagaaaatcctaacagctgctgtcagtatcagaacccaaacaaacaggtgggactttcgccaactctcta

SEQ ID NO: 679525 - DNA, 917 bp, Homo sapiens
tccaagtgattcacaaatggacacaaggaatatgattagtcctctgtgagtgattctgaggggccgtggtatagagagagagaggggaaggaggatgggaaaatgccggcagttccctccccaacccattctgacagtttgctggttagagaaaaatccccatgtcagagaatttttttctttgtttatttcctgtgaaatagaatgtgggtctggcattggggaggactctagtaattcatattttctgcttatttggctcctggctgaacaggaatttacattacttaatgtctgggtttttcctggggaatcaaaataagttttctattcaattattaagcaaatttcacagccaaataatcctcttatttttacaagtggtattttccctggcagagggttttctggcttctctgggtacttgatccgtctcctctcttctgtttcctctgtctttgtctggctatgaaggaagctaaagcccctcattcatggattaggggcttctcaatggcagttggcagactttggctttgcaagctagagatgaatcttttttttctttcttttttttttttttcgagacggagtcttgctctgttgcgcaggctggtgtgcrgtggtgtgatctccactcactacaacctctgccttccaggttcaagctattctcctatctcagccttccaagaagctgggactacaggcatgaaccaccacacctaatttaaaaaatactttagtaaatggctaatttaaaaaatatttttagtaaatgggaggttttaccatgtcggccaggctggtctcgaactcgtgacctcaggtgatctgcctgccttgtcctcccaaagtgctgggattacaggtgtgagccactgcgcctggcctagagataaatcttaatgtccgcc

SEQ ID NO: 679526 - DNA, 917 bp, Homo sapiens
tccaagtgattcacaaatggacacaaggaatatgattagtcctctgtgagtgattctgaggggccgtggtatagagagagagaggggaaggaggatgggaaaatgccggcagttccctccccaacccattctgacagtttgctggttagagaaaaatccccatgtcagagaatttttttctttgtttatttcctgtgaaatagaatgtgggtctggcattggggaggactctagtaattcatattttctgcttatttggctcctggctgaacaggaatttacattacttaatgtctgggtttttcctggggaatcaaaataagttttctattcaattattaagcaaatttcacagccaaataatcctcttatttttacaagtggtattttccctggcagagggttttctggcttctctgggtacttgatccgtctcctctcttctgtttcctctgtctttgtctggctatgaaggaagctaaagcccctcattcatggattaggggcttctcaatggcagttggcagactttggctttgcaagctagagatgaatcttttttttctttcttttttttttttttcgagacggagtcttgctctgttgcgcaggctggtgtgcggtggtgygatctccactcactacaacctctgccttccaggttcaagctattctcctatctcagccttccaagaagctgggactacaggcatgaaccaccacacctaatttaaaaaatactttagtaaatggctaatttaaaaaatatttttagtaaatgggaggttttaccatgtcggccaggctggtctcgaactcgtgacctcaggtgatctgcctgccttgtcctcccaaagtgctgggattacaggtgtgagccactgcgcctggcctagagataaatcttaatgtccgcc

SEQ ID NO: 679527 - DNA, 917 bp, Homo sapiens
tccaagtgattcacaaatggacacaaggaatatgattagtcctctgtgagtgattctgaggggccgtggtatagagagagagaggggaaggaggatgggaaaatgccggcagttccctccccaacccattctgacagtttgctggttagagaaaaatccccatgtcagagaatttttttctttgtttatttcctgtgaaatagaatgtgggtctggcattggggaggactctagtaattcatattttctgcttatttggctcctggctgaacaggaatttacattacttaatgtctgggtttttcctggggaatcaaaataagttttctattcaattattaagcaaatttcacagccaaataatcctcttatttttacaagtggtattttccctggcagagggttttctggcttctctgggtacttgatccgtctcctctcttctgtttcctctgtctttgtctggctatgaaggaagctaaagcccctcattcatggattaggggcttctcaatggcagttggcagactttggctttgcaagctagagatgaatcttttttttctttcttttttttttttttcgagacggagtcttgctctgttgcgcaggctggtgtgcggtggtgtgatctccactcactacaacctctgccttccaggttcaagctattctcctatctcagccttccaagaagctgggactacaggcatgmaccaccacacctaatttaaaaaatactttagtaaatggctaatttaaaaaatatttttagtaaatgggaggttttaccatgtcggccaggctggtctcgaactcgtgacctcaggtgatctgcctgccttgtcctcccaaagtgctgggattacaggtgtgagccactgcgcctggcctagagataaatcttaatgtccgcc

SEQ ID NO: 679528 - DNA, 977 bp, Homo sapiens
tattgtgactagttaataaaagtgttctaaccacaaaaatgatccatatacaaggtagcatatatgttaattagctttatttagccattccacactgtatgcgtatatcaaaaatcatgtacaccataaatataattattattattttttgagacagagtttcgctcttgttgcccaggctggagtgcaatggcacgatctcagcccactgcaacctccgcctcctgggttcaagcgattctcctgcttcagcctccctagtagctgggattacaggcatgcaccaccatgcccagctaattttgtatttttagtagagatggggtttatccatgctggtcaggctggtctcgaactcctgacctcaggtgatccgcccacctcggcctcccaaagtgctgggattataggcgtgagccacygtgcccggctcataatttttatttataacaaaaagtaaagcgaatctcttgtagacagagtatagttggatcttgttttttcaacctattcacctactctatgtcttctaattggggaatttaattcatttatacttaaagtaattattgatagataatttacttagtagaagtataactttgagcctgttatttaccttttctaaatgagttttcatctctgtgaaatgggcacaattaaagagtccgcctcctgggactggggtcaggattagttgagatagtctgtgtaaggctaggatggtgcttgacagtcagtgttattattttttgatcctgtgggatagggcaacccagatactcaggtgggaaacacttgcaaccagagaaccttgactcaaaatcttggtcctacttggtttgaaggatcccattgcatttgcattgctgccccttctgacaggttattcacactgataaaccccattttgcaacttacatgtgcaggattcagctaattggataggagtggacaccgaacctaaggtgaaaaat

SEQ ID NO: 679529 - DNA, 598 bp, Homo sapiens
tgctaaatgcatatacacacacacatatctatgcacacacatacatacacactgatatatatcacacrcatgcatacacacacacggagaataaccggtactgccttttgttgagtgtcaaggttgcttttatctctccagctggagatttctgcacctgtctgtagcatccattactagcatcccattcccaatattattattcactcctttacttccgaatataaagcagatgtcatctggggccctttttgccccttctgatttcaataaaattttccccaacgtcctgtcttcctcctcctcctctatcccattcctgaggcatctcaagtcttcccttggatttctgtcaactcctgacttttctgcctctagagctttggctcctagtaggatatttctgacctgcagcatatcatattctttgtttttaaaatttattattgttggccaggtgcagtggctcatgcctgtaatcccatcactttgggagaccgaggcaggtggatcacctgaggtcaggagtttgagattaacctggccaacatggtgaaatcccgtttctactaaaaatacaaaaattagctggatgtgg

SEQ ID NO: 679530 - DNA, 598 bp, Homo sapiens
tgctaaatgcatatacacacacacatatctatgcacacacatacatacacactgatatatatcacacacatgcatacacacacacggagaataaccggtactgccttttgttgagtgtcaaggttgcttttatctctccagctggagatttctgcacctgtctgtagcatccattactagcatcccattcccaatattattattcactcctttacttccgaatataaagcagatgtcatctggggccctttttgccccttctgatttcaataaaawtttccccaacgtcctgtcttcctcctcctcctctatcccattcctgaggcatctcaagtcttcccttggatttctgtcaactcctgacttttctgcctctagagctttggctcctagtaggatatttctgacctgcagcatatcatattctttgtttttaaaatttattattgttggccaggtgcagtggctcatgcctgtaatcccatcactttgggagaccgaggcaggtggatcacctgaggtcaggagtttgagattaacctggccaacatggtgaaatcccgtttctactaaaaatacaaaaattagctggatgtgg

SEQ ID NO: 679531 - DNA, 598 bp, Homo sapiens
tgctaaatgcatatacacacacacatatctatgcacacacatacatacacactgatatatatcacacacatgcatacacacacacggagaataaccggtactgccttttgttgagtgtcaaggttgcttttatctctccagctggagatttctgcacctgtctgtagcatccattactagcatcccattcccaatattattattcactcctttacttccgaatataaagcagatgtcatctggggccctttttgccccttctgatttcaataaaattttccccaacgtcctgtcttcctcctcctcctctatcccattcctgaggcatctcaagtcttccctyggatttctgtcaactcctgacttttctgcctctagagctttggctcctagtaggatatttctgacctgcagcatatcatattctttgtttttaaaatttattattgttggccaggtgcagtggctcatgcctgtaatcccatcactttgggagaccgaggcaggtggatcacctgaggtcaggagtttgagattaacctggccaacatggtgaaatcccgtttctactaaaaatacaaaaattagctggatgtgg

SEQ ID NO: 679532 - DNA, 598 bp, Homo sapiens
tgctaaatgcatatacacacacacatatctatgcacacacatacatacacactgatatatatcacacacatgcatacacacacacggagaataaccggtactgccttttgttgagtgtcaaggttgcttttatctctccagctggagatttctgcacctgtctgtagcatccattactagcatcccattcccaatattattattcactcctttacttccgaatataaagcagatgtcatctggggccctttttgccccttctgatttcaataaaattttccccaacgtcctgtcttcctcctcctcctctatcccattcctgaggcatctcaagtcttcccttggatttctgtcaactcctgacttttctgcctctagagctttggctcctagtaggatatttctgacctgcrgcatatcatattctttgtttttaaaatttattattgttggccaggtgcagtggctcatgcctgtaatcccatcactttgggagaccgaggcaggtggatcacctgaggtcaggagtttgagattaacctggccaacatggtgaaatcccgtttctactaaaaatacaaaaattagctggatgtgg

SEQ ID NO: 679533 - DNA, 670 bp, Homo sapiens
ggtcactgygtgaagcaattttactaagagccaccaaacccctctcttccctccaaccaagttcattcacccttctcagaagagcccaagagacctctgtgagagtaagacaggagttggcgatggtgcaatttgcagaacgccatgtttgttagcgccttgtcttcatgtggccggagggcactcctgaagcttcaaactcctgtaaaaacgcttcctgtccagggagggtggtatgggaagtctgaggtggctgggagaggaactggcgaagtaaggagttggagcaggagtcagagagacatgggatggggaaactcacaagcagactccaccccagtcagggaacctcactcaccgttccattaagggctggaaaaggaggcaccgacaggtgtctcacagaagcgaatggtagctgttcaggaggctggacccaggaaaaaggacataaaatcggggaggtgcctcaccctaatttttctcaactccagcagaaccttcttagagagcctcactcaattccacatttctcctcctctcagacaagcccggcagctccgtccacgtcctttgctgaatggagccagcgtggtcacttctgccctatcgaggaagctgaaggccctggcccatctctgacagctcagggcacaggaaagccttgcct

SEQ ID NO: 679534 - DNA, 670 bp, Homo sapiens
ggtcactgcgtgaagcaattttactaagagccaccaaacccctctcttccctccaaccaagttcattcacccttctcagaagagcccaagagacctctgtgagagtaagacaggagttggcgayggtgcaatttgcagaacgccatgtttgttagcgccttgtcttcatgtggccggagggcactcctgaagcttcaaactcctgtaaaaacgcttcctgtccagggagggtggtatgggaagtctgaggtggctgggagaggaactggcgaagtaaggagttggagcaggagtcagagagacatgggatggggaaactcacaagcagactccaccccagtcagggaacctcactcaccgttccattaagggctggaaaaggaggcaccgacaggtgtctcacagaagcgaatggtagctgttcaggaggctggacccaggaaaaaggacataaaatcggggaggtgcctcaccctaatttttctcaactccagcagaaccttcttagagagcctcactcaattccacatttctcctcctctcagacaagcccggcagctccgtccacgtcctttgctgaatggagccagcgtggtcacttctgccctatcgaggaagctgaaggccctggcccatctctgacagctcagggcacaggaaagccttgcct

SEQ ID NO: 679535 - DNA, 670 bp, Homo sapiens
ggtcactgcgtgaagcaattttactaagagccaccaaacccctctcttccctccaaccaagttcattcacccttctcagaagagcccaagagacctctgtgagagtaagacaggagttggcgatggtgcaayttgcagaacgccatgtttgttagcgccttgtcttcatgtggccggagggcactcctgaagcttcaaactcctgtaaaaacgcttcctgtccagggagggtggtatgggaagtctgaggtggctgggagaggaactggcgaagtaaggagttggagcaggagtcagagagacatgggatggggaaactcacaagcagactccaccccagtcagggaacctcactcaccgttccattaagggctggaaaaggaggcaccgacaggtgtctcacagaagcgaatggtagctgttcaggaggctggacccaggaaaaaggacataaaatcggggaggtgcctcaccctaatttttctcaactccagcagaaccttcttagagagcctcactcaattccacatttctcctcctctcagacaagcccggcagctccgtccacgtcctttgctgaatggagccagcgtggtcacttctgccctatcgaggaagctgaaggccctggcccatctctgacagctcagggcacaggaaagccttgcct

SEQ ID NO: 679536 - DNA, 1121 bp, Homo sapiens
cacgggtttctatttttactggttttgtccttttaaaaagcttgtctttctttagtttttgtttttcttgctctgttgcccaagctggagtgcagtggtgcaatcatagctcactgaagcctcaaattcctaggctgaattccttgtacccaggactacaggcatargccaccatgctcagctaatttttttatctaactggagtctttaaaaaccttcttttagggccaggtgccgtggcccatgcttgtaatcccagcactttgacaggccaaggcagccagatcacttgaggccaggagttcaagaccagcctggccaacatggtgaaaccctgtctctactgaaaatacaaaaattagctgggcctggtggtgcactcctgtaatcccagctactcaagtggctgaggcatgagaatcgcttgaacccatgaggcggaggttgctgtgagcccagatcacacctctgcattccagcttgggcaacagagggagactctgtctcaaaaaaaaatttttttcataaagcttattttaaatctaataagcccgtttcaacttttaactactctttgaagtactataattgcaaatcagtatttgtttttatgtatttgctttatgtacctctttagatatgaaggactttattcattattcttaaagccattttaataccaacatacctaccagataggccacataaatcagcgtttacttgcttcaagaaacccaagttctaatctcatcagttgtctggactatgatatatatagtgatagccatttttgtggggttttctttgattgtttaattaggcagccttccaatccaaagtaggaccagagagactccctcttttgttgttattatcattatcattattatatcaggcagccccctgagccacagtagactcagaaaaactcccagttatagccatttttgggtatgagcttggggcttcgctgaattatgaggcctaatttgctgcatggattagatatagaaatgtgactgtatgaaaagggcataaggaaaagttaaaaggtacatgttctcaggatctcctggggctgtgtcattccctggtcacttgaaaaaaagaaagaaaagtta

SEQ ID NO: 679537 - DNA, 865 bp, Homo sapiens
tgagaggagtccatttgtcctagctgaggcccaggcacgggacagagcccagccaaggtcagcagagccaccactccagccagcagctgatcacagatacatcaaaaagtccagatgagaccagaaaaaccaccctcactgaccaatggactcataagcagtaaagagtggtgttctttttatttttacttatttatttgagatggagtcttgctctgtcacccaggctggagtgcagtggcatgatcttggctcactgtaacttccacctcctgggttcaagcaattctcctgtttcagcctcctgagtagctggggctacaggcacrtgccactgcgccctgctaatttttgtatttttagtagagatggtgtttcgtcatatcggccaggctgctctcgaactcctgatcccaaatgatccacccgcctcagcctcccaaaatgctgggattacaggtgtgagccaccatgcccagccaagagtggtgtttttttaagcaattaagttttggagtgccttcggttagtaaaaactaactagacaaccaagataagccagtgagtaaatgttggagttgagattttttccagctgtcaccactgcccctgcccctgccatatgtatatatatatatatatatattttttttttttttttttttttttttttttctctaagacagggtcttgctctgtcatctgggctggagtgcagtgccaatagctcattggcagccttgacctctggggctcaagtgatctttccacctcaacctcctgagtagctgggaccacaggcatgtgtcacaatgcccatctaatttttttttttttttttttgagacggagtcttgctctgttc

SEQ ID NO: 679538 - DNA, 865 bp, Homo sapiens
tgagaggagtccatttgtcctagctgaggcccaggcacgggacagagcccagccaaggtcagcagagccaccactccagccagcagctgatcacagatacatcaaaaagtccagatgagaccagaaaaaccaccctcactgaccaatggactcataagcagtaaagagtggtgttctttttatttttacttatttatttgagatggagtcttgctctgtcacccaggctggagtgcagtggcatgatcttggctcactgtaacttccacctcctgggttcaagcaattctcctgtttcagcctcctgagtagctggggctacaggcacgtgccactgcgccctgctaatttttgtatttttagtagagatggtgtttcgtcatatcggccaggctgctctcgaactcctgatcccaaatgatccacccgcctcagcctcccaaaatgctgggattacaggtgtgagccaccatgcccagccaagagtggtgtttttttaagcaattaagttttggagtgccttcggttagtaaaaactaactagacaaccaagataagccagtgagtaaatgttggagttgagattttttccagctgtcaccactgcccctgcccctgccatatgtatatatatatatatatatatwttttttttttttttttttttttttttttctctaagacagggtcttgctctgtcatctgggctggagtgcagtgccaatagctcattggcagccttgacctctggggctcaagtgatctttccacctcaacctcctgagtagctgggaccacaggcatgtgtcacaatgcccatctaatttttttttttttttttttgagacggagtcttgctctgttc

SEQ ID NO: 679539 - DNA, 865 bp, Homo sapiens
tgagaggagtccatttgtcctagctgaggcccaggcacgggacagagcccagccaaggtcagcagagccaccactccagccagcagctgatcacagatacatcaaaaagtccagatgagaccagaaaaaccaccctcactgaccaatggactcataagcagtaaagagtggtgttctttttatttttacttatttatttgagatggagtcttgctctgtcacccaggctggagtgcagtggcatgatcttggctcactgtaacttccacctcctgggttcaagcaattctcctgtttcagcctcctgagtagctggggctacaggcacgtgccactgcgccctgctaatttttgtatttttagtagagatggtgtttcgtcatatcggccaggctgctctcgaactcctgatcccaaatgatccacccgcctcagcctcccaaaatgctgggattacaggtgtgagccaccatgcccagccaagagtggtgtttttttaagcaattaagttttggagtgccttcggttagtaaaaactaactagacaaccaagataagccagtgagtaaatgttggagttgagattttttccagctgtcaccactgcccctgcccctgccatatgtatatatatatatatatatatttwttttttttttttttttttttttttttctctaagacagggtcttgctctgtcatctgggctggagtgcagtgccaatagctcattggcagccttgacctctggggctcaagtgatctttccacctcaacctcctgagtagctgggaccacaggcatgtgtcacaatgcccatctaatttttttttttttttttttgagacggagtcttgctctgttc

SEQ ID NO: 679540 - DNA, 865 bp, Homo sapiens
tgagaggagtccatttgtcctagctgaggcccaggcacgggacagagcccagccaaggtcagcagagccaccactccagccagcagctgatcacagatacatcaaaaagtccagatgagaccagaaaaaccaccctcactgaccaatggactcataagcagtaaagagtggtgttctttttatttttacttatttatttgagatggagtcttgctctgtcacccaggctggagtgcagtggcatgatcttggctcactgtaacttccacctcctgggttcaagcaattctcctgtttcagcctcctgagtagctggggctacaggcacgtgccactgcgccctgctaatttttgtatttttagtagagatggtgtttcgtcatatcggccaggctgctctcgaactcctgatcccaaatgatccacccgcctcagcctcccaaaatgctgggattacaggtgtgagccaccatgcccagccaagagtggtgtttttttaagcaattaagttttggagtgccttcggttagtaaaaactaactagacaaccaagataagccagtgagtaaatgttggagttgagattttttccagctgtcaccactgcccctgcccctgccatatgtatatatatatatatatatatttttwttttttttttttttttttttttttctctaagacagggtcttgctctgtcatctgggctggagtgcagtgccaatagctcattggcagccttgacctctggggctcaagtgatctttccacctcaacctcctgagtagctgggaccacaggcatgtgtcacaatgcccatctaatttttttttttttttttttgagacggagtcttgctctgttc

SEQ ID NO: 679541 - DNA, 613 bp, Homo sapiens
gaggcaggtgaattgcttgaacccaggaggcggaggctgcagtgagccgagatcacaccactgcactccagcctgggcgacagagagagactcggtctcaaaaaaaaagtcagcgggtggctgacagggtgatcatgtccgcagcctactgctccccacagtggtcggctgtggggggtgtaatgacaatgccctgcttgtccccctgtgaccacttcatgaaagccgctgcagctcaagaaggctcagtggggagtggagctctttagggggccttggaagggcccaaaccagctgtgtgaccccaacgatgacgtgggtgtttgyggatgccctgcaggacaggcatacagcaggtgccaaatcaatgcacacctgttgttctgtcgttctcctgcctgcatggaaggcagtggtccttgggcatgagaaggccagagacccacaggcagcccccgccccagccctcagccccagagtatcctcctcccctaccagggctggccaggaggctgggcttctccagaaggaatttctgcgtggggaagaaggcctcctttgcaataagcagtgagtcttcaggcttggccatgccctaggagacaagaggcag

SEQ ID NO: 679542 - DNA, 634 bp, Homo sapiens
gcacaagagctctccagcaacaaggtatccgagactcagacttctgctttggaacaaaaatgtgcacctcctgaaggttagccacttcccatccaggacactgtaaaacccatctaaagtgcaaagacagaccagcrgattgaaatagaacagatcatgaaacattgattgataggtgcttagcttccacatcaccttgccctgaagaaacaactggtgatcaagtcgtggtgcggcgccacagaacatccacaattatccaatgctgctgcattcaaagagggagtttccacttcatgtgccagtgcggcagactttcagcaaaggcacggagtggaaaaacagcaaaagaacttgtcactacactacagcccacaaaaaggagacactgtcacaaaatcaagtccagcctggagattgcagtggcttagaattttatgactctgtgacaacagtttctttctaccccttgcctgcccccctgcactcaaggaatcttctgatcacccctcagaatatccttagcatcttccttctcagcccttctctactcaaaggcagtttctgttttctgcaaagagttgagtcttctcttctggcatgaggctgaccaagatgtatgcaaatgtctgtc

SEQ ID NO: 679543 - DNA, 1568 bp, Homo sapiens
tgatcacctatgtaaaaaaatcctaaggaatctgccaaaaagctactagaactaatcggtgggtttaataagggttcatgatacacagtcaatgtacaaaaataaattatattttttatatagtagtatttattttagtgttggactgctggtaatcaattcttccagtgtttaattgtctgaaaatattctttcacattcatttttgaaagatattttcactgaggatagaattctaggttggagttactatctttaagcactttgaaaataacaatctattgtcttctgacttccattgtttacattgaaatgtcatgtgtcctttcctctgactacttttaggatttttctctttgcctttgatttttaacactttactatgattttactagtgtacgattttttatgtttattgttcctggggtatgtagcagttcctgaatatgtggcttgatatattttctgagtttctaaaattctcaggcattgtctcttcaaatattgttttggcccattcttcctctcctctccttctgggactccaaaatgagtctgcaaacctgtgtacctgacttattcttgttcactggaagaaactgactccaaatacccttatctctctatattaatattttgtagacttttatgccataaatgtgctacatattataaagaaaataactcctttcttgmggttgggcactggagtttctgaatatctttcaaagaacaagtataacatttctttatttgatttttaccttcttgtgaattaaacaaatgcttttgctttaaaagaaaaagcatcaatctcaaatactgttttgatacttaaactgtattttataagcattaacttctattcacccacacttatggaaaaagtctgtatccttcatttattaataacagccagagatatatggttgtggatgcatatttctgtttcaacttttgtttgagcagcttccaaaacatcatcctataggtttttggaatccgtgccaagttcagttcagattaagtttctttgttagaattgctttttaaagcatctggatcagaaatcatatacttctgctgcatagcaaagaaacatttggaaatcatcagggacattataatagaggatgaatagtattgtatgttttttctcagggtaggtaaaggctacaacaaaaaagaattttattaagaatttagaaaatgctaggttgatattgttaaaatattttaagcagctgatagcttgctttcaaaatgataatattgtacatactatttttcctaaagctactatggaatatttctgagtaaaggcagtaatttcttccttttacctattttcaatgctacagacacacacacacacacacacacacacacacacacacacacacacacacacacacacagagagagagaaggagagagagagattaagaaggtatgcaggttaaacatttttagcttaacatcataattttccttttgtttttgtttttccccagatttgaagcagagacctaaatgattctttatatcatttcaacaaacagcatttg

SEQ ID NO: 679544 - DNA, 1410 bp, Homo sapiens
gggtaagaaaatgcacttttgcttctttatagcctatcttatctgcacgttaaagacagagctaaaatgtggtgtgtgaaatatatgtagcaatgaagtttttattgattgatatgtatggctttgtgcagctgaatactgctggtaggagttactggcgtatgtaatacattatcttattacactcattttatggaagctgatcctgatgggacagtggaaggagagcttactctggctttctggaaaagcaattaatcctactgcttatgtagtaaccatgtcttggatcgcactggtgtgctggcaccctttctccttttattaaaacaaaaatgcagctgctgaccagaagtgcggctctccaagtggggctttcatcatgttggtaagagattcatatccagggttgacatcatttcagttatggccttttcattattaaagtttggaatttcaagtttgtttattaaagatttaaagctataggttraatcaccaaattgaaatccacttattttcctatactatgataagtggataaggtgtgctggaaaatatgtttttcagattttaccaccagatgaattatttaaattgtgaaatgcattgtatcagaaaggaactgacctttttttttcctgaatcttcagcatttcttttttataagtaactttcacatccctcagtttctagtaagtgcatttagcaaatgttttagaactgttgactattaagtgttagtaaaaatagtggtgaggacttttacttagtccttgtggcaactttactgtatgtttcatccgtttctcatccatctttaaaattgataattctttgagacatgtggaattcaccaatgtttatgatgatttttaactctcagtacagtcttgtgctcaagggctctctgaatttgtaatccaacctttttcatgctggcactgcatcttttattgcaaaaacaaaaattagcagaatgctttttatctagagtttaatgtaaattctattttaaatagcagaattcgtattgtatagttgacaaagacaattttataaagacattcatgaaacagaaagttcatattctaaaatttctagtgttttgagttcttggcattttagctcttgctttcccattaagtcatagtctgtttggtttcacttttgacctctataaaaattattgtaataaagacctttgaatacatacacgatggcttttattttcatgccctgtgcattctgcgtatgtattattagtaggtaataatttgggtttttaaaaatttgttttgttaaaatgaaagtaactttagaaaaagcaattggtgtaatggttgtgacatcactgacatcttttctttaaaaactatttaaattgtttagttacacattgcaggaagc

SEQ ID NO: 679545 - DNA, 651 bp, Homo sapiens
tctaagtgtctgcacagattacttgagatgactttgaataagtcacttaacccttacataacttatttttctcatctgccaaatgagagaaaagagtggtttagttatatggcttacgatgaccgaaagtagttgtataacatcaagtaattgtgtatgttctgttgctgggaaggatatcaacacactaatatttttaatataacctatacatttcctgtggtatttttattcacatttgggaaactagtcaaactcaatgtaaaatacactgagatgctatgaaggtataaataagataattcagatgatgatattttaaggagattatgarcattgatttttattattttgttctttgatgagaattgagatataggaggagcaaacttagcttgcggaacataagatgactcataatgagacaagaaaaattttttaaaaagtgtgggacagaagagatcaaatgcttcgctgaaagaaaacaaacttggaaacaagttaaagatggaaatggtagacatgtgtttcatttttgtgaaattggttggttatttctggaagggttgcgtgttttataaatgcagtttatgtattggttggatgctaattgttcaaccagaaaaaaaaaattttctagaaaaaagactg

SEQ ID NO: 679546 - DNA, 651 bp, Homo sapiens
tctaagtgtctgcacagattacttgagatgactttgaataagtcacttaacccttacataacttatttttctcatctgccaaatgagagaaaagagtggtttagttatatggcttacgatgaccgaaagtagttgtataacatcaagtaattgtgtatgttctgttgctgggaaggatatcaacacactaatatttttaatataacctatacatttcctgtggtatttttattcacatttgggaaactagtcaaactcaatgtaaaatacactgagatgctatgaaggtataaataagataattcagatgatgatattttaaggagattatgaacattgatttttattattttgttctttgatgagmattgagatataggaggagcaaacttagcttgcggaacataagatgactcataatgagacaagaaaaattttttaaaaagtgtgggacagaagagatcaaatgcttcgctgaaagaaaacaaacttggaaacaagttaaagatggaaatggtagacatgtgtttcatttttgtgaaattggttggttatttctggaagggttgcgtgttttataaatgcagtttatgtattggttggatgctaattgttcaaccagaaaaaaaaaattttctagaaaaaagactg

SEQ ID NO: 679547 - DNA, 651 bp, Homo sapiens
tctaagtgtctgcacagattacttgagatgactttgaataagtcacttaacccttacataacttatttttctcatctgccaaatgagagaaaagagtggtttagttatatggcttacgatgaccgaaagtagttgtataacatcaagtaattgtgtatgttctgttgctgggaaggatatcaacacactaatatttttaatataacctatacatttcctgtggtatttttattcacatttgggaaactagtcaaactcaatgtaaaatacactgagatgctatgaaggtataaataagataattcagatgatgatattttaaggagattatgaacattgatttttattattttgttctttgatgagaattgagatataggaggagcaaacttagcttgcggaacataagatgactcataatgagacaagaaaaattttttaaaaagtgtgggacagaagagatcaaatgcttmgctgaaagaaaacaaacttggaaacaagttaaagatggaaatggtagacatgtgtttcatttttgtgaaattggttggttatttctggaagggttgcgtgttttataaatgcagtttatgtattggttggatgctaattgttcaaccagaaaaaaaaaattttctagaaaaaagactg

SEQ ID NO: 679548 - DNA, 380 bp, Homo sapiens
gatcagcctgtccaacatggcgaaaccccatctctactaaaaatataaaaattagctgggtgtgttggcatgcgcctgtaaccccagctactcgggaggcagaagcagaagaattgcttgaaaccgggaggcagaggttgtagtgagccaagatcgcaccactgcactccagcctgggagtgctcatatgagcactcactctacagagaccctgtctcacaaaaataaataaataaataaataaataaaataaatagataaaaaaaagaggtagaagctggaaaagtggttatcttaggagtggaaggtttgctgactgagagggaayaaaagggcctctagggtgctgaaaatggcctgcatctcaacctgggtggtca

SEQ ID NO: 679549 - DNA, 826 bp, Homo sapiens
tgatgggaaatcctggtgccaacgtcaaccaaatagcgtaaggacatacattcttgtgcctcagtgagtctggcaataaaatccaacttcccctctctttcttttcttacactcaaagatacctgagtggtgaaatcacgatacttcactctgtctcctttacaaagatcctagcacatttactgcctttaggaacgataactgaagcatagaacatagaacaaaaagggaaataataaggatataaacattaaattagcaagagaaaaatagtagaacaaattcatatataaatatagttagaaacatcctaagtcaaacactaatttagccatgccaaaatctggaaacaattcaaagatcccttcaacaggtaaatggatagacaaaatacagtaatacattcaaatcatggaatactactccacaataaaaataaactactaaaaatgcaataacatggataaattccaaatgcattatgctaagtaaaagaagcaaattcaaaaggcttcctattgtataattccatgtaagtaacataaagaagatcattggctgccaaggactggggatggagaaagggctgaccacaaaatggcatggggaaatccaggaggtaatggaattgtcctgtatcttgcttgtgttgatggttacatgactgcatgcctttgtcaaaactcacagtgctgtatactaaaaggggtaaatttactgtacataaattattcctcaataaaaaaggaagtttcaaaaagtttytaaggtaaccatagctaaaacaaaatccaaaccaagctcaactactgcctagattttctta

SEQ ID NO: 679550 - DNA, 826 bp, Homo sapiens
tgatgggaaatcctggtgccaacgtcaaccaaatagcgtaaggacatacattcttgtgcctcagtgagtctggcaataaaatccaacttcccctctctttcttttcttacactcaaagatacctgagtggtgaaatcacgatacttcactctgtctcctttacaaagatcctagcacatttactgcctttaggaacgataactgaagcatagaacatagaacaaaaagggaaataataaggatataaacattaaattagcaagagaaaaatagtagaacaaattcatatataaatatagttagaaacatcctaagtcaaacactaatttagccatgccaaaatctggaaacaattcaaagatcccttcaacaggtaaatggatagacaaaatacagtaatacattcaaatcatggaatactactccacaataaaaataaactactaaaaatgcaataacatggataaattccaaatgcattatgctaagtaaaagaagcaaattcaaaaggcttcctattgtataattccatgtaagtaacataaagaagatcattggctgccaaggactggggatggagaaagggctgaccacaaaatggcatggggaaatccaggaggtaatggaattgtcctgtatcttgcttgtgttgatggttacatgactgcatgcctttgtcaaaactcacagtgctgtatactaaaaggggtaaatttactgtacataaattattcctcaataaaaaaggaagtttcaaaaagtttctaaggtaaccatagctaaaacaaaatccaaaccaagctcaactactgcctagattttytta

SEQ ID NO: 679551 - DNA, 922 bp, Homo sapiens
gtcattcagccgacctgggctacattcatgtcggcccatggaaactgtgaccctgacaggttcatgaaattagtccagaaggctagctgcaaatcctcaaaggaagaatcacacttcatgagcgtcctgcagatatatacgccagagctaacgtccctttacatactttccagtatgccttgtgcgacaggcagaggagttctgtgactcaactcacgtctataaaaccagtcatgtttacgacgtgtcctgcctctgccttagatggaaaagaatgcactggtttctggtaaagtgaaacctacacttgtcacacgacccagcaaccccactccaagatatttacccaagagaaatgaaaacctgcgttcatacaaatgacctgtatgaaaatcttttttgtagctttatgttggaatcaccaaaacctggaaagaacgcaaatgtccctccacaagaggatgcataaacaaatcgcagaaacagcattcaaaatggaacaccacttagctattcaagaatgaatggctggtgcacacaacagcatgcatgaatctcaaatgcataaggttgagtgaaagacgtcacactctcaggaccacacaatatgtgatgccatctctatgccattcttgcaagggcaaaactctagggacagagcagtggtggttgccggggcagggtgggggtggaagaggagctgagtacaaagggatacaaggcaattttgagggtgacagaactgtcctgtgtgttgactatgctcaagccagctccgcgcattccttccytctttcctcttcagacagtatcttctacttctttaaaaaatatttttggccaggtaacgcagtggctcatgcctgtaatgccagcactttatgaggccgggggggaggatctcttgaacccaggagtttga

SEQ ID NO: 679552 - DNA, 1137 bp, Homo sapiens
agccctctgttcttggtgtggtgtgccatgcatgtatagtgacagtccctccacattgaacatggagaggttttgaaggggctctctaagctgacacaacacagcatgtacctgcttctccaaagaaagtaggttagaatagagcttgcagtgctacatacatctcttcaaaacactgaattcaaacactgtaatcaaataaaatacaagataatttagaaactgcacatccaccagcctgctcctcccccaaaatttctttttcttttagtcacacaagcacacctcattaagagaccccaggtgttccactactgagttcttgccaatggtaggtgagaggagctgggaaaggatgtgcacaacttgtggtcatgggggttgcttgagagcctgtctgacccttaggaaggcaggatagtaacacaacaggaacctggatccgccgatgctcttggggatttgacacctacccttctgggactaccgcctgcctttgtctcaaattgctgtattttgatgtttagcctattccctaagtagaatacagaatccctgggtgatgatctcaattttcctcatggtatccggtgtttccttcggtcacaccatccataacacgcattataccttttctacccgaacaggaggaagagtcctttcttcttcaagttcatttctacagtccaggcttgacacataacacatacttgattaaagttagcttaatgaatgaaagatgtaccatatataatcaatcaaaacattacagttgctgatcacacacgttaatacagatttcggaagtcctctacacattcatttcttcatcatgtctgccttaattctattgtgaaaaatcagaakaaaatgcagccttttcacatggatattggaattcagaaagattcctgtggagttatttttactggcatctttgaggatgttcttgggggaagcacgaaaatttcaagagatagttttaaagaaaaggacacagaatggtctgctattgttttccgatgttttagaattctagatctccaagtgcaagcaccagttatcaccccattgtgtctgtatttatgagtaggcagtctttgtgtatttccttgaactggtgcctcaccgacactg

SEQ ID NO: 679553 - DNA, 1223 bp, Homo sapiens
ggatgttattttcactcctgctgtggttgactaagtaatgatggtggatcgtacccagcccaagagactaacataattccacatatgcattttcactgatcacatagtccatcacctggtggagttaagactgataatcagtgagaaaaacaatcacaaatgttaacagtctccaggtaggaaggaggccaggaaacaaacagctatttagaattctacggaagttaaagggcagtagttactggtgaccagggtctgagttcccatccctctgtactctgcaccagctgtgtgtccctaggcaaattaataaccctctccaggcctccagttcgtcctctatagaatgggagtgatcatacttgtgcctgcctcctatcttggcagtaccggatggattaacacatgcagtagtgaactgcttgataaagaaaagtgctgtcattttcatgagtgattttaataactcaagcagcaattactgagagcctactgaatgcacagcaaagtgctgcgtatgcatgttacttgaattagaacatcttggcaaagatctgatagtagctacatgagaacgtttatgtgtcaaccacagcaactcagcttttaaaatatcataaaccaggctactaagtctgaaaggtttcttggcttaaaagagagggagagcaattatgaatgaatgatttgttgacctagttataccctagtgcaagagtccgcaaactttttctgtgaagggccaggtagtagaattttaggctttgagggccatctggtctctcttgcaactgctcatctctgccattgtagcatgaaagcaaccatggagaagtctcaacaaaggggtgtggctgtgtcccaatacaactttatttaaatttaagaaacaggtgaggagccagacttggcctatgtgggccacagtttgccaaattcaattatttcatttagcaatttctcccaaagtgggatgatgttcagaggtcaagtctatcattttatttatttatttatttatttatttatttatttatttgagatgaagttttgctcttgttgcccaggctggagtgcagtggcgcgatctkggctcaccccaggttcaaatgattcccctgcctcagcctcctgagtagctgggattacaggcatcccccaccacgcccagctaattttgtatttttagtagagacagggtttctccatgttggtcaggctgg

SEQ ID NO: 679554 - DNA, 612 bp, Homo sapiens
taagtggattaatgctggtccattagaaaatggctcctatacatcatgtcaaatgagcaattcccaatattggaatttataataaagctaaaaaggccctccaaatgacagctttaacactagcctaatagcctagtcctttttcaagcaactttacaaatacgatttaaacactgatttttaaaatgctctcactttctagataagattggaggtgtttaaattggtatggccataaaccaataggaatagtatgtgcaaagatcctaaggttggaagaaacttgagaacataaagaaatttaaagcagtgtggctagagcccagacagcaagaaaggaagtattaagagawaagtcgagaagaccagaatgtgatggctctcagctcaggtatagtggatgctgtaatatatcacccagattcccctccttccggactgatatactgatacccccagctgctggcaaagttgacagatgacagcttgtggctgaggacttcctcctagtgattgtactctactgaagaaagccgtcttgcccatggtcatgtccctggctcaggggcatctggcactcagtgactggtcaatatgggtgcataaagaccc

SEQ ID NO: 679555 - DNA, 2973 bp, Homo sapiens
gcttggtttttggaaccattcttgacaagcaagtygggtggtatcacctctggtgctgcttttgagcttcctgtgtatggccaaggtgtcactggggaggggagcatacaggctcaacccagccaggaagtgctgcagaaggcccctgaagtgaggtgctgcagacccagtggcagcaggaagacagggaagtaagggtcttttctaacccagtaggtcctgatgaaaaacatgattcatgaaaacagcctggactttcatggtatttcaaggcggcaatccactacaggtgaactatgtctttatgtgcttaagcaacagcaattcatggtgggtgacatagtgaactgagtatgatgggaatgccagagcgtcatgctagtctgtgctgaactaaaggatgaataaacatctccaaggacataccctggctggcttctatcagtctgtgggctcctgagcaagcctcatttaattgtggtggatttcagttaccttatctgtccagatcttccagttctaaaatcatattataccatatcattacaatagcataaaaattcttacgtactttggattctgccttcccagctggcaaaaactccatttcaaaaactggattatcatggtggccaacaattacaaagtagaagctcccagacatggtcttcaatatatggctcctaattaagtgaaaaatagtacatatttttagtagtcaatcttcaaattaaaaaatgactaatgggaagtgtagaattcttttttaaatttaaacctgacattgtagaggaagatgctactaagcttggcagtttccagtatactagcgaagatacgtagcttctggaataaacaaattatgtatctatgatatgaatctgtgaatctaatgtattttcttaagtaaactggaagacctctaacatgaaatcacaaagacaacattctcatgatctgaaaatatggctcattcagctcaaggggccctaagtgtctggtagagtaagctgggcttcatttggactggaccagttagtagcagcacggacacctagaaggattaacagaaggtggtggtaagtcaaggacaatacagagtagtgggaagaccaaggaagtaattaccttgccttagaaatttccaggaggcatccgtcgggggaagctaaaaccaactctacctcatgtcacttacctagaaaggacagacactgtatcactgattcgcagactgcgtgtgctgtatttgtcttctttctacttgaagtatgtgtgctataaatgtaagtctttgcaaatctaagagcctatgatatgcctctttatataccaatttataagaaaggaagagttttgtattctagaaaagatggaagaaataatccataaaggaagacattctgaggcactgaaagatcttggaactaagtttaacatgttgggcccggtgcagtggctcacgcctgtaatcccagcactttggagggctgagatgggcagattgcttcagcccaggacttcgagaccagcctgggcaacatggtgaaactccatctctacatgaaatacaaaaagtagccaggcatggtggtatgtgcctgtagtcccagctactcaggaggctgacgcaggaggatcacctgagcccagggaggtcagggctgcagtgaaccaagatcgcaccactgcactccagtctaagtgacaaaatgagaccctgtctcaaaaaaaaaaaaaaaacagattggcagaagagatgaaactacgagaaactggggggaaaaatataagtgattccatggcttttagcacagataattgaaatctagatgaatgatggatgggtgggggcatggatggatttaccccaaggtaaccccacggtgtgtatttttaacacaaggactttggagtcaaagttaggttcaggtctagctctgctacttactggcagtgtgaccacaggcagtccttaacttcctaatgtccgttttctcatctgttaaatagtgctaacactgtagcaccttatggtgcacttatgaggatcacacaatctaatgcatgtaaagtacccagtacagtgtctgacccacagtacatgctcaattaatgttagtggaataacatgggagaccgtatgcacactgggatgtggtgactagtaacttctcaacacggagtggaaatcaagtaaaccgggagttacagtcagtctcctagaacatacatctgaggtgtgttagaagccaagacttagcaagcctcattgggccttctgctgattcacacagaacacacaatgaaatcagaagaaatctgatatgtacttgctaatgaatgacacattttataaaggaaatcaaggcacagctggcacttttaactctagaattggaaggccatgactatggaagaaaaggcagatcagaactcctggcatgatgacgtaagatttaaaatgctatttggggcaggggtggaggggtgggggactatagactgcaggccaaatctagccttgcccatcattttgcgaccatctaaggctgctctcacgcttcaatggcagagttaagcacctgtgacacagaccagctgtcccacaaagccaacaatatttactatctggccctttaaagaaaatgtttgcccctgttttaggggaaagataagaaaaaggtccaaacagaaaaagtggataacaaagacgagctggaatgataaaaaagctatgcaaaactagaagaactggcaataattctccaaagtgaagggaaggacagggagttgaaatttgaaccaagtaaacaatgatatcatgaattcttgctggactagatttcagagctggagtttgccaagggaagggcttcttactttcttcagtacatttaagcagcagcaaaaaaaaaaaaaaaaaaaaaaaaaagcaaaagcagcagcagaaggaaatatatgtacacatat

SEQ ID NO: 679556 - DNA, 2973 bp, Homo sapiens
gcttggtttttggaaccattcttgacaagcaagttgggtggtatcacctctggtgctgcttttgagcttcctgtgtatggccaaggtgtcactggggaggggagcatacaggctcaacccagccaggaagtgctgcagaaggcccctgaagtgaggtgctgcagacccagtggcagcaggaagacagggaagtaagggtcttttctaacccagtaggtcctgatgaaaaacatgattcatgaaaacagcctggactttcatggtatttcaaggcggcaatccactacaggtgaactatgtctttatgtgcttaagcaacagcaattcatggtgggtgacatagtgaactgagtatgatgggaatgccagagcgtcatgctagtctgtgctgaactaaaggatgaataaacatctccaaggacataccctggctggcttctatcagtctgtgggctcctgagcaagcctcatttaattgtggtggatttcagttaccttatctgtccagatcttccagttctaaaatcatattataccatatcattacaatagcataaaaattcttacgtactttggattctgccttcccagctggcaaaaactccatttcaaaaactggattatcatggtggccaacaattacaaagtagaagctcccagacatggtcttcaatatatggctcctaattaagtgaaaaatagtacatatttttagtagtcaatcttcaaattaaaaaatgactaatgggaagtgtagaattcttttttaaatttaaacctgacattgtagaggaagatgctactaagcttggcagtttccagtatactagcgaagatacgtagcttctggaataaacaaattatgtatctatgatatgaatctgtgaatctaatgtattttcttaagtaaactggaagacctctaacatgaaatcacaaagacaacattctcatgatctgaaaatatggctcattcagctcaaggggccctaagtgtctggtagagtaagctgggcttcatttggactggaccagttagtagcagcacggacacctagaaggattaacagaaggtggtggtaagtcaaggacaatacagagtagtgggaagaccaaggaagtaattaccttgccttagaaatttccaggaggcatccgtcgggggaagctaaaaccaactctacctcatgtcacttacctagaaaggacagacactgtatcactgattcgcagactgcgtgtgctgtatttgtcttctttctacttgaagtatgtgtgctataaatgtaagtctttgcaaatctaagagcctatgatatgcctctttatataccaatttataagaaaggaagagttttgtattctagaaaagatggaagaaataatccataaaggaagacattctgaggcactgaaagatcttggaactaagtttaacatgttgggcccggtgcagtggctcacgcctgtaatcccagcactttggagggctgagatgggcagattgcttcagcccaggacttcgagaccagcctgggcaacatggtgaaactccatctctacatgaaatacaaaaagtagccaggcatggtggtatgtgcctgtagtcccagctactcaggaggctgacgcaggaggatcacctgagcccagggaggtcagggctgcagtgaaccaagatcgcaccactgcactccagtctaagtgacaaaatgagaccctgtctcaaaaaaaaaaaaaaaacagattggcagaagagatgaaactacgagaaactggggggaaaaatataagtgattccatggcttttagcacagataattgaaatctagatgaatgatggatgggtgggggcatggatggatttaccccaaggtaaccccacggtgtgtatttttaacacaaggactttggagtcaaagttaggttcaggtctagctctgctacttactggcagtgtgaccacaggcagtccttaacttcctaatgtccgttttctcatctgttaaatagtgctaacactgtagcaccttatggtgcacttatgaggatcacacaatctaatgcatgtaaagtacccagtacagtgtctgacccacagtacatgctcaattaatgttagtggaataacatgggagaccgtatgcacactgggatgtggtgactagtaacttctcaacacggagtggaaatcaagtaaaccgggagttacagtcagtctcctrgaacatacatctgaggtgtgttagaagccaagacttagcaagcctcattgggccttctgctgattcacacagaacacacaatgaaatcagaagaaatctgatatgtacttgctaatgaatgacacattttataaaggaaatcaaggcacagctggcacttttaactctagaattggaaggccatgactatggaagaaaaggcagatcagaactcctggcatgatgacgtaagatttaaaatgctatttggggcaggggtggaggggtgggggactatagactgcaggccaaatctagccttgcccatcattttgcgaccatctaaggctgctctcacgcttcaatggcagagttaagcacctgtgacacagaccagctgtcccacaaagccaacaatatttactatctggccctttaaagaaaatgtttgcccctgttttaggggaaagataagaaaaaggtccaaacagaaaaagtggataacaaagacgagctggaatgataaaaaagctatgcaaaactagaagaactggcaataattctccaaagtgaagggaaggacagggagttgaaatttgaaccaagtaaacaatgatatcatgaattcttgctggactagatttcagagctggagtttgccaagggaagggcttcttactttcttcagtacatttaagcagcagcaaaaaaaaaaaaaaaaaaaaaaaaaagcaaaagcagcagcagaaggaaatatatgtacacatat

SEQ ID NO: 679557 - DNA, 625 bp, Homo sapiens
aaggttttgaaaaagagggacctgatgaattcagcagtgggtcaggagcgggtgactctcaactttgtggctgctggtggatttttgtgcccagatgcagtgtgcggtcaacatctgcacgagggagtgctgctgcttctccaggtgtctgagaaccagtgggtgagggcttggatctcccttgcctctgccatctctaagtgatgtccgagttgtaaagctttactcactttttgatgccagctaccatgttttcttcagctattaggataagtgtcattataaagatccatctgtatttaagaattaatagtaaggttaaaaaccaagaggtgagctttctttcctgtgctgaaagaccctttcagttggtaggcccgccttgccaactggctttcaartctatctttattaccttttcccagcctgtgaattaatgtgaccctgctgaattctcatccttgttctccggcgatgttttgggcaagagtgtggagtcaggcagtgagtctcaagtcctattccagggtctgggagctggaggctttgagggtcagctctgggaggattcttcctctcttagacattaactcagcttgactcacgcctatgaatccagagcctt

SEQ ID NO: 679558 - DNA, 625 bp, Homo sapiens
aaggttttgaaaaagagggacctgatgaattcagcagtgggtcaggagcgggtgactctcaactttgtggctgctggtggatttttgtgcccagatgcagtgtgcggtcaacatctgcacgagggagtgctgctgcttctccaggtgtctgagaaccagtgggtgagggcttggatctcccttgcctctgccatctctaagtgatgtccgagttgtaaagctttactcactttttgatgccagctaccatgttttcttcagctattaggataagtgtcattataaagatccatctgtatttaagaattaatagtaaggttaaaaaccaagaggtgagctttctttcctgtgctgaaagaccctttcagttggtaggcccgccttgccaactggctttcaaatctatctttattaccttttcccagcctgtgaattaatgtgaccctgctgaattctcatccttgttctccggcgatgttttgggcaagagtgtggagtcaggcagtgagyctcaagtcctattccagggtctgggagctggaggctttgagggtcagctctgggaggattcttcctctcttagacattaactcagcttgactcacgcctatgaatccagagcctt

SEQ ID NO: 679559 - DNA, 1689 bp, Homo sapiens
ctaccgaacagatgagccacacccctgtcacatgtcctgcaaggggggtcagggaactctcccatttcagaactatgataaaaatttggacagtcatcctgatattatacaaatttgaaaaattaaccttccctctggtaaggtaacaagagaaacccaaaatatggggggaggggtgctctacaccgcaaaggttcaattcttgctcatgctaagtccagtgcagaattttttacaggaaaattctctccaggacttctccatctcatgttgccaccatttccccatctcagctcccaaggcctctgcagcacaggaggaaagaacccaagagtcatggagggatttggggggcagaaatcaaaggagcagacatcacttctgctcacaacccgtttgccaaaacgggtccacagctcgaacttaatcgcaagcaaggctgagaaaggaaggcaaggaagccctgatattttgtgagcactaaatatctctgccaccaaatctcttctggtttttgtttagtaaaaacccataaacttttatcaagattgtcatttaatagagaatggaattggatacataccaagactcccccatacacatgtactgtgtttaataggacaaactgactgacatgtgatcaataggatcttaaactactgtaacaatccatcctttcccctacccccaacttcaagtcatgaaatagaaaccaattgaaaagtatttccttggcatttagtctcaaatgatccttagccacacgactaagttttagggcactcaggtctctgttctaaacctaaggtaaaccctataaatgtcacaatgcattttggcactaaatctccaggctttgagaaggttcatgtgacattttctttgtgacagaaatgattgcaagagttgattttgttggttggcttcttgtttcaattgcaacagaggtctcaaaaaccacccggcaacaagtaaacagaatactgctgtccccgtaataatactgcaagagaaaaacatctcagggagaaagaagtcagtaaatttctgacattccaaggtgtgaaaggaagcaatctgacgtctgaaagccggaaaaaaaacagttccttggcccatgctgttcatacacaccaaggtcacctagaaagttatcagaactcaaaaataaataaaattcaaagtctattttaaatgatctcctgtatccaaaagctgcagacaagcacgtgaagatttcaacattttagctctcttgtttgaaagtcctcattaatactatattatgctgaggggttattgaactcaggtaaacactagaattacagaatgatttcctaacaaacacattgctcactatatataatgaagaccataagagaaaaatcctgggaatgttgttaactcaaaggtgcaaaaatgaggaaatgtcattactgaagaataattagattaactgaaaagacaactcttaatagaactaatatcatackaaagcaaaggaagtaaagcaagctttgtcttgaaagtcaaatggtctccttttatatatgttcatttctatgggaaagggtggttttaagctgccaaatcagtataaataaaagtcccacttatggccgggcacagtggctcacgcctgtaatcccagcactttggcaggccaaggcaggcagatcatgtggtcag

SEQ ID NO: 679560 - DNA, 2003 bp, Homo sapiens
atgctctgtcttgttttcttacactgcaatgaatctggtttctataactgctagtagaaaaaagaaaaataaaaaggaaggacatgaagatgtatagctctgtagagttttatagattacagagcctttatattttagttagtggacgttctggaaactttaaaacagattaaaatcatatccttaattgcttcaaataaaatctacctttgtaaagcctacataactggcttcagtaatcaaaatgttaattacttcacagatcctccaaaacatatataaaatctatagtaaaaatcatataacctgtatcttcaatgaatggcaacactgtaaattctttaaataaaaagttagtattacctggccagataatggtgagtttaaaatgattttttctcattactcataacacaattcatgtcaccattctctttaaacatactgtacacagcagtgtaatccaatagaaatataatgtgagccacatacagaacttaaatttttggctacagtagattaaataaaatacatttctaaagttaattttacctgtttctttttacttttgtaatgcggctactgaaaaaactaatcatttcaacatgaaatcaataataaaagatgagatattttacattcttttttcaagccaagtcttcaaaatccaaaaatccaatgtgtacttcacacagcacatctcaatttggactagccacatttcaagtgctgaacagctactcagtggctcaatattgagtgtcttagctcaataacatgtactctggaacatatgtaggtctatagaattatttggttatttacaaagaagcagtgaaaagtagtgaggggaaaacactgcaaagaacttatgtggtactcatgcaactccttattcaaaatgtaattttacagaattaacttctgtacaatttgctttactcaagagtaaaatatactttcatagcaattttgtgagacggactataactgaatattattcaattttaatataattgaaggatgtaaggaataagaaaaattttcactgtccttttctattaaaaagctcatatacgattagacaagcaaaatgtatgaaaaagccagaaaatacaattaaagataaagcttcaggtcatacttttaattattatactctaatacagagtaaacaggggtcaaggagcttaattttagtcaagatattctttaaaactaaacttaaatatactttaaaatgaactaaatattttctaatggaaaaagcataaatgcaaacakgatgtattcctgagtggccagagacagcagttactgacattatgttaactttttttttttaagtgatcatttttagatttaaagtgtgctcactgccagacggattctgatgacacatttaaacaacaaaaatgcactatcaagcttgatttccatgacagaaagccagctgagttacctcttttaagaaagccagaaaagaaagccattctaccttaaaggatgagatgaggataggggaggtaatgtggaggaatagctagagaacatggaggtgcctaggactgaattccagggatataattaatctagggtttcagaggcattgtaagaaagcacacttaaatttgagtttaactcaatttcaaacatatataaaaaaatagagctttgaagaaattattcttaaaaattgcaatacgttttttaaagcttgaatttttaaatagccatataatttttaaagaatccagaaagaataaaccaaattatctattttaaacaaaatacttctaaaaactaatttcacctggtaatttaggtcatcttatattaaggacacattcatgttgcttcattccttgatatctttctccctcatgaatcaggtgaatgatatattagtaacatactggaaaaagtacaggcttgtaaaaaaaaaaaaggtagtcacagatataataaaaaatgctgtctccatgaatgctgtagataaccga

SEQ ID NO: 679561 - DNA, 600 bp, Homo sapiens
tgatgggcatttgggttggttcctagtctttgctgttataaatagtgccgcaataaacaaatgtgtgcatatatttataatcccttgggtatatacccattaataagattgctgggtcaactggtatttctggttctagatccttgaagaatcgccacactgacttccacaatggttgaactatttacactcccaccaacagtgtaaaagtgttcctatttctccacaccctcaccagcatctgttgtttcctgacttactaataatcgcccattctaactggtgtgagatatatctcattgtggttttgatttgcatttctctaatgaccagtgacratgaacttttttactatgtttcttggccgcataactgtcttcttttgagaagtgtctgttcatatccttcgaaattgcttactttcttaaacataagacaaacatctctataacattcttctaactccagtctgtaaatcattatttagtcaactttgaccaaatagaaatttgacttatttgaactataaagacacatgcacacatttgtttattgcagcactatttataatagcaaagacttggaatcaatccaaatgcc

SEQ ID NO: 679562 - DNA, 600 bp, Homo sapiens
tgatgggcatttgggttggttcctagtctttgctgttataaatagtgccgcaataaacaaatgtgtgcatatatttataatcccttgggtatatacccattaataagattgctgggtcaactggtatttctggttctagatccttgaagaatcgccacactgacttccacaatggttgaactatttacactcccaccaacagtgtaaaagtgttcctatttctccacaccctcaccagcatctgttgtttcctgacttactaataatcgcccattctaactggtgtgagatatatctcattgtggttttgatttgcatttctctaatgaccagtgacaatgarcttttttactatgtttcttggccgcataactgtcttcttttgagaagtgtctgttcatatccttcgaaattgcttactttcttaaacataagacaaacatctctataacattcttctaactccagtctgtaaatcattatttagtcaactttgaccaaatagaaatttgacttatttgaactataaagacacatgcacacatttgtttattgcagcactatttataatagcaaagacttggaatcaatccaaatgcc

SEQ ID NO: 679563 - DNA, 643 bp, Homo sapiens
tgcatactttgttttgcttcaatgtgggtctgaatggtggataagaacaaacaatattcaccaagtttttgtctactgaccaaacctaaagatgtcattatttatgctatgcaatctatatatgctatataatgtagtatatactatatgttactagtacaatactatgtacctcatacgacttatagtggtatatatttcagttcctctctgaacaagcacacacacatttttcttcacatgccactgcaatcagcatcactttcttttttagccaacttcaatgtgtgaacctgtatgtttgtcaataatgttgctgctcaaagccagccataggcagcgaagcatgttttgttttgtttttgtttttttttttttttttttttttttaracagtgtcttgctctgtcacccgggctgcagtgcagtggcgcgaccttggctcattgcaagctccgccttccaggttcacgccattctcctgcctcagcctccggagtagctgggactacaggtgcctgccaccatgcccggctaatttttgtattttttttttttttttagtagagatgaggtttcaccgtgttagccaggatggtctcgatctcctgacctcgtgatccgcccgcctcggcctcccaaa

SEQ ID NO: 679564 - DNA, 609 bp, Homo sapiens
taatttccttcccaaacagacaaacaaaaaaaagggcttggaacgaaaagtgtagggaaagtcagccagcccatacactcacctgcattggagccagtcaagttataacgtgcattcagctttttgatgatgttctcatggatttggtaccactcactctctgtgttacacctatgaaaacattaacactctgttaagctttaatgatgcatgcagtcaagcagtgatcctcatagtacatctgcccttttcgttataaccactataatgtacctccttgaggtccccatcaacctgctgcaactgactgtcagttttagcatggttgtcccaggatgagcaagaatgtccgtatctggtaatgcctgaccacctacctcatgacagaagcagctgggataacacttcgcagattacaagtggccccaaaacagacagaaatctcagagaacaatgtatacaggggaaggcagccccaactgagttcaactccccagattcaaattctcactattaaccaagctatgttctttaggtgagtttatttactcttgtcttaatttccccacctatgaaacacrgataatatactagaactttaaactaaca

SEQ ID NO: 679565 - DNA, 935 bp, Homo sapiens
gataaaayaccaaagccaccaaaattgtcttgaattttatttttccctggaaattaaaaatattcaggaggttcaacaataggtccatgtaaaccatcctatttggttagatgccagaaaaataatcttttatattcctgtggtattgaaaaataacttacaaaacccatgctcagtggacacagagattgtaacaagactgtcttgttaatatctatatccccaaggagtcctggagacttgcagaaggtgctatattagttaatgcttactcatgttcatgtatttcttaaaacaattctttacccgaaaaatcgtgtcattaaaaagctacttaaccacatagagttgtttccacatggttccccagtctcttaatgttgatgtcatttctgtgataacagagtcttcagtgggaataaccatttcaaattgtctgtgaaattaaaaaagaaaaagtatatatgtaaataccatagacaacaattttgttttaaatactctaaaagataactagaaaagaaagctgcctagctattgttcgttctacagacagtaaccaggatctggttataagttaatgtgaggaatgctacatgggttgtggtaggacaataccagaacaaccagccacttcaaccagatcaagtttgagcagcgtggtgaagaaggaacagcatcagaagggttgcactccagtaccagttcacgactaggcagcaactcatttaacctaaggccaaaagccttcatctgtaacatgaggtcactgggctacataaactctgaggtgacttttgccttccaagggctatgactataggactcaaagagagtaaaaggaacaccattcaatcaccaggacatgatggctgtgggcatccaaactaactcagtgttataagtaactagacactgagatactaattgaacac

SEQ ID NO: 679566 - DNA, 935 bp, Homo sapiens
gataaaataccaaagccaccaaaattgtcttgaattttatttttccctggaaattaaaaatattcaggaggttcaacaataggtccatgtaaaccatcctatttggttagatgccagaaaaataatcttttatattcctgtggtattgaaaaataacttacaaaacccatgctcagtggacacagagattgtaacaagactgtcttgttaatatctatatccccaaggagtcctggagacttgcagaaggtgctatattagttaatgcttactcatgttcatgtatttcttaaaacaattctttacccgaaaaatcgtgtcattaaaaagctacttaaccacatagagttgtttccacatggttccccagtctcttaatgttgatgtcatttctgtgataacagagtcttcagtgggaataaccatttcaaattgtctgtgaaattaaaaaagaaaaagtatatatgtaaataccatagacaacaattttgttttaaatactctaaaagataactagraaagaaagctgcctagctattgttcgttctacagacagtaaccaggatctggttataagttaatgtgaggaatgctacatgggttgtggtaggacaataccagaacaaccagccacttcaaccagatcaagtttgagcagcgtggtgaagaaggaacagcatcagaagggttgcactccagtaccagttcacgactaggcagcaactcatttaacctaaggccaaaagccttcatctgtaacatgaggtcactgggctacataaactctgaggtgacttttgccttccaagggctatgactataggactcaaagagagtaaaaggaacaccattcaatcaccaggacatgatggctgtgggcatccaaactaactcagtgttataagtaactagacactgagatactaattgaacac

SEQ ID NO: 679567 - DNA, 935 bp, Homo sapiens
gataaaataccaaagccaccaaaattgtcttgaattttatttttccctggaaattaaaaatattcaggaggttcaacaataggtccatgtaaaccatcctatttggttagatgccagaaaaataatcttttatattcctgtggtattgaaaaataacttacaaaacccatgctcagtggacacagagattgtaacaagactgtcttgttaatatctatatccccaaggagtcctggagacttgcagaaggtgctatattagttaatgcttactcatgttcatgtatttcttaaaacaattctttacccgaaaaatcgtgtcattaaaaagctacttaaccacatagagttgtttccacatggttccccagtctcttaatgttgatgtcatttctgtgataacagagtcttcagtgggaataaccatttcaaattgtctgtgaaattaaaaaagaaaaagtatatatgtaaataccatagacaacaattttgttttaaatactctaaaagataactagaaaagaaagctgcctagctattgttcgttctacagacagtaaccaggatctggttataagttaatgtgaggaatgctacatgggttgtggtaggacaataccagaacaaccagccacttcaaccagatcaagtttgagcagcgtggtgaagaaggaacagcatcagaagggttgcactccagtaccagttcacgactaggcagcaactcatttaacctaaggccaaaagccttcatctgtaacatgaggtcactgggctacataaactstgaggtgacttttgccttccaagggctatgactataggactcaaagagagtaaaaggaacaccattcaatcaccaggacatgatggctgtgggcatccaaactaactcagtgttataagtaactagacactgagatactaattgaacac

SEQ ID NO: 679568 - DNA, 566 bp, Homo sapiens
tttatgaatatcagaacacttgccatgtcagacccaaagcttgaatctagaacagtaaccacaatcttttctgctacagaagctttatcagtttctgcttactacagctcagatcataccttagttttatccagcatcctaactacagtcatatccaaccagagtatcacatctgccctcttctttgccatatctatcaatatttatttcacttaagatccattgctttcctgtaacaatttaaaacaaggtatctttctaacaattttgctttgctcaagattgtctctgaaaatgaaaatactgagaaaaattgtttttgataactctatraagagttgggcaactgtctttccgtatcaggccttaggtatagatgcctttaaaggattctgagatagcaagagaacaccaggttttgctgtaattactaaaggcactgtttgacaaaactttattaaagttcagcactgtttcagattcctttagtctctagactggtcattcagcatctgaagataaacttatctgggaatgtcaaaataatacagcaataattgcatcta

SEQ ID NO: 679569 - DNA, 566 bp, Homo sapiens
tttatgaatatcagaacacttgccatgtcagacccaaagcttgaatctagaacagtaaccacaatcttttctgctacagaagctttatcagtttctgcttactacagctcagatcataccttagttttatccagcatcctaactacagtcatatccaaccagagtatcacatctgccctcttctttgccatatctatcaatatttatttcacttaagatccattgctttcctgtaacaatttaaaacaaggtatctttctaacaattttgctttgctcaagattgtctctgaaaatgaaaatactgagaaaaattgtttttgataactctataaagagttgggcaactgtctttccgtatcaggccttaggtatagatgcctttaaaggattctgagatagcaagagaacaccaggttttgctgtaattactaaaggcactgtytgacaaaactttattaaagttcagcactgtttcagattcctttagtctctagactggtcattcagcatctgaagataaacttatctgggaatgtcaaaataatacagcaataattgcatcta

SEQ ID NO: 679570 - DNA, 2014 bp, Homo sapiens
tctcaaaatatttttttaaagtcattcttagtttttattttcttatattcacaatgcttaataakattttgtagactctcatgctgaatgcatgtaatgtgtagattcaactgtgcctagtttaaaacacaagctatggtcatctctttgtgaagcttaaatatgtgtctgtcttttattccaattgagtccctggtaactcacttgtgtaacaattatcacagtttccacaccattaactacatttaactaaattaactacattttctattaagagatttgaaattatttgaggagtttttatgaaattcctagaactctacatgctgttggtaaatcctaaccaggatttacctgagacacagccttccagagggaccatcatcaccaagatgcaaaacataacatccttctgttcatctactcatcaacaccatttctcacctgccatgatttcccaataactcatccctcttgtaacttattatctgaaattagtaaaatcaagttatctcccacttcttctataaagctccatttgcacattttgtgctgattgaattcttgctgtaacccagaaacaatgtttctcttgaaattctctcaaacaaaggtattcttcctcattcttgacagaactcagagactgagttattccacatttcctaaaaaaatatgattttgctgaaattctttttttagactatgctatcatttgcctttatttgttgaagattttagccttcttcacaattggacccaaaattcttgaaaatatcaacctccacctatatcattcatccagaatttctgcctctcatttccttgacctcctcactttctacaacgggttattttacctcaactcagtcatgtcctctcatgagcaaatttagactttgtcatcagaattatcatgcaacctccataatttcagaataccactttctatatctccagttaatgtgcactagaaataataccttgctctatcaggtctaaggaaggaaacatgactctcatttctgccagccaatgattaggtaggacttactgcctctgcgttatcagtgagtaccactcaagagagccaaaactctcatttccaccaagcagtaatgagaacaacccccttaagctttaataaaggtaaagtggagaaaacacactctatatatacctaagagtaataagaaaactacccttttccctagccgagacagtggccatagacagccaactaaatggaaggactaagatccagattctcataagaaagtaccccaaaatgtccatatttaaatgaaaaatcaatcatcatctcaaggacaagaaaaatatcaaacagaatttagaaagataatcagtagatgctggctgagtgcagtggttcatgtctgtaatcccaggaatttgggaggccaaggcacgcagatcacttgtagcaaggagttcaagacaaggttgagtagcatagcaagaccatatctgtttaaaatcaataaaaaatagctagatggatagataaattaaaaaacagattccagtactaagtttacagagatgttagagttatcagacaaaggttttaaagcagccgttatacaaatacaaatgcttcaacatgcttgaattgtaaaataaaaagtctcagcaaaaaaaaaagtctaggcacaaaatagaaagcataaagaaaaaacaaagattctagaaatgaaatgaacttagaaatttaggtgatcagatttccaagcaaagtgttgaagttatagactggtttattcttgctgcttttagtgaaattcaagaagaaaattaaagaaatatttataaacataaagaaaatggcctacaaactttacaaaagatactaaaattaagacatttactgtattaagtattttctagagaaaaatatgagtgcctggcattataacctttggataataccttagatcagaaatgcacagtgttcagtcacacaaaaactcttaagtaaattaaaggctcatgc

SEQ ID NO: 679571 - DNA, 1120 bp, Homo sapiens
tttttaattaagaaaaattcagacagtacgtatgcgaactataaacatttcatacttgcccacaaatgttacagtccctctaaatattaattgattcacttatttctaattataacttaatacgtagtatttacataagaaagagtagagagcatttcacaagcttaaaacataatataatacctgctttttcataggcataactttcttactcagatgtatttcccaaaaaaaagtggttttaaataagacatataatcaaatctataaaagataaaatgttttcattacacttgaaacatactggataatagaacattgaatgtttctctctcacaatccatattgttccttttatacgtgaatccttttataatgcaaaagagaagaaaaaagctaaatttcagcaaatgaaaaagaaacatgcaaaataagagtaggtacagaagtttctagtctggaggtcagatccaggcatcattatgttgaaattgatgtggtcacacccccagtggtgatagaaaaacatttcacctcaggaactatttgagataaagagcaaatgaagtttacacagtgtttaatcggagtagtgataagaggtaggaagtaatgacaccctgaagtcgcagcctcagggaaatggttgacaagagtaatttacctaacactttggaayctctaaagtctctatctaataattatctccctgcctccctaaccttcatttatccactctcttttcattcattctcttcaattcttggagtgtgcttccacagtttgttccctgacttcttaatttgtctgagtccgtctcatagagtttgcccccactccatacacacacacacatgaatgccaaatttatattttctttccttttctttcttattgtgtctatagacttcttcttaagaaactatattatgaaactcaagtaaaatatttaatatttattgggcttttagaataagactttatttttattataaaattcagatgaataaaatatcacctgttttttaaaaatctctaactaaattaacttacctttgacttttattcagctaccattataaatgtagtgacaagaaataggaaaaaattctctatttta

SEQ ID NO: 679572 - DNA, 1088 bp, Homo sapiens
aatatttgaaacatgaaaaaataaatgaaattttggataaataggtaatgatcaggcttaatttagcactctaagttctcaaataaaacacaaattcatcataaactgaaactttttttcatttgaaatacataaattcaaaaatagccaccctaggaagtcttcttcaacctaccaagacaaaagttgggcattccacactggcttagaactttgtacaaactttaatcatcacaccatattgctattattttgttttcatgtctgacttttccagtacactgtgaaatccctgaaccctgagtgccagttttataaagctgtgacattctaaaattgaatgcagttaaatctcaaagccaaatgctattactgtatacaacaatgatcaatgcttgttgaatcagctaattcattctttgaatagtaatagagctttattatgtgtcgtacaaaaatccccagagctgagaataaggcagaggtacaacagaacaatcacctatacacatttactataaaaacttagagtatgaaattcaaaataagaaaggatggtttactgtactctatagttagaggatgtttgaaaattatctatagaattgcaactttaacaatggcttcaagaaaccgagaataaattgtcctaaaataaaccaacagcccttgatcttctattatcatttgaagttgtgtataattgcacttaagttttatattggtctcaattcaatatggtctataacattaggatatcagcaattttcattgtaaaagaccattactaatccaactgagtttgattattgtattttatcaggttagcaggtcttttcctgagctctgcagcattgctgtttttaatatgtgtctacattttgtgtattggtcttcaaacccctcctatgaaaactatttcccttsgtggaggacctgattttatgaattgtgctttcattttttcacgttgtatagcattgtaatagtaagtaaacttaatgactgcttaaaatgtataaagtactcctggattacattctcattatatactttatattataaattttaagtattttattattttt

SEQ ID NO: 679573 - DNA, 1088 bp, Homo sapiens
aatatttgaaacatgaaaaaataaatgaaattttggataaataggtaatgatcaggcttaatttagcactctaagttctcaaataaaacacaaattcatcataaactgaaactttttttcatttgaaatacataaattcaaaaatagccaccctaggaagtcttcttcaacctaccaagacaaaagttgggcattccacactggcttagaactttgtacaaactttaatcatcacaccatattgctattattttgttttcatgtctgacttttccagtacactgtgaaatccctgaaccctgagtgccagttttataaagctgtgacattctaaaattgaatgcagttaaatctcaaagccaaatgctattactgtatacaacaatgatcaatgcttgttgaatcagctaattcattctttgaatagtaatagagctttattatgtgtcgtacaaaaatccccagagctgagaataaggcagaggtacaacagaacaatcacctatacacatttactataaaaacttagagtatgaaattcaaaataagaaaggatggtttactgtactctatagttagaggatgtttgaaaattatctatagaattgcaactttaacaatggcttcaagaaaccgagaataaattgtcctaaaataaaccaacagcccttgatcttctattatcatttgaagttgtgtataattgcacttaagttttatattggtctcaattcaatatggtctataacattaggatatcagcaattttcattgtaaaagaccattactaatccaactgagtttgattattgtattttatcaggttagcaggtcttttcctgagctctgcagcattgctgtttttaatatgtgtctacattttgtgtattggtcttcaaacccctcctatgaaaactatttcccttcgtggaggacctgattttatgaattgtgctttcattttttcacgttgtatagcattgtaatagtaagtaaacttaatgactgcttaaaatgtataaagtactcctggattacattctcattatatactttatattataaattktaagtattttattattttt

SEQ ID NO: 679574 - DNA, 1698 bp, Homo sapiens
gaaagcatttaatgagtatttgttgatttttgtattaaagtttttatgtactcttttcttttagatttattatccttttcctgtgtgaaaagataagacaattactttcttcttaattacaggtttttggctactgatgttacaaacaataaaatattggagcatagagttgaagaacagactcaaaccaggtaggtagataataaaagtctaaagaatcaataaaattactatttattttgataaaggacattattgatattattgacagaattggaatatgaactgtagagtacggttcaaaattaagtttcctgaatttgataattgtattgtgattatataagataatattctgatgtatttatggtgaagggacatgatgtatgcagcctacttttgaatggttcagaaaaaaaattatatgtaatttgacagagaatttgataagtcatggataagtaggaactctcatattgccagtagaagtatagattgatccaagctttctggaaagcatcatggcaatttgtatgacgttttttttgttgttgttgttttgattttgacatgtagtcttctctgtcacctaggctggagtgcagtaatgcgatcttggctcattgcaacttctgcctcctgggttaaagggattctcatgcctcagtcccccacggaactgggactacaggtttgcgccaccatgccctgctaattttttgtatttttagtagagactggatttcaccatgttggccaggctggtctcaaactcctgacctcaggtaatccacctgccttggcctcccaaagtgctaggattacaggtgtgagccaccacacctggccctgtatcaagttttaaaatagcttatcccatcaatcttactatctttcctacagtaattgtaggaaggttacaaaaatatatatatgtatgtataagaatgttatagcagaatattttatagtttggaaattggcaacaacctgatatctaacaatctgaaactgattaaataaatataattaactaccgtgcaagcaataaaaatgtaaatctgtttttattgacacaatgtctataatgtgtttttaagtgttaaagcagcctactaaacaagcaaaatagtattgacctgtttttcagaaaagctgtatgtacacggacacataagtgtacgtgtgtttgattaatatacaatatttggttagatgtaatgtgtgtgtatagacatatacatatgtatgtgtgtatgttcatagacatttggaaagatgacattcctgttgctggtgattattattattatttttttttgagacagagtcttgctctgttgcccaggctggagtgcagtggtgcgatctcggctcactgcaagctccgcctcctgggttcaygccattctcctgcctcagcctcccgagtagctgggactacagacacctggctaattttttgtatttttagttgagacaggatttcaccatgttagccaggttggtctcgatctcccgacctcatgatgcgcccgcctcggcctccaaaagtgctggggttacaggtgtgagccaccacgcctggccggtgattatttttgaatagtaagttcataagttatttttatactgttctgtattatctgactttttaaaactttttatgtttttatgttgcttttctcatcaaatttt

SEQ ID NO: 679575 - DNA, 1096 bp, Homo sapiens
tcagtgatgaaaaggaggacaattggggaatttcaagtagctctaaaacacagtagagttctcacactcaaaagcagacaagggtcaacaggtaatgaagagtgaaactggctgggaggagattgggggcaaactgaagagcccttggcccactggaagggccaccactccccaacatccattcatcactgccaggccaaatggggggccactgttgctagatccattgattttctagagaagcaggggaaaatgttcccatatgaattatcccattctccaatrctgaaaattaattcatgctttcaaaaatactttgctggccaacccagacacactgaatggtggatgtccatggggacttcactttgcaacctctgtaagtctacctctctacaaataattgagggccagctattattgatatgctcttcttgtccatttgtacatttcctggtcataggacttctgtgtgaggtagtaaaatgaaataatcctcattaagaacatatcactagagaccaggagcagtggctcatgcctataatcccaacattttgggaggctgaggcaggaggatcacttgaagccagtgagctatggcctcctgtgagaaccactgcacctactggacaacagagtgagactctgtctataaaaatataagtagataaaagtaaaaataagaacatttaactaggaatacagataaaataaattcaatctacggtggaaagtaagaagctacctcatctccttataaaactatggtcttttctcagcagtttaaattattcaacattattagatgtaatgttcattgaaagaagatttttgaagtcattcaaatccaagaatttgttcttaggaagcctggccacagacattactaaacagcagcattggacaactgtggaaaattcctctcaatcagacctcaagaaagatctgttgattgattggaaatgggagaactgcttgtcctcaggaggacaagaagagaggatttgaataaaagtgctgaaaatctgaaacaaagaaagggtcctgtaaacagcctagataactgggcagacaagcctgcctgacttacgaa

SEQ ID NO: 679576 - DNA, 1096 bp, Homo sapiens
tcagtgatgaaaaggaggacaattggggaatttcaagtagctctaaaacacagtagagttctcacactcaaaagcagacaagggtcaacaggtaatgaagagtgaaactggctgggaggagattgggggcaaactgaagagcccttggcccactggaagggccaccactccccaacatccattcatcactgccaggccaaatggggggccactgttgctagatccattgattttctagagaagcaggggaaaatgttcccatatgaattatcccattctccaatamtgaaaattaattcatgctttcaaaaatactttgctggccaacccagacacactgaatggtggatgtccatggggacttcactttgcaacctctgtaagtctacctctctacaaataattgagggccagctattattgatatgctcttcttgtccatttgtacatttcctggtcataggacttctgtgtgaggtagtaaaatgaaataatcctcattaagaacatatcactagagaccaggagcagtggctcatgcctataatcccaacattttgggaggctgaggcaggaggatcacttgaagccagtgagctatggcctcctgtgagaaccactgcacctactggacaacagagtgagactctgtctataaaaatataagtagataaaagtaaaaataagaacatttaactaggaatacagataaaataaattcaatctacggtggaaagtaagaagctacctcatctccttataaaactatggtcttttctcagcagtttaaattattcaacattattagatgtaatgttcattgaaagaagatttttgaagtcattcaaatccaagaatttgttcttaggaagcctggccacagacattactaaacagcagcattggacaactgtggaaaattcctctcaatcagacctcaagaaagatctgttgattgattggaaatgggagaactgcttgtcctcaggaggacaagaagagaggatttgaataaaagtgctgaaaatctgaaacaaagaaagggtcctgtaaacagcctagataactgggcagacaagcctgcctgacttacgaa

SEQ ID NO: 679577 - DNA, 1096 bp, Homo sapiens
tcagtgatgaaaaggaggacaattggggaatttcaagtagctctaaaacacagtagagttctcacactcaaaagcagacaagggtcaacaggtaatgaagagtgaaactggctgggaggagattgggggcaaactgaagagcccttggcccactggaagggccaccactccccaacatccattcatcactgccaggccaaatggggggccactgttgctagatccattgattttctagagaagcaggggaaaatgttcccatatgaattatcccattctccaatactgaaaattaattcatgctttcaaaaatactttgctggccaacccagacacactgaatggtggatgtccatggggacttcactttgcaacctctgtaagtctacctctctacaaataattgagggccagctattattgatatgctcttcttgtccatttgtacatttcctggtcataggacttctgtgtgaggtagtaaaatgaaataatcctcattaagaacatatcactagagaccaggagcagtggctcatgcctataatcccaacattttgggaggctgaggcaggaggatcacttgaagccagtgagctatggcctcctgtgagaaccactgcacctactggacaacagagtgagactctgtctataaaaatataagtagataaaagtaaaaataagaacatttaactaggaatacagataaaataaattcaatctacggtggaaagtaagaagctacctcatctccttataaaactatggtcttttctcagcagtttaaattattcaacattattagatgtaatgttcattgaaagaagatttttgaagtcattcaaatccaagaatttgttcttaggaagcctggccacagacattactaaacagcagcattggacaactgtggaaaattcctctcaatcagacctcaagaaagatctgttgattgattggaaatgggagaactgcttgtcctcaggaggacaagaagagaggatttgaataaaagtgctgaaaatctgaaacaaagaaagggtcctgtaaacagcctagataactgggcagacargcctgcctgacttacgaa

SEQ ID NO: 679578 - DNA, 446 bp, Homo sapiens
caccgctctctatccagggcagaggaatcgttgaaaaggcaggaggtatgctggccacacagccagcatggagagctggagtttttggcagggcacttccaccccaaaagcagacagagtcctggaagggcgttcgtgtaaacaaagcaggcagatagcttcaactctgcaatgaggcgcaacctttcccagatcaaagcctggatcacagagacagccctgaagaactgagtgtcctttctggaacatccagctccagggsagagacttgaactggagccacaactttgccacctgtagccaatgacttggcacacgaaagctctcacagggtggggagcctgcagctgctcccacaacagaagatcaatggaaagataagacaacacagggaagaaaggtttcttactcgagatactgaagctgagatcatttaactaaagctt

SEQ ID NO: 679579 - DNA, 590 bp, Homo sapiens
taagataataaaactacgtacctcagagggttgctatatgggatcaggtgagctgtctgtaaagcactgcgaacgacacttggcacttagaaagcctgtgtctgtgtaaactattgttatcatcagttacttcctaatagtgatatttggaaggaaagaaacaggctgagtcacccccttttctgctccagggtaatgtattcccatccagggactcacacagatcctgagatttaggagggctgatggatcttgttttttgtattacagatcacttttctccagagaatgcaaatgacacggccaaggaaacatgcctaaattggtttttcaagattgcctccatcagggaactcattccaagattgtatccttttttttttttttttggtctgatgattttaaagataggctaaaagaattgtactgttaatagaagccatgtgatgggatgccctgacattcttattgaaagtttggtcccgttacggttgctagcctgaaaacacatacaggkcaagccacattgtagaaacccttggactcttgctctttccagttttttgtcttttactttgaatacgatgcca

SEQ ID NO: 679580 - DNA, 590 bp, Homo sapiens
taagataataaaactacgtacctcagagggttgctatatgggatcaggtgagctgtctgtaaagcactgcgaacgacacttggcacttagaaagcctgtgtctgtgtaaactattgttatcatcagttacttcctaatagtgatatttggaaggaaagaaacaggctgagtcacccccttttctgctccagggtaatgtattcccatccagggactcacacagatcctgagatttaggagggctgatggatcttgttttttgtattacagatcacttttctccagagaatgcaaatgacacggccaaggaaacatgcctaaattggtttttcaagattgcctccatcagggaactcattccaagattgtatccttttttttttttttttggtctgatgattttaaagataggctaaaagaattgtactgttaatagaagccatgtgatgggatgccctgacattcttattgaaagtttggtcccgttacggttgctagcctgaaaacacatacagggcaagccacattgtagaaacccttggactcttgctctttccagttttttgtcttttactttgaataygatgcca

SEQ ID NO: 679581 - DNA, 671 bp, Homo sapiens
tctttgttgcagctgcatagtgctccattttgtggcagtgccgtattgttttcaaccactctcctatgtataaacatttaggccatttccaagattttgcaattacaaaccatgctgcaatatgctttttttgcatacacgtttttgcaatgttggaagtatgacttcaagctaaattcttagaagtaggattgctgagtgaaaaagttaataaatgcgtcattttgttagatagtgccaaaatcggccaggtgcagtggctcatgcctgtaatcccagcactttaggaggcaggaggatcacttgagcccaggagttgtaaaccagcctaggcaacatggcgaaaccccatctctattaattaaaaaaaaaaaaaaaaagatattgccaaattcctttccaaaaagaccgtatgttttcatgcctaccagcagtttgtgagagcgcttcaagtatccttttaaacgagaagtgatgtttccggagcattaaaactgaagtgatttcaaaaccatgttgcrctcacacgaacaggtgtgcacttaatggactaaactagttcagctgacatgtcttcttcattaggaacagtgtggagactgaaaaactaatttagcctagagcagctatttaattgtaaagtctcctttctcaaatattgatttactatg

SEQ ID NO: 679582 - DNA, 408 bp, Homo sapiens
ctgtgattttagtaggtttcaggaggaattactggttaacaagcatgttcaactgcagtgtttatccagaagttttatcatttaagctgactgcattttctattccttgtagttaaaatcatcttgatttgacggaattgcaatggtattkacccacagaaatattttatgatttttaatgagtacatcgtatttcctcttatggaataaatatgtaattatttaatcactcttgaaatatttgagtggctttcaatttgtttgttttttgaaaatagaattatagaagtaaaaaaatttaaaaagtttacaagaattatacaatttttctgcaattttttaatgttatcgaacatcccaaactgggcacagtggctcacgcctgtaatcctagcactttgggaggcc

SEQ ID NO: 679583 - DNA, 408 bp, Homo sapiens
ctgtgattttagtaggtttcaggaggaattactggttaacaagcatgttcaactgcagtgtttatccagaagttttatcatttaagctgactgcattttctattccttgtagttaaaatcatcttgatttgacggaattgcaatggtattgacccacagaaatattttatgatttttaatgagtacatcgtatttcctcttatggaataaatatgtaattatttaatcactcttgaaatatttgagtggctttcaatttgtttgttttttgaaaatagaattatagaagtaaaaaaatttaaaaagtttacaagaattatacaatttttctgcaattttttaatgttatcgaacatcccaaactgggcacagtggctcacrcctgtaatcctagcactttgggaggcc

SEQ ID NO: 679584 - DNA, 2655 bp, Homo sapiens
tcaaaagtaatacatgctcaatacagaaaacagaaaagcgcaaagaagaaaataaaaattatgtatctatccagcccctaaataacttggcacaccaagtttttgctttgcatccatgtttttaaaataaaatttagaatatactcaataaatctgtatttaaatctgtatttattttcactgaaaatatatttttactattttccatgccagtgattactctcccataacaacatatttgaccacaatctggaaagaatttaaagttctagaaaagtgcaaagaacaacttaatagacatctatactcccaccctgtgctgttaacaactattaatattttattatgttcactttcagtcatttttcaaagggaaaacagtacataggtagctaacgtctcctaccagtgagtctttatttatttttcacagttgtaaaggcactctgaagaatatcattattgagcctgtacacaatacaaaattatacgacctttgtgtacatccaccactccctcagggtgaagtcttggaaatggtggaactgccagatcagtgggtgaatttgtactcctgcctgccataaatgataactcccttgtccctatattctagccaacactggctcattctaattcacttcaaaaaaaagtttcatttgagaaaggtgacattttattattgctttattttgtatttctttgatttctagtgatgtgacatatacacttaatatgtaccagccagtttataatttttctattattaattgcattttcacatcctgtgtgcttttgtttgttgggtattcatcgtttctttttgagttaaaggagctgcttcgatgttaaggatatcatcataaatggcaaacatatattctgctgtgtatcaattgcccttcagttttatttatgatggtttttgacataagttgttactgttttttgtgtgttataatcaagtttgacagacttttcctttatgttttctgcatttggtgtcatgcttagaaaacccttctccatccctagtttctaaaattgttcacccatgttttcagtgtccttatggtttatttttacataaaattaaaaaaaaactagaattaattttggggtatggtatgggctaagattctaacaaatttttcccagatgggtatcatgttgtctcaacataatgatgattgattaaaaatgccatatactacattgacttttatagatctatgtcaatttctggaaattttattctgttccatcaatgtgtatgcctttgctacacatcactacagtgttttattacgtctttataatatagtttcctatctattttaatgaatctctcttcttcttaaaactttggtcaaacttgtgttttcctttttctaaatgagattcttaaccaagggtgagcataaaaacaatctgtggaggactttaattaacctgcccagggctcacatcccagaaaattctgattcattgggtctggtgtgggagctgggcatctttcaaaaataaataaataacacatgcatatatacataatatatgcattatacataaaagactccctagttgatggggaggcccctagattaagaaccacagctcccacgtgagaacacatggacacatagaggggagcagcacacactggggcctattggagggtggaaggtgggagaaggaaaaggattaggaaaaataattaatgagtactaggcttaatacctggtgatgagacaagtttacctatgtaacaaacccgcacrtgtaccctgaacttaaaataaaagttaaaataaataaataagaagacaaaaccaaataaaaagaaccacagccccagcttcaaaagatttttataatttcagaatcctgtgtcagagttcccctcttctcccacttctatcctgtttccaagtgcaagatgctccctgggggccacctggggtgctcttatgtaattggtcttgaggatttagctcaggctttggggtttttgaaaacttcctcagtgattctaacgtgcagtcagggttggtgatgactggtttagaaactccttctcagtcctgaccactaaatccttgctctactgtacagatagaattctatctgtgaattagtatggatttcaatcctggttatacatcagaatcatctgtggttcttaaaaaacagactgagctgaatgtatacattaaatattgaccatcagcattaaaaaaatacaactgggtgtggtggctgacacctgtaatcccagaactttgggaagctgaggtgggaggatagctttaggccaggagtttcagaccagcctgcacaacatagcgagacccctgtctctacaaaaaaaatttaaaaattagctgggcatggcggcatatacctatggtcccagctactcgggaggctgaggtgggaggacggcttgagcccaggaggttgaggctgcagcgagcctatgattgagccactgcacaccagtctgggcaatagagtgaggccctgtctccaaaaaaaaagaagaagaaagaaaataagtccaatttcatagttgattctgatgcacagcaagactaaatagccattctccaggtaactgtcctttttaaatgactaactctatttttcaggtga

SEQ ID NO: 679585 - DNA, 2655 bp, Homo sapiens
tcaaaagtaatacatgctcaatacagaaaacagaaaagcgcaaagaagaaaataaaaattatgtatctatccagcccctaaataacttggcacaccaagtttttgctttgcatccatgtttttaaaataaaatttagaatatactcaataaatctgtatttaaatctgtatttattttcactgaaaatatatttttactattttccatgccagtgattactctcccataacaacatatttgaccacaatctggaaagaatttaaagttctagaaaagtgcaaagaacaacttaatagacatctatactcccaccctgtgctgttaacaactattaatattttattatgttcactttcagtcatttttcaaagggaaaacagtacataggtagctaacgtctcctaccagtgagtctttatttatttttcacagttgtaaaggcactctgaagaatatcattattgagcctgtacacaatacaaaattatacgacctttgtgtacatccaccactccctcagggtgaagtcttggaaatggtggaactgccagatcagtgggtgaatttgtactcctgcctgccataaatgataactcccttgtccctatattctagccaacactggctcattctaattcacttcaaaaaaaagtttcatttgagaaaggtgacattttattattgctttattttgtatttctttgatttctagtgatgtgacatatacacttaatatgtaccagccagtttataatttttctattattaattgcattttcacatcctgtgtgcttttgtttgttgggtattcatcgtttctttttgagttaaaggagctgcttcgatgttaaggatatcatcataaatggcaaacatatattctgctgtgtatcaattgcccttcagttttatttatgatggtttttgacataagttgttactgttttttgtgtgttataatcaagtttgacagacttttcctttatgttttctgcatttggtgtcatgcttagaaaacccttctccatccctagtttctaaaattgttcacccatgttttcagtgtccttatggtttatttttacataaaattaaaaaaaaactagaattaattttggggtatggtatgggctaagattctaacaaatttttcccagatgggtatcatgttgtctcaacataatgatgattgattaaaaatgccatatactacattgacttttatagatctatgtcaatttctggaaattttattctgttccatcaatgtgtatgcctttgctacacatcactacagtgttttattacgtctttataatatagtttcctatctattttaatgaatctctcttcttcttaaaactttggtcaaacttgtgttttcctttttctaaatgagattcttaaccaagggtgagcataaaaacaatctgtggaggactttaattaacctgcccagggctcacatcccagaaaattctgattcattgggtctggtgtgggagctgggcatctttcaaaaataaataaataacacatgcatatatacataatatatgcattatacataaaagactccctagttgatggggaggcccctagattaagaaccacagctcccacgtgagaacacatggacacatagaggggagcagcacacactggggcctattggagggtggaaggtgggagaaggaaaaggattaggaaaaataattaatgagtactaggcttaatacctggtgatgagacaagtttacctatgtaacaaacccgcacatgtaccstgaacttaaaataaaagttaaaataaataaataagaagacaaaaccaaataaaaagaaccacagccccagcttcaaaagatttttataatttcagaatcctgtgtcagagttcccctcttctcccacttctatcctgtttccaagtgcaagatgctccctgggggccacctggggtgctcttatgtaattggtcttgaggatttagctcaggctttggggtttttgaaaacttcctcagtgattctaacgtgcagtcagggttggtgatgactggtttagaaactccttctcagtcctgaccactaaatccttgctctactgtacagatagaattctatctgtgaattagtatggatttcaatcctggttatacatcagaatcatctgtggttcttaaaaaacagactgagctgaatgtatacattaaatattgaccatcagcattaaaaaaatacaactgggtgtggtggctgacacctgtaatcccagaactttgggaagctgaggtgggaggatagctttaggccaggagtttcagaccagcctgcacaacatagcgagacccctgtctctacaaaaaaaatttaaaaattagctgggcatggcggcatatacctatggtcccagctactcgggaggctgaggtgggaggacggcttgagcccaggaggttgaggctgcagcgagcctatgattgagccactgcacaccagtctgggcaatagagtgaggccctgtctccaaaaaaaaagaagaagaaagaaaataagtccaatttcatagttgattctgatgcacagcaagactaaatagccattctccaggtaactgtcctttttaaatgactaactctatttttcaggtga

SEQ ID NO: 679586 - DNA, 2655 bp, Homo sapiens
tcaaaagtaatacatgctcaatacagaaaacagaaaagcgcaaagaagaaaataaaaattatgtatctatccagcccctaaataacttggcacaccaagtttttgctttgcatccatgtttttaaaataaaatttagaatatactcaataaatctgtatttaaatctgtatttattttcactgaaaatatatttttactattttccatgccagtgattactctcccataacaacatatttgaccacaatctggaaagaatttaaagttctagaaaagtgcaaagaacaacttaatagacatctatactcccaccctgtgctgttaacaactattaatattttattatgttcactttcagtcatttttcaaagggaaaacagtacataggtagctaacgtctcctaccagtgagtctttatttatttttcacagttgtaaaggcactctgaagaatatcattattgagcctgtacacaatacaaaattatacgacctttgtgtacatccaccactccctcagggtgaagtcttggaaatggtggaactgccagatcagtgggtgaatttgtactcctgcctgccataaatgataactcccttgtccctatattctagccaacactggctcattctaattcacttcaaaaaaaagtttcatttgagaaaggtgacattttattattgctttattttgtatttctttgatttctagtgatgtgacatatacacttaatatgtaccagccagtttataatttttctattattaattgcattttcacatcctgtgtgcttttgtttgttgggtattcatcgtttctttttgagttaaaggagctgcttcgatgttaaggatatcatcataaatggcaaacatatattctgctgtgtatcaattgcccttcagttttatttatgatggtttttgacataagttgttactgttttttgtgtgttataatcaagtttgacagacttttcctttatgttttctgcatttggtgtcatgcttagaaaacccttctccatccctagtttctaaaattgttcacccatgttttcagtgtccttatggtttatttttacataaaattaaaaaaaaactagaattaattttggggtatggtatgggctaagattctaacaaatttttcccagatgggtatcatgttgtctcaacataatgatgattgattaaaaatgccatatactacattgacttttatagatctatgtcaatttctggaaattttattctgttccatcaatgtgtatgcctttgctacacatcactacagtgttttattacgtctttataatatagtttcctatctattttaatgaatctctcttcttcttaaaactttggtcaaacttgtgttttcctttttctaaatgagattcttaaccaagggtgagcataaaaacaatctgtggaggactttaattaacctgcccagggctcacatcccagaaaattctgattcattgggtctggtgtgggagctgggcatctttcaaaaataaataaataacacatgcatatatacataatatatgcattatacataaaagactccctagttgatggggaggcccctagattaagaaccacagctcccacgtgagaacacatggacacatagaggggagcagcacacactggggcctattggagggtggaaggtgggagaaggaaaaggattaggaaaaataattaatgagtactaggcttaatacctggtgatgagacaagtttacctatgtaacaaacccgcacatgtaccctgaacttaaaataaaagttaaaataaataaataagaagacaaaaccaaataaaaagaaccacagccccagcttcaaaagatttttataatttcagaatcctgtgtcagagttcccctcttctcccacttctatcctgtttccaagtgcaagatgctccctgggggccacctggggtgctcttatgtaattggtcttgaggatttagctcaggctttggggtttttgaaarcttcctcagtgattctaacgtgcagtcagggttggtgatgactggtttagaaactccttctcagtcctgaccactaaatccttgctctactgtacagatagaattctatctgtgaattagtatggatttcaatcctggttatacatcagaatcatctgtggttcttaaaaaacagactgagctgaatgtatacattaaatattgaccatcagcattaaaaaaatacaactgggtgtggtggctgacacctgtaatcccagaactttgggaagctgaggtgggaggatagctttaggccaggagtttcagaccagcctgcacaacatagcgagacccctgtctctacaaaaaaaatttaaaaattagctgggcatggcggcatatacctatggtcccagctactcgggaggctgaggtgggaggacggcttgagcccaggaggttgaggctgcagcgagcctatgattgagccactgcacaccagtctgggcaatagagtgaggccctgtctccaaaaaaaaagaagaagaaagaaaataagtccaatttcatagttgattctgatgcacagcaagactaaatagccattctccaggtaactgtcctttttaaatgactaactctatttttcaggtga

SEQ ID NO: 679587 - DNA, 601 bp, Homo sapiens
atcatctgaggtcaggagttcaagaccagcctgcccaatatggcaaaaccctgtctctactaaaaatacaaaaaattaactgggcgtggtggcaggagttggatgttgcactgagccgagattgtgccactgcacttcagcctgggtgacaagagcaagactccgtctcaaaaaaacaaaaaaaacaacaacaaaaaaacactttgataaattatatatctttacctataactttcatttttgtatttgtttttgttgtaagcaagggaggaaaggtaatattcctaatatcatttggcaattatcaaagtaaaaactgctaagacttattttgcttgttgaaataatcttaaaagggtaactttaaaagattggacatcagtgttaaacatttaayaaagtattgattctttcattgctatattgcatttttaggacaaaggaaatcaacattctgtttcctaatgttgattttttcccctctcatcctcaatctttctgtcactgcatcatcactgaagaaaaaactcgggataattttttcattactgtaaatcctcattgttaagtgagatttttatttcagcatttggcctcttta

SEQ ID NO: 679588 - DNA, 643 bp, Homo sapiens
cctaaattcaagtgaggtataaagaggaccctgacctcgggctgagccatctgtccctctggacttgtcctggagtttgctctccaatgcctcatctctgtgctaattttgatggcctcttcacagagcaggactttctgtgtttatccagggaatgtagaaaacacagtgcaggacactctgctgtggtgcgaggcaacatcagggctagaaatatctatcacgggcaggatggaggccccattctttggagcttgtgtgtatgttagcaggcaacatgagaaagggccaaagccttggagtcaggtagacttggtttaaatcctggttttgccgcttaccagctatgtgactgggtggtgattacactctctcagtgtttccttgactataaagtggggatatagtgtttattcctaaggtgactgtctgtctgstttgtttttgtttttattttttgagacagaatctcactctgtcgcccaggctggagtgcagtgacgcaatgttggctcactgcagccttgacctcccaggctcaagcaatcctcccagctcagcttcccgagtagctgagactacaggcacacaccatcattattattttttttcctgtagaaatgaggtctcactatggcccagg

SEQ ID NO: 679589 - DNA, 1412 bp, Homo sapiens
gtttccctgcctgcttttttgtttctaatagttattttctttatggaatttttaagagatagggaagatgaaggaaaagagtgagatctttgttttcagttgtcatccttccagattttcttgaaaaaccatctctagaaacaaaagtttgagacgcatagcgagaacttaaaaaaaaagtctagaaatcatcttaaacatgtcaactcttctaagacttatctaaaatagaagcttcaaaaatgttacttattttcccccttttaagttttccgaaaaatgttccagagccgagattgcatatgccaagactttgtgaaaaggacttttattgcaaagttactagctctgagaatttggctttaataaagaatccacataaccttccatgaaatgtcaggaatgtgctattttagtaataaccttacctgtgtcctagggcacaatgaatgagaatctccataacagagaaaaaaataattgagaattggcaggtgaaatcatctagtcatgatattaatgatttcttcaaagaagaagctggctcctgactttatcaaaaactcattaaatgcttgccaattttataaaaggaaatatctattttatttctctaagtatatagagataaggagatttttaaaatatataactgcagaggctrtctctggacaagtttaacaattactagtaaataaccagaagatgatatgctagccatggccagatgtgaacattctgcacacaccccttgtggtgtgcaaatggttggtcattttctggtggttatcaactgtgagtggtcctgaccctcacaagtgcagcgagtttaattatatcctgttttaaagccagtttagtcattcaaaatacatttttaaaggcttccaatgtaaagcataaaaagaaaaaaaatcttttaaccataatttagtaattctccagccttgatttttggctttccttgctgcctaagtggtcatatattttataagccttgctaatttgctgttaaatttgctatttatatgatcctagatgatttgttggacttcattgaacaaaaaaagatttttattagcagccagtgctttcaaagaagtggtttttttcacaccatcaaggccactttctcaacttattgacagctttatgagtgtagctggataaagaacagtttcctgtatccaaaagcgttttgcattccatggggcaaaaacttggacttttaattaggatatgagagccttcctttctctcccaacattccccgggggcacagagcagtaacacttgcatttagatagttaatcacttttccagacttcagcccactgaaattaggaaggtttttaggtcaaatgcttacctggctctcagccagcctaggatggtatttatttctgcacatc

SEQ ID NO: 679590 - DNA, 1412 bp, Homo sapiens
gtttccctgcctgcttttttgtttctaatagttattttctttatggaatttttaagagatagggaagatgaaggaaaagagtgagatctttgttttcagttgtcatccttccagattttcttgaaaaaccatctctagaaacaaaagtttgagacgcatagcgagaacttaaaaaaaaagtctagaaatcatcttaaacatgtcaactcttctaagacttatctaaaatagaagcttcaaaaatgttacttattttcccccttttaagttttccgaaaaatgttccagagccgagattgcatatgccaagactttgtgaaaaggacttttattgcaaagttactagctctgagaatttggctttaataaagaatccacataaccttccatgaaatgtcaggaatgtgctattttagtaataaccttacctgtgtcctagggcacaatgaatgagaatctccataacagagaaaaaaataattgagaattggcaggtgaaatcatctagtcatgatattaatgatttcttcaaagaagaagctggctcctgactttatcaaaaactcattaaatgcttgccaattttataaaaggaaatatctattttatttctctaagtatatagagataaggagatttttaaaatatataactgcagaggctgtctytggacaagtttaacaattactagtaaataaccagaagatgatatgctagccatggccagatgtgaacattctgcacacaccccttgtggtgtgcaaatggttggtcattttctggtggttatcaactgtgagtggtcctgaccctcacaagtgcagcgagtttaattatatcctgttttaaagccagtttagtcattcaaaatacatttttaaaggcttccaatgtaaagcataaaaagaaaaaaaatcttttaaccataatttagtaattctccagccttgatttttggctttccttgctgcctaagtggtcatatattttataagccttgctaatttgctgttaaatttgctatttatatgatcctagatgatttgttggacttcattgaacaaaaaaagatttttattagcagccagtgctttcaaagaagtggtttttttcacaccatcaaggccactttctcaacttattgacagctttatgagtgtagctggataaagaacagtttcctgtatccaaaagcgttttgcattccatggggcaaaaacttggacttttaattaggatatgagagccttcctttctctcccaacattccccgggggcacagagcagtaacacttgcatttagatagttaatcacttttccagacttcagcccactgaaattaggaaggtttttaggtcaaatgcttacctggctctcagccagcctaggatggtatttatttctgcacatc

SEQ ID NO: 679591 - DNA, 1412 bp, Homo sapiens
gtttccctgcctgcttttttgtttctaatagttattttctttatggaatttttaagagatagggaagatgaaggaaaagagtgagatctttgttttcagttgtcatccttccagattttcttgaaaaaccatctctagaaacaaaagtttgagacgcatagcgagaacttaaaaaaaaagtctagaaatcatcttaaacatgtcaactcttctaagacttatctaaaatagaagcttcaaaaatgttacttattttcccccttttaagttttccgaaaaatgttccagagccgagattgcatatgccaagactttgtgaaaaggacttttattgcaaagttactagctctgagaatttggctttaataaagaatccacataaccttccatgaaatgtcaggaatgtgctattttagtaataaccttacctgtgtcctagggcacaatgaatgagaatctccataacagagaaaaaaataattgagaattggcaggtgaaatcatctagtcatgatattaatgatttcttcaaagaagaagctggctcctgactttatcaaaaactcattaaatgcttgccaattttataaaaggaaatatctattttatttctctaagtatatagagataaggagatttttaaaatatataactgcagaggctgtctctggacaagtttaacaattactagtaaataaccagaagatgatatgctagccayggccagatgtgaacattctgcacacaccccttgtggtgtgcaaatggttggtcattttctggtggttatcaactgtgagtggtcctgaccctcacaagtgcagcgagtttaattatatcctgttttaaagccagtttagtcattcaaaatacatttttaaaggcttccaatgtaaagcataaaaagaaaaaaaatcttttaaccataatttagtaattctccagccttgatttttggctttccttgctgcctaagtggtcatatattttataagccttgctaatttgctgttaaatttgctatttatatgatcctagatgatttgttggacttcattgaacaaaaaaagatttttattagcagccagtgctttcaaagaagtggtttttttcacaccatcaaggccactttctcaacttattgacagctttatgagtgtagctggataaagaacagtttcctgtatccaaaagcgttttgcattccatggggcaaaaacttggacttttaattaggatatgagagccttcctttctctcccaacattccccgggggcacagagcagtaacacttgcatttagatagttaatcacttttccagacttcagcccactgaaattaggaaggtttttaggtcaaatgcttacctggctctcagccagcctaggatggtatttatttctgcacatc

SEQ ID NO: 679592 - DNA, 1412 bp, Homo sapiens
gtttccctgcctgcttttttgtttctaatagttattttctttatggaatttttaagagatagggaagatgaaggaaaagagtgagatctttgttttcagttgtcatccttccagattttcttgaaaaaccatctctagaaacaaaagtttgagacgcatagcgagaacttaaaaaaaaagtctagaaatcatcttaaacatgtcaactcttctaagacttatctaaaatagaagcttcaaaaatgttacttattttcccccttttaagttttccgaaaaatgttccagagccgagattgcatatgccaagactttgtgaaaaggacttttattgcaaagttactagctctgagaatttggctttaataaagaatccacataaccttccatgaaatgtcaggaatgtgctattttagtaataaccttacctgtgtcctagggcacaatgaatgagaatctccataacagagaaaaaaataattgagaattggcaggtgaaatcatctagtcatgatattaatgatttcttcaaagaagaagctggctcctgactttatcaaaaactcattaaatgcttgccaattttataaaaggaaatatctattttatttctctaagtatatagagataaggagatttttaaaatatataactgcagaggctgtctctggacaagtttaacaattactagtaaataaccagaagatgatatgctagccatggccagatgtgaacattctgcacacacccctygtggtgtgcaaatggttggtcattttctggtggttatcaactgtgagtggtcctgaccctcacaagtgcagcgagtttaattatatcctgttttaaagccagtttagtcattcaaaatacatttttaaaggcttccaatgtaaagcataaaaagaaaaaaaatcttttaaccataatttagtaattctccagccttgatttttggctttccttgctgcctaagtggtcatatattttataagccttgctaatttgctgttaaatttgctatttatatgatcctagatgatttgttggacttcattgaacaaaaaaagatttttattagcagccagtgctttcaaagaagtggtttttttcacaccatcaaggccactttctcaacttattgacagctttatgagtgtagctggataaagaacagtttcctgtatccaaaagcgttttgcattccatggggcaaaaacttggacttttaattaggatatgagagccttcctttctctcccaacattccccgggggcacagagcagtaacacttgcatttagatagttaatcacttttccagacttcagcccactgaaattaggaaggtttttaggtcaaatgcttacctggctctcagccagcctaggatggtatttatttctgcacatc

SEQ ID NO: 679593 - DNA, 1412 bp, Homo sapiens
gtttccctgcctgcttttttgtttctaatagttattttctttatggaatttttaagagatagggaagatgaaggaaaagagtgagatctttgttttcagttgtcatccttccagattttcttgaaaaaccatctctagaaacaaaagtttgagacgcatagcgagaacttaaaaaaaaagtctagaaatcatcttaaacatgtcaactcttctaagacttatctaaaatagaagcttcaaaaatgttacttattttcccccttttaagttttccgaaaaatgttccagagccgagattgcatatgccaagactttgtgaaaaggacttttattgcaaagttactagctctgagaatttggctttaataaagaatccacataaccttccatgaaatgtcaggaatgtgctattttagtaataaccttacctgtgtcctagggcacaatgaatgagaatctccataacagagaaaaaaataattgagaattggcaggtgaaatcatctagtcatgatattaatgatttcttcaaagaagaagctggctcctgactttatcaaaaactcattaaatgcttgccaattttataaaaggaaatatctattttatttctctaagtatatagagataaggagatttttaaaatatataactgcagaggctgtctctggacaagtttaacaattactagtaaataaccagaagatgatatgctagccatggccagatgtgaacattctgcacacaccccttgtggtgtgcaaatggttggtcattttctggtggttatcaactgtgagtggtcctgaccctcacaagtgcagcgagtttaattatatcctgttttaaagccagtttagtcattcaaaatacatttttaaaggcttccaatgwaaagcataaaaagaaaaaaaatcttttaaccataatttagtaattctccagccttgatttttggctttccttgctgcctaagtggtcatatattttataagccttgctaatttgctgttaaatttgctatttatatgatcctagatgatttgttggacttcattgaacaaaaaaagatttttattagcagccagtgctttcaaagaagtggtttttttcacaccatcaaggccactttctcaacttattgacagctttatgagtgtagctggataaagaacagtttcctgtatccaaaagcgttttgcattccatggggcaaaaacttggacttttaattaggatatgagagccttcctttctctcccaacattccccgggggcacagagcagtaacacttgcatttagatagttaatcacttttccagacttcagcccactgaaattaggaaggtttttaggtcaaatgcttacctggctctcagccagcctaggatggtatttatttctgcacatc

SEQ ID NO: 679594 - DNA, 1412 bp, Homo sapiens
gtttccctgcctgcttttttgtttctaatagttattttctttatggaatttttaagagatagggaagatgaaggaaaagagtgagatctttgttttcagttgtcatccttccagattttcttgaaaaaccatctctagaaacaaaagtttgagacgcatagcgagaacttaaaaaaaaagtctagaaatcatcttaaacatgtcaactcttctaagacttatctaaaatagaagcttcaaaaatgttacttattttcccccttttaagttttccgaaaaatgttccagagccgagattgcatatgccaagactttgtgaaaaggacttttattgcaaagttactagctctgagaatttggctttaataaagaatccacataaccttccatgaaatgtcaggaatgtgctattttagtaataaccttacctgtgtcctagggcacaatgaatgagaatctccataacagagaaaaaaataattgagaattggcaggtgaaatcatctagtcatgatattaatgatttcttcaaagaagaagctggctcctgactttatcaaaaactcattaaatgcttgccaattttataaaaggaaatatctattttatttctctaagtatatagagataaggagatttttaaaatatataactgcagaggctgtctctggacaagtttaacaattactagtaaataaccagaagatgatatgctagccatggccagatgtgaacattctgcacacaccccttgtggtgtgcaaatggttggtcattttctggtggttatcaactgtgagtggtcctgaccctcacaagtgcagcgagtttaattatatcctgttttaaagccagtttagtcattcaaaatacatttttaaaggcttccaatgtaaagcataaaaagaaaaaaaatcttttaaccataatttagtaattctccagccttgatttttggctttccttgctgcctaagtggtcatatattttataagccttgctaatttgctgttaaatttgctatttatatgatcctagatgatttgttggacttcattgaacaaaaaaagatttttattagcagccagtgctttcaaagaagtggtttttttcacaccatcaaggccactttctcaacttattgacagctttatgagtgtagctggataaagaacagtttcctgtatccaaaagcgttttgcattccatggggcaaaaacttggacttttaattaggatatragagccttcctttctctcccaacattccccgggggcacagagcagtaacacttgcatttagatagttaatcacttttccagacttcagcccactgaaattaggaaggtttttaggtcaaatgcttacctggctctcagccagcctaggatggtatttatttctgcacatc

SEQ ID NO: 679595 - DNA, 606 bp, Homo sapiens
tgccattgtgaaagaaaaataaaatctcaggaccccaaactcactatgctgaaaggaaaagttaagcttggaaactgagtctcacacacacacaactgcctttccttttgttcctaaatagatatctccccaggtggcccccagcaccctgtgcatgtatattaacarcttatcttcatgggcgcaggacaagggaagactagaaatcatccccctgcccacacctagaggaatacatctttgacttctgcctctcctttatgtttacttatcttatgtaaaaggcagattcactgagcaccagatgaatacatcattgactattcttctacccccttcttttcatgtgcaaaagaatgtaatcacttgtctcatttatctaccctccctttttttttttctttcctcccttccctcctgctcctttgaatattgaagcactcaaaattcgctctggaaaaagtgcacagattttactgtggcttgtgtctctatttcccgagcatgtcctcatccttggcaaaataaacctctaaatagattgagacccgtctcactcatcatagagggaagcacaggggcactggattcacaaggaaggggtca

SEQ ID NO: 679596 - DNA, 625 bp, Homo sapiens
taaaacaagtcaaatttactagcattttccacaattggcaatggtgatattcttgctggtcttgccattcctggatccaaagtgctccatggtttccacaatattcaygccctcttttatcttcccaaagacaacaggcttgctatgtaaccactcagtcttggccgtgcagatgaaaaactgggaattgtttgtgctgagtcctgcatttaccatgaacatcacgccaggacctgtatgcttcaggatgagattctcatcatcaaatttctctctgtagataagcttgtcaccaacgccataatggcatgaagtcaccaccctagcacgtaaggcctggaataattctgtaaaagtaagaacccatataacaaaatcctctctcgccagctctcaagtacaaaattttctgctgtctgtggaactttgtctgcaaacagctcaaagaagacacagcccaagttgatgatggcatcaaagaacacagtgggattgaccatgacgggtgcaggtggctctgggaggcatccatctgcaaagcaaggaaaatatatgtatacattttaagaagccttgcctaactaaacagttttattgaaaatgctttacaaattgtgtgggctct

SEQ ID NO: 679597 - DNA, 625 bp, Homo sapiens
taaaacaagtcaaatttactagcattttccacaattggcaatggtgatattcttgctggtcttgccattcctggatccaaagtgctccatggtttccacaatattcatgccctcttttatcttcccaaagacaacaggcttgctatgtaaccactcagtcttggccgtgcagatgaaaaactgggaattgtttgtgctgagtcctgcatttaccatgaacatcacgccaggacctgtatgcttcaggatgagattctcatcatcaaatttctctctgtagataagcttgtcaccaacgccataayggcatgaagtcaccaccctagcacgtaaggcctggaataattctgtaaaagtaagaacccatataacaaaatcctctctcgccagctctcaagtacaaaattttctgctgtctgtggaactttgtctgcaaacagctcaaagaagacacagcccaagttgatgatggcatcaaagaacacagtgggattgaccatgacgggtgcaggtggctctgggaggcatccatctgcaaagcaaggaaaatatatgtatacattttaagaagccttgcctaactaaacagttttattgaaaatgctttacaaattgtgtgggctct

SEQ ID NO: 679598 - DNA, 625 bp, Homo sapiens
taaaacaagtcaaatttactagcattttccacaattggcaatggtgatattcttgctggtcttgccattcctggatccaaagtgctccatggtttccacaatattcatgccctcttttatcttcccaaagacaacaggcttgctatgtaaccactcagtcttggccgtgcagatgaaaaactgggaattgtttgtgctgagtcctgcatttaccatgaacatcacgccaggacctgtatgcttcaggatgagattctcatcatcaaatttctctctgtagataagcttgtcaccaacgccataatggcatgaagtcaccaccctagcaygtaaggcctggaataattctgtaaaagtaagaacccatataacaaaatcctctctcgccagctctcaagtacaaaattttctgctgtctgtggaactttgtctgcaaacagctcaaagaagacacagcccaagttgatgatggcatcaaagaacacagtgggattgaccatgacgggtgcaggtggctctgggaggcatccatctgcaaagcaaggaaaatatatgtatacattttaagaagccttgcctaactaaacagttttattgaaaatgctttacaaattgtgtgggctct

SEQ ID NO: 679599 - DNA, 625 bp, Homo sapiens
taaaacaagtcaaatttactagcattttccacaattggcaatggtgatattcttgctggtcttgccattcctggatccaaagtgctccatggtttccacaatattcatgccctcttttatcttcccaaagacaacaggcttgctatgtaaccactcagtcttggccgtgcagatgaaaaactgggaattgtttgtgctgagtcctgcatttaccatgaacatcacgccaggacctgtatgcttcaggatgagattctcatcatcaaatttctctctgtagataagcttgtcaccaacgccataatggcatgaagtcaccaccctagcacgtaaggcctggaataattctgtaaaagtaagaacccatataacaaaatcctctctygccagctctcaagtacaaaattttctgctgtctgtggaactttgtctgcaaacagctcaaagaagacacagcccaagttgatgatggcatcaaagaacacagtgggattgaccatgacgggtgcaggtggctctgggaggcatccatctgcaaagcaaggaaaatatatgtatacattttaagaagccttgcctaactaaacagttttattgaaaatgctttacaaattgtgtgggctct

SEQ ID NO: 679600 - DNA, 1532 bp, Homo sapiens
ttcctcgcttaaaggaagataaatatttaaggtgttaaagcaaattaaatatggcctgagaaggactccatacttctatatatgagtgattgtggacaaaatgtaacccagcttaataggcagacaagattgaaaacctaacttaggagtatgcacctgtaacaatagctgagtcttggccaatcccagtggccacacttcaactactcatggactaagttaaactactcatggactaagttaaacaccaactgtaaccaatccagctgtttctatacctcacttcttatttctgtacctcacttccctttttataaatttgttctgaccacaaggcacccctggagtctctctgaatctgctgtgattctgggggttgcctgattcatgaatcattcattgtttgattaaactcctttaaatttatttccactgaagtttttattttaacaaaggtattggatgtcccaattactgtgatttgactacatgaatgtaccaaattatcacctgtaccccaaaagtatgtatatctaatatacatatcaataaaaataaatttttaaaagaagagaaaaggagtcttattcacccttcataagacaaatggggctgggtcatctggaaagacaataagagaaaagcctctctcaggggatgtattagtctgttctcatgctgctaataaagacatacccaagactgtgtaatttataaaaaaaaaaaaagaggtttaatggactcacagctccacatggctggggaggcctcacaatcatggtggaagagcaaaggacatcttttatggcagcagacaagagagaatgagagagccaagtgaaaagggaaaccccttataaaatcatcagatctcgtgagacttactcaccatcatgagaacagtatgggggaaactgcccccatgattcaattgtctttcactgggtccttcccacaacacatgggaattaggggagctacaattcaagatgacatttgggtggggacagagccaagccatatcaggggaggacaaagccaaaagtttcaaagagtaaaattaataatcccatttgcagaagtaaataacaaagaggagaaggagaaatggtaaagtgctgaattgaagcagaaatcacttttaaaaaaccaaagagccaaagtgagaagtctgtataaacagaatcccagtaattaggagagacaaacggagtggcaggcaggaaggcaatgccatgcayagaccttcgccagaaatgcaaggaggtcagagggctgccacagggttgagagagaatgcacagggaaaggtgagaaataagaaagtaaggacatcagaacagtgtaatcgttctgtttcaggagcaagggaaggctcagagaaagtgggaggcaggctttagaggaagactacagcatcattccagaatgggccaagctataaacttaagaaagcactccccagggagtcagagtctggcaatcaaggtctctatatggcctcaagaccaagaaaacctcagattgctgtc

SEQ ID NO: 679601 - DNA, 626 bp, Homo sapiens
caattttactgggtcagctccaagcctttcgtaagcctgcaaaggaaaataaaacttctgaaacattccattaggcttgacctttgaaccagtttctcagaaacaagaaaggaaatgaagagtttcagctctccttaaacaccagttcaggcaaagaggrttcattcttgcactacagactttgatttccatttaaggctttcactctttagacaaaaaaaaaaaaaggataatgcattaagttgaaagctggaaaaattaaacttggccttcagttttctgagaaatcagcactcagttcttagtaaatttcagaagcaaacttagccaccaaacaaatggtttctttcaattaatacacagcaaataaggatgtctggagttgcttttaaacaatgggccaactatacactttcccatcctgttaccctctccacgttcaatggcacactgtggtggaggtggcaggctgccctcggctgagaagacaggcatttcatcttttccagaaagccagaattctgctctgccaataacctgatgtgcccccgaccttgttaggatagacaccattcagtttcatcgttattattagacaaagagaagccaagggaaatagtctcaaa

SEQ ID NO: 679602 - DNA, 623 bp, Homo sapiens
ttgtatatccaattaaagaagttgattgaaaaatgccagttcatgtttatgtttgtatttaaaaaaatcttagacttgtatatacatttaaaaaaccataaaatgctagaaggacatacatatgaaatgtatgcattaatgtatattaaatgtatgtccttctggcattttatggttttgtaaatgtrtacacaaatctaagtgatggcaatgacatttgttcagacccctccaataaggtatttgtataaaggtactgtaattttcatacttactatgataaggataaggttaagcgagtcaaaggtcactttataaaaaatctagctgcttttttacaataatttaaagctctcctggaaacactatacaaggtttaaacaatgagtatttaaacaatgagcccctctatgatggactgggaagcaccatgtgtcaagaggagcatggcaatgctattaaccatagaagcatcaataaaatatgtgtatgttgccaatgaggaccacatttgggttggttcgtttctctaagatatctgtctagccgattcattgtctcaggacattttgttgcccaggatgcagttttctctttcaaatacacatccctgatttttactg

SEQ ID NO: 679603 - DNA, 665 bp, Homo sapiens
ggtaaacgaactcagggtttccactgattctacattatggtgaatatgtaataataataatagaaataaagtacacaatacatgtaatgcactcgaatcacccctaaaccatccctctatacccaacccactgcctgtccatggaaaaaattgtcttccatgaaaccagtccctgctgtgaaaaaggttggggaccactgaactagaggacaagatgccttcttaatgcaggccaaataagtcagtttcttaaagcatattaaattataagcaatgtgggagagtgcatctaaagtaggaattagaaaatatcaaacacaaaaatctagggcaagctttgcattcccttttttatcttctttatactcattcacccctcaatgcattgacagtggagcgtgaggaattattcagtcagttgattacaaactggaatacagaatggaagtctggtgagaagagccatcagaaaaatctcactttattgattgtatttttttgctgtgcagaggctatttattacattgatgcaaaagtcatctaggtttttgccgttactttcratggtaaaaaccgcgataacttttgcaccaacccaataacttgatgtaatcccatttattcaggtttgttttggttgcctgtgcttgtagggtattgttcaa

SEQ ID NO: 679604 - DNA, 589 bp, Homo sapiens
cgtcagcctcctgagtagctggaattacagatgcccaacaccatgcccggctaatttttgtatttttagtagagacagggtttcgccatgttggccaggctggtctcgaactcctgacctcaggtgatccgcccactgtggcctcccaaagtgctgggattacaggcgtgagccaccatgcccaacctatatgacttatttgtaaatgtcctccrtttaaatgtggccctgattttcaaaatagtgtcagctgatcacttgctctgttctacttgaatctttggaggtttctccatagtttggtataaagttcaactcctgagttttgtacccaaggcccttcaagatacgtctccaatccaggtctacagccttcaatatatgaatctgttattccagccacatcagaatatttgcagttctaggactacacaggatgttttactgtacagtcctatacagtaataatgtcttctattctacccctagttgttacctcttttaggaatcacctttcaactttttacttctgttaaccataattaactaattattaaagtgccacatcccagcagaaatcttctggact

SEQ ID NO: 679605 - DNA, 1186 bp, Homo sapiens
gcccacctcggcctcccaatgtgctggggaactattttctgttatctgttctggactcacacattctggatgactggaattctttggacccatatgagcctctgcaaagacattggtatgtgctggtcatattcaaatgtgagattcataagaatagaataatttgtgtatggaattacctgtcctgggttacctaatccagagatccagcaatttttcttaattcctgaatttccaggcattgtaaagcatacttcactgtgcttggcacagattaattagtctatatattatatataggtacaaaaagtataagcttattctctcctattctaatagaaatgaggcatttttaacttgcttggaaatagcaattcataccattgcatagtggttatttgcaaatcttcctaataaactccaggaataaattttaggtaaatgtatgatgcctacaaatatagtaattgtcatagagaatgctagatttcaagtgacagaaacttttacttcaatacagcttaatcaaaataataaatttattagtccgtttagttaggacactaggatggttcacaggatcaaaagatgaaccacagacatcagggtctcaaagtttggaactgctctcaatgtctgctatgattcacttgtattcatctttcttacctccttccatccatctatgcatctatccaccctgctcacatctctgcttttatatacttggctttgctctacagaaggacttctccatgtgatgaggctaccaatacctttaaattcatttttggcccagcaagcccaaagaaataacttctctttcccaaaatctggccatcattcaagggaaggattatgacaggcattgttagggtcacatgtacacccccaagaccaatcagagcagaagagtataggatactatgatkggctatgtctgcctacctctctggagagggcagtgggttcttaccagaaggagaataggggagggacaagggagagggaattacactggatagccaaaagaaatattttaatagattgtttaaaagggttaggagcagttaaagagtatttttaattgaaaacacaaacttgaatccaagcaagatgaataggtttgagaaaatgatctactaaattcattatatatgcatatgagaagacattttctcatgtt

SEQ ID NO: 679606 - DNA, 1686 bp, Homo sapiens
gctagaggtttattttaaaatacycaaacacaaaaagaaaagtgaagggagagagaaaggtggtaggtaaagacaagaacagcaaaattttgataatcactgaagctaggtgataggtatttggggattcattattttattatcttaattgttttctgtttgacaatttccataataaaactttttgttttgagacaaagtctcactctatcgccctggctggagtgcagtggcacgatcacagctcactgcagcattgaactcctgggctcatgcgatcctcctgctttagcctcctgagtagctaggactacagatgttcactgccatacctggctaattttttacatttcgtagttatgggatcttgatatgttgaccaggctggtcttgaacttctggcctcaagtgatcctcctcccttggcctcccaagaaaataaaaacttttaaagagagacaaggatatgatcaggaacctatatcttaaaaaaaaaaataagatgattattcaaccatttaaactagtaaggtgatttttttcttgtggcagaggctaggcagctgtgcctccaaaattcatttgaaaactttttggttcagtgattattcagcaaaccagatgatctatgatatggcaggtcaaggagaacagaaagaggtgaaatgccatagtttcaatgcagttcagtcctgcagacccactctggaccaggatgggggaagagccttgcaggtgtcttcttaaacctgactcaatttactgtgtattctgtgcaaacttcagagggagaacactgtgcttttcttcccttttatccaggttctcattgtcgttttattacctcctgctcataatatgtagagacaaatgccttgggaagggtagtaacaaggctgtaaatccagtggaggaaaggactgttcactgttttgaacagtgaacaatatgcctactgccattactggcagataaaatacattaaataaatattgtatgaaggaatgaatgaacaaatccatatttgctgcttgccacatagaagataaataaatactgtctacattgaattgaattgtgagtgacaaaattgaaaaaataactttagagtttatgttggaccatttaatgtcgaacctcttcaaagtcttttggagatgtccagatggacaaaatcagccaatatgatgttcatgaccaggcaagggaagccaaaatgaagggcagctttatttaaaatgaatagaacaagatatagttacattcatgccactgttcttttaaaatatatccatagaaatgattagtcctttaaaagtcttcatgccacagttctgcaaagaaatcaggagactttgtaaatatcctgtccgcaaaaagttagaatgacaagcacccttaaataaacaggaataattaatcataggtgtggttgttttgatgagcatgcaagagtgacaagttaataaataagcagttcatacagggaaagtggctaaggaggtgctgtggtttaatttacatctttggaaggtagcaaagatttaataatctccctgcctcatacatcaaacgaatacccctgaggcagaaaagcaaaacgtttttaactgttaatctgagaagcaataaaatcctgcctcaggtcacaaataaattgagtttctagtggtctcgatggatccc

SEQ ID NO: 679607 - DNA, 1561 bp, Homo sapiens
cccagcactttgggaggctgaggctgatggttcacctgaggtcaggagttcgagaccagcctgaccaatatggtgaaaccccgtctctactaaaaatacaaaaattagccgggcatgatggcgtgtgcctgtagtctcagctactccggaggctgagacaggagaattgcttgagcccaggaggcggagactgtggtgagctgagatcgtgtcactgcgttccagcctgggtaacagagcgagactcggtctaaaaaaaaaaaaaaaaaagaaatcaggttttgtctactaaacctgctgcacggttaccgttactagtactcacagggtttgttgcacatgcatcgttgctaatagtgctaactaatattaacagcccttgccctatgcctggccctgtcccagcccccctcccttgtataatttaacccttgcactgggggtagagattttcatatctactgatttcttacctttgctcatttatcatggagtgtcctttggttttctgtgtttgtatatacctttaccacttatagatttgaccagcactcaagaaccagtgttactcctgggagttaatacaatcccagccccatggcaaagaaactcatgtggttaggattctgtgtgcagcctggttagccacagggcacgtaaggctttttataatattgacatgagtgcagaagccccattcccgtgtaagccctgagggctcttgtttcataatctttttttggtcacatgcacacagctttattgagatataacccactcatttaaagcatacaaatcagtgggttttagtgtcctatattcacagagctgtgcagccatcatcacaaatgtggaagttttcatttccccaaaaagaaacccgtacccattggcagtcactcctcatcttcgcccccagcccttggccaccgtttatctacacatacttttgaaaggctagtgaaactttctcagaaaaataaatgcttgctcaaacatttgggctataatttcaggggcttcatgggtgcccccctgacatttatcaagaacaccaggttaaggaatttagctataatggaggcctctgtgtttcccagtctcctgggtatcagaggcccagagagggcaggtgccttaccctgggccacgcagtgaaccagtggcagcaccatactcacacatctcctttctgcggttccccagtgacagagttctcaggaagctttttcatttattttctgagaggagggtaggccaycttgtattgatctccaactatatgccagccacaattctaggtgcttatcataaaggttcatttaatcttcacaatagtcctgcagagtggacagagtccttcagagtgggcattataatcaccattttaaagatggagaagctgaaaaccagagaggttaagtaactcacccaagactgcacagcaaaaggctggggctttgaaactcagggccacagactccaaagactatgtcctccccactatgctagatttttttcctaacctgtgaataggagacaaaatagtccttttatttct

SEQ ID NO: 679608 - DNA, 657 bp, Homo sapiens
gagtgtgccgggtccgacacactgagagagtggcccgggctgcttggaaccggtgggaagtggctgtggcgggactcaggcctccccgcagtcagctccacatctgtgccccgagttcttgcctagctcgacctcagtccsgttcagccataagatggaggctgcgctgacacccggtccccgggcgtcctgtctcttccctgcgctgtgattgtgccctggcctggagccctcttggggccgctctgcacccgcagcgcggagtctctcccagatgtgcagggaccatgagagggtcgtgagaggagaatcctgacttggggtgtgggttcatgaatgggaagagctttggtccgtgaggctcccagttcctgttttctcctattaaaaatttatggaagtcacctcaaaaatattaaagaatttaatcaaagagtgattccaaaattgtagagcacccagctatgggttgtagttaatggtctattgaaggggtttgacggaaagagttttataaggtgcataacgaggaaaaccacattcaataattggttaggtacagttacgtagtttcttgttttgttttatttatttatttatttttgagacggagtcttccctctgtcgcccaggctggagtgctgtggcacgatcttg

SEQ ID NO: 679609 - DNA, 670 bp, Homo sapiens
acaaattactccataatctatacttactactaaaaaaaaaaaaaaagtttgtttctctagctggtggatctgtagatcaggtggaatgactcttcctaaggctttcagtttgggccaggtctgcttcgtgtgtcttcatgaatatgagatcagtggttgctgtagaacatgcttcttactgatgattataggcgagcaggagataatccaaagcaggaagcattttaaaaacctctgcctgcatcatgtaaactggccaaacccaattcaatggggtggaaatacatgttcctcttagagagggaaactttgcaaatgtgtaagctgaaatattttaaatgtgtagatatatcatatggagtaatatttagaataacaattcaaggactgggcgcrgtggctcacgcctgtattcccagcactttgggaggccgaggcgggcagatgacgaggtcaggagatcgagaccatcctggctaactcggtgaaaccccgtctctattaaaaaaattagccaggcatggtggcgggtgcctgtagtcccagctacttgggaggctgaggcaggagaatggtgtgaacccaggaggcggagcttgaagtgagccgagatcgcgccactgcactctagcctgggcaacagagcgagactctgtctcaaaaaaaaaaa

SEQ ID NO: 679610 - DNA, 646 bp, Homo sapiens
tatggacttaaggtgataacgatgtgtcagtgagttcatttgtaacacatgtaccccttcgctgagagatgttgatagtgggggaaggaaatgtctggcggggttggggggtatggagtgagtatatgggccatctcatactttctgcccagtttttctgtgaatttaagacaactctaaaaaataaattccataaaatcttaaaaagtaattgtagcaattttatgaactagtctttatcagttaatccttaggaaactgaaccagatagataatatgttaatcataggaacagttttttttttttttcttctgagtgtggtccaaggtaaaacaatatcagtttaactttctacacagaattgagcttttcaactgcagaagtatattttcaggctgggagcggtggctcacgcctgtaatctcagcactttgggaggccgaggcgatggatcacggggtcaggagatcgagaccatcctggctaacacggtgaaacccgtctctactaaaaatacaaaaaattagccgggcgaggtggtgggcgcctgtagtcccagctactcaggaggctgaggcaggagaatgatgtgaacccggggggcrgagcctgcagtgagccgagatcgcaccactgcactccagc

SEQ ID NO: 679611 - DNA, 625 bp, Homo sapiens
taagtcttcaaaacacacacacacacacacatcccaactttcatcyacattaaaggtacaaaaagctggaaaatataaatgagtaaaaaggacagaatcaaccctggtcacttcaattactccagtgagatcactttttgttatactttttgtttatggttgtatagggaaagctttctggataaaccaactcactggattaaaaattcatgggaggccagacgtggtggctcattcctgtaatcccagcgacttgagaggccaaggtaggaggattgcttgaggccaagagttcagaagcagcctgggcaacttggcaagaccccgtctctaccaaaaaaaaaaaaaaaaaaatccctggaattggctcactagcttaacaaatgctcgctttgcctgctataaaatctagaacaatgtgaggcccacagcagctggtgggttcatttctagtgtgacaagccactaactcctgttgagtgaagatgtgaccatgtggttatcaagagtcaggggggttggttctcccatcagttactcctttttttgagacggagtctcactccgttgccaagggtggagtacagtggcataatctcggctcactgcaaccttcacctcccag

SEQ ID NO: 679612 - DNA, 615 bp, Homo sapiens
tatactgcctttaaatcttgttgacaaataaaccttaaaaatattttatcagcccaacagacaactttaagcttcattgaatctggggtctttcaactttcaatctccattgtagtagtatcaaatatttttaaatctccattgtatttatatcaaatgtttttgagatggaatataatgacagtgagagaaaacttacaactttttctcagtaacttaaatctcatggaagattgttgaaaatcaataagaatctacaataaatagtttcagtacaaagcaaacttaatcagcaatactgtataaatatacccaatatgttttgaactaatgagattcagaaatagtgtttgtaaatgctttatttcttcccctttgattaagatacaggagcccmccaatagtagctcttgttcatagcagttacctggggaacacatctttcaagatcaaatgcaggaccacttcacatacatctggggacagagatcagaaatctatgcttccacacttgtgattaactgccatgtcttggatatttcttaatgggttaagacacggagtcagaaaaataaaactgaattatctatcaggaacagaaatcagatttccagg

SEQ ID NO: 679613 - DNA, 922 bp, Homo sapiens
tagacacttgaatgtggtttcaatgtaagcactctcttagcagactcactcttcaaagtccaaaatgaaagaaaaattatatgctcagcagtttatttaattaaaaggaatggaactacagagtgataagtatagaaaagttcagcatgtcttttcaaaggactgtaaaaaaaacttccaacactttacttatattcttgcccttgtgactaagttatggacawtgaaacaccttgagttatgatacaaatccttaaacctaaaatgccatatgttaaaactcaaattatgttaaagcccataactattttaaaaccctgtgtataatgtgatctactgcattcacagtacttaaagtactttcatttttgaacttttataatttctgcaagagaaaacaatgccaagagacatccctacagtaattaatgtaagataacagctttgaatttacagttattggtaatttaattagtcttgaacatagccactataagacttgataactactaaacaattattaatgaataaaaggctggcccccagattcttttatgccagacccatggaaatagtatgtgccagataaatagattctcaataaatatttattgaggtcgaattgaccccatgactggttagatgcagaattttagttcacatcatatagacattctgaaactgaatttaacacaagcataatatcagcataatattatactgaattgtacagacagaaccatgagtcactttctgctccaaatcaatgaaatgttgaagtagaaggaacagcataagaattctccattatgtagctaagtttgaaacaatggtagagaaatctccaggtcccaaaaaatgaaaaagaaattcgatatctgggtggtagaaggaactgaattttaaaaaaaattagaaatat

SEQ ID NO: 679614 - DNA, 2220 bp, Homo sapiens
cataatgctctctgtggattgctatgattatgatgccagacttcttggctgcttctgaatagctcaagacttctgcaccactgggcagtagggtggtcttctgggggtttcgacttccaaaaacaacagaataaccacactggagcattttcaatcccagtgatcttccaaaatcaccagttccaaaaatacatacagtctcttgcttttctgaagaattcatagtaagaggaagtgcatctatacaagttttctccataactgaaaaataataacacaaatgcccaacaaaatataaatgctctgtgcctggaaaattaaagagagctatattcaagaagtaatgtaattgacttgttgtaatctaattatcttaactatatttacccccaaatttggaaggagtaaaaattgtcatatatatttccccccaaatttggaaggagtaaaaattgtcatatatcttttcatatgtgtcttatttaacaaaatcactggtgaaaagcttctgtttgataaaaggatacagggcaaaatctgacaaaaaatatgctccaataaattatagataaattcacttgtttagtgataccaaaaaaaactaaataaaacattagcaaacacaatccagcagcttgttaatagaaggtttatgttgatcaaatggggattattctacaaatgtgaagattagttctataaattcaatttttgaaacttcattaatataacttaaaagattaaaatttaattttatattaaaagatttaaggaaaaagtctgtcatatctgtgtatgttaaaaggacatctgttaaaattcaacatttattcttgattcatagtgaaagagaaatacatagatatttccttaacatataaaaattattgatcttaacctaaaattcagcattatgcctaaaaacattagtagaaacatttccaacaaagtcaggaaccagacaaatacatctgctatgaccactttagttattgttctgaaagctctaacataactagatcagagaaagaaatcagaggtacagaaattcaaaagggattccagatgatcgaactagatcaaactttaaaaactgggaaaatcaaccaaaaaagtatcatacatacaaaaataattcaacatctaggctgggaactcgattaaaataaatattcttcatatattaaaaaagaaaccagtaagaagatttaatacatgaaaggatcctacttatagctgcaacaaaataaagacaatatgtaacaagatagcaagatatgtgcaacatatgtatgaaaaatattttaaatgctcttaagaatcaggagaagagaacttatataaaagaaaatgtacagcatgttcttggatggcaaggctcacacaacgtcagttttccctaattctataaattctgaaaagtaggttaataaatgggatgctagtcatattaaatattaaaatttttataaagctaaaataattaaataatgtggtactatcaaagaaatggataaagttctggccaggcacagtggcttatgcctgtaatcccagcactttgggaggccaaggcaggtggatcacttgaggccaggagtttgaaaccagcctggccaacatagtgaaatcccatctctactaaaaatacaaaaattagctgggtgtgttgacacgcgcctgtaatctcagctactcaggaggccacagcactccagcctgggcgacagagagagactttgtctcaaaaaaaaaaaaaaaaaagaaagaaagaaaagaaaaaagaaaagtagaaaaattttaatgaataagttttaaaaaaattcagaaatggacccaaacacatatgataaawatagcatctcaggtcaatgagaaaacagattatttaatagctaatgttgtaatgacccaacaggtttgccttgcctgctacctagacagagctgatttcttcatatgaaagaacatttcagctctttatgagagtcccgaaagttttttcctttattttaatgtcataatctccaaggttatcagaaacttgcattcaagagcacctgtcaaagttttatagctgattataaaaccatctcctaaagaggaccaaatcaagacaacaattgtctgcagatgacagaaatgttttagggaagccgcagtcaaagaaattgacaaggaaatttgttacctctgtggcacacaaaaattcaacataac

SEQ ID NO: 679615 - DNA, 1194 bp, Homo sapiens
aatccagcactttggggggccaaggtgggaggatcgcttgagcccaggagttggagaccaacctgggcaacacagcaagacttcatttttactaaaaataaataaatatataaataaaaaatagccaggcatggtggcaaacgcctgtagtcccagctacttgagaggctgagttgggaggatcccttgagcccagtagttccaggttactgtaagctatgatctcgccactgcgcttcagcctgggcarcagagcaagactgtctcagaaaaaaaaattgttaagaagataaagttatgttatgtgtttttaccacattaaataacaataacaaaaaagaatgagcatctggcctaattctgacgagtaaaattggaagggaagtcagttgggggctaggaaatctttgcttgctcataagaaagtgattttagaaatgattgcctggaaccgttacatgtattttcttaccagtccgaggatgaacacacaagagattcacaggaacaaaccagaccactgacttgctgcactgaagttgcaatacttctgagacgtagatctccttattaatctagctcagtgttttgttacctgcagcacagaaacactttccctgaaaaacagatacaacttttaaagcataatttttattctttaggtattctggtaagtgatctaaactatatgtctatttaaaaaataaacctacattagacctaggattaatttatgaattgggattacttattttaaaaatatagggagaacatttaaagtcaggtttattgaggtataatttatattcagcaatcctcctttaaatatacagtttgattttggcaaatgcatatttctttatggattagtctttatgcttatttaccaagtaaataattatgaagaaactatcataactgcagttttaatttaaggaaagttctctccaaatggggtaaactcttttaaaataggtggcaccagtttaatttctaaaggagctgtgaagacatctgtagacatagagataagagttctatttagatcagtatttttttttttagagacggagtctcgctctgttgcccaggctggagtgcagtggtacgaacttggctcattgctacctccacctcccgggttcaagcgatgctcctgcctcagcctccagagttgctgggattacaggcacc

SEQ ID NO: 679616 - DNA, 2847 bp, Homo sapiens
tgaccattacatcgcacaaataagaaggtaagttaaatgtgtttttatttaaaaagtaaaaaaccaagagaaaaagttttagaatcaggacagtcacatcattaagtgttatatatttgctagaggtgagccacaaatttaatgctgagctttctaacagctcgtatgaagagaaaatcataattaaattacaaggttcattgtgtaagatgaaaggaagtaagttgctcacaaacagaactattcctaacagtgaaatctgagttatatttttaccccaatgggatcttaggtagcaaacactggaaaagatactgaacgacatccctaaaacattgttaaataaagtagccaattaagtatttttaaaactatagtgctcctaaatttaggctactgatattaagcaattttatatagatccattataatggtggtagagttatgaggctatcagcaataaccctgtacttaattaatcaaagttagattttagaggatttaatgaagtgtgtatcctgcatgcaatcctccataatcactctgggacaagcttttgataggtattgagcaaaagtgagctggatctcatgattcctcataagttgcagtagttcatttcttctaggccagtggttctcaaacttgagcatgcatcagaattacctgcagggtaattgctgagctccaaccccagggtttctgattcagtaggtctagggagtggcctgagaatgtgcatttctaacaagttcccggtgatgctgttgctgctggtccaggactcacacttttgagaatcgctcttctaggtcatcagttaagtatagatccaaagactttaacaaataacctgggtgtaagagacaacatcctcctgaggaaagaaagatgcccaacaaggacagtgaaaatgaaacaaagccaaccacccaacatgaaatcatcctgacatatacccccaaaaaaattatttgcaaagtatgcctataaaattaaataagatgctgctgaatagcttataatttctaaccagttaaaaatgtggattattaactaaaatstttcttttggtataagaatatttttctgttattaattagatagttacctattaagataacttatagtttgtgataatatgatgccatcctcatataaacagactgttaatattctgttcccagttactaaatgttgcttcagtgttgttcctcaatctgaccttatatggctctttaaagttaatagtttcctattttccagtgtttgtattgcacttaaccaggctgtattgtatttactttttccatatatattttacttagatgattacctttctaaacaaggaaggactgcattttcctttgcaattcctctgcctagaataggtagtcaataaatatttattaaaatgatctgaacaagaggtgcaaatgtttttaagtatattaagtaagtccaaaccattgtggagctcatctaaggatagaaactaaacacagtaaatgaaatgtttacacttcctgatggttatttttaaatttataaacataagttatatttgcagtcttttcctcccattattaaaaacaaagctaagtgaaaccaaatttaagaaagaaaacctctatattaactaagcaacggattctgagaggtggtaattaagatttataatcattttataagtcaaaaacatttcggtatcatagataatagtggatgtttcagagaataaaatacaggacttggggacaaatagataaaaattcaagtcaacctgtagtcattcagtttctgtaggcttgtattgtacagtgctgagttttttaatctgaatctcatcatctataagtggagataatattgtctccatcttattccaaaggatcattcttaggataatatgaaatgatgaacataaatgtcatttgaacactataaaattgttctcttacctttagaagaaaatatactttaaagcatgtggtcttcagtaaaatatatgaatacctcttggtcactattaaactatctaaatgcaacttttatttatttatttatttatttatttatttatttatttatttacttatttattttttagatggaggcttgctctttcacccaggctagatagagtgcagtggcacggtctcagctcactgcaatctctgcctcctgggttcaagtgattctcctgcctcagcctccatagtagctgggattacagatgtgcaccaccacacctggctaattttttgtatttttagtagaaatgggtttttgccatgttggccagtatggtctcaaagtcctgacctcaggtgatcctggtgcctcggcctctcaaagtgctcagattacaagcgtgagccagcatgcctggcccaaatgcaacttttaaaagtgacctttatgtattttcttaaatatatgtattcgaccccaaaattttaaaaataactttctccagtcttagaataaaatgtaaacacaataggaaagatgaaagctgttattgggcacacaattaatttagcaaaatttaaactctgctactgtgctactagcaacattattttactatgagtgtgtcagtagtctagattacatcactgtcaatacataattattttgtacagtttgaaatttacctatcaactttgaactcatagactgagtaagccattgactttctttgatccattgagttctgctagattccaaggtatttaaataagtattactacctatatacaactttgcaccacctccaatacatatgaacatgtgtaacttgagtgtgcttagtacagcaaattaacaaatatttagtaagtc

SEQ ID NO: 679617 - DNA, 620 bp, Homo sapiens
tgtaatcccagctacttgggaagctgaagtaggaagattgcttgagcctaggatttgggaggccagcctggacaacacatcaaggctttatctcataaacatacaaacaagaaacagagaaagaaatactggttcaacagtatcatagtctgaatttgaagcaaaaattgtggtggtactgaactgcaacttaggagtaatttcaaggcagtttcttttcaaattatgttatgaatattctaagtatcaatactttaagtttttataaagttctactttttatcactttgggcaaaatgtcttaaactttactttgttattgcaacatcaatttggtaaaatatgtatatctcttgacatttaaaaaaaagtaataattaaaaagytacctctaattgtctaaaaataatcctctggtattcagaaatatgttaattcaaaaaccctcattctgacagcatagaaagaagaactgttgacattagaattatagaacaagttttctgtgaattaaagacaaataataatatttaattctattagataatttcttcttatggtaacatcctgtcagaaaagactacttttacaatctccatttcttcacaaaaagaaaaaaa

SEQ ID NO: 679618 - DNA, 1166 bp, Homo sapiens
cacacatctgacatcacatcattacaatgcagaagagccagtttccaagcatgggtctatctgatacaggagcccatgatcttgacactgagaccacggacctttatatgtaccacacactcttagtaatacagaggaagtggatatcaacaagcatggttcctgctcttaaggtgattgtgatctagagtggcagtctgaattgcctcaaattctttttggaatgaggtattaggaaggcttcctggagagggaggtgaagattatgactgtgataaaagcaacatgtaatgtttattatttacaatgtgcctgatactgtgcaaagcatgctgcagacattatctcttttaatctaaataactccatgtgattatgtgatagacactgcaggactgaattatgcaccgccccccccatcctacagtagttatggtcaagtcataatccccagtacctgtgaatgtgactttatttagaaagagggtcttcrcagatgtaattaagttggaaattttgagatgatttcatcctaggtttagggtggacactaaatccaatgattagttgtccttaaaagagaaaggaaagggttatttgacacacagagacaaagaggggaaggccatgtgcagttggagggagagattggagttttactgccgcaaccaaggaatgtcaggtgccactagaaactggaagaggtaagaaagaattccctagaaacttcagagggactctgctgggcacattaattgtgagcttctggcctccagggggaaaaaaaaatacatacatatatatatatatatgtatgtatgtatatgtgtgtatatatacatatgcatgcatgcatgtatgtatgtatatgccaccaagtctgtgtgaatttgtgatggcagctgcagaaaacaattattaccttacccagggaagtttcattagttgtccatggtggcatacctggtgagtgctagagctttgaattgaagctagagctttgatagggtagtctactttagactggtagagcagggtttgggttccagatatggtggaacctgattaacaaaatgttttgggcagagtcccactgggcagctctgcttgtcaattctaagtgagcatttgtgcttattcctcagaggccttgttcccgccacaaa

SEQ ID NO: 679619 - DNA, 636 bp, Homo sapiens
tggcttgaggatctggattatttcccatgttaggaaggcccactctagaacagacaaatgggcatgcctttccagcagctcatgcatgtgtgtggcaggactcgtctatgattttggttcattttcttcaccgcgactctaagagctatgtgtttttattattttctaccttgcagatgaggaaacagaggcacagcctggttatttgctttgtctgaggttacacagcttgtgtgtaaaaattaagtctatgtttcaagaatgtactggcctattggaacaggaagcagcaagacaccattgaaagactcatgaaaggctggggagcttcctcttttctggaagattaaaaccgaaagtctcaaccactggtatctcagtttccctgatggcaaaatagatatagttgtattggtttctgccagtgccacagggatatttaacacttcgttatgttatactctagaatctattttcttatttgttcatgtgagttgtttataagattataaaaataaacctgtattttttatatcagaaaaattaaaagttactaaaaactgttagtttttggtaacatcagttttcattattgggatayacccaatgataataactacagctggcacttactat

SEQ ID NO: 679620 - DNA, 1439 bp, Homo sapiens
tgctagaattaacaggtgtgagccaccgcgcccagcccccattctctattctctctctctctctcttttttttttttttttttgagacagagtcttactctgttgcccaggctggagtgcagtggcacaatctcagctcactgcaacctccgcctcccgggttcaagcaattctcctgcctcagcctcccaagtagctgggattacaaccaggctgggagattcagcttgtccatttcatgttctgtttctcacaatcatctgtgtttgcttgtcactgcactttaaagagaaggcataactcaaaagtttcacccttcaacttgatggagaattattttttatttatttatttatttatttatttatttttatttttttgaaacagggtttttctctgttgcccaggctggattgccgtggtgcaatctcggctcactgcagcctcaacttcctgggctcggtcgatcctcctgcctcaggatctactccctcctgagtagctgggactacaggtacatgccatcatgcccggctaatttttttttcttttgtagagatgaggtttcgtcatgttgcccaggctggtcttggactcctgggatcaagcgatctgccagcctcagcctcccaaagtgctggaattacaggcatgagccactgcacccagccattctatatttttaaagcatagaatattgattctttgagctggattaatgaggaaagatataacaatcattaatataaaataaagaattgtgaaacctcattaatttgcatgccactaacctaaaattgtaataacccagggcttagtaagcaaattagtcatataaacagcataactatagggatatttaaactgtttaccaaaagaagctgcttttaaagcctgctgaagtacttatttattactaataatgtctaatattattgacacttataatgttgctggcactcttcattgtcttatttaatttccatagcaactctaagagctaggtattatcactcccatttttgaaataaagaaattgaggccaggcgcagtggctcatgcctgtaatcccagcactttgggaggccgaggtgggtggatcacgaggtcgagagatcgagatcaccctgaccaacatggtgaaaccccatctctactaaaaatacaaaaaaagccaggcatggtggcaggcacctgtaatcccagctacttgggaggctgaggcaggagaatcacttgaacccaggaggcggaagttgcagtgagccaagatcgtggcattgcactccagcctgggcaaaaagagtgaaactgtgtctcaaaaaaaaaaaaaaaaraagaaattgaagctcagagaagttaaggaactcactgggtgcagtggctcacgcctgtaatcccagcactttggcaggccgaggtgggtggctcacttgagg

SEQ ID NO: 679621 - DNA, 1134 bp, Homo sapiens
catgcccttggtgctcatatacaaagtgggtacccataacattgcgatccagctaatgcaaagtgaaataacaagtgcccaaagataataagattcaaaagaaaaatgttaaacaattcaaagtatttcattttttggaagacaatttaaaaagttccaaaaatatattcaacgttcaaaaattaaattgaggatgagacatattgttccttaggtgtgcaagaatttacagataattcccattaacaaaaagaagaatcaagagctcaaatgactaagcatggctagaataaggtgtacctgcatgaaagtacatataagatatgactttttctccttttattaatgactgtaattaaaaactatcttattttatagcctctgctaacagtcatttgttattacyaacaaatagttataactatattgacaatttactaatagtttcactattaataatacgtgttaatgtgaatatagttttaatgaattctggaagttaaaaagcaatctatataaatgaataattcagctatttctcaatctaagtaaatggatcaaaacactgaccataggccatcaagaccccaaagttatatgcttaaaaattctgagtttatcagcttctggtaaaatggaaacataaataaataaatttccctgctgtctttcctatctttacctcttatagctaaaggaaatacaatttaaaaattaagatactttttgagaattttttaatcactgagttttaaggtctttttagtatactaaatgtttgttcaatctttaaactttttaataaatccagaatagcagatttgcctactaggggatgaagtctttaaaaaaaattctgcattttgctgtgagttcttcctaaaaacacaggcaaccaggaaagtcaatttgtttgtttgcttacctaggagttaagcctagaactaagtcatactatggcagaaaatcccaatttacaattggagctgcagagttaaaaatacccagcattatacagaaaaactttcctacattgtgtttgaagctgtgtgacagatatatacaagtactgagtgtttctcaatcaccacctgctccgcacccacctgagttctgacacaataagcaaacagg

SEQ ID NO: 679622 - DNA, 1566 bp, Homo sapiens
aagaacaactatttattgagtcactattacatgcaaggcatttttatactttggctcattctttatccctattacatctcaataaagaatataatatccccatttaaaaaataaggatgacattttcaaactttaaataaattgcccaagaatttacatttgttattgtaagagccagcatttcaacctgtaactgtttccaaagcccaygctccataccttgtaccatgctgctgcctgctgggcagtgctcattcattctgttcatctgttcatccgtttttagacaaatgtttattatgatcaatcacgtcagatgcttgtcacttgagtgtatagttttggacaaaacataagggtggaggtatatctatatgtagatacatatagatatatatgtacacatagatatagttccacctttatgatcatacatttgtttataaaagtagaaagtattgtaagacagaatgatagaggtggagaggctgcttttactgggggctcagggaaggcctcccagaggaagtaacgtttatttctgaaggataagtaggacttagctatgtaaagagtgtttggagaaaacaggaatgtgtgagatgaaagaattcagggattccaggtagtgagtgaatttctgtggctgcagggtaatgagcaaggggaaaggtagcaagaaatgaatctagagaggtgggaaagactgaatcacgcagagttttgtagaccactgtgtgtggaatttggggattataatctgtgtgcaacaagaagccattggaagatttcaagcagataactgatgtgatgacaaaagactcagagttacgtgaacagacctgagatatgatttgaagctggaatcattggctcctggagatggactggttatgggcaataataaagaggaaaggatcaagcataactagcaggtttcctaacagtacagaactagtatgcaaaacttctaacaagcacagtgtggttggagtttgaaagtaaccatgtgtgaggagaagagtaaaactaaatcatcagtgtcagcccagtattgcccaaattccaaaactacactaaggcattacaataaaagaaaaatactgggcagtccccccttgtaaacattgttggtaaactcctccagaaaatgttggcaaattgaatccaaccatatataaaaagcacaatgtatcatgaccaagtggaatgtatgccaagaatcaaattggtttaacattcaaaaatcacgaagtgtaattaatcagttaacagaataaaagaaaaaaaagctcatatggtcatttcagttgatgcaaagaacttgaaaaatttcaacaaatgagttaaaaaaaaaaccaaccaactctcaactaatgaatagatggtaacttctcaacatgataaaatgcatctagaaaaaatctacaccaacattatacttaatgttgaaaatggaatgcttttcgctaaaatcaggaacaagacaaggatatctttctctcagcacatctattcagcgctgcactggaagttatagtcggtacagtaagacaatagaaggca

SEQ ID NO: 679623 - DNA, 591 bp, Homo sapiens
gtgctggagcaattggatatccacatgacataaaataaacctcaaactattatactatataaaaaaattcaaaatgaatttattaagctatacattttctaggagaaaaataagagagggctttgggttaggcaaagatttcttaggacacaatagaaaataaaaacttaataaattgaaccttatcaagcttaaaagtttatggttttcaaaagatatgaagatgaaaaggtaggccacagacaagcaaagacaatattctcaatacatatatataaaacaaagaatttgtatcaggatataaaaagaacttgtacaactcagtaataagagttgaacagacatrtaataacacatgtgaattatccacaagcacattaaaaatgctcatcaggcatcagaaaaatgcaaaataaaagcagaatgaggtcttattctatgtcccacagaatggctaaagtttcagaagactcttaatagcaagtgtagcacagatatggtactacagctctctcacattgctggaaggaatgcaataaaccattttggaaaacagtttggcagtttcttgtaaagataaatatacagtta

SEQ ID NO: 679624 - DNA, 588 bp, Homo sapiens
tgtaaggtaaaaaattcttattttagacaaaaaagtataatcagggcctaattaataaaaagttataagttgctaacattctcacagccattgaatyggtagtgattatgccatttttcttgtattttatgttacctgaaaatatttgagtttttccagtggtgttgccattcatatacaattgagttgattttctttttttttttccaatgcatattgagcatgttttccttgcacaactaaaggcttgaaaagtatattgaacatcaaaactctaaaaggacagttttaagaaataagattatggcattaaaattgaagataaggcacatttggcatgccctatgtgatcagcgggcatgtaattcctaatttgggttgtaaatgtttctgttgagtttcagataagtggagaatgtccttaaaagtatattattgggctgagtacagtggcctgtaatccctgcacttagggaggcagaggcaggaggatagcttcagcccaggagttcgagacctgcctggacaacataatgagaccccattctccataaaagaggggcaaaaaagacaaagcgtgttattcca

SEQ ID NO: 679625 - DNA, 588 bp, Homo sapiens
tgtaaggtaaaaaattcttattttagacaaaaaagtataatcagggcctaattaataaaaagttataagttgctaacattctcacagccattgaatcggtagtgattatgccatttttcttgtattttatgttacctgaaaatatttgagtttttccagtggtgttgccattcatatacaattgagttgattttctttttttttttccaatgcatattgagcatgttttccttgcacaactaaaggcttgaaaagtatattgaacatcaaaactctaaaaggacagttttaagaaataagattatggcattaaaattgaagataaggcacatttggcatgccctatgtgatcagcgggcatgtaattcctaatttgggttgtaaatgtttctgttgagtttcagataagtggagaatgtccttaaaagtatattattgggctgagtacagtggcctgtaatccctgcacttagggaggcagaggcaggaggatagcttcagcccaggagttcgagacctgcctggacaacataatgagaccccattctccataaaagaggggcaaaaaagacaaagcrtgttattcca

SEQ ID NO: 679626 - DNA, 1282 bp, Homo sapiens
cagtatcttccctctatgcatgcttgtcatgatgtacaaatttcccctcattataaagacactgtcaggattaggtcccatcctaataaccttatcctaatttgatcagctgtaaagattctatttcaaaatatggttggtcacggtcatcggtattgagggttaggacttcaacatctttttgggaaacatggttcaaacaataacactgggtctaaaagaatcaattgtacaagagggaaaacctgttttaaaggcacttcattaagagaaaaggatgaagaaagaagaggaagggggtgagagggagggggaggaggagaagaaggaaaaaaaggaggagaaggagacggagaaaagaaagaaaaraaaaaagaaaagaaagagaaaaagagagagaaagagagagagaaggaaagacaagaaagaaagaaagaaaaagaaagaaagaaagaaagaaaagaaaagaaaagagaaaagaaaagaaaagaaaagaatttaggcccaacctaaatgaatagtttagcagggccgtcttccattgcgtgaatagattcagatcaaagacaggtatagccacaatccctctcatctgtcagatttcacacaaaattttctaatctatttggaggcggggatattgatgaatataggacaaccacagagactaaaaaccaagttgaagtaaaagaagactaaagatgacatatctatcttccaagtatttatcttttaaatccctcataccgccttaaaaggggtagaccctttgtttcaattgtctaggtaggagagttagacttaatacaacaaaagccagtaatattgagaccagaagaacctcctaaaatttagaatgttagagaattttaacaaaagaaatctgtaaccaatggaaagggcttgctcaaaatgtagtgatttcccttttgccagggaatgttcaaaagaactggtcaactcttcattagatattcttgaattaggtgggagattgtactagctcagtgtctccaactgttttgttttgtttttacttttcagcactttcaaagaaatatatattaacttcaccttcttagaattttttttaaaaatttcaccttttttccaaatggtaagattcaaatgtaactttaaattgacaaatatttgagaaaagtgttattagtaaatatcatattaaaaggttgatttccatgtaatgtttgctaataattcaaaagaaaaaaacatcatttcgccaatcaatttaaatatgacatgttcaattttaggattg

SEQ ID NO: 679627 - DNA, 1856 bp, Homo sapiens
atcctccctcctcagcctcctaagtagctgggattacaggtgcaagccaccctgtcaggtccagaataaaagaattttatgtagacctaggggaattagattgataataactgtggcatatcaaatttgggggtataaatgtattattcaataagtggtatggaaactgctactgattgaaagaaacaattttaaaaagttccaaatatctcaatggcataaaatattaaaaaattaggccataaataaaaccaagttaagtgcgaattaatatatttataatattagaacatggaaagacttttaaattagccattaatttaaaagcttgaaaattttgacctataaaattaacaacaaaaattctggatgacaatgaataaattccaaagacaaatttgaaaaattaataacaatttgaaacaaaactttatgcatataacaaaatggtaatttttaatttacaaaaagtttatgtaaatcaataagaaaggatgaactaagcaattttttaaaagagcaagaaggcattctccaaaaactaggaatgacaataaattgtaagaaattatgttcaatctcagtaacaactgaagaaatgcaaataaaagaaaaaaattgaatttttctcttattaaactgtcaaaaaattagaatagtttgattttcctagtgttgtccaggatgtgggtaaatgagctgtctcatatgttgttgttgagagcaaaaattgctacatcctttctgtaggacaatttggcaatatctatcaaaattcaaaatacttttatcctttgcccactcataaaagttcagtttatcaatgtacttataaaaagtttgtcaaaatttatatacaagggtattcactatagaaatttatgtaagaacaaaatgctgaaaacaaccaaaatgttgttcaccaagataatagattaatatattaccgtgtattaatatattaccatgtattaatatgatggtatattctaccacaataataatgaaatgtagatatatgtgctagtatgatgagatctctaaaatctattttaattgaaaaaaagatttacggtaatgtgttaagatctcttttgagaaaataaatgtacaactggctacatatttgtggctcaatgtacattttggtgatggaaaggaatcacaagaaactgttaacagtgggtgcttgaatatagtggttaatatatgaatggaaaggaggacgtgatgagtattttacagtattttaggttatatacttttttaacattatataatgatttacattattattagtatttgtcacagtagtcgagtacacctacttgactggttcttacagagatgggtaagattgggggccattttatattttattctttattttgagaaaaaatcaatcaatattttaaatataaatacacacacaccaatacaagtatgtttttamaggtaaaaccattcccaagaattgttttaagtgaaagcatgtggtttgtaccaaattgtgttaaacataaggtagctatggagagaagaaaatgctaaaaacgaaggaaatgatcctttaacagcttgtcgataaatatatcttggtttcttcgtttccgtcagtttttctgctctcatccactatctcttaaaatatttgtgaacctctaaatgtatgttattgaggaatcactagatctacatgctctttttgaatgtatacatggtcaatacactaattataaaggtaacaataacctgtttgttaatgtgcacagtcccaataaccaatattttcaaaacaatcaatggattattggttaactcaaaacctgattgatactttggaaatagagtttcaa

SEQ ID NO: 679628 - DNA, 1856 bp, Homo sapiens
atcctccctcctcagcctcctaagtagctgggattacaggtgcaagccaccctgtcaggtccagaataaaagaattttatgtagacctaggggaattagattgataataactgtggcatatcaaatttgggggtataaatgtattattcaataagtggtatggaaactgctactgattgaaagaaacaattttaaaaagttccaaatatctcaatggcataaaatattaaaaaattaggccataaataaaaccaagttaagtgcgaattaatatatttataatattagaacatggaaagacttttaaattagccattaatttaaaagcttgaaaattttgacctataaaattaacaacaaaaattctggatgacaatgaataaattccaaagacaaatttgaaaaattaataacaatttgaaacaaaactttatgcatataacaaaatggtaatttttaatttacaaaaagtttatgtaaatcaataagaaaggatgaactaagcaattttttaaaagagcaagaaggcattctccaaaaactaggaatgacaataaattgtaagaaattatgttcaatctcagtaacaactgaagaaatgcaaataaaagaaaaaaattgaatttttctcttattaaactgtcaaaaaattagaatagtttgattttcctagtgttgtccaggatgtgggtaaatgagctgtctcatatgttgttgttgagagcaaaaattgctacatcctttctgtaggacaatttggcaatatctatcaaaattcaaaatacttttatcctttgcccactcataaaagttcagtttatcaatgtacttataaaaagtttgtcaaaatttatatacaagggtattcactatagaaatttatgtaagaacaaaatgctgaaaacaaccaaaatgttgttcaccaagataatagattaatatattaccgtgtattaatatattaccatgtattaatatgatggtatattctaccacaataataatgaaatgtagatatatgtgctagtatgatgagatctctaaaatctattttaattgaaaaaaagatttacggtaatgtgttaagatctcttttgagaaaataaatgtacaactggctacatatttgtggctcaatgtacattttggtgatggaaaggaatcacaagaaactgttaacagtgggtgcttgaatatagtggttaatatatgaatggaaaggaggacgtgatgagtattttacagtattttaggttatatacttttttaacattatataatgatttacattattattagtatttgtcacagtagtcgagtacacctacttgactggttcttacagagatgggtaagattgggggccattttatattttattctttattttgagaaaaaatcaatcaatattttaaatataaatacacacacaccaatacaagtatgtttttacaggtaaaaccattcccaagaattgttttaagtgaragcatgtggtttgtaccaaattgtgttaaacataaggtagctatggagagaagaaaatgctaaaaacgaaggaaatgatcctttaacagcttgtcgataaatatatcttggtttcttcgtttccgtcagtttttctgctctcatccactatctcttaaaatatttgtgaacctctaaatgtatgttattgaggaatcactagatctacatgctctttttgaatgtatacatggtcaatacactaattataaaggtaacaataacctgtttgttaatgtgcacagtcccaataaccaatattttcaaaacaatcaatggattattggttaactcaaaacctgattgatactttggaaatagagtttcaa

SEQ ID NO: 679629 - DNA, 1467 bp, Homo sapiens
ttgaatcccagcttgatcatctactctctgtgacaatggacaagtttctcaacatctctgtgccttagtatcttcatctgtaaaatgaggataatagtatcttccttatagtgttgttgtatgcattaaatcatataataactataaagtacttatagttgtgtctggtatatagtatttaacaagtagtgagattttaatgcctccctctgctttttaaagtaaactataagcctttgtgggcaagggcctcatagaatcatcaagctatatttctcatttgaataacatctcacaagagatgttttttatattgcaatataaaaatataaaaaagaactatgaagagaagttaccaaaaaaataattcataatggtagatatggtaatgctgtttgggtaaggagttctcagcaccctttaaatcaccccaaatgctaattagtatcctacaagaaggtcagagcaaattctagaggcaagaatttcttccccaaatcaattttcaggaaccctatgatgaaaacgtctcattttacatgtacttgataaaatgaaataataattgaatctacaaggcccacatgcaacatgaggtcatataactttacgtcaacatgtttgtgttttatttgaatagttcatttgtatttatttaattatatatttactgaaaagcaacagagacttgtactaaattgtgccaaatggtatgtgatggctatacttaaaatgctcagattattttgaacagagggatttattttcttctcatagcttttggaagtctgggcctatctggtttcagttaggcaatagtctttggccagcattttctggtacatttgaaactgttgaacaatgaaaagtagaaacttttcattgccagtgcagcttaagcctaatacagatataaacacatttaatagcactttatttaggttcagctttattattcttaactttcatagtaattttgaatcacattgcattaacaaatttttattgggtttcccaatggaaagccaattgcaggcaaggccttttacgactgggatgtcgcagtcaatcttagatttgccttctaacaaagaagaaaacacaattcttaaaagcttgcttttgttaagttctgatatagtatgctctaaaggacactaattctttgttttgttctttgctagtgcccrtcttaggtattgtgcaagtacccttcttaaacatttttgagttacagccttctaacagagcaagcacatggatggagctggaggccattatcttcagcaaagtaacgcatgaacataaaaccaaatactgcgtgttctcactcataagtgggagctaaatgatgagaacacatggacacatacaggggaataacacacactggggcctgtcagagggcggagggtggaaggagggagaggatcaggaaaaataattaatggatgttaggcttagtac

SEQ ID NO: 679630 - DNA, 613 bp, Homo sapiens
ttttttwaaaaaaaaaggaagagataagttgacaaaacaatatgctaaatataacacagccatcagcaggacagtggtattatatgaccagtaattgaagttttcccatcactttgctctcagaaaaaaagccagtgttaaaaatcacatctttactgaatgtgaaactaaatctaagtagattaaatgacttggccaagtcctttctgtaaatttgtggcaaaggagaatttctcagtgcagtaattacatctttgccttccagaaggccatctacaatgagattacatgtagagcatgggttagcaaactttctgtaaagggtcagacaggaaatattttaggctttgtgggccagagtatttctgctgcaatgacttcactcttatgacagtgtgaaagcaaccatagacaattcatacataaatgaatatgtctgtgtttcaataaaactttatttacaaaaacaggtggagggccagatttggctcacaagtcatagtttgccagttgctggtgtggaggaacctaactgttgaattacaaaaccagtctttaaaagctgtatcctaaaaaaacaaaacataacaaaacaaaaaacacaggactatta

SEQ ID NO: 679631 - DNA, 613 bp, Homo sapiens
ttttttawaaaaaaaaggaagagataagttgacaaaacaatatgctaaatataacacagccatcagcaggacagtggtattatatgaccagtaattgaagttttcccatcactttgctctcagaaaaaaagccagtgttaaaaatcacatctttactgaatgtgaaactaaatctaagtagattaaatgacttggccaagtcctttctgtaaatttgtggcaaaggagaatttctcagtgcagtaattacatctttgccttccagaaggccatctacaatgagattacatgtagagcatgggttagcaaactttctgtaaagggtcagacaggaaatattttaggctttgtgggccagagtatttctgctgcaatgacttcactcttatgacagtgtgaaagcaaccatagacaattcatacataaatgaatatgtctgtgtttcaataaaactttatttacaaaaacaggtggagggccagatttggctcacaagtcatagtttgccagttgctggtgtggaggaacctaactgttgaattacaaaaccagtctttaaaagctgtatcctaaaaaaacaaaacataacaaaacaaaaaacacaggactatta

SEQ ID NO: 679632 - DNA, 869 bp, Homo sapiens
tctttgtaccatcttgagcaaaggaggaaaatgagtagtttttagataaaatctagctggagaatggatgtcaatattttctagtatttcaacttttccatgtgttatttgcacacagtcaggcagttattgagcacatattgctgcagagttatacagaaaatttgagagcagagttgcaagtagccacgtgcttgcttcattaactgtgcttgtggcaatttttaccacctrtgcaaatttccatttctctgaacaatctgactatacatgtcctgttcactccctctttccaaaatgaattaaggagaagagaaaacagtggtgataagagaaaaaaaaaatcagctagtgagatttaaaacaaaatttggtgagcttatactaaattgctgcttaaatatgggaaatgacattgattgttgaaaagaaatacagcctaagtttcattaacaccaataacctaaacatgggactttgtgatgttatctggcctagtcctttgtcttcagatttgtgctttcaagcatgcaaagtatcatggttcttaaaagttaagaggctgactgaaggtcccttgcttactaagtgatgaaggtagcactgaaacacaggtcctagtaatgggcaactttaaatactcaacacctgtgggtagactatcttgttagcatgaaatgtaaaattatattttgaagaattacaatttttgagctcttaggagaggaaatgctcaacataggtgtgtagactatctcattagcatgaaatgtaaaatgatattttgaagaattatgatttttgagctcttaggagagaaaaatattttgaacctggccccccattgtgaatagaaactaaaatgggaa

SEQ ID NO: 679633 - DNA, 869 bp, Homo sapiens
tctttgtaccatcttgagcaaaggaggaaaatgagtagtttttagataaaatctagctggagaatggatgtcaatattttctagtatttcaacttttccatgtgttatttgcacacagtcaggcagttattgagcacatattgctgcagagttatacagaaaatttgagagcagagttgcaagtagccacgtgcttgcttcattaactgtgcttgtggcaatttttaccacctgtgcaaatttccatttctctgaacaatctgactatacatgtcctgttcactccctctttccaaaatgaattaaggagaagagaaaacagtggtgataagagaaaaaaaaaatcagctagtgagatttaaaacaaaatttggtgagcttatactaaattgctgcttaaatatgggaaatgacattgattgttgaaaagaaatacagcctaagtttcattaacaccaataacctaaacatgggactttgtgatgttatctggcctagtcctttgtcttcagatttgtgctttcaagcatgcaaagtatcatggttcttaaaagttaagaggctgactgaaggtcccttgcttactaagtgatgaaggtagcactgaaacacaggtcctagtaatgggcaactttaaatactcaacacctgtgggtagactakcttgttagcatgaaatgtaaaattatattttgaagaattacaatttttgagctcttaggagaggaaatgctcaacataggtgtgtagactatctcattagcatgaaatgtaaaatgatattttgaagaattatgatttttgagctcttaggagagaaaaatattttgaacctggccccccattgtgaatagaaactaaaatgggaa

SEQ ID NO: 679634 - DNA, 1015 bp, Homo sapiens
gatcctaaactacagaacccaggaaatccagtggggaagaacagagaagcaaggatgggaattgactttgaaaggggagggactctaggctttgaaaggggagggactagagtgagctatagggagagaggctcttggacagatttttgtggtgaggggcaagaagaggaataaggaaagagcatttgttgttactataggctatgcattggatcctctctaatgatatttgagagatttgagagatgccagtaagattgggattacttctaattacctttcactgctgggatcaatctgcgacaccctgctgagaccaagccaggtgagtgcctgggggagttaatttgtctgtgggtgtgtgtataaaacctttatatataaaaaatattaatatattgtacattaatatataacaataacatgtcatattatatatgcaatatataatmtattcatatatacctatgtgtatacatatactatatttagggaatacgggtttaaatacttaaacaccagcctggacaacatggcaaaaccaaaaccccgtctctacaaaaaatacagaaaattagctgggcatagtagtgtgcacctgtaatcccaactacttgaggggctgaggcaggaggatggcttgagcccaggagttcgaggctgcagtgagctatgattgcaccactgcactccagcctgggtgacaaagtgagactctgtctccaaaaaataaataagtaaataagtatttaaattaatgaggcgtgagatgattggaatatacgacaagacagaacatagtaatgtagtggaactgagtataataaaaaatttaacgtatatctggggggtagaggcaaacctgatttacaaaatcttaaaccaactgctgttttctgggtatgaagcgtatttatgaaaactatggaaattcctttgacatttagacacataatccattctgtgtgaaaagcaagtttcctcaggggagtttctaaataataattttgctttt

SEQ ID NO: 679635 - DNA, 644 bp, Homo sapiens
cactcttggctgcattcgtgagatctatttcccatttcycccttgctgtatcagtcacagtgggttgaggtctcactgacatggtttagcaccctttgagcagccctagaaaggtttccacaccagctccctcagtctaacatgcatttcctaacgaaacgtcatttcatttcctaaaagaagccatgtgggtcttgccatgaatacacagccaagaccgtaaagaaatacttgaaaatgcacttgctcagcctgctcttgagaaggaaacaatgaagttctttccttcttcaatggggctcaaggggcttggcttgtggacaagccacacttcgaatgtagaaatgtgcagaaaaaatgaatggcaggcctaagactgcttccttagaaaggcctgcttgcaaggctggcccctgactggcctctgggaacctagatgtagggaaggttctcaaaattccttaactcataagagtggcctgaactgtctgtgcaaactgtgtggtttatgctgcacacctgccttccttctacatttacgaattgaactccagttttttgttttgtttttcaggtatgaaccctatggtctaaatcagtcatggcagaaattttgtcttgcctaatgtctgctttaagtatga

SEQ ID NO: 679636 - DNA, 2164 bp, Homo sapiens
atataacttaagtgtgtatttactctaaaaatacaactacatgaaaaaatattagaaggaaacattgaacaataaaaatagcttttttgtaggtagcattataggcaattttattcattttctttaacttctattactattattattaatattattttagagacagggtcttgttatattgcccaggcttgtgtgcagtggcttttcatagacatgatcatagcccactatagccttgagcttctaggctcaagtgatcctcctacctcagactcccaagtagctgggactacaggtgtgtgccaccacgcttgtctaacttctattgttttttgtttttgctattgttttgatgttattttgtacacagtttcttttgcaagaaatactggggtaaagcaaacactgaaagatcattcttttggaatcatcagactttcttccccatctcatagtcctagcaagttgcactcaccttgaggaaggaaaaaaaaaaaaaggattatataggtattgatatgtctcattctaagcatatactcttcatagacaagtttatttttggttacaggaattcagtttattatcttaacagtctgtaagaacaagagcaagatagtcacagtttcttccctgaagtaccaatttcatctgagtgtgatattccaattgctgtggatcagtagggaattgcgtgtaagaaataagcatcagggaacagggcactttcttttgatgaaaccacaggttraaaaaagtttttcacctttgtgctagcctttttcatatctccacagtgttgtttaaccagcaatatacggaatgtcttttatgtgctatgtgaaaggaggacacccaagaagaataagaaaaagagcttataatttagaaagaaatataaaatgggcacccaaataaatatataataaatataatatgaggcatcttaagtcacatgagataccacaacataatgcgaaaacacaattttcacctttgtgaaatactctcaagaattatcgtgaaatgactcttacatacaattccctactgatccacagcaactggactatcacactccacagtgttgtggagttaagaagaggctaacacaaaggtgaagaatttacttcaagtaaaggtaacactatacacagacatggaggattcctagtttccatttctgtaaatagggaaaggtctatgtgaacccgcctatggcaggatggaggcagccaaactaagcccacttctgccatttcttttgatacatttggcagagttgatgtggacattttaaggaataaggaaatatattgaaaaggaaagggataaaataaaaatcagttaacttatgaccttggcaaaatagcaactttaaaggaggcagcatctttccgttgtcaagttgctacaaaattatctctgtgacctgaacactagcacattaactctaataacatctctgctcactgggcctggaatgggcatccacctcccatctccccagctccagccaccattcaagtttattctttgggattctgtttattcattcaacgaatatttgaatgcttactaggtgctaggtattgagacaggcactgagagtgtgaaagttgtcagaatcaaaatggagtcatttgtgttaaaaactctgacaaacagaggtggggaaagccatgaagggagagttcccaggcttgtatgcctgatacccagaactgtccccaaagactctgcagaaaccacaaccttgcacaaaaaaatacctctgcaagggtgtctacccagcaactgcctgtccaacctcaaactggcaccacctttgttattgatccttgaagccaaggataattatctcagaaacaattaatgtaatgctcttcacttttcccttaaaagcctttacctccctgaatacacacataggtgactatggcacacatactcccactggaatgccctatccatgaataaatatcattttcttttagagagcctctctgtttgttatttaggttggcaggagactaaaaatatacatgatcttcacgttgtggagcctacaatccagctagaagacagaaattaatcagaaaaatcacaaaaaataaacataatttcaactgtgataggttctaccaaaacaaacaactcctcc

SEQ ID NO: 679637 - DNA, 1769 bp, Homo sapiens
tcctaattagctttccaagaaggctgaataaatttacagttctgccaacaggatatgaaagtacttgtttcctataaaataagtttttgttattgattactattaaatgtttctatattatgaaaaattttgcatatttgggcctaaatattttttgtaacttgtttgccttataactatttataatagctattaagattgtccaatcatattttttgtgactttttttgcatttactttaggtttaaaaagtcttttcttatctagctgttggaaacaatatattttcttctaattgttgtggctttttatttttattttgttttttatttcatttcatttttcttctttacatttagctctttgattcatgtaggatttatttggatgatattgtaaggcaagaatctaagctgatttattttctcctaatacctttgattaaatttccttttattaattggatgattcttctctttttaattgatttataatgtctcctttataataaattgaattagtttatatgctataatttgcttcttagctatctatgctgattcttgatttgtatgttagttctcatttagaatttagtttttaaataggtttttggtttttcatagggtttttgtctgtttgaagttttgtttgtttatatttttgctaagcatgttttcccataattatttaaccttttcaaatattattttgactatattagtctctttactcttctggatcaactttagaatttttttttttgagttacaaaaaaagtccctttggattttagactaggatacttaaagctatgaaacaacatatggataactgtttttttctttaatatttagtcttccatacaggaatgtatttttttatatctcttcatttattcaaagcttactctctctctctctctctagatatggagaaacatatatatgtatatatgtttctccatatctagagagagagagagagagagtaagctatatatatgtacacacacacacacattccataataatggaaatttggatactgtttgattgctgattggctcttgacccacccacttgtcaaatgtcagcaaactgaagttccagcagacggctccttcttgggtagggagaaggcattgagtaaggctctgtattcccagtattttccagcatagactccctgaattggatcagtggaatgcatgccaactaacgaggagatttctggaaacttccctctgtcctggagttctcagccagccacaggacccagaattgtcaccattaatatttaagctagagtggaattgctaccagtcaacatctattaaaatccaaggagtggatacagatttgaataaagcagcaagagaatccaagccaccctgcataggcttattccagtcactttattgatcttgcagtcattcaacacgcattttataccgttgaaatcattgaaccccacttactgtgctatggcagcatactacctatatatggcggtatggttgacttcaaatcactataatgcatggcccttcactattccaaatattaaatccacagatacaaakaatattctgtatttggattaggaagagacaaaaatatttacccctgattgtaattctgattttcttgctctggaaaaattatttggacccttgggtggttcatgagagtactcgcacaggacttggcctcatgagctgatgtaggatagcagccactagccctttactccacaaagggctccac

SEQ ID NO: 679638 - DNA, 1769 bp, Homo sapiens
tcctaattagctttccaagaaggctgaataaatttacagttctgccaacaggatatgaaagtacttgtttcctataaaataagtttttgttattgattactattaaatgtttctatattatgaaaaattttgcatatttgggcctaaatattttttgtaacttgtttgccttataactatttataatagctattaagattgtccaatcatattttttgtgactttttttgcatttactttaggtttaaaaagtcttttcttatctagctgttggaaacaatatattttcttctaattgttgtggctttttatttttattttgttttttatttcatttcatttttcttctttacatttagctctttgattcatgtaggatttatttggatgatattgtaaggcaagaatctaagctgatttattttctcctaatacctttgattaaatttccttttattaattggatgattcttctctttttaattgatttataatgtctcctttataataaattgaattagtttatatgctataatttgcttcttagctatctatgctgattcttgatttgtatgttagttctcatttagaatttagtttttaaataggtttttggtttttcatagggtttttgtctgtttgaagttttgtttgtttatatttttgctaagcatgttttcccataattatttaaccttttcaaatattattttgactatattagtctctttactcttctggatcaactttagaatttttttttttgagttacaaaaaaagtccctttggattttagactaggatacttaaagctatgaaacaacatatggataactgtttttttctttaatatttagtcttccatacaggaatgtatttttttatatctcttcatttattcaaagcttactctctctctctctctctagatatggagaaacatatatatgtatatatgtttctccatatctagagagagagagagagagagtaagctatatatatgtacacacacacacacattccataataatggaaatttggatactgtttgattgctgattggctcttgacccacccacttgtcaaatgtcagcaaactgaagttccagcagacggctccttcttgggtagggagaaggcattgagtaaggctctgtattcccagtattttccagcatagactccctgaattggatcagtggaatgcatgccaactaacgaggagatttctggaaacttccctctgtcctggagttctcagccagccacaggacccagaattgtcaccattaatatttaagctagagtggaattgctaccagtcaacatctattaaaatccaaggagtggatacagatttgaataaagcagcaagagaatccaagccaccctgcataggcttattccagtcactttattgatcttgcagtcattcaacacgcattttataccgttgaaatcattgaaccccacttactgtgctatggcagcatactacctatatatggcggtatggttgacttcaaatcactataatgcatggcccttcactattccaaatattaaatccacagatacaaagaatattctgtatttggattaggaagagacaaaaatatttacccctgattgtaattctgattttcttgctctggaaaaattatttggacccttgggtggttcatgagagtacycgcacaggacttggcctcatgagctgatgtaggatagcagccactagccctttactccacaaagggctccac

SEQ ID NO: 679639 - DNA, 646 bp, Homo sapiens
tccatgttatagactcatcaactacctgttcattaaaacacatggcctaccaaaattawatcttaacatcattagcttttaaatactagaagtcatttcaacccttagaaaagtctggtgagcatgattacatgtggaaactttcagatacaatgtatccaaaaaagtaagtgtattaaaaatgtaaatatatttcagatatccaaaaatgtagacatattgtcaggctttgctacttttttgcagtttcacatcatgtctttacttgtaataatatcaataattgctgcaaagataataaactacattcccattcgcctatccctctaccccagtactgtgttatacagttttccctgcaacatgatgtcagtctgcaaagggtctttgtgacatcaggaagagagtctagatttccttccagggcaacacattttgctattaggttgagccataaaactgccatttttggtcaggaatgatttaccactggtagtttcatatggcacaagctaaagagccttccttgggtttgagttacagtcctgagagtcgcttgtgtgtccaatgggccagttacttaattgctgagtcttggtgtgtgaaatggtaataacacccactttataggattgattattaactc

SEQ ID NO: 679640 - DNA, 646 bp, Homo sapiens
tccatgttatagactcatcaactacctgttcattaaaacacatggcctaccaaaattatatcttaacatcattagcttttaaatactagaagtcatttcaacccttagaaaagtctggtgagcatgattacatgtggaaactttcagatacaatgtatccaaaaaagtaagtgtattaaaaatgtaaatatatttcagatatccaaaaatgtagacatattgtcaggctttgctacttttttgcagtttcacatcatgtctttacttgtaataatatcaataattgctgcaaagataataaactacattcccattcgcctatccctctaccccagtactgtgttatacagttttccctgcaacatgatgtcagtctgcaaagggtctttgtgacatcaggaagagagtctagatttccttccagggcaacacattttgctattaggttgarccataaaactgccatttttggtcaggaatgatttaccactggtagtttcatatggcacaagctaaagagccttccttgggtttgagttacagtcctgagagtcgcttgtgtgtccaatgggccagttacttaattgctgagtcttggtgtgtgaaatggtaataacacccactttataggattgattattaactc

SEQ ID NO: 679641 - DNA, 862 bp, Homo sapiens
gatccagctactcaggacgctgaggtgagaggataactggagcccagatgggaggtcaaggctgtagtgagctgtgttcgtgacactgcactccagcctggctgacagagtaagagcctgtctcaaaaaaaaaaawaataataataataatttcaacaaggtggtaatcttaacagataattactaaagcgttatcaaggaagacaatatgcatcactgatctatttcttaagaaaaaataataaataaaattaaaacctcatgattttataacctaatagaattttgtaagcacaggttttcaacaggtagctgtaattttaattaaatattccatcttcctcaaacctttgtatacaagctctagtaatgccactttattttgcctattttttcttcaagacaaaatcaaaaaggataattttaaaaagatcatgcctgtagtcccagcactttgggaggccaaggcaggtggatcacatgaggtcaggagttcgagaccagcctgaccaacatggcgaaaccccatctctactaaaaatacaaaattagccaggcgtggtggcacatgtctgtaattccagctacttgggaggctgaggcaggagaattgcttgaactcaggaggcagaggttgcagtgggctgagattgcgccattgtactccagcctgggcaacaagagtgagactccgtctctaaaaaagaacactcagcttcaatattaggatcctcccagttttgccctaggatgaaagctttatgccaaggatttcagctttctctctgttctgccttctcttccagaccatgcctcaaaggctattacttcacacggaacctgcctgcatgttcttttgcta

SEQ ID NO: 679642 - DNA, 651 bp, Homo sapiens
tagtgtccctgctgctgggccatttataataatgatagagttggaaaataaatcttttaaagacatgaattcatactgatttttccaatgtaacatattaccgaaactaacttttttgtagacatgcttttatgcttatattaaatacgtaataagatggagaaaatgtattatcttcacagccggtagcagaattcctccacaggaaaaatcagtctgtcttgggaaaaatgttttaattttttagagttgaaggtgagattctctctcttccccatttccaccatcaaggcctaaaaaaaaaaaaagytgacccccaaagtttcagtgaagaatttagttgttcaagggctaccaggaagaggaaacttgaggacaacagatgacagtaggggaggaaagtcgggttttagatgttactgttgttcatgatgatgcaccaaataaacaaacaaaaaatatcaaattcttgcatgtatgtgtgataacatttcttcatgaaaactgaagaaagagctgaacttcatgtcagatggaggagttatgagacatatagtatgccaggaagtagaaacacaaagatctggagaaacctatgaataccagttccctgtaaactttttagaaatatgaagacctcttgggacttcc

SEQ ID NO: 679643 - DNA, 2381 bp, Homo sapiens
cacgtttatagagaccataaccaagtattttttttctgtcttcctgctttcctttttcctrtgagttcctctaatggaagaaacttaactagaagtcagctggccaaggaatgtggaaaacatagttaacagggccctaactcccttaaaatgcataatagaacatagagggatagaagagggaatcaaggtcaagcacatttatgattggcaaaatgaactctccacctggagcattgtttgacaagattcccgaatgaaagagggttttaaatgaaaataaccattacctctgtcatccactcaacagtatatttgaattcaagacattccaaacatgggccagaagacctaatttttaatgagagctttactcttaacaggaaaataaggaaaacatctacaacaagtgtatactcaggaggattcacagagactgtattttgaactggctcattgtttggtgtcctgaaggttttcccaccccagggagatgcatcctattaagacaacacatagatgagattacagcagtattgggtacagtaggagacagggtcatacagtggagaagagtaagacatcttgagcccagatgtatttttaggcacatacatttaggaaagataatggatggaagttgatgatctaaaaattggtttctataaaaataccacaatcctgtacctcttggaaagtcttatgaacttctctatgtatacttcaccttgaaaactgctcttatagatgattaagaaattgtgtatatttaaataataataaagctctaaaaggttgtgcaatgaactttagtatgaaatgatagttctttgtagtttttagcctattgcaaacatattcaatttctgaagggagaatcaagattttgcctctttaaagtcaagtcaacattattactgagcattaattaatcacgtatttaaaggtcaacaggtttttttgtttttttttttcttttttttgacaagagtctcactccagttgcccagactggagcagtggcgtgatcttggcttactgcagcttcgacctcccgggctcagatgattctcccacctcagcctcctgagtagctgggactacaggcacatgccaccatgcccagttattattttttttttttgtatttttagtaaaaacagtgtttcgccatgttccccaagctggtcttgaactcctggattcaggcgatccacccacctaggcctcccagagtcctgggattacaggcatgagccaccgtgccaagccacggtttttgtttttttaattgaaacagaaagtaaagaccgtgattcttgaataaggtatttgtgatgtctatggttcaaaatgtttatgatttaagacaggtatggctattaaaacacatattactccttaaaaacttagaaaatacaaggttgttcaattataatagtattctgcatttcctgctccaaataaaaagactttgaaagagtgggtctccatttctatatttgtcccttagaacctcagacagcgtgttttgagtcttcatgaaccctgtgagaaagtaactaacctacaactatttcttgcatagctttgaaatataataaatcaattggacctaaaatccattttaaaggttcaaatattaagctttagttataaaattataaagcctttctcaacaaatagtctggtttgtagtgtagagactccattttcataaagattagtgatatatacccatagtctttacttctaatttatttaccagcgtatttccttatctgtccttcctctagcaactacatttcggcataattattgagagatattttttacacgaattttaaattacctagattccactagagtgctatatagtaagttgaataatggcaccagagatataaagcctattgtccagaacatgtaaatattactttatgtggcaaatatattgcagatatgattaagaattttgagactgagatgttatcctgattatctgagtggccttaaatgcaatcacatgtatatttataagagggcggaagaggcagctttgaccacacagagaaggcaacaggagaaaatagaactgagagaggtttgaagatacgaaccttgaaaattggatgatgtgccagatgataaaccaaagaattctagtagccattacaagctggaagaggcaaaggacacattctccactagagcttctaaaaggagtgtggtccctttgataagtcaattttggccaagtgatactgttttagacttctggcctccagaaatatgacagaataaatttttgttgttttaagccaccaagttttggtaatctgttacagcagtcataggaatctaatataggtaccatgcat

SEQ ID NO: 679644 - DNA, 1414 bp, Homo sapiens
tagttttcagctacaaagtgattagaaaatattcgttgtatttggtcattaatgaactrtttcaaagcgaatcaagaccaagctcaagcatccatcaccatttcttttccatgactgacttacaatagaaatctacagatgttaatcaccaagatacttttcctgatttgtaaaacctgagaaagttgggcattctcttatggctgctttaatttgcatatttccatatagtgtaaagcctaacagaagccaagaaattgcttaattatttgctgatcttgaatacagcccaaatgttgcttgaaatgtctatgcaattgtcttctctgcatgatcacctactaagtctgctccatgactcctccttcacatctactgatagtcagattttcttctgtttgtatcaagatttcatgtgatttatcacatttttttactttaaaacattataattgagtaatatttgttttagcttatgtagctatttcctatcactttacaaaggtctttgttaggttgtaaatttttttaactacacaagccattagatgtgtacatactcttacatctttcttgttctttccataaaacgtgtcctatctgatgcacaaggatgatattaaggtgaaagctttttatcatctaattttcattttactttcacagtcagactggattttcaatatatttttgttataaaaaactattacatatctcttgtctactttaggcatcattccacctattcctgtataacaggaaatgcgaataggcctctcactagcttagatgatgttctataagagagaagacaagatcagttatttttatatttctaaacacatttgagactggttaaaagaatataaagctatcttttggcttaatattctttattgatagatcagataaagtagaaaactgagaaatagcaaaaatttatgtttttgaatttcttaaccttcaaaaatatttcaaaatttataaactttgaatttatttgtagcttgctaacatcatgtcctgaaaactaacaatatagctgtagatataatgttgattattagaatttataagatttttagtataacttcaaatattttaaatattcttctttgcttcctattgaagagaaagcaagctcaggcatgagtatctcttttagttgaagatctcttgcctgtttgtgttgtgtgcagcctaattaattccattgaaaagaatacttaccatattcactgtattcaggtaagaatgctatttctttgtgtgtgtatttttttgggggggtctcaatttctttactgtgataaaatatgaataatataacatttgttactttaataattgttgaatgtacaattcaatggcattaagttcattcacatttttgtgcatttatcactactctcta

SEQ ID NO: 679645 - DNA, 1414 bp, Homo sapiens
tagttttcagctacaaagtgattagaaaatattcgttgtatttggtcattaatgaactgtttcaaagcgaatcaagaccaagctcaagcatccatcaccatttcttttccatgactgacttacaatagaaatctacagatgttaatcaccaagatacttttcctgatttgtaaaacctgagaaagttgggcattctcttatggctgctttaatttgcatatttccatatagtgtaaagcctaacagaagccaagaaattgcttaattatttgctgatcttgaatacagcccaaatgttgcttgaaatgtctatgcaattgtcttctctgcatgatcacctactaagtctgctccatgactcctccttcacatctactgatagtcagattttcttctgtttgtatcaagatttcatgtgatttatcacatttttttactttaaaacattataattgagtaatatttgttttagcttatgtagctatttcctatcactttacaaaggtctttgttaggttgtaaatttttttaactacacaagccattagatgtgtacatactcttacatctttcttgttctttccataaaacgtgtcctatctgatgcacaaggatgatattaaggtgaaagctttttatcatctaattttcattttactttcacagtcagactggattttcaatatatttttgttataaaaaactattacatatctcttgtctactttaggcatcattccacctattcctgtataacaggaaatgcgaataggcctctcactagcttagatgatgttctataagagagaagacaagatcagttatttttatatttctaaacacatttgagactggttaaaagaatataaagctatcttttggcttaatattctttattgatagatcagataaagtagaaaactgagaaatagcaaaaatttatgtttttgaatttcttaaccttcaaaaatatttcaaaatttataaactttgaatttatttgtagcttgctaacatcatgtcctgaaaactaacaatatagctgtagatataatgttgattattagaatttataagatttttagtataacttcaaatattttaaatattcttctttgcttcctattgaagagaaagcaagctcaggcatgagtatctcttttagttgaagatctcttgcctgtttgtgttgtgtgcagcctaattaattccattgaaaagaatacttaccatattcactgtattcaggtaagaatgctatttctttgtgtgtgtatttttttgrgggggtctcaatttctttactgtgataaaatatgaataatataacatttgttactttaataattgttgaatgtacaattcaatggcattaagttcattcacatttttgtgcatttatcactactctcta

SEQ ID NO: 679646 - DNA, 724 bp, Homo sapiens
tcactctgtcccgccttgcagtttgaacttcaagcaccctgaattcttaccagttttcggaagataacaaactctgttgagttgttgtgtctttatatcattgcccattctattatctttctctagaatgccttcctctcaataggaacatttgctttttttcttcccagcactttgtttaaatattgtcttttctaaaaaattccttgaccacccctttcttcctccttccttctctctctttcttctttctttctttctctttctttcccttgctttccctttctctcccttcctwccttccctcctctgtctctctctctttccttccttcctttccttctttctttctttctttctctctttcctttctttctttctttctttctttctttctttctttctttctttctttctttctctctttctctctttcctttctttctttctctctttctctctttccttctttccttctttcatggagtttcactcttgttgcccaggctggagtgcagtggcacaatcttggctccccacaacctccacctcccaggttcaagcaattctcctgcctcagcctcccgagtagctgggattacagccatgagccatcacacctggcaaattttttgtatttttagtagagacggggtttctccatgttggtctggctgatctcaaactcccgacctctggtgatccacctgccttgggctcccaa

SEQ ID NO: 679647 - DNA, 724 bp, Homo sapiens
tcactctgtcccgccttgcagtttgaacttcaagcaccctgaattcttaccagttttcggaagataacaaactctgttgagttgttgtgtctttatatcattgcccattctattatctttctctagaatgccttcctctcaataggaacatttgctttttttcttcccagcactttgtttaaatattgtcttttctaaaaaattccttgaccacccctttcttcctccttccttctctctctttcttctttctttctttctctttctttcccttgctttccctttctctcccttcctaccttccctcctctgtctctctctctttccttccttcctttccttctttctttctttctttctctctttcctttctttctttctttctttctttctttctttctttctttctttctttctttctctctttctctctttcctttctttctttctctctttctctctttccttctttccttctttcayggagtttcactcttgttgcccaggctggagtgcagtggcacaatcttggctccccacaacctccacctcccaggttcaagcaattctcctgcctcagcctcccgagtagctgggattacagccatgagccatcacacctggcaaattttttgtatttttagtagagacggggtttctccatgttggtctggctgatctcaaactcccgacctctggtgatccacctgccttgggctcccaa

SEQ ID NO: 679648 - DNA, 724 bp, Homo sapiens
tcactctgtcccgccttgcagtttgaacttcaagcaccctgaattcttaccagttttcggaagataacaaactctgttgagttgttgtgtctttatatcattgcccattctattatctttctctagaatgccttcctctcaataggaacatttgctttttttcttcccagcactttgtttaaatattgtcttttctaaaaaattccttgaccacccctttcttcctccttccttctctctctttcttctttctttctttctctttctttcccttgctttccctttctctcccttcctaccttccctcctctgtctctctctctttccttccttcctttccttctttctttctttctttctctctttcctttctttctttctttctttctttctttctttctttctttctttctttctttctctctttctctctttcctttctttctttctctctttctctctttccttctttccttctttcatggagtttcactcttgttgcccaggctggagtgcagtggcacaatcttggctccccacaacctccacctcccaggttcaagcaattcycctgcctcagcctcccgagtagctgggattacagccatgagccatcacacctggcaaattttttgtatttttagtagagacggggtttctccatgttggtctggctgatctcaaactcccgacctctggtgatccacctgccttgggctcccaa

SEQ ID NO: 679649 - DNA, 724 bp, Homo sapiens
tcactctgtcccgccttgcagtttgaacttcaagcaccctgaattcttaccagttttcggaagataacaaactctgttgagttgttgtgtctttatatcattgcccattctattatctttctctagaatgccttcctctcaataggaacatttgctttttttcttcccagcactttgtttaaatattgtcttttctaaaaaattccttgaccacccctttcttcctccttccttctctctctttcttctttctttctttctctttctttcccttgctttccctttctctcccttcctaccttccctcctctgtctctctctctttccttccttcctttccttctttctttctttctttctctctttcctttctttctttctttctttctttctttctttctttctttctttctttctttctctctttctctctttcctttctttctttctctctttctctctttccttctttccttctttcatggagtttcactcttgttgcccaggctggagtgcagtggcacaatcttggctccccacaacctccacctcccaggttcaagcaattctcctgcctcagcctcccragtagctgggattacagccatgagccatcacacctggcaaattttttgtatttttagtagagacggggtttctccatgttggtctggctgatctcaaactcccgacctctggtgatccacctgccttgggctcccaa

SEQ ID NO: 679650 - DNA, 767 bp, Homo sapiens
tttcatggcaatgaaaccaacttaaccctaaccttaaattggggcttaacaaaaggatgcatctcaacaatctcataacatgattctggtttgaatcactttcttggctctggcctcaaactctcttcagctccagattctggttcaaacatctactaaatgttctgaagttcttcaatgaaaaagatttgtcactgactttcttatcttcttaatgcaaacatcagactgcattctctttaaattaatggcactgccctccgtataatcttcccagctaaaattctcagagtgctctttagtcctcttcctcccttagccctccacacccattccctgaccatatcccgttagcttcatctctgaaatacttctcagatcattttctcttttccggtctcaggaccattgtgtcaattcctgctcccacyttctctgaccttgattattgctcttgttttctaactggtgtatctgcttcacccttacctaatttatttttattttaactgccaccaacttaatggaatagaatacaaatcttcttcatcttgcttaaatacctagtttttctcgatgaattatagtttatactcattaaagtatgtaagttagtgtatgaccccaaactattttcctaagggcatctcctgcacttcttacttctctttccagcccaacttttcatcctccaggtctttgcacaaactttctttctattaaaaattcccttttgtgacttgacttgtacctttctttacctatca

SEQ ID NO: 679651 - DNA, 1051 bp, Homo sapiens
gccaatcagaatggctattagtaaaaagtcaaaaaacaacagatgctggcaagtttgcagagaaataggaatgcttttacactgttggtgggagtgtaaattagttcaaccattatgggagactgtggtgattcctcaaagagctagtggcagaaatactatttgacccagcaatcttaatacctaggtgatgggatgatttgtgcagcaaaccactgtgtcacacatttacctatgtaacaatcctgcacatcctgcagagatagccctgaacttaaaataaaagctgaagaaaaaaaattatctttatatctttcaactactaacacctaaaacaaaacaaaacggaacagaacaaaaaggcctcagtgcctgactgcagcagttttaaaagtttttccagggacaatatgcrttgccacaaaaatctgacaggaagaaaataaaaagcagatgcaaaatatgtgaaaataaaagtgacactaccagctctgcctttgttgatggcttccttttgcaaattgtcttccactaagtaatgtagtctgcataaaaatcctttcatttttcttcctcttttcttccattggctgtttgattataatattttgtatatactataagagttttcatattatctacttttttgtaactgctacatgaaaataaaaagagaagcacttttgaaattttaattatgagaaaaccaggaatcttagatcttgattcaatctatgtcactcggttactcattagaatttatatttttctcttaacagcacgcttagattcttgatttttccttttcttgttataatagtatatgcacaggttagtggatttagatttagtttcgttatatagagttaaagatatctttagttaaagatagttgacatttttgtacactttagttttgaatactgaagaaatacctcatttctatgtgaataaattattcttcaattgagtagcaaattggatgcttagacattactaaaagttatttaaataatgacaccttattagtatgtttccacatacagatctg

SEQ ID NO: 679652 - DNA, 1051 bp, Homo sapiens
gccaatcagaatggctattagtaaaaagtcaaaaaacaacagatgctggcaagtttgcagagaaataggaatgcttttacactgttggtgggagtgtaaattagttcaaccattatgggagactgtggtgattcctcaaagagctagtggcagaaatactatttgacccagcaatcttaatacctaggtgatgggatgatttgtgcagcaaaccactgtgtcacacatttacctatgtaacaatcctgcacatcctgcagagatagccctgaacttaaaataaaagctgaagaaaaaaaattatctttatatctttcaactactaacacctaaaacaaaacaaaacggaacagaacaaaaaggcctcagtgcctgactgcagcagttttaaaagtttttccagggacaatatgcgttgccacaaaaatctgacaggaagwaaataaaaagcagatgcaaaatatgtgaaaataaaagtgacactaccagctctgcctttgttgatggcttccttttgcaaattgtcttccactaagtaatgtagtctgcataaaaatcctttcatttttcttcctcttttcttccattggctgtttgattataatattttgtatatactataagagttttcatattatctacttttttgtaactgctacatgaaaataaaaagagaagcacttttgaaattttaattatgagaaaaccaggaatcttagatcttgattcaatctatgtcactcggttactcattagaatttatatttttctcttaacagcacgcttagattcttgatttttccttttcttgttataatagtatatgcacaggttagtggatttagatttagtttcgttatatagagttaaagatatctttagttaaagatagttgacatttttgtacactttagttttgaatactgaagaaatacctcatttctatgtgaataaattattcttcaattgagtagcaaattggatgcttagacattactaaaagttatttaaataatgacaccttattagtatgtttccacatacagatctg

SEQ ID NO: 679653 - DNA, 620 bp, Homo sapiens
gaagaaatcctttttattaggctttgtgggcccattctttacttacattgtttgggtgccagttatgggaggccaggctttccctttcccactggagtcagcattcttcagggcaatcctcaaaactcctgcaagactccattcccaaaccagactcttctactctaacctgccaatttttwaaaaattattacagtacagcacattcaaatctaatgtcatgtttttatattgctgttaaaatctgaaaaagacaaaataacccaaaacaaaacttaggaaatatgaacaaattaacagcataatagaaatataaggcttttactatactaagtatttacttgaattgtttctataatcaatatattggcctgatgtgttagttacacttacacattcatttaacagatgacaaaacagatcaaattgctgagtgccccacacccatgagaaaccgaagctctgatttaaactcaggctgactccagaacgatactcctaaccacaaggatgtactgccttttcatttttaataactagtttcaaaactcagatgttcctagatattattcctactggcatctttctatttttgtcacttcctcagaatttatgacatt

SEQ ID NO: 679654 - DNA, 620 bp, Homo sapiens
gaagaaatcctttttattaggctttgtgggcccattctttacttacattgtttgggtgccagttatgggaggccaggctttccctttcccactggagtcagcattcttcagggcaatcctcaaaactcctgcaagactccattcccaaaccagactcttctactctaacctgccaatttttaaaaaattattacagtacagcacattcaaatctaatgtcatgtttttatattgctgttaaaatctgaaaaagacaaaataacccaaaacaaaacttaggaaatatraacaaattaacagcataatagaaatataaggcttttactatactaagtatttacttgaattgtttctataatcaatatattggcctgatgtgttagttacacttacacattcatttaacagatgacaaaacagatcaaattgctgagtgccccacacccatgagaaaccgaagctctgatttaaactcaggctgactccagaacgatactcctaaccacaaggatgtactgccttttcatttttaataactagtttcaaaactcagatgttcctagatattattcctactggcatctttctatttttgtcacttcctcagaatttatgacatt

SEQ ID NO: 679655 - DNA, 488 bp, Homo sapiens
tacctgtgttccagagcagcatgactatttcctttctctaaatacacacagtactttaaatgcctaacatacgattttgtaccctttatgttgtcctttgtatcttatgaattaatcctatccttgcaggtggtctgtgagtttcttgaaaatagggattgtgtattattatcatgcacagtaaaatggcacagtaactcatccaagcattcatawcataactaaatccctaccctaaaccaggctctttcaagagcaccatagaaatgtgaagacaattttaaaaataattttaggtgtgaattcttttatcttttgatttgatgttttcctttcatgttagacatccctcctatatcagagaaaggtgtagcttcctcctttctaaaaccagtttttagaactggctaagttcagtgctgaatttattatagctacaactagtgatctatggactagcaaaactctaaatgcattttttaaagctt

SEQ ID NO: 679656 - DNA, 488 bp, Homo sapiens
tacctgtgttccagagcagcatgactatttcctttctctaaatacacacagtactttaaatgcctaacatacgattttgtaccctttatgttgtcctttgtatcttatgaattaatcctatccttgcaggtggtctgtgagtttcttgaaaatagggattgtgtattattatcatgcacagtaaaatggcacagtaactcatccaagcattcatatcataactaaatccctaccctaaaccaggctctttcaagagcaccatagaaatgtgaagacaattttaaaaataattttaggtgtgaattcttttatcttttgatttgatgttttcctttcatgttagacatccctcctatatcagagaaaggkgtagcttcctcctttctaaaaccagtttttagaactggctaagttcagtgctgaatttattatagctacaactagtgatctatggactagcaaaactctaaatgcattttttaaagctt

SEQ ID NO: 679657 - DNA, 621 bp, Homo sapiens
gggtgattctaatgtgcagtcagggtacagaacacctacatcgtgaagatctccatctgatcactccctcacctctagcacaatgattctcaatctttcttggatgtgtgtcagactctgcccttggagactgacttataggcccatgtggaaatcaggcatcagtatcaggcatcaatactgaaggaacagaagaagaaacctgtctgcatgtacagccaggtgaagatgcaaagatctgcaaggagagtgtcttttgttgatgatgggtgcaacctttacaagcaaaatatggaagggaatgtggacaagcawaggggaaggacacaaatgaatctgaagtgtaaacatcaaaccagtatcatctaatagccacaacagaaagcagacgtttcaagtcactctacctttggagcatttttccatgtcctctgaagactgtaaccataatggaactcgtgtctcaccaccacaagaaaatgatacattgcttccagtttgaaataaattctgctttgatatactgctacgctgttccacggatgacaaaagcacattgtaaatggaaacagagcccattggggacatgttaagacaaaggataacagagtgggctagtca

SEQ ID NO: 679658 - DNA, 621 bp, Homo sapiens
gggtgattctaatgtgcagtcagggtacagaacacctacatcgtgaagatctccatctgatcactccctcacctctagcacaatgattctcaatctttcttggatgtgtgtcagactctgcccttggagactgacttataggcccatgtggaaatcaggcatcagtatcaggcatcaatactgaaggaacagaagaagaaacctgtctgcatgtacagccaggtgaagatgcaaagatctgcaaggagagtgtcttttgttgatgatgggtgcaacctttacaagcaaaatatggaagggaatgtggacaagcataggggaaggacacaaatgaayctgaagtgtaaacatcaaaccagtatcatctaatagccacaacagaaagcagacgtttcaagtcactctacctttggagcatttttccatgtcctctgaagactgtaaccataatggaactcgtgtctcaccaccacaagaaaatgatacattgcttccagtttgaaataaattctgctttgatatactgctacgctgttccacggatgacaaaagcacattgtaaatggaaacagagcccattggggacatgttaagacaaaggataacagagtgggctagtca

SEQ ID NO: 679659 - DNA, 621 bp, Homo sapiens
gggtgattctaatgtgcagtcagggtacagaacacctacatcgtgaagatctccatctgatcactccctcacctctagcacaatgattctcaatctttcttggatgtgtgtcagactctgcccttggagactgacttataggcccatgtggaaatcaggcatcagtatcaggcatcaatactgaaggaacagaagaagaaacctgtctgcatgtacagccaggtgaagatgcaaagatctgcaaggagagtgtcttttgttgatgatgggtgcaacctttacaagcaaaatatggaagggaatgtggacaagcataggggaaggacacaaatgaatctgaagtgtaaacatcaaaccagtatcatctaatagccacaacagaaagcagacgtttcaagtcactctacctttggagcatttttccatgtcctctgaagactgtaaccataatggaactcgtgtctcaccaccacaagaaaaygatacattgcttccagtttgaaataaattctgctttgatatactgctacgctgttccacggatgacaaaagcacattgtaaatggaaacagagcccattggggacatgttaagacaaaggataacagagtgggctagtca

SEQ ID NO: 679660 - DNA, 656 bp, Homo sapiens
ttaatcttgctcttcaatcatcaagttaaatttacagaaaggcagatttcacttcactgtaaaagaagattctttgaatagttagaattgaccaaaactagagtcgtctgcctcccgatgcagtgactcccaatgctgtaaatggaaagtgatcaaatgcaggctgacgtgtcctcagagatgtcaggaggcattcctcagtgggtgggaggttgacccacatgccccttaaggcatctctggaccatgaaatcacaatgcacttttgactttcattcttctcaggctccatcttgctaaacaccctttgcacaatgggagtctttatctcactaacaccttaatttcaaagagttaatgcatatcattttttttcctttccacttaattttccttcataacctatccctattatgcaccagcatatctggaaactcgtttatcctctttgcacccctatgcagcctctctgatgctgttccccttggctcatcactaccaatccaagcagagtctttctctcagatgaagacgatgaaagagctgaaaaaacacagctggatgtttcacatcctggttggattgacaggggtgccagcagctgggagtcaccctttcaygtcaacggagtcaattagattgggaagccaatgagg

SEQ ID NO: 679661 - DNA, 637 bp, Homo sapiens
tatatgaatgaccaacaagtatatgaaaaaaaatgctcaacatcactatttatctgggaaatgcaaatgaaaatcacaacgagatatcacctcaccccaattagaaggtctactgcagaaaagacaaaagataactgctggcaaggatgtggagaaagaggaactcttataccctgctggtgggaawgtaaattagtacagcccagtatggtcaaaagaaatccaatttttatggtaggtgttgcaagaagcactcatacatggagcactacacccactactgtgttgatcatgcagagtaaaaagaataaatttcctatcatgagtgctaatggatagttgtttccatggatacctgatgttagcaagcagttaggcaaatacgagtatttcccacagtctacatgtatcacatctctgaaatcacaaacttctagctacttaagaagaccacaagatgttagaggaagagacttgaaccattctctcctatatgccctcattttatattccagaaacacccaggcccagggagttcaacaagcatgtttctttctttccccaacactcctaaaccccaatatacttaagattaatatgcctttattagaaattactcaatcaaatcagcttattt

SEQ ID NO: 679662 - DNA, 622 bp, Homo sapiens
aaaaatgatgaaaaaattaaaacggtaacatcacttggcctggaaattgttcttcagctttctattactacctacagccagtaaaaaagactttcactatgagtccacaaagaataagaaaaggactgaagcacaatggtttgatagaaacgtctacaagctgagacgtcagtggtactaatcctaaccatgagtgcaggatgacatacggatggagaatgtctgccagtcaatatggtagactgagctgctctggaaggaatctttccctgtagctccaaacacgtgagcatgatgtattacagaaaaaataaagatttgagccatacgcaaaagcaagaagaaaatgcctgagtgttttaaataagaaggaattcaatccgggcagctgagtggaaattgaagccaaaatggctcacagagacaattcagatatgggctttaattgaggactggtgtcccattgggtagggtgcctaggccacaggctcctgtggacagatttgcyccagctgtaaaactaagactagatgaactctgcccatgtgctatgagtaaggggaaggaagctcgccatctcctgtgggctgaggaacgcagtggcgtgggaggcaagggagaa

SEQ ID NO: 679663 - DNA, 609 bp, Homo sapiens
acacaatgaactagtgattttgtgtgactcccatcacatccatttgacctctctcaataacaagaattctaaaataaaaaccacatgaaggaaaaacaagagcaaaaatggcaaggattcatgccctcccctaccctctaattcccctatctgtccttactctctagaaaactgttaaaattattcccataacctcagctggctcagtgcaaactccagccccagtgtacctcaatcccttgggggacatctgctgagtccttccgtggcacctcctggggcactgagtcaggtactgcatgtgatacaaagatgactaaggtaccctcacagccctcaaggcatctgagggcagtagaggagataaggaatgggcaaaagcaagtgatgctggaagaagwacagtctctgagctctgggaggggcccaggcagggctggggacactggggagcatgaggtcacaaccactctctgaccctgctaggcactggggccccaggtcatgccaacaacccagaccaacatgggcactgggaagactcccccttaggaaaggctccagtcaacagttatgactactactaggagcagtactagtagtaataac

SEQ ID NO: 679664 - DNA, 636 bp, Homo sapiens
ttagaaatgagagttgaacagccatacctactctggccaaaaggaaaaactaaaagtggattaactatccgctacagctaaaggaaaatagaaatgtgatatatctcagtacttaggcagaagtttatgtctgatggtttttagatgcaaaagcgatttttcttcttcttgaaatttaaacaactccactgtggacttggcatctggatggttcaccaccaggaggtacatggcattatctgagaggagattaaaaacaaaaatgaaacattaactaagctctcactgtcagccctctctccaaaaaccaatttcaacccacctccagctagtagttaggatgtcaggcagatggaatattttcatctctttgtagagagaagcattkgtgattgctcctgttccaaacaaaagtggctcaaggaagaaccagtgacagtctctgaaaactcaaaactccacaggagaaaaaaaaattctcaagaatgagtatcactgacactaaaactccaaagaatcctttaagttttccagttcaaatggtctccacgaaatgcacagttgcgatgaaagggataaaaaccatgggaactcccaatatgagaaggtgtgatcaggtgtaatttacacagtgtg

SEQ ID NO: 679665 - DNA, 652 bp, Homo sapiens
aaataatttattggcaactcaacaaccacaatagctgatgaaatatgttgagacaaggaatagtcaagtatggtgaatgtgaaataaaccacaaattttagaataagaaaagcagatgcctggaaaaatgaagaataatatcaataaaatcatgttatatttgtttttaatattttaagctgagaaatagtgatatttaggtaagaaaagattttgtaaaaatataagttaaaatataaaaagaaggaagctatcttatgataaagctctattccacacacatataaaaagccttagacttacttcaacacctagatagggtgatggacagaaataaatgaattttgatagagtatgctgtcactgatacatagcatcatgtgtgactatcatatagtccatattttattctctacacacagtacttttatctstagaaaatcagagagtgaaacagaaaataaaatgtaggagaaaaagtaaaggagtgttctcagttttactgtactaacaatcaccattagtgacccagttttgttttatatttttcccttccaaggaaagaatctgtatactcccataagttttgtataaaagtccctcaaggctacattgtgactatgcttctttgggacaaatttagcctgaggga

SEQ ID NO: 679666 - DNA, 1376 bp, Homo sapiens
cctaaagaatcttaaatgaaggacacatatgttaattttctatttgtatattctttatgatctcactgaaaaataaaaatgataaaattttgagtttcaggtttctactctagtgaccatcaacaaaaaattaggtttggaagttgcttacttaaaagatagatgccatacacattcatggccaattacatttattttcagcctgtgttagaggcagtataagacgagatgatacagaggtattgtaggtcctctgatgtcctaggtgtcatttctttgttttggtggcgtcaccccataatattttaaatacatgaaaatttacctttgcccaatattaagcattatgggttttcatatttgcaaaattggaaagcactttataaacktgtgttttcacttcattacaattgtctgtaatctcaaaaaataattattatgcatattgggagatacttgcaaagggagaaaatcttaactatgaaaaggtttcaattgcacaactgataagtttgagaggtaaattaatagacatttagttaaaatttcttagtttttaatttgcatatcttttttcatagaaactaaaacatttttcacaatttaaatatttttctggttgctggaaaagtgtacttgccttccctgagcaatgttctatggtgcctaatgtatatatcaacccctgaagggtgtactataaatctttaccattcatctttagtcttctcttcatagacttgggagcacaaaaaaccctgtaatctggtttagattattacttctacatttgctaagcattcattatatatggccatcattatactcatcacatactacagtgtactaacttatttgtgtgactccctctgtaaaacagaggaaaggagatgggagcacattccttcatttactcaaatacatacatttattctaatagagacattcacataaagtgtatatttgttagatatttttgaatgtaactccctgaagggcactgttctattcactgaggatatggaagcaactaaaaaacaagtcccagctggccagaaggttatattttggttgtatgtctaatttaattttgcacctaaaaccttgcccaatatagtatgtttaacaagtattttcagattattaataaaatattgaaattgcatgtttaaagataagattgtttgaaattacttaaatttgcatgattttagtgtacattcaatattcagtgtaacaacttcaagccattagaaatatatatatatatataacatctactaattctaataaaaatcacttggaaatctgcatgtaaatgaaattaaaccttaattgatttgtttttaatttatttatatctattgcccaaatta

SEQ ID NO: 679667 - DNA, 1376 bp, Homo sapiens
cctaaagaatcttaaatgaaggacacatatgttaattttctatttgtatattctttatgatctcactgaaaaataaaaatgataaaattttgagtttcaggtttctactctagtgaccatcaacaaaaaattaggtttggaagttgcttacttaaaagatagatgccatacacattcatggccaattacatttattttcagcctgtgttagaggcagtataagacgagatgatacagaggtattgtaggtcctctgatgtcctaggtgtcatttctttgttttggtggcgtcaccccataatattttaaatacatgaaaatttacctttgcccaatattaagcattatgggttttcatatttgcaaaattggaaagcactttataaacttgtgttttcacttcattacaattgtctgtaatctcaaaaaataattattatgcatattgggagatacttgcaaagggagaaaatcttaactatgaaaaggtttcaattgcacaactgataagtttgagaggtaaattaatagacatttagttaaaatttcttagtttttaatttgcatatcttttttcatagaaactaaaacatttttcacaatttaaatatttttctggttgctggaaaagtgtacttgccttccctgagcaatgttctatggtgcctaatgtatatatcaacccctgaagggtgtactataaatctttaccattcatctttagtcttctcttcatagacttgggagcacaaaaaaccctgtaatctggtttagattattacttctacatttgctaagcattcattatatatggccatcattatactcatcacatactacagtgtactaacttatttgtgtgactccctctgtaaaacagaggaaaggagatgggagcacattccttcatttactcaaatacatacatttattctaatagagacattcacataaagtgtatatttgttagatatttttgaatgtaactccctgaagggcactgttctattcactgaggatatggaagcaactaaaaaacaagtcccagctggccagaaggttatattttggttgtatgtctaatttaattttgcacctaaaaccttgcccratatagtatgtttaacaagtattttcagattattaataaaatattgaaattgcatgtttaaagataagattgtttgaaattacttaaatttgcatgattttagtgtacattcaatattcagtgtaacaacttcaagccattagaaatatatatatatatataacatctactaattctaataaaaatcacttggaaatctgcatgtaaatgaaattaaaccttaattgatttgtttttaatttatttatatctattgcccaaatta

SEQ ID NO: 679668 - DNA, 603 bp, Homo sapiens
caatctatattaaatacctgtgagaagacccagacttgaaaatttgagtttttgtctacatgtaatatgtctaactgtagtagaatgcagtatgtttcagaaatatcttgccatgtccttgatgtgaagtttggtatgatcacttgctgtgaccaggatcttggagtgtagatgacacagagcagagcttcagtcaacctgcggtggacatctagcatggacataaataaatctttgttgttttaagccactgaagtttctttagccatagcaaaatacaatctatcttgacttatacactatcctgagctttgtatgtgtgatatcaaaagtatggatcagaagaataaatgtatttgttcttccttaattttagaggtatagtcagtgagaaaataaagcttaattccaccaaaggaatccgtttctatcactttaaagcaacttgtttgacatttaaagaaatatcttaaaaaacaggcaggaagyacagtgattctttatgttgtcacacagagaaatattaaaaataatggcatattttctttacaggagtaaaacgaattcatcacctttgtgaacatgatatttatgtacatttta

SEQ ID NO: 679669 - DNA, 642 bp, Homo sapiens
ctataaatacaaaattagccgggcgatgtggtccatgcctgtaatcccagctacttgggaggctgaggcaggagaatcacttgaacctggaaggtggaaggtggaggttgcggtgagccaagatcgtgccattgcactccggcctgggcaacaagagtgaaactctgtctcaaaaaaaaaaaaaaaattaaaacaaataaataaatagaaaggattgtagaaatgggaaatgtgagagtaaataagaagtttaccttttaaaagtttataacatatgtaaatatagagatgtaacatgcataaaaataaaggacaatgcaggaaagaaaatatgtggaagtatattgtttgaagattcttatgctacatgtgaagaaacatataaactaaatagacttctacatactaaagaaatgtagataaatatttttcacaaagagaactcgagattcagatggcttcacktagtcaacatggtcatataatttctagacagcataataaaggcatgaaaagaaaataaaaggcataaagattgtgaagaaaaaaataaaattgttctgatttgtagatgacataattgtctacatatgaaatctgaaggaacctaaaccaacaaacaaaagccagctactagaatta

SEQ ID NO: 679670 - DNA, 662 bp, Homo sapiens
tttcagttcacctgaagcacttactttaatcaatccctacaagagtgccaggagaaaggtgccttcatcatccccttatttccagatggggaaactgatgctcaaagaggtaaggtgatttgccctaacatcacccaggtcctccctgctggggccctggagcggcaggctgaggccaggcccgaggatttcagtggtacagggaggatatttaaatcatttctttttctttttcaccttctttatagcctgtctgcctgtggtggctcygacacttgccaattctccttcacaacaaagagtgggggcatgcagtcctcatgctcccaaagagacaaggaacagcatcaagccaggtttctcattacaggattttatttccactgtgcttctttttttggggttttttgttcgattatttgtatttatttatttattttagttagtttgtttttgtttttgtttttgtttgagatggagtctcactctgtcgcccaggctggagcacaatggcgtgatctcagctcattgcaacctccacctcccgggttcaagtaattatcctgcctcagcctcccaagaagctgggattacaggcatgcgccaccacgcccagctgatttttgtatttttagtagagatggggttttgccatgttggcc

SEQ ID NO: 679671 - DNA, 662 bp, Homo sapiens
tttcagttcacctgaagcacttactttaatcaatccctacaagagtgccaggagaaaggtgccttcatcatccccttatttccagatggggaaactgatgctcaaagaggtaaggtgatttgccctaacatcacccaggtcctccctgctggggccctggagcggcaggctgaggccaggcccgaggatttcagtggtacagggaggatatttaaatcatttctttttctttttcaccttctttatagcctgtctgcctgtggtggctccgayacttgccaattctccttcacaacaaagagtgggggcatgcagtcctcatgctcccaaagagacaaggaacagcatcaagccaggtttctcattacaggattttatttccactgtgcttctttttttggggttttttgttcgattatttgtatttatttatttattttagttagtttgtttttgtttttgtttttgtttgagatggagtctcactctgtcgcccaggctggagcacaatggcgtgatctcagctcattgcaacctccacctcccgggttcaagtaattatcctgcctcagcctcccaagaagctgggattacaggcatgcgccaccacgcccagctgatttttgtatttttagtagagatggggttttgccatgttggcc

SEQ ID NO: 679672 - DNA, 946 bp, Homo sapiens
tgacctcgtgatccgcctgcctcggcctcccaaagtgctgggattacagacgtgagccaccgcgccaggactttactgctcatttttttactcttaggttagatttatggttgaatggtcataagcatctagcagagacagcacaaacttgtctcgccccaacccaggaaaaaccagcaattctgaaaacactcctatttttatttcactaacaattgtaaaactatatttaccaaagatctccttcatgtgaacttagaaaaaactccacattttggattagtttcaacatttctgtgcattttcagagtaacttataagagtgctcatttacccccaagccaatttgaatacacgtcccttaaaggattgtataaattggtttagtaacgccatccaaaaatatcatataaattaacatataaacctacatasactcacagaaagatgctcaaacatgcagacgtaagctgacaaacgctgatttaagagttacttattaggagaaatccaaaggtcattctaggctgttggttgccctgacattgctatcactgcaagactgtgcatttagaagcatttttgttttgtatcttgtgctaaggtcctttgaaaatgttcagctaacatagatgagtctgtagcttccctccctatcttttttctctttcttttatgtatctactaatgtgcaggtagagttcatttgccaagagagtagcgagggctggctgaattgactcaaatgctggaagaaaaaacctccaagagggctttgacatcagttacgggttcatccttctttcatctgcaggtctggttcactgaccagtcagcacaggtaggaaacagtagaaatggctttcaaaagtttgccatttttggccaggcgcggtggctcacacctgtaatcccagcactttgggaggccgaggcgagcagatta

SEQ ID NO: 679673 - DNA, 1817 bp, Homo sapiens
atggatgtagttttttttatatctttacaaattaaaatagattttatagaaatttatcatctacaaacagatgaaatgacttcttaatgaatgggtggttaggtggacggatggatgaatagacagatgataagcccagttacttcatttggcttattaaggtaactgaaattacttcaaggttaaattaagacaaagtaggacagaaagatgaaggtaaggatacacagagagggattggggaagggagaagaggaggggagaaggagaaaatcatatttttattatagttctattaaacaacagatgaaataaaaactttaaaatttgatttaaacataaaagataacatgaattttaagagagctaaatcacatgaatacaacaaagagtggaaaacgaagattttgagataattaattttgcattataatcaaatggaagaaggcaggaagaaagaaaagaaagaaggaggataaaagaaaatatctcctctaaatagggtattaaaagttacagcatttgaaaataaaataataatttgagattaaacgtccccccaaaatactaaattaagctcactgtaattagcatgctgctaccattgattggtacaaattttctcttaagattcccatatattttgccactttttttcaccacagctagaacagtcccaccaccctgttcagatttaaaactcagctaacatgggttatcatatgtcatatacctgtttgtcacatggactaggacatataaacttcagtcactttaatgagttttacatgtcttctccagtatccattctaatattatactttccccacataaaaatagtactgccacttgtttctaattcttatttcttctaatttgcattggctaggatttccaacatactattgaaatatatgggcaatactgagctccttatttttccttctgagtttaacaggaatgtttacagtttcacagttgcatatgatgtttgctgaaggtattcatagaataccttactaacttagggaaataactttctgatatcaatgcatgtctgagtgaagaaggaggcaacattatttgatatataggtcaaaggtgaatggaagtttattagtaatatttggaaaaggattcaaagattagaacagccactgagggaaatatggaagagctgaataagtactacaggagtgcttaatgtaatgagtcagaaaatatgttgcttcagctgaggatggagtgcatgagtttggagagcactaacatagtactcagttgagtgatattcatcctagtggctgaaacaaagatgagtaaatttagattcaatttaggttgacgttttgcagatcatgtgtggagaaagaccaaaggtataaaagctgtcagtgaagttgaaagtgaaagaaggcataacacttacagggatctatggggaatgagtaaaagagtaaggttagagggagcccgataatttggagaaaagaatacagtagtaaagagaatggaatcatcagtgatgaaaaagagcagacattttacaaaaaaaaggaactttatcagggagtgagatttaggtatttaagatttcagagagaaagttctgagacatgactaggtattgtcacaagagtaaagaagggtgcaggtagaggtcatctagattgaggtcaaatcrttattaaatagtgttgggtgaactaataatataaacgtgaaattgcacatgaccagaaagaacttgggacagtggtaggtggccaacatccataagaaatgtgggtgagaatcaagatcaatcacagctttaa

SEQ ID NO: 679674 - DNA, 709 bp, Homo sapiens
ttttacaaacatttctcctctttgtttttagtgtttagaaactactaccttaaaagagagttgaggacagggacatgtctggactaagtggaatttagtgcttagagttaggatttggaatataaatatggaagttamtatttagaattaggatttctgaatctgtgaaggaaaggtaaaataaaattttgatgtcagttcagcttaagcttctaaatcattctcgctgaaccaaagcttccagttggtaaaaatctaagatctgaggaataaaaccaacataagaagctgacttttggtaagccttaacagtgatagaagagggacaaggtggcagttcgattctcctattttccccatagactgcaggccccttggctaaccgtaaaccttctaccctttaactccctgtcgtccattcagcaggccttcctgtgacccgtgagtatcagtggaagcattccctccaataagttaccacggcctaagaaaaaagtctaaaaaattatgtttcctgaagttttcacagtatttaagtatttacgtaaaggagtatttgttgtatcctagagagtgaatatggagaagggtacccctggagcactagaaataagcctgccaattttcagtattagccaagcagcaaagttttgctgctgtttatttttgtagctcttactatattctacttttaccattgaaaatattg

SEQ ID NO: 679675 - DNA, 709 bp, Homo sapiens
ttttacaaacatttctcctctttgtttttagtgtttagaaactactaccttaaaagagagttgaggacagggacatgtctggactaagtggaatttagtgcttagagttaggatttggaatataaatatggaagttaatatttagaattaggatttctgaatctgtgaaggaaaggtaaaataaaattttgatgtcagttcagcttaagcttctaaatcattctcgctgaaccaaagcttccagttggtaaaaatctaagatctgaggaataaaascaacataagaagctgacttttggtaagccttaacagtgatagaagagggacaaggtggcagttcgattctcctattttccccatagactgcaggccccttggctaaccgtaaaccttctaccctttaactccctgtcgtccattcagcaggccttcctgtgacccgtgagtatcagtggaagcattccctccaataagttaccacggcctaagaaaaaagtctaaaaaattatgtttcctgaagttttcacagtatttaagtatttacgtaaaggagtatttgttgtatcctagagagtgaatatggagaagggtacccctggagcactagaaataagcctgccaattttcagtattagccaagcagcaaagttttgctgctgtttatttttgtagctcttactatattctacttttaccattgaaaatattg

SEQ ID NO: 679676 - DNA, 636 bp, Homo sapiens
ttctgttccagagcctaacaggacttacatatttgactgcagtaggcattatatttagctgatgacataataggttctgtcatagtgtagatagggataagccaaaatgcrataagaaaaaccatccagaggaaactcttttttttttctttttcttttttttttttccagatggagtctcgcacttctctgtcacccgggctggagcgcagtggtgcaatcttggctcactgcaacctccacctcctgggttcaggtgattctcccacctcagcctcccgagtagtagctggaattacaggtgcgcgctcccacacctggctaattttttgtattcttagtagagatggggtttcaccatgttggccaggctggtctcaaactcctgccctcaggtgatctgcccaccttggcctcccagtgttgggtttacaggcgtgagccaccgcgcctggcctggaggaaactcttaacagggaaactaagaaagagttgaggctgaggaactggggcatctgggttgcttctggccagaccaccaggctcttgaatcctcccagccagagaaagagtttccacaccagccattgttttcctctggtaatgtcagcctcatctgttgttcctaggcttact

SEQ ID NO: 679677 - DNA, 601 bp, Homo sapiens
tctggcttcaggtaaggctctgtgaggacagcctacattggaaatcaggaagaggaatgaagttttaaagaatcaggaatatggcatccttggggaacaaggctggatccttcactgtgcacaggtttgtaacaaagatgtcacagatacttgagctttctgctttcagatcaaggcagaagattacacttgataacacctctaggcccttgactttttttwaataaaattctaaaatcatagaaatagatgcttacattatctaactcattttcatagtttgcagtttttgcttaaagaacatgccatgcagctgggcatggtgtctcacacctgtaatcgcagcactttggaaggccgaggcgggcagatcacctgaggtcaggagttcgagaccagcctaacatggtgaaactccgtctctattaaaaatacaaaaattagctgggcatggtagcatgtgcctgtaatcccagctactcgggaggctgaggcaggagaattgcttgaacctgggaggcggaggttgcagtgagccgagatcgtgccattgcactccagcccaggcaacaagagcgaaactccgtctcaaaaaaaaaaa

SEQ ID NO: 679678 - DNA, 636 bp, Homo sapiens
catccttacaggtggaagggaagaactagctctctgtggtctctcactaatcctaatcttgagggccccacccttatgatagaatcaccttctaaaggtcccatctcctaataccatcaccttgggggttagaatttcaacatatgatttttttggggggtcatacacattcagaccataacatccactaagtatggttcaataattttctgcagcttgtacaataacaacacacagagtacagtattaaaatttacttggattaatacttttttctttatgggtatattatcaagttgatatatggtgaagttcattttttagtattcagtttaaaaaagtgtttttttttkgttttttttttttaaagagttgagtcttgctttttcacccagtctggagcgcagtggcacaatcataccttaccgtaacctcaaactcctgggcttaaacaatcctcctgcctcagcttacccagtatctaggactatagtcatgcaccaccttgcttgaatattttttttttatagagacagggtctcactatgttgcccaggctggtcttgaactcctggactcaagcaatctttctgcttcagcctcccaaagtgctgggattacagaattgagccacca

SEQ ID NO: 679679 - DNA, 1532 bp, Homo sapiens
gacaaaaggactcagtctcttacaggaatataaaaagaatcttaaacatgcagatgctgccagcttctagcacattccagtgacaaatctcagtttccaaaaccactactaaacatctgaaaggagcaaaaccacctcaaagtgacacaagatatctggacaacagaaagttggtccctgccacatgagctatccactttatttgggattcattaggatttccacagacacagctattagaaacaacgtgctcttcttcaatttgtacatataaaaccctttgcttcatgaaatgtcctttaaaacacaaagagatcacaagccaggccaggaaaaagtctgcacacacctggacatctcacctccaatctgaaaggctccagtcacccagcactgaagggtaaagggggctcagggaggccctaggagtcctcctgagcaggggatcagtaaatgacccacactctactattaatgagaggtgaattccgtaacctgtaagtctagagatattatamatttataagtattaatttaattttaaaatgtaacacggggtacccagaacgttgtttgactttgacagtctaacatctaacatatgttgtatccaaaaacagacaactgtttttgtttttacctggacactggcaggcagggcaaacaacatgcgctacatgaaagtggtagctctcgcctctcattttaatcttcctaaagaactctgaacatgttaatacaatgattccacattttaagttttcctttaaatactttctgtacttttttcttgagccaaatctgctcaacagatttgaacacaagggcacattcatatttttatgtaactattaaatttctgttatctaaactacatgcatccaaagcatgaacaccaaacgacattccggcaacactttaaaactgagctgcaaagtctggcttttatgtgtagcataaaacccatttagagcactaaaccaccatttcttaaaaagacaaacctttaaataatttatagcactagtaaatctagagttcctggtagattttaaaacagtatttaaaatatcactttagattaaaaccagcagcaagaagtctacttccttatgtcataacaagccaagttaaaatgcaatactagcaggccatctagtgaccaatttagggtctaggaaaataaaaaaatcctgatttgttagtgttttctattttcttaaatacataccaaacaaagaaaatgaagatgctgtgagaaaacgctaagaaatgcagtctttatatgaatgaccactttatctatcctgattatattacatagccacagtgaaagagaaggcaacccagaaaatgacagagaattcttaactttatgtaaagtacccatggtaaccaaaggacccatcatcctatattacccgttgtacagcatactaaaaacatttttcttggacaatgaaataaatactgtatcttactgaagaccattaaacaattccaggtacaattcacttcagaagagtctctcc

SEQ ID NO: 679680 - DNA, 1532 bp, Homo sapiens
gacaaaaggactcagtctcttacaggaatataaaaagaatcttaaacatgcagatgctgccagcttctagcacattccagtgacaaatctcagtttccaaaaccactactaaacatctgaaaggagcaaaaccacctcaaagtgacacaagatatctggacaacagaaagttggtccctgccacatgagctatccactttatttgggattcattaggatttccacagacacagctattagaaacaacgtgctcttcttcaatttgtacatataaaaccctttgcttcatgaaatgtcctttaaaacacaaagagatcacaagccaggccaggaaaaagtctgcacacacctggacatctcacctccaatctgaaaggctccagtcacccagcactgaagggtaaagggggctcagggaggccctaggagtcctcctgagcaggggatcagtaaatgacccacactctactattaatgagaggtgaattccgtaacctgtaagtctagagatattataaatttataagtattaatttaattttaaaatgtaacacggggtacccagaacgttgtttgactttgacagtctaacatctaacatatgttgtatccaaaaacagacaactgtttttgtttttacctggacactggcaggcagggcaaacaacatgcgctacatgaaagtggtagctctcgcctctcattttaatcttcctaaagaactctgaacatgttaatacaatgattccacattttaagttttcctttaaatactttctgtacttttttcttgagccaaatctgctcaacagatttgaacacaagggcacattcatatttttatgtaactattaaatttctgttatctaaactacatgcatccaaagcatgaacaccaaacgacattccggcaacactttaaaactgagctgcaaagtctggcttttatgtgtagcataaaacccatttagagcactaaaccaccatttcttaaaaagacaaacctttaaataatttatagcactagtaaatctagagttcctggtagattttaaaacagtatttaaaatatcactttagattaaaaccagcagcaagaagtctacttccttatgtcataacaagccaagttaaaatgcaatactagcaggccatctagtgaccaatttagggtctaggaaaataaaaaaatcctgatttgttagtgttttctattttcttaaatacataccaaacaaagaaaatgaagatgctgtgagaaaacgctaagaaatgcagtctttatatgaatgaccactttatctatcctgattatattacatagccacagtgaaagagaaggcaacccagaaaatgacagagaattcttaactttatgtaaagtacccatggtaaccaaaggacccatcatcctatattacccrttgtacagcatactaaaaacatttttcttggacaatgaaataaatactgtatcttactgaagaccattaaacaattccaggtacaattcacttcagaagagtctctcc

SEQ ID NO: 679681 - DNA, 890 bp, Homo sapiens
ggcacatataaaatgttcaggaaatattgcttgaataaataattaaaatctcatgaccctcccctggctgaaattacagtcagccctccatatctataggttctgcatctgcagattcaaccaagcttggtttggaggaaaaaaaataaagacaacaatacaaattactttaaaatactgtataacaactatttacattgcatgtacattgtgttattataagtaatcctggagatgttttaaagtatatgggaagatggacacaggttatgtgcaaataccaagccatttcatatcagagacttgagcatcctcagattttggtatcctggggagttcctgggacaagtctccctgatattgaggaattactatatttagaacctgggctgtctgcaattctgttggttgaaaatttatgtaataccccaggaaggacaaaggagtttcagccattccctgctcccattgcatttgtcttctcctaatatctaattgaggaattatgggattttgttttgcagagaaggaggagacaaatctgtattttgtaacctaaagtttggaagggccatggactatgggaaaagaatagaacaagaataaggaataagccagaaagtgagagagataaaccaattatcttccagcggtggtctttttatttcccctctcacacttcagatggaaaccggcttttccttcagaagacaggaaagccctaaagcatcaagggctccatcctctctgctgractggctgtgaggtcaggggcagcggtggaaggaattttccttgttcctcaatgcttacatttcatagtgaagggagaaaaatacgttctccttggaggaaatgtagagacttcctggggagttcagctatgaggc

SEQ ID NO: 679682 - DNA, 890 bp, Homo sapiens
ggcacatataaaatgttcaggaaatattgcttgaataaataattaaaatctcatgaccctcccctggctgaaattacagtcagccctccatatctataggttctgcatctgcagattcaaccaagcttggtttggaggaaaaaaaataaagacaacaatacaaattactttaaaatactgtataacaactatttacattgcatgtacattgtgttattataagtaatcctggagatgttttaaagtatatgggaagatggacacaggttatgtgcaaataccaagccatttcatatcagagacttgagcatcctcagattttggtatcctggggagttcctgggacaagtctccctgatattgaggaattactatatttagaacctgggctgtctgcaattctgttggttgaaaatttatgtaataccccaggaaggacaaaggagtttcagccattccctgctcccattgcatttgtcttctcctaatatctaattgaggaattatgggattttgttttgcagagaaggaggagacaaatctgtattttgtaacctaaagtttggaagggccatggactatgggaaaagaatagaacaagaataaggaataagccagaaagtgagagagataaaccaattatcttccagcggtggtctttttatttcccctctcacacttcagatggaaaccggcttttccttcagaagacaggaaagccctaaagcatcaagggctccatcctctctgctggactggctgtgaggtcaggggcagcggtggaaggaattttccttgttcctcaatgcttacatttcatagtgaagggagaaaaatacrttctccttggaggaaatgtagagacttcctggggagttcagctatgaggc

SEQ ID NO: 679683 - DNA, 1340 bp, Homo sapiens
tgcccatccttgccttccgccatgattgtaaggcctccccagccatgtggaactgtaagtataccttatattatgtctagctctgagtagactaaaacataaaagagaatgttcattgatttaagctagacaatacagtatcattggattgtggatataatcaaagtgtcagtgatgaattkttcaaatcatccttttttaaaaaacaatactattcaaaggtggtctgtaaccaaaacttctatacagcatgtggatacgttgaatatatcatagatatttatagctaggtggaactagagattatttagtgcattgtacagaacaaaaactttagatgtactgaacttaggaaatttgactgtggtagtccacagaaagtcaagagtagatcccacatcctcctgatatcctgatcccttgcccagtgtgctctttcaatcctgccccaagtcatcaaaactatgctacccactgaagctgtcatctagattcctatttgtgatttggtgataatgcaattttcaatgtagttgattaatctcattatcaaatgaagatttacctggaaagtttttactttaagggctactacctaacaaatgatactaaaaattaagcagctcttctgtacctcaaaacattctgccaatagaaagccctccatatctcaatgaacaactgttttaataccttcatttctgatgtttagattcttatattttagttattgtttttaattagaagaaaaggagtctccactcattatattaatttaagagcaatgcacttcaaaggaatgcagatccattcctctcagttgtgacaaaacaagggagagcagagctctctctttaacaggaagatgtggctgaaaggtcttctggtgtagtgggaagcacaagtgctttagagtcagtcaaatggagtttcaaattccatatcagtcaatatttgcagtatggcttgggcaccttaagcaaccattctgaacttcaggttccttatctgcgtaataggagtaataatatcaattatttaattctctctgctgctgtaagcacttacccttctagatgacagaaaatgtattttaaagtctctgatgtggtgtcaatgctcaatggtctattttagcaataattttcaactgggtaattgtccaagacctgtgctatgagtagatagtcagaagcatcattatagggtgaggaagctgatcctatcagctggtgctaaaaatcattcaagactgttataaacagtccatacagttagttaccttttaaatttgctttgctccaggtttgggactagcagttagcaagtgttcccctctt

SEQ ID NO: 679684 - DNA, 1340 bp, Homo sapiens
tgcccatccttgccttccgccatgattgtaaggcctccccagccatgtggaactgtaagtataccttatattatgtctagctctgagtagactaaaacataaaagagaatgttcattgatttaagctagacaatacagtatcattggattgtggatataatcaaagtgtcagtgatgaatttttcaaatcatccttttttaaaaaacaatactattcaaaggtggtctgtaaccaaaacttctatacagcatgtggatacgttgaatatatcatagatatttatagctaggtggaactagagattatttagtgcattgtacagaacaaaaactttagatgtactgaacttargaaatttgactgtggtagtccacagaaagtcaagagtagatcccacatcctcctgatatcctgatcccttgcccagtgtgctctttcaatcctgccccaagtcatcaaaactatgctacccactgaagctgtcatctagattcctatttgtgatttggtgataatgcaattttcaatgtagttgattaatctcattatcaaatgaagatttacctggaaagtttttactttaagggctactacctaacaaatgatactaaaaattaagcagctcttctgtacctcaaaacattctgccaatagaaagccctccatatctcaatgaacaactgttttaataccttcatttctgatgtttagattcttatattttagttattgtttttaattagaagaaaaggagtctccactcattatattaatttaagagcaatgcacttcaaaggaatgcagatccattcctctcagttgtgacaaaacaagggagagcagagctctctctttaacaggaagatgtggctgaaaggtcttctggtgtagtgggaagcacaagtgctttagagtcagtcaaatggagtttcaaattccatatcagtcaatatttgcagtatggcttgggcaccttaagcaaccattctgaacttcaggttccttatctgcgtaataggagtaataatatcaattatttaattctctctgctgctgtaagcacttacccttctagatgacagaaaatgtattttaaagtctctgatgtggtgtcaatgctcaatggtctattttagcaataattttcaactgggtaattgtccaagacctgtgctatgagtagatagtcagaagcatcattatagggtgaggaagctgatcctatcagctggtgctaaaaatcattcaagactgttataaacagtccatacagttagttaccttttaaatttgctttgctccaggtttgggactagcagttagcaagtgttcccctctt

SEQ ID NO: 679685 - DNA, 1340 bp, Homo sapiens
tgcccatccttgccttccgccatgattgtaaggcctccccagccatgtggaactgtaagtataccttatattatgtctagctctgagtagactaaaacataaaagagaatgttcattgatttaagctagacaatacagtatcattggattgtggatataatcaaagtgtcagtgatgaatttttcaaatcatccttttttaaaaaacaatactattcaaaggtggtctgtaaccaaaacttctatacagcatgtggatacgttgaatatatcatagatatttatagctaggtggaactagagattatttagtgcattgtacagaacaaaaactttagatgtactgaacttaggaaatttgactgtggtagtccacagaaagtcaagagtagatcccacatcctcctgatatcctgatcccttgcccagtgtgctctttcaatcctgccccaagkcatcaaaactatgctacccactgaagctgtcatctagattcctatttgtgatttggtgataatgcaattttcaatgtagttgattaatctcattatcaaatgaagatttacctggaaagtttttactttaagggctactacctaacaaatgatactaaaaattaagcagctcttctgtacctcaaaacattctgccaatagaaagccctccatatctcaatgaacaactgttttaataccttcatttctgatgtttagattcttatattttagttattgtttttaattagaagaaaaggagtctccactcattatattaatttaagagcaatgcacttcaaaggaatgcagatccattcctctcagttgtgacaaaacaagggagagcagagctctctctttaacaggaagatgtggctgaaaggtcttctggtgtagtgggaagcacaagtgctttagagtcagtcaaatggagtttcaaattccatatcagtcaatatttgcagtatggcttgggcaccttaagcaaccattctgaacttcaggttccttatctgcgtaataggagtaataatatcaattatttaattctctctgctgctgtaagcacttacccttctagatgacagaaaatgtattttaaagtctctgatgtggtgtcaatgctcaatggtctattttagcaataattttcaactgggtaattgtccaagacctgtgctatgagtagatagtcagaagcatcattatagggtgaggaagctgatcctatcagctggtgctaaaaatcattcaagactgttataaacagtccatacagttagttaccttttaaatttgctttgctccaggtttgggactagcagttagcaagtgttcccctctt

SEQ ID NO: 679686 - DNA, 1340 bp, Homo sapiens
tgcccatccttgccttccgccatgattgtaaggcctccccagccatgtggaactgtaagtataccttatattatgtctagctctgagtagactaaaacataaaagagaatgttcattgatttaagctagacaatacagtatcattggattgtggatataatcaaagtgtcagtgatgaatttttcaaatcatccttttttaaaaaacaatactattcaaaggtggtctgtaaccaaaacttctatacagcatgtggatacgttgaatatatcatagatatttatagctaggtggaactagagattatttagtgcattgtacagaacaaaaactttagatgtactgaacttaggaaatttgactgtggtagtccacagaaagtcaagagtagatcccacatcctcctgatatcctgatcccttgcccagtgtgctctttcaatcctgccccaagtcatcaaaactatgctacccactgaagctgtcatctagattcctatttgtgatttggygataatgcaattttcaatgtagttgattaatctcattatcaaatgaagatttacctggaaagtttttactttaagggctactacctaacaaatgatactaaaaattaagcagctcttctgtacctcaaaacattctgccaatagaaagccctccatatctcaatgaacaactgttttaataccttcatttctgatgtttagattcttatattttagttattgtttttaattagaagaaaaggagtctccactcattatattaatttaagagcaatgcacttcaaaggaatgcagatccattcctctcagttgtgacaaaacaagggagagcagagctctctctttaacaggaagatgtggctgaaaggtcttctggtgtagtgggaagcacaagtgctttagagtcagtcaaatggagtttcaaattccatatcagtcaatatttgcagtatggcttgggcaccttaagcaaccattctgaacttcaggttccttatctgcgtaataggagtaataatatcaattatttaattctctctgctgctgtaagcacttacccttctagatgacagaaaatgtattttaaagtctctgatgtggtgtcaatgctcaatggtctattttagcaataattttcaactgggtaattgtccaagacctgtgctatgagtagatagtcagaagcatcattatagggtgaggaagctgatcctatcagctggtgctaaaaatcattcaagactgttataaacagtccatacagttagttaccttttaaatttgctttgctccaggtttgggactagcagttagcaagtgttcccctctt

SEQ ID NO: 679687 - DNA, 1691 bp, Homo sapiens
ctctctttattttattatttcgtctgttcttactgttctttgtatttatttacttatttagcaaatctaacaattattcaaatcagtctccaactgtgaattctgtttccaaatatttaaacatgtcatagttattgaagtctgtgaggctaactgatgaatatgataacaaatactttcatcagctaaagatatttgcttcagtagttcagttctttgttaatttactggaggtgcttgagcaagattgtaattccatttcattgtactctgaattttttcctcaaaatattgttaattttcttctagaaatgggtaagcaaacatttatactaaagaaagtgaattctattattttgtgttatagtttatggcactttatgaatttcatactaatttcctagattcaaagagagtaaaatcataaatacactaattttgttgttcacaagcattcagctatgtttgtgcagacatttcccccatgtaattattgaaagattcagctttcatcawgtccatcagtttgtggttttaggaaatttcagcaaatgttggtatggctatgattgcatttctacactgctctttggggaatctcttacctttgagaatcattcatttgggaacttttagctgggtttagcatcagaatgtgtaaggcaaatttttatgcctagatatggtttccccagcagaaattgaattatctggcttggtaagaggataggacagcatagcaggcccctttctgtccctctacaatatctgcaaacataaattctcaatatgagggtggttgttgttgtttggtacattgttaatcactccataggctgcatacatcaggataaaagttaatttagttattacccattttagagttgatgggtctaaggcaaaactaaatgagttttatattttgcacctttacccaatataattttaaatatacattattatttatatatgtctctcattaaatgatgttggattattcatagccaaagtcacttcctcagttccatctgaaattcccttactcttctagaacaataataatttaacttttgtttgtttctgagagaaatcctagatgggtaatgtgaggtactacggtggagatatgaattagtctggttgaatttgtatctaatatatgtctactacaaaaatccaatttctaatttcctggtaatctgggaggaaaatgagttatttgaaagtgtgtactacatattttatcaaatgatattattttctatgatgcaaaagtcgattttcattaggcttactcagtgtcaagtgtatattttgaggaaaggaatattccctcttaacactaccagaaatgtttttatcaatgaacaaaatcttcaggaagtacagctaatgaatgaggtaaaatgtaacactaagaaatgaataagcaggatctgctgatctaggaacacaatgaaaaggaaataaaaataaaattcaattaggatacggtagtttatactcaaatcttgcttgtactttttcaacttcaatattctttagatcacttctggtttccacagtgaaaccatggttggtaagcaacactaaaggaatactattgaggtcatgtctgttccataaacatttaaaattttccataagccccaagaatctagaggttagtatggaaataactcttgggaaaa

SEQ ID NO: 679688 - DNA, 1129 bp, Homo sapiens
gatttccagttttagtctcatgcatcttattttttgtttgcattcaactgtttaacccaatttttttttttttttttttttgagacagggtctcactctgacacccagagtggagtgtcatggtgcagtcatagcttactgcagtctccacatcctgggctaaagtaatccttccacctcagcctcctgagtagctggcattaccatggccagctcatttttaatttaaattttttaaatttaatttttaattttaaacagacacacaacaccacacccagctatttttgtttgtttgtttgtttgtttgtttgtttttagtagatatgaggtctcactatgttgcccaggctggtctcaaactcctggactcaggcagtcctcctgacttgtcttcccaaagtgctgggattacaggcgtgggccaccatgcctggcccaattgtttaaactagacaaataaaagtcttttaaaatagcactgattaatcagtgttttaactttctttttatttgaaaaacataatcactaacagagttgtctgataatactcttaaatttgcattttaagaaaaaatgttttatgtgcggaagaaacaaagtttaaaaattgaaatctcaaaacatttcattatggccaatggcttctgaggactgatcatacatcagttaagaggcttaaagtaaacggaatccaatctctttgaccaatgtcctaatttgacttggggatatgggagcatataaatcaaaagtatttttccccagtcaggtaggtttattttatttatttatttatttatttatttattttatttatttttttgagacaaggtctcacctcactctgtcacccaggctggagtgcagtggcatgatcttggttcactgcaacctctgcctcctgggttcaagygattcttccacctcagccttctgagtaactgggactataggcgcctggctaatttttgtattttttgttagagatggggtttcaccatgttggccaggctgctctcaaactcctgggctcaagtggtccaccagccaaggcctcccaaagtgctgggattacaggcgtgagccaccgcacccggccccagttaggtttttaaattttttgaa

SEQ ID NO: 679689 - DNA, 785 bp, Homo sapiens
tttggaatttatcaagcagaaaggcaaatgataaaaattttaaaaggtaacatgtttaatatataaagagttcttgcaaacaaataaagaaaagatgtctccatatgttaacaatggatctaaattgcaaattcacagcagaaaaaataaaaatggccaataaacataaaaagttttaaccttcctggtaacaaatttaaaaaattaaaacaataaaattctccaacgtggtggggaaaaataaaataraataataatacacagttttggctaggactttgggaaataggtaacttcctgctatggttttgggaattttagtttggagatcagtttgacattatgtatcaaaatccttgaaaaagagcataatatctgatccaggttaggggtgaattatcagccagtaattggacaagttgccaaagatacaagtgcaaaaatgtaaatggcggtatttttattttaatcatgaaaaatgagaaacaacttaaattattggtaatatggggtcatagatgtcataattaagccataaaaagaaaggctaccaaatacggtaccatgaatagtttgatgtaattttattcaggaaaaatgcacacatattagtaaatacacacatatataaatatatgtcatagtgtacatacaaattatatatatttctatgtgtgcatgcatatgtgtgtatatatatggagagagagagacagtgccagtcttggttctcagtgctttacatataacaattcatttaatcctccctacaaccccaagaagtg

SEQ ID NO: 679690 - DNA, 785 bp, Homo sapiens
tttggaatttatcaagcagaaaggcaaatgataaaaattttaaaaggtaacatgtttaatatataaagagttcttgcaaacaaataaagaaaagatgtctccatatgttaacaatggatctaaattgcaaattcacagcagaaaaaataaaaatggccaataaacataaaaagttttaaccttcctggtaacaaatttaaaaaattaaaacaataaaattctccaacgtggtggggaaaaataaaataaaataataatacacagttttggctaggactttgggaaataggtaacttcctgctatggttttgggaatttyagtttggagatcagtttgacattatgtatcaaaatccttgaaaaagagcataatatctgatccaggttaggggtgaattatcagccagtaattggacaagttgccaaagatacaagtgcaaaaatgtaaatggcggtatttttattttaatcatgaaaaatgagaaacaacttaaattattggtaatatggggtcatagatgtcataattaagccataaaaagaaaggctaccaaatacggtaccatgaatagtttgatgtaattttattcaggaaaaatgcacacatattagtaaatacacacatatataaatatatgtcatagtgtacatacaaattatatatatttctatgtgtgcatgcatatgtgtgtatatatatggagagagagagacagtgccagtcttggttctcagtgctttacatataacaattcatttaatcctccctacaaccccaagaagtg

SEQ ID NO: 679691 - DNA, 785 bp, Homo sapiens
tttggaatttatcaagcagaaaggcaaatgataaaaattttaaaaggtaacatgtttaatatataaagagttcttgcaaacaaataaagaaaagatgtctccatatgttaacaatggatctaaattgcaaattcacagcagaaaaaataaaaatggccaataaacataaaaagttttaaccttcctggtaacaaatttaaaaaattaaaacaataaaattctccaacgtggtggggaaaaataaaataaaataataatacacagttttggctaggactttgggaaataggtaacttcctgctatggttttgggaattttagtttggagatcagtttgacattatgtatcaaaatccttgaaaaagagcataatatctgatccaggttaggggtgaattatcagccagtaattggacaagttgccaaagatacaagtgcaaaaatgtaaatggcggtatttttattttaatcatgaaaaatgagaaacaacttaaattattggtaatatggggtcatagatgtcataattaagccataaaaagaaaggctaccaaatacggtaccakgaatagtttgatgtaattttattcaggaaaaatgcacacatattagtaaatacacacatatataaatatatgtcatagtgtacatacaaattatatatatttctatgtgtgcatgcatatgtgtgtatatatatggagagagagagacagtgccagtcttggttctcagtgctttacatataacaattcatttaatcctccctacaaccccaagaagtg

SEQ ID NO: 679692 - DNA, 785 bp, Homo sapiens
tttggaatttatcaagcagaaaggcaaatgataaaaattttaaaaggtaacatgtttaatatataaagagttcttgcaaacaaataaagaaaagatgtctccatatgttaacaatggatctaaattgcaaattcacagcagaaaaaataaaaatggccaataaacataaaaagttttaaccttcctggtaacaaatttaaaaaattaaaacaataaaattctccaacgtggtggggaaaaataaaataaaataataatacacagttttggctaggactttgggaaataggtaacttcctgctatggttttgggaattttagtttggagatcagtttgacattatgtatcaaaatccttgaaaaagagcataatatctgatccaggttaggggtgaattatcagccagtaattggacaagttgccaaagatacaagtgcaaaaatgtaaatggcggtatttttattttaatcatgaaaaatgagaaacaacttaaattattggtaatatggggtcatagatgtcataattaagccataaaaagaaaggctaccaaatacggtaccatgaatagtttgatgtaattttattcaggaaaaatgcacacatattagtaaatacacacatatataaatatatgtcatagtgtacatacaaattatatatatttctatgtgtgcmtgcatatgtgtgtatatatatggagagagagagacagtgccagtcttggttctcagtgctttacatataacaattcatttaatcctccctacaaccccaagaagtg

SEQ ID NO: 679693 - DNA, 651 bp, Homo sapiens
aggtctgtccaagttcgaagtgtgtgcctgaccatgcagttcgggtctaagaccagaggtaaatactgactttgtggagagtgagtgcccacttcctattccctcatccaccctggaaagcaccgggacaaaggggctcaatcaacgtttatggaatgaatgaatgactgggtgaatgaatgcatgaacacagcccccaccaacatgccaaaggatgtgaacaacagaaaaaaggccactgtgtaaagttccttttaaagctttaagacaaggacttgagggatgaggagtctgggttttgggtggctttattctcttttggtccggattcttttaaatgtggagggggaatactttaagttctggagacagagaagggtgctgagggttgcctagagaagacagaataacttactctaaattccagtttggtctctagagcrgggagtggcaaaccttctttggaaaagggtaagcagtaaacattttaggctttaaggaccagagagtctctgttgcaactgcttagctctgcttatgtagcatggaagcagccatatgtaaacaaatggatgtggctgtgtttcaataaaactttatttaaagactttgaaatgtgagcttactttgtattatttttgcatgtcacaa

SEQ ID NO: 679694 - DNA, 1988 bp, Homo sapiens
attttctttaaatttaagtataaggtaccacttcataagcagagtttcattatatgcactaggtgcactaaaaattctccttcatatacctgttgtattactgaactttttctgttagattatttgattaatgttggtccctcaaactagtccataagatctatgttgtcaggaattatgcagatttaaattatccttccatctcgccatatatcaaagttgatgccatgtggtaaggacttaataagtattgtctgaatgagtacatttaattgattgaataggatttgatgagtgtataaacatggcaagctgatcttgatgaatgtttcaagttttatggtttgagaaagaataaggagccacaaatggtggcaagttatagaggacaaataataggttcagagaattagaaaatgagtgacattcccttgtattatatcttaaatgctacaacattatttgaaataatgttttctataaaatgagggggaacttatatgaataaattttcttatatagcaaaggtgcgtgaggtgtacttccagawgtaacttaaaattgttcttatatcttttttcctttcactttttcctatctctactagtctttctatgatattaaaaatatatacatcaagcacaggaaactcctcaaaaggtcaccattaaatgaagacataattaacacatgggataaataactgacaagtaagtcaccgaggataagtgagacgtcaaagacgagacagtgtttaaagaccttttgagaagccagtaaacagtatcaatcatattgttgtcaagagggaggtgatcagcagagaccaattttgcagaaatacaggagacctgatgctgaaaagtctaagtgtcttatgtatgctttgaaacatgtaaggcagtagttcccagtggaggttttcccttgctcaggtgcaacagagtttgaagagtttgtgctgcttgttgaagcatcacaaatggcatgctttgacagctggggtacctgttgaataatttctctgtcaaatattcaaaataaaatggcacagatgttaaggtgcatgaatatgcagcaaaaatatcctcctgaaggacaacaaaaagctctttaaaagtttgaaaagatagaatgctctgttacttctctatagtcattttaattgttaccctttgtttttaaatttctattaaaattgaaagttctggtgatgttttaatttccaatgaaaaaaagtggaagctttgctatatctttatttctacctcaaattcaacaaacaccttcctttgatcagctttcaaagtgctgtttatgtgaatgtagcaaacctgcatatgtaccccctgaatgtacaataaaaatggaaattataaagtgaataaaataaaataaaatatatattccaagggtagctatcaaaaagaagaaagagaggtgcaggaaatttcaattcggggttataataactacgatggagtaaaaacttctcacttggtagtacagaagtggaacactccctagacccccgagagctcagagaagtattgatttgttacacatgatgtaatactaaaaataaaccctgagggataattaggaggttaaaaataatcttggcgaaagaagtgaagaagggcagagaatgtattatgtgaaggcctgaatgttaagaaaccaaacactagaagatctttaaattgtcaagcattgtttaatataagaaaataaatggagagttgtctcaaaaaaggaggccagagaacaaagcagagtccagattaaaaagtgtccagtttgccacattaaaaggtttggctctagggtgtggtggcctgtgcctgtaattccagctactctggaggctgaggcaggagaatcacttgaacccgagaggtggagtttgcagtgaggtgagatggcgccactgctcgccggtctgggcaacagagcgagactccatcttaaaaaaaataaataaaaat

SEQ ID NO: 679695 - DNA, 1308 bp, Homo sapiens
tgccatcctcttgcctcagcctcccaagtagctgggactacaggcgctcaccaccaggcccggctaattttttatatttttagtagagacggggtttcactgtgttagccaggatggtctcgatctcctgacctcgtgatccgccctcctcgacctcccaaagtgctgggattacaggcgtgagccactgtgcccggcctatttttgatttttgagacagagtcttgttgtgacgcycaggctgaagtgtggtggtgtgatctcagctcactgcaacctctgcttccgcagttcaagtgattctcctgcctcagcctcctgagtagctgggactacaggcgtgtgccaccatgcccagctcatttttgtgtttttagtagagatggagtttcaccatattggccaggctggtctcgaactcctgacctcaggtgatccgcccgcctccgccttccaaagtgctgggagtataggcgtgagccaccgtgcctggcccctagattccatttgtatctctgttcttaagcaaaacttttttctccttagacttcagattttcctgtccttgatcccagctggactgctcaagaagaaatggcccttttagaagctgtgatggactgtggctttggaaattggtaagagcttggtgttaagagttgtcctgccctagtggactcagagaagaagctgttgttgaagagtaaaggaaggaacctcaggaagagaaagtatgtgttgctttcctatcaacccatgatttagaggcaagttagtcccctctgtacattatttttccagtgtcgaaatgtgtcacgaggatatgggatgtttagcggtccatgactgagcagctttaaaaggccactttggatgtatcaacagtgggaagattgattattattcctttctgaatagtagggaagtttagtttcgttagttattactcccttctgattttatgaatttttgttagttgtagatgccctagtcatttaagtgaatcagactttagctagatggtcatacgtaagattcaagtttcacagacttcctgatagcattctctgtttttagctttcaaacacctacctgccttagtccaaaaccggcggaattgaatagcacttattgctgttgacctagggggcagcaccacttaatactaccactttcgtttttatcttttgggaacactttcatatggatgcttttattttatgaactagatagcagaggcattattgaatatattttgttcacaaattatctgaagcctagggggttgaaatgatttcttgtgattac

SEQ ID NO: 679696 - DNA, 649 bp, Homo sapiens
ctcgacctcccatattcttcccacttctagaggtgaccaagtcttatcaaacctacctatttgataatggctatttagtgacagccctcctttctagcgcctgggttcaggatctcacatagtctcctactgatcctgcaggtgccagtctcagcccctcctgccctcatccattgtctcagttcaatcttttaagatatgtaaacctgatctttttccagccctgtttaaaatctttgcctctaagcttaagatctgagttgcagccccatgtcaatcactaactggcatatggccctagacaagtcacttctcccaaatttgcattctttataaaattgaagtttgatcaacaacggcagttttcaaactcaagaactgtctcctgtgcagaggggtaaaggccaagtgagccaggatacaggatcctcattcctgatttcacaaggagcagcctcacttccactcattttatttaaggttctacccatggggcaaaaagcttaaaacaaaacaaaacaaaacaaaatcacctgactagatcactgtaaaacatctctcacctctcaaatgatatgayttttctataatctttaataagaccaaacgaaacactggatacaaaatcacccaaagatacaaaatcacc

SEQ ID NO: 679697 - DNA, 1042 bp, Homo sapiens
ttagattgattagttgacattgtgctacaagagtttcccttctctccatttatttatccatttatatcactatcaactcatttttattttaatatattgtttataatccattataatatgtatttattttgttaagttgttgtagaattggccaatggcccctcattcaagctggcttcaggttaaagtctgctgattttctcttcccttgatggttgttgaaatttttcttgttytgtgtgtgtcaactgattttacattgtatcctaaacatttttgctcttacattatgtgaagttcaattctgtaaaaaaccctgtggacattacttgatttttttttccttttctttagtaggcaatcaacctgcttagggtgagacaacaatgattaactcagttccacatgtgtgcagctcagaggcaggcataagatgttatatacatatttaggagatctcattttccatttttctatcttcttctatttcctcacttcctatggctgctagaattcattttatcttggtcctctggctaaaaccgtggtgtttttacctccctatgttagagaatttgagaaaatgacatatcttcaatggtctgcttcgggggctaagcagaaagagaaaaataacaaggattccctgcacaaaatttagaccacaaggggaacagttcctctggccagatagcattttttgtctcataattttagtaacttttaaatcactgctgacaccacagtaaagtttcatggtttacctggttccctgagcctaaaacaaataataaatgaatttttaaaagggggattattcctacagtctcctttcttggacctctgtaaagaaaaagagatatgatttttcctgaggcttttttttcatctgtgctcactgcacagttctgaaacagcagtcatcatttagtctaaacctgaatgtatgaaacaacagcaaaagatataaccaccacatcagccattattttgggtttgatttatctccttacctacctgcgattatgcacttttaagggcc

SEQ ID NO: 679698 - DNA, 1042 bp, Homo sapiens
ttagattgattagttgacattgtgctacaagagtttcccttctctccatttatttatccatttatatcactatcaactcatttttattttaatatattgtttataatccattataatatgtatttattttgttaagttgttgtagaattggccaatggcccctcattcaagctggcttcaggttaaagtctgctgattttctcttcccttgatggttgttgaaatttttcttgttctgtgtgtgtcaactgattttacattgtatcctaaacatttttgctcttacattatgtgaakttcaattctgtaaaaaaccctgtggacattacttgatttttttttccttttctttagtaggcaatcaacctgcttagggtgagacaacaatgattaactcagttccacatgtgtgcagctcagaggcaggcataagatgttatatacatatttaggagatctcattttccatttttctatcttcttctatttcctcacttcctatggctgctagaattcattttatcttggtcctctggctaaaaccgtggtgtttttacctccctatgttagagaatttgagaaaatgacatatcttcaatggtctgcttcgggggctaagcagaaagagaaaaataacaaggattccctgcacaaaatttagaccacaaggggaacagttcctctggccagatagcattttttgtctcataattttagtaacttttaaatcactgctgacaccacagtaaagtttcatggtttacctggttccctgagcctaaaacaaataataaatgaatttttaaaagggggattattcctacagtctcctttcttggacctctgtaaagaaaaagagatatgatttttcctgaggcttttttttcatctgtgctcactgcacagttctgaaacagcagtcatcatttagtctaaacctgaatgtatgaaacaacagcaaaagatataaccaccacatcagccattattttgggtttgatttatctccttacctacctgcgattatgcacttttaagggcc

SEQ ID NO: 679699 - DNA, 1042 bp, Homo sapiens
ttagattgattagttgacattgtgctacaagagtttcccttctctccatttatttatccatttatatcactatcaactcatttttattttaatatattgtttataatccattataatatgtatttattttgttaagttgttgtagaattggccaatggcccctcattcaagctggcttcaggttaaagtctgctgattttctcttcccttgatggttgttgaaatttttcttgttctgtgtgtgtcaactgattttacattgtatcctaaacatttttgctcttacattatgtgaagttcaattctgtaaaaaaccctgtggacattacttgatttttttttccttttctttagtaggcaatcaacctgcttagggtgagacaacaatgattaactcagttccacatgtgtgcagctcagaggcaggcataagatgttatatacatatttaggagatctcattttccatttttctatcttcttctatttcctcacttcctatggctgctagaattcattttatcttggtcctctggctaaaaccgtggtgtttttacctccctatgttagagaatttgagaaaatgacatatcttcaatggtctgcttygggggctaagcagaaagagaaaaataacaaggattccctgcacaaaatttagaccacaaggggaacagttcctctggccagatagcattttttgtctcataattttagtaacttttaaatcactgctgacaccacagtaaagtttcatggtttacctggttccctgagcctaaaacaaataataaatgaatttttaaaagggggattattcctacagtctcctttcttggacctctgtaaagaaaaagagatatgatttttcctgaggcttttttttcatctgtgctcactgcacagttctgaaacagcagtcatcatttagtctaaacctgaatgtatgaaacaacagcaaaagatataaccaccacatcagccattattttgggtttgatttatctccttacctacctgcgattatgcacttttaagggcc

SEQ ID NO: 679700 - DNA, 642 bp, Homo sapiens
tattccactttaaattcaaggtggagacattttgcactaaagaaataaaaactgccaggtgcactgactcatgctgtaatcccagcactctgagaggccaaggcaggaggatcacttgagctcaggagtttgagaccagcctgggcaacatagagagacctcatctctamcaaaaaaaaaaaaaaaaagatgaaaaaaaagtagctgggtgtggtggcatgcacctgtagtcccagctactcaagaggccgaggtgggaggattgcttgagcctgagaggtccaggctgcagtgagctgagatcatgccactgtactccagcctgggtgacagggtgagaccttgttcaaaaaaaaaaaaaaaaaaaaaaaaacgagagaagaaataaaattttatcttcacataaaacctacacatgaatgtttatagctgcattatctatatcactgacaactggagacaactctcatgtctttccatagttaaacagataaaccatggtccccatgcaatgggatactactcagcaataaaaagaaatgaactattgataaatgcaatagcatatatgaatctcaaaggcattgtgctaagtcaaggaaactgactccaaaaagttttatattattccatttatagaac

SEQ ID NO: 679701 - DNA, 590 bp, Homo sapiens
cttcttcttctttttttttttttaatcctacaatccgtattctgttaaaccaccatattcttayatgacacacgtctgtatgatttgattttttttttttttttttttttttgagacggagtctcgctttgtcaaccaggctggagtgcagtggcgcgatctcggctcactgcaagctccgcctcccaggttcacgccattctcctgcctcagcctcccgagtaactgggactacaggcgccagccaacaagcccggctagttttttgtatttttagtagagacggggtttcaccgtgttagccaggaggtctcgatctgctgacctcgtgatccgcccgtctcggcctcccaaagtgctgggattacaggcgtaagccaccgcgcccggcctatgatttgatttttataataaaaagggataaatctatataaactgaaagatctgcaaccttcttttttctttcagcagtctatcatagaaacccttccacgtcagtacatttgtttcctttttttttaaggactgtgcccatcatattccaaaatatgattgtgccattctttatccattcccttataaatgaacat

SEQ ID NO: 679702 - DNA, 590 bp, Homo sapiens
cttcttcttctttttttttttttaatcctacaatccgtattctgttaaaccaccatattcttatatgacacacgtctgtatgatttgattttttttttttttttttttttttgagacggagtctcgctttgtcaaccaggctggagtgcagtggcgcgatctcggctcactgcaagctccgcctcccaggttcacgccattctcctgcctcagcctcccgagtaactgggactacaggcgccagccaacaagcccggctagttttttgtatttttagtagagacggggtttcaccgtgttagccaggaggtctcgatctgctgacctcgtgatccgcccgtctcggcctcccaaagtgctgggattacaggcgtaagccaccgcgcccggcctatgatttgatttttataataaaaagggataaatctatataaactgaaagatctgcaaccttcttttttctttcagcagtctatcataraaacccttccacgtcagtacatttgtttcctttttttttaaggactgtgcccatcatattccaaaatatgattgtgccattctttatccattcccttataaatgaacat

SEQ ID NO: 679703 - DNA, 586 bp, Homo sapiens
gagcaaacacagaaaatgcaagatttctgatcagcaacttgggacaagtgaccaatttgacaccggcccctgtgcctggtgtaaagtagaggatcaaagatgtaaaggccctgggagaggcaggtgggtggggatgtgatgataggtgactttttggggggccaccctgcatcttttccatttgatttcaaaagtaaaggttattcattgcartttccctcacaaaattacagaagagtgtgaagtttaaaaaatccttcctctctaatccctctaaccacaaatagtcacagttaacaatttgatgtttatcatctagagttttttctgcacatgtatactttcttatgtatatatattatatatattcctattacatatatacagacaaacacatatgcatatttaaacaatgaaaccggagttctcctttacttatttttctctctccttccctgaaccccttacttcttcatggctttcactccagattagggtgtatagatctgcctcatttttaaaaatatttttttctattctaaaattaatatgggctgggtgtggtggctcacacctgcaataccag

SEQ ID NO: 679704 - DNA, 721 bp, Homo sapiens
actggttgcagcacataccacacctcccggaagctgccagcctgagggagcatggaaacagcccacagagggcacagctgaagcaccagggccatagcattcctctaaaaggatggggtgccaatctctaggatgcaaggcattcactgaatgaaagcccattgtgtgctctaagggaaaggacagataggatcagaagtaagggtgaatcaggggtgggccacccaccatccctcttagcgacccagccactgagagactttgtgtttgtttagttctgggctctgcagggttagaaaacctggcactcaaaggagacacacttttttgtcacaggacataacaagagtcccttgaattataaactatggcttccacctgggcaccttgggctccttgtgtccaggaccaacaggatgasaacttaccaccttggcaggagtgattgtggctgaccattggaaggaggcaggcctgctgttacacaatgggaatgggacaggaaggtctatgggtggaacccaattgtgactgtaaacaggcaagtgtagcaacgctggcctgcaaagggcatggtgaccaggtgcttaggcctcttcaggataaaggtctgggttacagcactagttaagctcctgagtccagcaggggtggtagctgagggtgaggggaatttagaagagagagtgaagatggagccagtgaatattatttacagcct

SEQ ID NO: 679705 - DNA, 577 bp, Homo sapiens
tagtggcctgtgaatttgaatgagaacgtgttcaatatgtgactctctcattaagaaaacctcatgaagtcctggagacaatcaaagcaatgtatttagatagcagaaagaccaccagtctagtagtgaggaaccctaagtgttcatcccatttccawaacaacagttatgtgaatggtgaatgttattttccctctttggaccttagtttacccaaatctaaaatgagaaatttagataagattagagtaacaaatccaaatgtttgtgtagatgaggcagctaatgtaaagtatgaaacaagcatttcccaatcctcttagctcaattctcagcaggtttggaggcgggtaacggtagatttgagaagatgtattgtaactgaaactcggtctcagtgtggggcaatagggagtggtgaggactgtggcaaactggaaaacacaagcctcatctgaaggatgactactacttggcttgatttgatttttaccttggagaaatagacaccaagtgtggcccaatattccaagtaaagaaaagccagatgtaaaatatcttgatttttaaaatgcag

SEQ ID NO: 679706 - DNA, 599 bp, Homo sapiens
tacttgaaattaaaagtagaggtaccaactctatagagggttaggggggacaacccaagtccttgtatcaaatagtaatatgacagagaactaaataaaattgtagttccctgcggggrctaccgacatttgtccttgtggcagccccctctcctcatccagttgttttgcccaaggtgggtgcctcgctcatgggccccctcctcagcatgtgttcattgaacacctaccgtgtgttggacaaatgctgacccctaccttccccaggtcctccatgtggcactgcagggcaccattctttagcccactgtctcattccttcacttggctaactgatgggaagaatcttaccaactaactagtgatgaggtactaattattttgaatagcttgctgtactacacagtaccagagttttctcatctcctgtgtaaatacactttaacccaaaggaataaatttatgcctttatccaataggagatcacctttttttaaagataccttcccagttttcctcaagtcattccacacgtacatccccctcactgtcttgagatcgaatgccgcttgctggtttgcactgtgtttttctagcta

SEQ ID NO: 679707 - DNA, 599 bp, Homo sapiens
tacttgaaattaaaagtagaggtaccaactctatagagggttaggggggacaacccaagtccttgtatcaaatagtaatatgacagagaactaaataaaattgtagttccctgcggggactaccgacatttgtccttgtggcagccccctctcctcatccagttgttttgcccaaggtgggtgcctcgctcatgggccccctcctcagcatgtgttcattgaacacctaccgtgtgttggacaaatgctgacccctaccttccccaggtcctccatgtggcactgcagggcaccattctttagcccactgtctcattccttcacttggctaactgatgggaagaatcttaccaactaactagtgatgaggtactaattattttgaatagcttgytgtactacacagtaccagagttttctcatctcctgtgtaaatacactttaacccaaaggaataaatttatgcctttatccaataggagatcacctttttttaaagataccttcccagttttcctcaagtcattccacacgtacatccccctcactgtcttgagatcgaatgccgcttgctggtttgcactgtgtttttctagcta

SEQ ID NO: 679708 - DNA, 654 bp, Homo sapiens
tcaatttctcagtcagtaaaatgaaaatgaggatagcatctacctcccagggtggttgggagaattgtwtgagataattaaggtaggtaaagccctgagcctagtgtccagcatctggctagtgcaaatttcctgattaattctatgatattgtccatagggaccctcttgggtgtgtaagactctttgaggatctgactaaaaaggtgggcacatttttgtgtctgttctcttcctccccattgttcctattttattttttgtgattgaggtggcactcacatacagtggggtacaccggtcacagtgcagtgctccgtgaaattctgtgcatgaatccaacccaaccaccgcctggatccagatagtgaacatgggcggcccccagccagctccctcatgccccacgcggtgtccccttcccttgaggtaaactctgttctgactcctttcaccatagagtagttttgcttcttctctgcctaactggaaaacacagaatgaactcctttgtgtctggcgtctgtgtcttctgctgaacattatgtctgggagatgcagctaacttgttgaggggtagcactcagttgatcttgtattgtcgtgttgctgttgtagcattcctttgtatgattatcgtcacaagctgtgaat

SEQ ID NO: 679709 - DNA, 621 bp, Homo sapiens
aatcacccgagggagtatttaaaaatcccagtatccaagctgcaccctggacctgtcagaacagctggggagtgggactacatatcagtagttaaaactttctaagtgataccagttctaaggttctcaaatttagcttctcaaaygttaaagtgcatgccaattccctggggtggggggtgttaggatacagattctcattctgtaggcctggggtgaggcctgggtttctgcattttcaacaagttcccaggtgctgttgaagaggatggtctgggacacacttttgagtactggagttggattagcaactaactcccctttgcctcccaacctgtgtaatttgcctcaccatcaccagccttgacatctaatatggggaaatgctcttttaaatccagccggcacagtgacaaaattacaggctatggaggcagacccaaattccaaccttcactttggcacttactgctgtgtgaccttgggcaagtctctggaatctctgtgcttgcctcttgaggtgtggagacatccactcatgcagatgctggaagaattaaataagataatatatatgtaaaacactccagacataccagattctcataaatagtagctgtt

SEQ ID NO: 679710 - DNA, 636 bp, Homo sapiens
tgcaaactgtgcttccgcttacgaagcactcctgagcggcagggcggatggggagaggrcggctgcaggcgcgaggggcccggggacgcaggggtgcgggccttaccagggccctgtcctgtcgtgcagcaggctcctggggcagggaagacaccaggggcggccacttcttactgctgtctgacctcgagcaatgcggcctcacagcccccaccagggtgccggtgtcctctgggcccagcgcccccgaggctcatgcctgggtggggcgaaccaatcggtcctgctcctctggccactccacgcgagggaagtcccagcctcacaggcaggcgcacaccccggcagcatctctgacaaaggccctccagttccgagtctccaggtcccgccgctgcaagcctcacctgcccagccctcctctccagctccaactccaactcccaagaaccaccacggacacacagaacccgagccttgtctccctcaacgcctcctgactcaaaactccatcttccaacaggaaaacggctcggccgggggactgtgacccggagcaggcggcccagcctgtcgcgcagactcggggcctaaaacacttgttctctcagtccggagatcaaggacgatccgagg

SEQ ID NO: 679711 - DNA, 636 bp, Homo sapiens
tgcaaactgtgcttccgcttacgaagcactcctgagcggcagggcggatggggagagggcggctgcaggcgcgaggggcccggggacgcaggggtgcgggccttaccagggccctgtcctgtcgtgcagcaggctcctggggcagggaagacaccaggggcggccacttcttactgctgtctgacctcgagcaatgcggcctcacagcccccaccagggtgccggtgtcctctgggcccagcgcccccgaggctcatgcctggrtggggcgaaccaatcggtcctgctcctctggccactccacgcgagggaagtcccagcctcacaggcaggcgcacaccccggcagcatctctgacaaaggccctccagttccgagtctccaggtcccgccgctgcaagcctcacctgcccagccctcctctccagctccaactccaactcccaagaaccaccacggacacacagaacccgagccttgtctccctcaacgcctcctgactcaaaactccatcttccaacaggaaaacggctcggccgggggactgtgacccggagcaggcggcccagcctgtcgcgcagactcggggcctaaaacacttgttctctcagtccggagatcaaggacgatccgagg

SEQ ID NO: 679712 - DNA, 678 bp, Homo sapiens
ccggagcctgcgggagtgtgcagctgcggtcacagcgggcgtggggggcctgccgagccttcaagggcaggctactccacagcctcagccggaggccgcccctgagcccagcgaggggagaaaagccgtgtgtgtgtcccccgggctgccagaggggacctggacagaaccctctcctcccagcccaccttcagggaaatgctcgaggccgggtgcggtggctcacgcctgtcatcccagcactttgggaggccgaggcaggaggatcacctgaggtcaggagttcgagacctgcctgaccaacatggtgaaaccctgtctctactgaaaatacaagtatgagccaggcgtggcggcgggtgcctgtaattcccactactcgggaggctgagctctcatacctacgtgctcctcagtgacggggacggtggggagggcctggattttctctttatctgccggtggggggcctgtgttttcaaactgattgaggagctgaaagacaagaggcgagagtgccgggagctcctcgggggcccggcccggggctctgaaacgcgaggctgcaggacctgcaaaagcaccgaggccgcgtttgtcctgggccctgggccccttggagcccgcccsgggtcggagatcactgtggagcccacgcggcccccccgctcctgggtc

SEQ ID NO: 679713 - DNA, 678 bp, Homo sapiens
ccggagcctgcgggagtgtgcagctgcggtcacagcgggcgtggggggcctgccgagccttcaagggcaggctactccacagcctcagccggaggccgcccctgagcccagcgaggggagaaaagccgtgtgtgtgtcccccgggctgccagaggggacctggacagaaccctctcctcccagcccaccttcagggaaatgctcgaggccgggtgcggtggctcacgcctgtcatcccagcactttgggaggccgaggcaggaggatcacctgaggtcaggagttcgagacctgcctgaccaacatggtgaaaccctgtctctactgaaaatacaagtatgagccaggcgtggcggcgggtgcctgtaattcccactactcgggaggctgagctctcatacctacgtgctcctcagtgacggggacggtggggagggcctggattttctctttatctgccggtggggggcctgtgttttcaaactgattgaggagctgaaagacaagaggcgagagtgccgggagctcctcgggggcccggcccggggctctgaaacgcgaggctgcaggacctgcaaaagcaccgaggccgcgtttgtcctgggccctgggccccttggagcccgcccggggtcggagatcactgtggagcccacgcrgcccccccgctcctgggtc

SEQ ID NO: 679714 - DNA, 568 bp, Homo sapiens
cagagtttcactcttgttgcccaggctggagtgcaatggcacgacctcggctgactgcaacctctgcctcccgggttcaagtgattctcctgcctcagcctcctgagtagctgggattacaggcgcccaccgccatgcctggctaatttttgtattcttagtagagacggagtttcatcatattggtcaggctggtctcaaactcctgacctcagtgatctgcccgcctcggcctcccaaagtgctaggattacaggtgtgagccacctcacccagcctcagctactttttaaaaattagagatggggcctccctacrttgctcaggctggtcttaaactcctgtcctcaagagatcctccctctttgacctcccagagaactgcaaatacagcactgagccaccgtgcctggcaaaattagccacttttaaagatgacatttccagcaggtgagacacacaaccataaaagcatcaaccgccaggagtagggccctgcgacggctcccccaggctctgttccaccaggagcagggcccagcgacggctcccccaggctctgttccac

SEQ ID NO: 679715 - DNA, 864 bp, Homo sapiens
atcccggatatccagggtggaggttgagcctctgctggccgacggtgggaggggctggacctgggggtctccagccgccctcctcctccaagggcacagccaagagaccgcttggtctcgtattaaatcggggcagctgcaggtagaaacgcctgggcaagggggcctggtgaaggagctgccccaccttctccgggggcagcacgcactgggggcccccacagaggccccattggagcctctggccctagcagaagacggtgaatccattcacctctccgtcagagaacagatgcaggaggtacgatcacccggcatcatcaccatagcaacagctggccaggcagccagggtaggggggaccctgccagtgccgggctccacccatgcacccctgcagcgtgatggcctcatccccgggtgggacctggcagggcagcagaggccccttcatccacggggcctgcacggggcgcatgtcctgagggcccagggccaggcgcatggaggggagtgggctggcgacctacaggccccagatgactgacagtgaccrgggcaggcaggcccctggtgacagtgactcggcccctgtgggtggcagggccctcgggaagctgtgcacatcaggagaccccagggagagtcatggtgcagtgctcggcctcggtaggagcccccgtgctggctactgttttcctaaagggtgcccaaagcttcccggctgatccacagtgtgtgggccccgcagccccagaggcacgggcacgtgcggcgcctgcacccctttcttcccgccctcagcagctgccaccacatcccacattcacaccgtctgtccctgggccccacgcaccacacact

SEQ ID NO: 679716 - DNA, 561 bp, Homo sapiens
aggccctcctcccctcccgaagctgcccaggccttcgtgtccctcagtrcttccctacctcatcgccgtctcccctcacggtacttcagcccactgtccccaccgttcctggggctcgccaggcgccctctcccccgcccgctgcccggtgcagcgctctcccgacgcccgcgtggctttcttccaggtctttgctcaaatgtcagcttacaaggtcttctctgctgccctcctgctccgtggcactgattccctcccgatgcactgtcaggtcagctgcgcagcaaagggatttttggacccgcagcagcgcctgacacacagcaggcattccctcagcgctgcggaatacaggcagacccggggctcagggcgctgtctgggcctcactgggacccgtggggtcagacagaggctgaggtctgtgggttgtggccttgtttccaagatgctccacgggctgacggcccaggcgcctctcgggtgcggagaaggcaggaaacctaacccctgcttccaaatttaatcagtagaaacggtatcatcacccagcacaggcca

SEQ ID NO: 679717 - DNA, 561 bp, Homo sapiens
aggccctcctcccctcccgaagctgcccaggccttcgtgtccctcagtgcttccctacctcatcgccgtctcccctcacggtacttcagcccactgtccccaccgttcctggggctcgccaggcgccctctcccccgcccgctgcccggtgcagcgctctcccgacgcccgcgtggctttcttccaggtctttgctcaaatgtcagcttacaaggtcttctctgctgccctcctgctccgtggcactgattccctcccgatgcactgtcaggtcagctgcgcagcaaagggatttttggacccgcagcagcgcctgacacacagcaggcattccctcagcgctgcggaatacaggcagacccggggctcagggcgctgtctgggcctcactgggacccgtggggtcagacagaggctgaggtctgtgggttgtggccttgtttccaagatgctccacgggctgacggcccaggcgcctctcgggtgcggagarggcaggaaacctaacccctgcttccaaatttaatcagtagaaacggtatcatcacccagcacaggcca

SEQ ID NO: 679718 - DNA, 2838 bp, Homo sapiens
cagtggtgcaattacagctgactgcagcctcgacctcccaggctcaagcaatcctcccatctcagcctcccaaagtagctgggaccacaggtgcatgtcaccatccctagctaatttttaactgttttgtagagtcagggtctcactatgttgcccaggctggtcttgaactcctaggctaaagggatcctcctgccttggcctcacaaagtgctgggactacaggtatgagccaatgcacctggaccctgaactcttacaaagagatatttcttaaaaactgaaaacattttattccttttagcccctactccatatgtggtctaataaaccactgatattcaacaaatgtttgctaaaccctttaatacaattatttggaataatattgccactgatagtaattagaacagaaaagcactcaatgcttccctgaatccctttggcctgcctcctactcccagtcctctatcaacccttctgttgcagttcctgctgagctgaacaagagacacacatgccagcctcacagcttaaacaaagagctacagtgaaagaaaaacagctgagccagcaggaagcataaacagagggggaggtgtcaagatagctatttttaaagccaatgtagtaaataaactcataggctttaataaagccaggtagctcttttcttcagaagctagcctatgcttcaagcttggcccaaggtttgcttgatcctctgttaggacagcatatttgaaattttggtaagggcaaacaacactggggcaggggaagacatgtcctcattcttaggtttattcttaaaaagaaaaataggaagcttgagaaccatgaaaacacaatgcagataggaatcacaaaatatgtacaaaatgttattgttgcccatcaagatacaaacggatacatcatgaatttgatgacaatttctcctcttcggatcttatctacatccctccttctggccctcaaagtcctcaattatccctgtcaccttaatctctttctttttcctattttgttcttattcttggatctgacaaaacagaaagaaaaatgcactataattatgagcacatgatgtgcctggaactgtgttatgagttaccttacttaacacaacacttctaatatctccagtgttgaagaagaaactgaggtttacaaattccaaagtagaaaaaattccctccacctgaatggcctgcacagctctataggatctggttcctgcctaccttgcagccctcgcctccctgatctcctacctctctcatctccacttcagtcaaactaacctttgagttccttgatcaagtcaacttccattccaccctagggctgttgcccttgtattcaacattgaaaggcactggaatcttcttcctccaaacatggttccttctagccatctggttctctgctcaaacgttgtcacctcattagagtaatcttcatgaatgttcagttgaaagtacctatctttccctcagagtaactccttgttgtggccacgaaggtgcaccattcagatgaccctttaagggagcatagttggctgatagcctccaactgccccatctttagatctattgcagtgttctcacttaggcctgaggctctctcttccaaggctgccctgagcctgtgactgagtaagataggggtactagacccagcccacttcaccacttccgcccagtacgggacttccctaatgaacaatatctactcaggactgggttgtgggacagagatctcatcaggttggccaagactttcttcaagctgcaccataacctgtcccaaactccctctttccttctctccttgtccaggtgtcagagctgcatcacatttgaagtgctccccagctactcctgctcctactctctcttatccttcacagaatcttctcccaatctcttgtttgtctaattctgtcttgacgtctgcttctcagaagacctgaactggtgcactctcttgtaaaacactgcttcattactttcatagcatttataactatttttattttatccaattaaattgatccacttatgtatttatttaatatctccctcctaccactgccaccatctcctcgtcaatgtaatctgtcttattcatcaccttattcccagtgctaagaacaccacctggcttataataggtcttcagttaatattgttgaataaatgaattaatggatttagaaagctagatttatactttagatccagaggctcctctttattcaattactgcgggttttactgttctaggtyttggacataaaacagtaagcaagaaagacaaagtctctgctcttttgaatttatattcaagggagggaagacaggtaataaacacataatcacaaatatatatatgctatgtgataagagatataaagaaattatagtgtgtaataagggaataaagagtggttgttgagtagttaggaaagatatctctctgataagattacatttgaacagagatttggatgaaataagggagtgagtcaagcagatacctggctcaagagtgttccaggcagggggagcataaatgccaaggccaatgatggagtgtgtttggcaagttcaaacagtctggaggtcagggaggctgaaccagacaacaaggagaatggcagaaaatactatggggaggcacatggttaaaaaaaagggtaagtccttgtatgccatcataaggattttagatgagattttcctctaagtgagatggaaagtgaatggatagttctccctgacattttaaaaggatgcatctggctgctaggtgggaacagtaagcgat

SEQ ID NO: 679719 - DNA, 1390 bp, Homo sapiens
gtctaaaaaccatttctaatctttagcttgaaaaagtgtctgttattctacttctttattttctggctttttcaaagccattttcattatattgtacctatttcatagtctgaaaaacgatttttgaagttcttgagcttcagctatttatggtgtcttgactctgtctcgwggtaaattgtgtcctcttataatttttcatttgtgagcatatattaagcagtacgttgtctgtgtgaatcctgtacaccctgggttggctgcagttttcctttcaatctcgtggatgctgtgtccttcttacttggtttttcccaggcagccctttcctgtagagccagtatgaggtagccaggttctcagctgtttcgagtgctttgccttctctggttatctcaagcatcaggaaaattatatgttgcatacattccacagaggtcccatggtgatggggaaaggtcagctcaggcattccctctgcttagccacacttcatcatactgcttggatacatgttgctgcctaggagactttcttaacccaaacaggccccactgcctttagcagtttcttcatcttctctgacatacaattcagctttggcccagagtggagattaagatatgggtctgactctgcctctcttttccctgtgtgactgctccagttgctcctaactgaatgccctgtagctcccaagcttgcaggctctgccatgggatgcctgggaaagtaaggcacttgtactcttccatttttgtctggatgataccagtgtctgcctcttctcccattattcatgtaaatgcaaaagagaaaaaaagcactttaataattttcaaaaatttctcatattacattctctattgtgtctggctctgaagttaggtttttgtgtttttttcccacaattattcctactgtatgtccttgctgcaatccaagtgctgaccttatttttttagagctcgttctttttaaagttaaactttactatgcatagaagtaattttgaatctttcaaaatgcagattctcattgagtaggtctggggtggggcctgagattctgcatttctcataggctcccggggtgcttgtattgctgagccacagtccagtccatctcagagtcctagaggaggtaatcttctctggttcttttccatttatccatttcataagcatttctcacatcttatctggcctttgccacattcatgaaacctatcactttatcagtaaggtatttaaaacactgccttgcacagagtaaacattcatcatgttctagatattcacatgtacatgaacacacacatatctatcacacttaatattattgctgttttatagttaaacttcttctaatgtcaatctagaaacttgtt

SEQ ID NO: 679720 - DNA, 224 bp, Homo sapiens
gcaggtttcaattagcycagcaaggccagaggctagccagccagccttacctctgtgacttcagggtaagggcttcccttccagggtgcgtttcctggtcagcaaaccaggctgcttagaaatctattattgcccaagaaaaaaaaaattgagtggatttgtttttttgtctctctcttttttttttctttgagacagagtctcactctgtcacccaggctgga

SEQ ID NO: 679721 - DNA, 2866 bp, Homo sapiens
tctgctctgctttcaaggaggctttcatatgtggagtagagtgaaaagctaaaagccgtgaacgatatatatatatatatatatatatatatatatatatgagagacttcacactgaatattaatgccccagaaaataaacaggagttaactaggtagaactcccttttatgagcaaaagcagctccaggttttagaatggcatttatttttaatttaatgccaggcacgggggtggtgggactggcaaacctgcacttttatctttaacttcatttatttccatggtttgattctgttatgagaaacaaaacagagaaagaaattaggatatttggaagaaaactatttaaggctccaatcgctctgggttcaccagaatctcagaactacagattttccgagattcttacatttcaggatatttaaaaactagggtattttgacaagacttacatatttgtgaataaattcctgtcaaaagctctcaatgacatatatgtagatgayagcaggttaagttatatttatttcctagagtataggacctgagctggaaactcatcactaaccagcccagtgaaaaaggacaattgtgtaatttagaggatattcatatcaggtttctggagcaaatttaagatatgcaaactgtttattatgactggaagaacaaaagccaaggaactaaaattattaatacagagaccttctgagctcctaggactatctgagaccatgtatttctaacctctgacaaagacaataaactaccttgctctttggcacacacctggaactactgttcacaacacacaacaatcacagctatcaatcgattattcctttccttttattcaagaaacattgaaaataaagggatgataattaagggataattatttagattgatatagcaaagcaatgtctgtattaaattttagacaagtcttagatcttgtgtgtggctgcagttccatcctacagactatttctattgatatattgctgctgtctcagctgttgctgccactacaacttcagcagctaggcaaggcaataccagaataggaaggtgagtttgtcctattttcagagaaaatatagaatcaaagattgctgatttaggtataccagcttcatactgaaaaatgggaaactgctttaataagctctcaagtatctatcaagtacacaacttcaatagtaagagatcgaatgtttctctaatgcatgtcttctttggactaattctggaatgtgttctacataataaatactttctagctcaaactctttgaaatctgaatctcgtggaattgctacaaagttgtgctatcttgttttaaattctaatacctgacatacgttaaagagcctttaggttgaataaaattcactgaattttagatttcaatgaatttacaaaaaatataaatttattatattttattaaatataaaaatataattatatattagtaaatctataaatatactatatacatcatctattatgtttcattatattatctatcttatcatacatacttaaagttgaaaatatattagcctatatgtatgcacagtttagaagttcccaacttatccttcacaattcattcttaaaatactaacatgcacatagataatgccactaaatctccctttaccccaactgtctcaatggaaactgtaataagcttaaaaaagaaaataatactgagaaataaattcaaaacctaaactaaaagctaaaatatctatttgtatagatgtgaacatatttttactaaggagattgtgcctatttgagctaaaagagatatttaaatgagttgataaagtttggcctcaaagcaactgcaaaagtaaattgaaatgacacaataatattggtttacaatgaaatggttattctgcaaagagtaatatcaacatggaactagcctttatgttgacctatgaaaataaatgatctaggaatttacttataacggctatcacagtgaaatggaccctacatttaacttattgaaaacctatcacagggccttcactaactctccacggtgacatctcagcttagacttcattctatgcttagaaagaacatctgaatacaaaatatttttcagagtgatgaggttgtgtgatttctaattggtctctaatttataattttttaaaataacgttaccattttcattaaatatacttgttctctcactttattttcctaggtaaaaagaacaaacactgatctcttaagtagagcagccactcactaggggatggaactgggaggtctggtgaaggcccttgtctaaacacctacccccacccaccactccaatgaacaagccttaaacttccacttttagaaattcattcttttagtgtaagtcattgaactttcttaaaatctaagtatcatttagagataaaactcattatgcatcctgagtcacttatactttcaagtatgtgaatgtatcacctattgatgcagccatcaatctctaagagatagaagcaaacttgagaaaagcccagaatagccaagaattaactttgacctactcaaaaatgtgtccaagaatgacccaggaagactatggttgtttactgttattttaaatctctcactatctttagaataaggttcaaattcatatattatttatagacttatgctttaaagctgatgggaaatagtgtttcccaagctggatgctaagctggatattgtacaaatatacttctatttaaagacttgaactgttcctggcccaattaaatattaacaaatcagcaaaagctatataccattacttcattcacctcaaattacataatttgaaagtt

SEQ ID NO: 679722 - DNA, 2866 bp, Homo sapiens
tctgctctgctttcaaggaggctttcatatgtggagtagagtgaaaagctaaaagccgtgaacgatatatatatatatatatatatatatatatatatatgagagacttcacactgaatattaatgccccagaaaataaacaggagttaactaggtagaactcccttttatgagcaaaagcagctccaggttttagaatggcatttatttttaatttaatgccaggcacgggggtggtgggactggcaaacctgcacttttatctttaacttcatttatttccatggtttgattctgttatgagaaacaaaacagagaaagaaattaggatatttggaagaaaactatttaaggctccaatcgctctgggttcaccagaatctcagaactacagattttccgagattcttacatttcaggatatttaaaaactagggtattttgacaagacttacatatttgtgaataaattcctgtcaaaagctctcaatgacatatatgtagatgatagcaggttaagttatatttatttcctagagtataggacctgagctggaaactcatcactaaccagcccagtgaaaaaggacaattgtgtaatttagaggatattcatatcaggtttctggagcaaatttaagatatgcaaactgtttattatgactggaagaacaaaagccaaggaactaaaattattaatacagagaccttctgagctcctaggactatctgagaccatgtatttctaacctctgacaaagacaataaactaccttgctctttggcacacacctggaactactgttcacaacacacawcaatcacagctatcaatcgattattcctttccttttattcaagaaacattgaaaataaagggatgataattaagggataattatttagattgatatagcaaagcaatgtctgtattaaattttagacaagtcttagatcttgtgtgtggctgcagttccatcctacagactatttctattgatatattgctgctgtctcagctgttgctgccactacaacttcagcagctaggcaaggcaataccagaataggaaggtgagtttgtcctattttcagagaaaatatagaatcaaagattgctgatttaggtataccagcttcatactgaaaaatgggaaactgctttaataagctctcaagtatctatcaagtacacaacttcaatagtaagagatcgaatgtttctctaatgcatgtcttctttggactaattctggaatgtgttctacataataaatactttctagctcaaactctttgaaatctgaatctcgtggaattgctacaaagttgtgctatcttgttttaaattctaatacctgacatacgttaaagagcctttaggttgaataaaattcactgaattttagatttcaatgaatttacaaaaaatataaatttattatattttattaaatataaaaatataattatatattagtaaatctataaatatactatatacatcatctattatgtttcattatattatctatcttatcatacatacttaaagttgaaaatatattagcctatatgtatgcacagtttagaagttcccaacttatccttcacaattcattcttaaaatactaacatgcacatagataatgccactaaatctccctttaccccaactgtctcaatggaaactgtaataagcttaaaaaagaaaataatactgagaaataaattcaaaacctaaactaaaagctaaaatatctatttgtatagatgtgaacatatttttactaaggagattgtgcctatttgagctaaaagagatatttaaatgagttgataaagtttggcctcaaagcaactgcaaaagtaaattgaaatgacacaataatattggtttacaatgaaatggttattctgcaaagagtaatatcaacatggaactagcctttatgttgacctatgaaaataaatgatctaggaatttacttataacggctatcacagtgaaatggaccctacatttaacttattgaaaacctatcacagggccttcactaactctccacggtgacatctcagcttagacttcattctatgcttagaaagaacatctgaatacaaaatatttttcagagtgatgaggttgtgtgatttctaattggtctctaatttataattttttaaaataacgttaccattttcattaaatatacttgttctctcactttattttcctaggtaaaaagaacaaacactgatctcttaagtagagcagccactcactaggggatggaactgggaggtctggtgaaggcccttgtctaaacacctacccccacccaccactccaatgaacaagccttaaacttccacttttagaaattcattcttttagtgtaagtcattgaactttcttaaaatctaagtatcatttagagataaaactcattatgcatcctgagtcacttatactttcaagtatgtgaatgtatcacctattgatgcagccatcaatctctaagagatagaagcaaacttgagaaaagcccagaatagccaagaattaactttgacctactcaaaaatgtgtccaagaatgacccaggaagactatggttgtttactgttattttaaatctctcactatctttagaataaggttcaaattcatatattatttatagacttatgctttaaagctgatgggaaatagtgtttcccaagctggatgctaagctggatattgtacaaatatacttctatttaaagacttgaactgttcctggcccaattaaatattaacaaatcagcaaaagctatataccattacttcattcacctcaaattacataatttgaaagtt

SEQ ID NO: 679723 - DNA, 2866 bp, Homo sapiens
tctgctctgctttcaaggaggctttcatatgtggagtagagtgaaaagctaaaagccgtgaacgatatatatatatatatatatatatatatatatatatgagagacttcacactgaatattaatgccccagaaaataaacaggagttaactaggtagaactcccttttatgagcaaaagcagctccaggttttagaatggcatttatttttaatttaatgccaggcacgggggtggtgggactggcaaacctgcacttttatctttaacttcatttatttccatggtttgattctgttatgagaaacaaaacagagaaagaaattaggatatttggaagaaaactatttaaggctccaatcgctctgggttcaccagaatctcagaactacagattttccgagattcttacatttcaggatatttaaaaactagggtattttgacaagacttacatatttgtgaataaattcctgtcaaaagctctcaatgacatatatgtagatgatagcaggttaagttatatttatttcctagagtataggacctgagctggaaactcatcactaaccagcccagtgaaaaaggacaattgtgtaatttagaggatattcatatcaggtttctggagcaaatttaagatatgcaaactgtttattatgactggaagaacaaaagccaaggaactaaaattattaatacagagaccttctgagctcctaggactatctgagaccatgtatttctaacctctgacaaagacaataaactaccttgctctttggcacacacctggaactactgttcacaacacacaacaatcacagctatcaatcgattattcctttccttttattcaagaaacattgaaaataaagggatgataattaagggataattatttagattgatatagcaaagcaatgtctgtattaaattttagacaagtcttagatcttgtgtgtggctgcagttccatcctacagactatttctattgatatattgctgctgtctcagctgttgctgccactacaacttcagcagctaggcaaggcaataccagaataggaaggtgagtttgtcctattttcagagaaaatatagaatcaaagattgctgatttaggtataccagcttcatactgaaaaatgggaaactgctttaataagctctcaagtatctatcaagtacacaacttcaatagtaagagatcgaatgtttctctaatgcatgtcttctttggactaattctggaatgtgttctacataataaatactttctagctcaaactctttgaaatctgaatctcgtggaattgctacaaagttgtgctatcttgttttaaattctaatacctgacatacgttaaagagcctttaggttgaataaaattcactgaattttagatttcaatgaatttacaaaaaatataaatttattatattttattaaatataaaaatataattatatattagtaaatctataaatatactatatacatcatctattatgtttcattatattatctatcttatcatacatacttaaagttgaaaatatattagcctatatgtatgcacagtttagaagttcccaacttatccttcacaattcattcttaaaatactaacatgcacatagataatgccactaaatctccctttaccccaactgtctcaatggaaactgtaataagcttaaaaaagaaaataatactgagaaataaattcaaaacctaaactaaaagctaaaatatctatttgtatagatgtgaacatatttttactaaggagattgtgcctatttgagctaaaagagatatttaaatgagttgataaagtttggcctcaaagcaactgcaaaagtaaattgaaatgacacaataatattggtttacaatgaaatggttattctgcaaagagtaatatcaacatggaactagcctttatgttgacctatgaaaataaatgatctaggaatttacttataacggctatcacagtgaaatggaccctacatttaacttattgaaaacctatcacagggccttcactaactctccacggtgacatctcagcttagacttcattctatgcttagaaagaacatctgaatacaaaatatttttcagagtgatgaggttgtgtgatttctaattggtctctaatttataattttttaaaataacgttaccattttcattaaatatacttgttctctcactttattttcctaggtaaaaagaacaaacactgatctcttaagtagagcagccactcactaggggatggaactgggaggtctggtgaaggcccttgtctaaacacctacccccacccaccactccaatgaacaagccttaaacttccacttttagaaattcattcttttagtgtaagtcattgaactttcttaaaatctaagtatcatttagagataaaactcattatgcatcctgagtcacttatactttcaagtatgtgaatgtatcacctattgatgcagccatcaatctctaagrgatagaagcaaacttgagaaaagcccagaatagccaagaattaactttgacctactcaaaaatgtgtccaagaatgacccaggaagactatggttgtttactgttattttaaatctctcactatctttagaataaggttcaaattcatatattatttatagacttatgctttaaagctgatgggaaatagtgtttcccaagctggatgctaagctggatattgtacaaatatacttctatttaaagacttgaactgttcctggcccaattaaatattaacaaatcagcaaaagctatataccattacttcattcacctcaaattacataatttgaaagtt

SEQ ID NO: 679724 - DNA, 1463 bp, Homo sapiens
attggggacgacatcaagtggaagtgtcctgggcaaaacaagatgtacggtcatgcagccagaacccagctttccctctgcagagttgaaacctagactctagttcctctagactacagagcccaattggtgctccttgcagttaagcctgttccaaaaccccttgcctaatacattcttcccaaatttatcaatcacgttaagctatttcaccttcaccaaagcagagatgaaggggaagtgaagtaggagagagagagagaaggtcactaattgcactaattaaggtccctttaccttgaaggaaatattaaaaatggggaagaatctctttctctaacgactttgtaatttattatctctgagctagacccctcatatacaaaatgaaaataatactataactcttaagaaagagttgttttgaggattaaagagaaaacacatataaaattttttgagtttcaaaaaaattacaattgctttattactttattaatcattaagattacagtgtctaaacacaagcttactgaatattatttcatgaatttctttaccaaaaataactttttttttttttttttgagacagagtcttactctgtcacccaggctggaatgcagtggcacgatctcggctcactacaacctccacctcccagtttcaagcgatgctcatgccttagcctcctaactagctgggaatacaggcgtgtgccaccatgcctggctgattttttatttttagtagatacggggtttcatcatgttggccaggctggcctcgaactcatggcctcaagtgatctgcccgccttggccacccaaagtgctgggattacaggcatgagtcactgcatccggccactttactaaaaataattgtaactacttttcctacaaagtaaaataaatcagtgaggtttcacgctatactccttatctgaattgggctaactggccagtgttgaaaattataagcaattaacaatttcaaaactctgcaaaaaattatatgtgtgtatatgtatacatatatatawaatgagcaaaattataccaattgaaattatacatttccaataactgtttgactatgacattactcaccataaaagacataggtagcattcaggcaacatacaaagaatggggtagaaaaacactgaaggatactaaatttacaggattgttatcaaggttaaagtatttttaaaaaccttctgtttctgcaattaatatttactttttctttatgaagtgaataaattttattaattgccttttcaatacctatcagggtaagacttttgttatataacatattgatgttatattacgtattacgttaataaaattcctaatgttaaattagatttgcattcctgatattaacactactcaatatgttatttcatttgctcttattttggattctgtgtttattcatgtgaactgtta

SEQ ID NO: 679725 - DNA, 777 bp, Homo sapiens
ttggggctccctggcaaaaacagctctctgaagatgatgcacgtaaataaaacgggtataaaagaaagtcttgtattatgtaatgaaaaatgaaaagaatgccctgttgatggtaaaggtaattttttttccttcttttaaggacaataaaatcatagaaaataaaatgatatcagtatcattttggaaaagtttctatttttaatatctcctaaacaaaaatgcttttgaactaagttgaaggtttggctgaacaatctgtgaacaagaaaaagagctgctgtacctggtcctcttgcttcaagttgccagtaatacaaagccaaactgcaccaacaatgccaagctcagttggaagaacatttccaccaacgtaaataatatttatttctagaattgaacaaaatacctaagcagtaaaawatatatatatatataactcagcagtgcactggaattaagggactaatgatttttatctgcagcatattccctcaattatataattcattaaacacaaagaataatgaggaagaaactgtgctaagtatcaggctgaacagaactacccattggacagagcctcggaaaaccttttagaaactactaatgtaattaaatcatctgaacaaacaaatttgtatcagaaactccaagaagctaaggtaataacaatttctgagcaaccatttttgccatagtcaattttgaaaatcaaaaatagactcaaatttttttaaatacttttttaaggaaacatggcattaactgacaaaa

SEQ ID NO: 679726 - DNA, 638 bp, Homo sapiens
aacagaagctccatctcagttgttgagacggggagagaccgcagatttgcatgtggacttttcatggtcctagcctgaagtgactgtcaccactgactcccccgtggcactggccagagctagtcacatggccatgccttgctgtaagggggctggggaagacggttgttcagatagccagaaagaagggagctgggtgctggtgagcactggtcatgctgtccactgagactttctcccgtttcttgaatgaggacaccaacgctcagagcctaagctcattactgcagtcaccagggcgagtaaggcaactgtagaaccggcctatttggttccaaaataccagcgtgcccagatccagcctggatttgttaaaaaaaawaataataattagagcagcagctgtggatgaaagtgggtagttgggggagcccacaaaaataatgaccaggcaaggccgccataaacaacagagacttgaataaaatgaaaggggctttgtcgagagagccaaactcgaagcgtatctttttcaagtataaaggggagaagctcagggctcatgtggtgcttaaaagcccccaaatgaaagcctcggcgctttcctagctgctctgccaatttaaagggggattttt

SEQ ID NO: 679727 - DNA, 1090 bp, Homo sapiens
tgtgcccttattgtcaagtggtcctgggaaatggacttttatcaagtctgactcttatgttaccaccttgcttgagtgctcagtgccatgagatcgtcccagaggtgatcccttgcatamcctggtctttaggcaaagccttgttttcaaatcgcacaagtaaaagatgtgctctgctaagtgacatttcagtggaagaatcaggatattgacagaggaagcacttttacctcttgactggtatttcataggctaggaaagtatggaacttgattttcctgtttctcaaactggctctatttctttaggaagggaccaaaaggagctgcccctagtatagggagcaaacagaggttttctataaatgttaaattaaggaatttttttctcatagggatagctgttggcataatagtagctaatgattatctatagtgactcattggacttccacaacatcagtatatgataggtttcattaccccatgtctctccccaccaccattgccatccatcaaaactaaattattgatggtttcctaaatctaatgtcttgttgcaccgcttgatgcttttactgtttcttcttcctggatttccctttgcttatattgtgaagccctcctaatcttgctctaaatgtcaggttattaatgtttttctctgtactacttttatatgtttaactagtattgttggattattgatattttcatatctgaactgtgctacactggagagctactttagcatggagattggttttgtttttcattccctaatagtgcctgacgtgtggggtgggggtgggggctcagttcaaagaaggaacccaaggctcagcatgattgagtaatttgccaaaggtcacacatctggtgtatggcagagctagaagaagaatccagatctttagccacttaccaactacaaagagaaaaacactgcacagaagtcaggatgtccaaggactaatactgggtcaacagctcttgtgttactctaccttgatgagatattttacctttgtgaaattttctttatcatttgtaaggctatttctagatccgtgaactgcaagttatatttt

SEQ ID NO: 679728 - DNA, 639 bp, Homo sapiens
aatgatgggtgaaacatcagatttagaagcagcaactgattcaactggaattgatatattcagtggtcctgtcctctcattttgatcattatcacttatttgatcacttatcaattctatgtcttcatccacttttataggtggaggtggcatctcggcagcaggtttagaaggaattgattcttccaatgagggataagtaaaatccaatgagatagacaactcttcattctggtgttgtgggggtggagtgaccttagcatttgttgtatactgggaatagcaaaggaaccagtttttatagcctccctctaaaaccaaaggcccaaggcccattgcacaggacagttttactttcccacttgaaaagtgcatctttcagatgccagagtgttgttccaatctgtaaatcttttgcagaactaaaccagtcaagaagtaccatatactccacattccccctcttcttccatgtatctatagaatcatctgggaggtgtgcttcaatccagctagcagtgactcctggactgatggctttttcaggaacactgagagaatgtaaaatacaggaatcctgataatmctgcattctttgagcatccattataatcaagctgatgtttttatccatcatca

SEQ ID NO: 679729 - DNA, 639 bp, Homo sapiens
aatgatgggtgaaacatcagatttagaagcagcaactgattcaactggaattgatatattcagtggtcctgtcctctcattttgatcattatcacttatttgatcacttatcaattctatgtcttcatccacttttataggtggaggtggcatctcggcagcaggtttagaaggaattgattcttccaatgagggataagtaaaatccaatgagatagacaactcttcattctggtgttgtgggggtggagtgaccttagcatttgttgtatactgggaatagcaaaggaaccagtttttatagcctccctctaaaaccaaaggcccaaggcccattgcacaggacagttttactttcccacttgaaaagtgcatctttcagatgccagagtgttgttccaatctgtaaatcttttgcagaactaaaccagtcaagaagtaccatatactccacattccccctcttcttccatgtatctatagaatcatctgggaggtgtgcttcaatccagctagcagtgactcctggactgatggctttttcaggaacactgagagaatgtaaaatacaggaatcctgataatcctgcattctttgagcatscattataatcaagctgatgtttttatccatcatca

SEQ ID NO: 679730 - DNA, 1728 bp, Homo sapiens
gcattgatctatgatctggctcctgcttccctctcctcatacctccactactatgcaacatgcaatcctggctccttgccaaaccatactacatgttgaatgcgatgttccctccaacatggcattgttttcaaggctcagcctcagtattttcatctcagtagccttccccaaactctctaacccctaaggcagttagactccttgttctcatagctttgtaatagcacttacccacactgtgttggaattagctattgctttctctccctagtagaatggactctttgagagcatgaattatgctttatttatcctattcctagcatgtaaccaagtatctataattcagttttgtgtcaatgataattactttattaataatgtcatacctaccacatattgttattttaggccatcattttcaattaattagcacttccttatgttagaatatacctgtatgttaaagtaatcagaagctagaataatttaacttgctttgttggtattcttgataaccaataatggcttgctacgccctgattaatctttgcagaaagcccgcttatctaccattttatttactgacaactgtgaagtaacccatgaccagctgtgtgaattgctgaagtatgcagttctgggcaaatccaatgttccaaaacccaggtatgagatgaatttaaatggtgggtattgaccagcggtttcttttttttttttttttttttacctctcccaagctccatcattcaaaccagaggtttcaaactggcttatcgacagtatttttttgctatgcagcatgtcctgaattttttatgatggctgccaagtgttaattctggaaattcctatataaaaatctacattttcttcttccaaaaactcaaagatggcagctatccctatattcccacatggcaataatttgtcaaagctgagtggtggtctccccctttatatgggacatgtatactacaatgtcctacctggcctgcttcccatatttacagtatctgtctggctactatagatattttagtttgtttcccgtgwtgcagactcagctgaaataacaatgatctgtgaagaattccagttaatcttttttctttcttttacaaataaaaggcaaagagagccccggcatagtggctcacagttataatcccagcactttgggaggccaaggtgtgaggatcacttgagtcccagagtctgagaccagcctgggcaacatagcgagactcaggccctacaaaaaaaaaagagaatcttactgttctgatattgttggtgccattattaagtgtcttatgaaaaatattttgtatgtatgcaaataatacacacgtctttctgggggaggttgttatgaattggctagctacttcgagaactgtcttctccatcaacaattacagccatcagtctgtcagtttatctaaaactgtttttttttttttttggtaggttttatgtctctattgcaactacccaacttggccattgtagcccaaagcagccatacataacacatagacaaataagcatgactgtagttcaatagtcttatttacaaaaatgggtggagcaggatttgacatttttttggtgggggatggagcctcgctctgtcacctaggctggagtgcagtggcacgatctccgctcaatgcaacctccacctcccaggttcaagtgatcctcttgcctcagcct

SEQ ID NO: 679731 - DNA, 1728 bp, Homo sapiens
gcattgatctatgatctggctcctgcttccctctcctcatacctccactactatgcaacatgcaatcctggctccttgccaaaccatactacatgttgaatgcgatgttccctccaacatggcattgttttcaaggctcagcctcagtattttcatctcagtagccttccccaaactctctaacccctaaggcagttagactccttgttctcatagctttgtaatagcacttacccacactgtgttggaattagctattgctttctctccctagtagaatggactctttgagagcatgaattatgctttatttatcctattcctagcatgtaaccaagtatctataattcagttttgtgtcaatgataattactttattaataatgtcatacctaccacatattgttattttaggccatcattttcaattaattagcacttccttatgttagaatatacctgtatgttaaagtaatcagaagctagaataatttaacttgctttgttggtattcttgataaccaataatggcttgctacgccctgattaatctttgcagaaagcccgcttatctaccattttatttactgacaactgtgaagtaacccatgaccagctgtgtgaattgctgaagtatgcagttctgggcaaatccaatgttccaaaacccaggtatgagatgaatttaaatggtgggtattgaccagcggtttcttttttttttttttttttttacctctcccaagctccatcattcaaaccagaggtttcaaactggcttatcgacagtatttttttgctatgcagcatgtcctgaattttttatgatggctgccaagtgttaattctggaaattcctatataaaaatctacattttcttcttccaaaaactcaaagatggcagctatccctatattcccacatggcaataatttgtcaaagctgagtggtggtctccccctttatatgggacatgtatactacaatgtcctacctggcctgcttcccatatttacagtatctgtctggctactatagatattttagtttgtttcccgtgttgcagactcagctgaaataacaatgatctgtgaagaattccagttaatcttttttctttcttttacaaataaaaggcaaagagagcccmggcatagtggctcacagttataatcccagcactttgggaggccaaggtgtgaggatcacttgagtcccagagtctgagaccagcctgggcaacatagcgagactcaggccctacaaaaaaaaaagagaatcttactgttctgatattgttggtgccattattaagtgtcttatgaaaaatattttgtatgtatgcaaataatacacacgtctttctgggggaggttgttatgaattggctagctacttcgagaactgtcttctccatcaacaattacagccatcagtctgtcagtttatctaaaactgtttttttttttttttggtaggttttatgtctctattgcaactacccaacttggccattgtagcccaaagcagccatacataacacatagacaaataagcatgactgtagttcaatagtcttatttacaaaaatgggtggagcaggatttgacatttttttggtgggggatggagcctcgctctgtcacctaggctggagtgcagtggcacgatctccgctcaatgcaacctccacctcccaggttcaagtgatcctcttgcctcagcct

SEQ ID NO: 679732 - DNA, 598 bp, Homo sapiens
gggctatggtgttttcagaaattgtaaaatataatacaagctgagttttctacctctctttaaaaaaatcgcaagattgggcacccttaaaacagtatatggaactgaatagcagttgtcatctttaaaaagaggcacctgctgtccattttcccgtagcctcttccatttcctagtgacccatttcatccatttattcctgaaggcatttgagttggtgagccctaatttaacctccctgggtcaccattttttttgctttcatttattgagcacttcctgtgtatcaggctctctattaaccacggaccacctgctacacgtatcatctttaattatcacaatagtcttataaaatagatactttttaatttccattttgtacatgagaaactgagtaacttgcccgagttccagctagtaagtggtagggctgaaatttaagcccaggtgaacctgaagctgaagctctcaacctttttgccrtgtgataccatctattctgatggcaatggcatgctttccaatgaaataatagatttggaagaactttgaaaatacaaagggacttttcttgtctaagttgtatatttctgta

SEQ ID NO: 679733 - DNA, 616 bp, Homo sapiens
tggtggtttttatatgtctatgcacatatcacgtggctatttctctttccattgtaaagcctttttccaactctcatcccctgaaaaaagccaatcaatttattctttctacaagctctgtttctctgcatacttctatttgtatccattaacaattatcaaaatacattctaattaaatatatatgtcaatatgccctcctgtattaccagttcttgaaggttagagacgaygtctaacagcaagtaatatttagtcattcggccagggggtaaagtaattacatgaaataatagcacagtaactctctcctgatttgccctcctacgacttacacagctccatctagagtcctcttgctccaaaagcaaattcttagaaacacctgaaaaactactgtttccccatttccacatggccagtatgctcccagtactttttgccatccactctattttcctcccagtatcttattcatcctcacagctcctacatagctatgtgttcagaaagatccacaagatgactcatctgtttctctctcaacagacatctttggcagttttccttcctgctatctcacagttacagcaactcctgggattaaatatatttg

SEQ ID NO: 679734 - DNA, 2546 bp, Homo sapiens
tctagaagccatacacttacaatgtattaagtaacatgatggagttaaaactaaaatgtagcagcttcccagagaaatgagaagctaatttcatctttggagatttgatgtaaaggtaggcaacgaatgaattttggttgagccaaccacaggctcagagggggaaagatggcccgttcacattccaggagtaggggaaaaagaatatataacacagtttctggagttgatagatgcagtgtctgtgtggaaaacatttactcatcaatgggcctgagaggaaggcacttatcttcttgtgtttcagactgcttcctctcatagcctcttctctctagccttggcaatttacacatgttcctcaaaaatcccatgccattttgcctcttcaaaattttggcattatttttctctctgcttgtttgaaaatattttgcttttttgtaaagaaatagctttggtaacattgcttgaaaatgtaagaccacatgacaataaaataagatcttggaaaaatactattataactaattatttatgctacttagaaaaaccatttaatgcaatatttcatttaatcttcacaacattccatgaagtaagtatttattttctgctttcttaaaaatatacaagtgagacttaaaattaaaggtaattcataattttcaggkctcagatttaaatgctggttctcacataatttaccagtagaaaaaaatcaaacttccgttaaaacaaaacttcaacagagcaatagaatttggccaaagtatttatacctccctaatctccagctgttattaactcaccaaaatttaaatagagggttaagttatttcagttttaatatttgaactctttctgcatgtcttgggggaaatatggatgtaagccaactgaattttatatttattctgaaaatgacaaaatcgtcttaagccctgcacttgaagttggaaaactgaaatgaatgttatgctttcaaaatagaataatttcatgtggccagacaacatttttatgcccactgccaaaaacagtatacgctttatgacagaaggatgactactattttaaacccagaaatatcaacacatctaaattattcctaattttttctataaatgctattataatagtaaacataagcacacagagacttttaaaatgtgttgtaattatcactggatgtttttctttaaagtcaatgtttctcttttctaacaaccaatatccactgttcattatgaattttgcatgtgaaagacaggaattgagttttttttaatgttaagtaaatttgagaggtatatagcatactctgattctacatcaaacctgtaatttttaatggacttacacaggtattttatataaagtacttcaaattcttttagggaatatgtaatttttaaattaatatataaaaaaacggtggcctgaaaaccaagtgaacctaatgttaattgaaagttaaagttgccctctctgagatgagagagagcctggagtgaaagatgaacaccaaaactttttccgcaacaaatggcccagtccctgctgagtgccaaccatccaataaaggcatcagccctacagctctggccatgaaacagaatctagatatatgttattaatacactaacaagagatttatgaaaagttgaagagattacaatatagaaggtagaagacatatcctagacagactgagtggctagacaacatttttgagtacattttaagtaggggtatcaagaggaaagagaaaaattgccaaggtaaacaaagataaagtgtttgttcatatggttcactagtaatgtttagagagtggaggtgttttgggaaaaaatttcccataataggattgcaagaactttttaaatctagtcaataacaggttatgattttttagaaaaggaactaagtttgcttctgttaaaagtaaaacatctgctaacttttaatagtgttaaaattatttattcatttaacaatattatttgtatacctaatgtgtgccagtcactgttcaaggtttgtttttcacagagcttagatggaaacaaaggtgtgagatgagtccggatgttcttatatttgttcccaaaacagctccaagttcttaaggacaaagttcatcagaagaaacgtcactgttgtaactaaaccagggtaaataatagagagggtctttgtctaattcagtgtgtataataaaagaagtagggcagggtcatgttgagttttgagttgaaagaaatttgctataaatatataatgttttgtttgtagaaaaatgtaaggattttgccaagagttaaatgagaaaaagcaaaaacaatccaattgtaagtacatataaattctcattcctcatgagtataaaatcatctggctaactacatgccacatgccagaagtattgctaaattagttgtttctgacatgatcctgacatgattgttgtcaaaaatccctggctttatggtaatgtgcactttatctgtccttcaatgaaagtactatgaagaaaaaaa

SEQ ID NO: 679735 - DNA, 778 bp, Homo sapiens
ctgtgtgctatttgctatacaatatatgattgtctggagttttgagtcctggtaaagaggctgacatttgtttagtccctggacttacagatagagcatgaattgaacaatactattctgtgacaataaatggtatggatgatagtgctaggctgatgtttgccttgtaaactgacctgtgctgagccatggatgtatctgacatgagccaagcctcagttcttgaggaaccaaaggtgcagaagaggcagcctttgctagttcattagcacagatgattactataaacaaaaagtctgattgctaaaattcatttacatatgctttaggtcgaaatgagacatcatgaccaaaaaaaaaaaattccatcaatttcctgtttttatatcatgttgaaataataggcaatgactactatttttgattatcagacttgagaaaactactacaacaaacaactagtgactagatctcctattttttyccctgacttcaatttgagcattggaatactgatgatagggcctagtagacacagctgtcatcagggccccaggaatcctgagagggaagaacagaaaagatgaggccaggaggggcctatttgaaatataaaagcagaatggcacagatcatcatagaaacagaaaagaacaaaagaggacaggaacgcaggcttttccttctttgattttataaaattatatatataaaattataccaatttcactatcatgacctcaaaatgaaatccaagctttccttagggagcagagac

SEQ ID NO: 679736 - DNA, 1329 bp, Homo sapiens
tttagggttttaacaattttcatatcaacccatctgtaacagcagagtcagtgttctctataagtacattatatctgttatccttgagcaatttcccttccttttggtgtaggaaaagattaygggctttggagtcaattagaccttggtttggatctcatctccctgcctctgcatgatcttcaagtaatgttaaccatacaggccttctttttcccgactgcaaaatgggaatgacagtctccatgtgacttgcttgttgggagacctgaaatacccacactgaaggcacttgttaaatgttggctcctcctctgctcctcctggccctccccttagtggagttctgggtcaaggtcaataggactgaactgggtgaagatcagaaccagtagcaaaagggctcaatgcacgagtcatgggtatttgtatgagtgtgtctgggtgtagttgcccttgcattacttttaaaatataaatataaataattttgtcaatttgccttcctctgttatgatattaatacttattgtgtgtagtgcttatgtaatgaaccctgagaaaacatgacttctctgagccccgtactggacagccattagacagtgctttagccactccttcctgagaaatcttctgtgacctgggaaagctgtgagtggtggaagttttgtttccaacccagcaatcagggcaaaatttcaaagctacatgctgtgaggtgtggagtcccatagcagtaaggaattcaaacattaattcacatgtatgcatagcatggctgatcactcccaagaaataaatttcttctttagtgttttttgtagtttaacctcgtttaaaatttttccagggagggaggaggttcccttattaatcttactgacattttagtctgttccattttgtattcatctgatatatttccttaagtagttggaggtctctcaccagtactgttttttcttaaaagctacctttataaattatcagcattatcaaaagcaaatatttccttctgccttccttttactccattttacttaatgtatttaaagtttttgttgcttatttgcatttttggttaaaaaaaatgtttctaatattcttccttgggaatacttaacaattcaaagttcttccagtctaaagcagggtttattgaccttggcactattgaccttttagggggataattgtttgttgtagggggttgtcacatgtactgtgtgatgtttattaacatcctggattctacccactagaggccaggaataccctcccccgagtcctgacagtcaaaactgtcatgaggcaaaaaataagcca

SEQ ID NO: 679737 - DNA, 1451 bp, Homo sapiens
taaaatcttgccttccccaccttcttactttaatcagatcaaataaacatttctctatctccaaacacctgtgtatcactatttaacatcaactacacaccaagtacacaaacctaaatttagacttcaacacaagcctagggcctgtgtcatcaggaaacagttctgcaggtgcaattctgatatatatggccaatgaggagccaccgactgggtctcattctcttctccgtacagaggaaataccaagactcaaagctcaaagtgacattgaacaaggagggttggaaggaggaaacacaattttagcagagcctattattttccttctttggcctcgtactgggtatcaccctctttgttacctctcctgggcttctccagctaccatctttgtgtctatttcatcaggatgtggcagtctccccaccccacccccagagtgagtagctgtcatttttgccacccagagccacctcagtgtaggagcttctggtggagtcatatctgcccactaatcccagaggtggatttgtgattcaaggccaagccgaaggaccccgtgtccctggctagggtggttggttcaagggtgaccatgtggtcaagtcagagccaggggaagacaacagacttttaccgtgagttccaggagccaggcctttcaccctctttctgcttggctcaattaggcaggaagtagagcctgggctgctgaaggcttcccgccacccgatagagcctgagaatggagcctggagaaagtagagcctggagatggggagagagaagctgagtcctgaggcctgatctgagcttctcgcggagctgcccttcagcccgcccccgtctctggatgttccagtactgctggcagttcattsctgccttgcctttgagctgggtaagcagatgttggtgctgcatttaagtcggcagctgctatcatccccacaagaactggaacccacctgtcagctccctgccacctctgctgtccttcattcccactcaccttacttgtcaccattactgaggaagcttagctattcaagttcaggttcattttaattttaatccaataatccacactacccttctttaaaatggtggtgttaaatcagaaaaaggggacctctagtgtttactgaaatgggtaggaatgtagcatcttgtttaccaggcagacatgggaaataacccagaagccactgctggaatgcagccgtcatcctttacctcctggctccacaacatatatatatgtagacctcttacagttaaatgcatttcagtaagattaaggcgctctgctaaagagtcttttttttttttttttttttttttttttgggagacggagtctccctctgtttccaggctggagtgcagtggtgccatcttggctgactgcaaccttcatctcccgggttcaagtgattcttctacctc

SEQ ID NO: 679738 - DNA, 595 bp, Homo sapiens
aagtctataattttggattagagaggaaagaaatcaggcttgttgaaatgtggtaataatatttcataygtttgagcagagtcaattagaaagaataccagtctcagagtaaaaaaaaaaaaacaggatgcaactgcttccccttccttagagcattatgcaagcacagcctattttattttatgtaaataattttcttattttttacctcacttgacttctgaaataattgtataaggcagagaggtacttgacaattttttttttttttagaaaggaatctcaggaagatgatgtaacttgcccaagatgacatatttagtgttttaagagttggaaccagactcaaatgcactgctaattccacatattacatgacataagacctggaatcatggttcttttcagtatcatatagtatttggttttatctctttaaaaacaggtggcattcctaatgaatacatttttagcactataaacaatagttgatatattatttactgaaacttgtgtatatgaaaaatatatcttaacccatcaccatggggaacaggaaagccagatgtgtttattttacctgcatgtattggca

SEQ ID NO: 679739 - DNA, 595 bp, Homo sapiens
aagtctataattttggattagagaggaaagaaatcaggcttgttgaaatgtggtaataatatttcatacgtttgagcagagtcaattagaaagaataccagtctcagagtaaaaaaaaaaaaacaggatgcaactgcttccccttccttagagcattatgcaagcacagcctattttattttatgtaaataattttcttattttttacctcacttgacttctgaaataattgtataaggcagagaggtacttgacaattttttttttttttagaaaggaatctcaggaagatgatgtaacttgcccaagatgacatatttagtgttttaagagttggaaccagactcaaatgcactgctaattccacatattacatgacataagacctggaatcatggttcttttcagtatcatatagtatttggttttatctctttaaaaacaggtggcattcctaatgaatacatttttagcactataaacaatagttgatatattatttactgaaacktgtgtatatgaaaaatatatcttaacccatcaccatggggaacaggaaagccagatgtgtttattttacctgcatgtattggca

SEQ ID NO: 679740 - DNA, 1020 bp, Homo sapiens
tatgcttactgtaacctctaccttctgggttcaagcaattctccctgcctcagcctcctgagtagctgagatttcaagcacccgccaccatcctcagctaagttttgtatttttagtagagatggggtttcgccatgttggccaggctggtctcaaactcttggccttaggtgatttgccaccttggcctcccgaagtgctggaataacaggtgtgagccaccatgcctggccataataagttttgcccagggtttaacttcaatataaaacccgtttccttaccaaattgttttcagaaatagattcaagataataatacaccttcatgagcaaygtttaatttaagactaagactgatttggggggcagcattgaattgttgataagggaaagtggtgatggaattggaagagcagcatgggagatttgttgggaagggcctttttttggcttacccagaatatgccagaatgacagtttctacgaccattgaaaagagaatattgaaaccaaccaagaaactctgaagatctcaatgcttatattacaatgtcagccctgacactcactgacatattgttagcattcaggatatctagcaaagatgtgctaacttttcatcccagtctattctaaggatccgtaagtagctagtaaatataatgctttaagagcatttttcccaaggaatatcccacagtatcttcataaatattcacttggtattccttcaaaattagtttctcagcaagatttctgcttcctttttagcaaatatattttttatgaatgtttttaagaggagagttatagtgtcactaattcagaagttgcctattataaaggaaggagagagaaaaagtcagcctcagaaaacttttgtcttttgcttacagtaagtgatattcatactcctccaattttgaaaaaataatctaacaatgattgtctatcctaggctgcttttggatatactgttagtttctaaagcatctctgttttttgtttgtttgtttgt

SEQ ID NO: 679741 - DNA, 1610 bp, Homo sapiens
gcagaagctaacaagtgcttttaaaaatatgtaacactccttatctcctgccactcctaatacacaatgcgcatttgagcctgagtatgttatatgccatacttacacactgtacatgccccatcaacctgttcacacctgtactcatgtgctctttttgctgagtagctacacctctttccactccctgagtgactcatgaacaattgtcgtgtatcttagtttctgatctcatatatgtggtagtgcttctcactatcactagtttatacatacgcttttgggcttcaagtgtcaaaatcattgtatttgttaattacttttattaaagctaccaattcaattgtgtcgaacatagtcaaattttcccaccttaaaaagaacttgacaatcttaatctacctttaaaaatttaacaactgtcagaaattatattaatttatggtttctccttagggttagtgagatcctgtgaagtagtaggaccctaataagaaggtatctccttggtaccttgtggggaaattgatttttccaagttttaatgagatttaaatgctttgctggctacacaacagcaaacattggagtttacccaacaatttattggctaggaatacgagaaatctaattctagagggtactaaaagcattggagaatatgtgatactgtaataaaatgcctaggtagattaataacacaattattggaaagatacaaattraatcattgtgaacaaataccataaaacaatgtcccaacttctatttttatacttttatttgtctttatggagcactcttaatttttgaccattagattatggctgggaaaatcaggcccatcagaaattctcaaaagtcactggccaaaactcaccagaagccagaggtcaagagaaccattgatgcagctcattcattcagccccagaagcgtggagcagagtggaaagggtgaagaaaggaaatggggttccacagagacgatttcaactgtccattttcatcagaaaaacttaaaataacacctaattaacttctcacctagttgtatacaaaaatgttacagcttgtttctttctttccctccctttgtctttcttcttccttccttccttcctttctttgttttctcttactttctttctttcttttcttcctttctttttctctttctttctttctttctttttttctctgtttcttcttttcgttcttttttcttttttatctgaaaaactgagtttttattaaagggataatttttaaaatctcactaaagatttttgtagtaagaatggggtacatctcagttgctacacatactagcaagaagtgagtgtgaaaagatctgcctttgattatctcgtcagattaatatactttaaaacagctcttaggtttgtttttcttcctctgagtaattataggttgaaactttaatttcaacctgatatagtgtggctgtatagaatgaaatggcattttgatatttttagcagaatatataaaaggactcataaaaatactaatctaaaataatattgttctgtagtggtttgtaaatactatcacattacatcctcatttttcatagttcaatatcca

SEQ ID NO: 679742 - DNA, 1224 bp, Homo sapiens
tttctcacggttgagttgaatgcttacagaggcagttgtgtgtttgcccaagcttgtttatgccagtaatacttacttttacaatgacataatttagttaaatagtacataatattataaaatataaggacagaaagaaagaacaaatctcttttaaaattgctactgaaataggaactgaataggccatatcataactactcaaattttaatgtgcacacaaaccacccagagagcttgttaaggggcagattctgattcagtaggtgagggtggggcctgagacttcgcatttctaattagctctcaggcgatagggacattgctggtccacagattacacagtgaatagcaaaatatgagactgttacaaaagcttattggaaaatcattaaaatacaaaaagagattgygtgcaggtcgctttgctagtactttaagttattcaagagctcactccactttaaaaaacctaaatctggatatcatgaagctgcttcttctcataaagataatgtgaataccattcagtaaaacacattaaaaaaaagaaagagagaaaacttgaccttattatgaaaaataaatacatggggttaaaagtaaaagtttctggaggcattttattgtttttaagtgattcattacataagaaaactttttgcactggagaagagtttctaccatattgtattaaatgcataattaccaatggaagttgataacaagactcttggcaattaaccaaactttaagtagatacgtctcataaaatgtcagtcagggtcacctcactgcccagttccaaaagtgcctggtatatagaatacagtagcagacctgcaacatattttgaatctcggggctttttgtgtattgttttgttttctaagaaggggaaggttagtaacattcaatatttcaggagccaatattgggagagagaaaaacttactgagtgttttcaaggcaaataaatgctctttacttctgacatttccttcacacacccctggtcacagctgtggaaatttttgttgttgttgttgttgtttgtttgctttgtttgtttgttttttgagacggagtcatgctctgtcgcccaggctggagtgcagtggcatgatctcggcccactgcaacctccacctcctgggttcaagtgattctcctgcctcagcctcctgagtagctaggattacaggcgtgtaccaccacgcctgg

SEQ ID NO: 679743 - DNA, 1740 bp, Homo sapiens
ttgctataatgcttccactggagtgaattgttatagcattcccattccaatgaattcatcctcattctaaatgctttgaagtttctgaatacagtaagaaaaaatgaaactatatttcacttctgctgtggctgcaaaaacccagtataggcaactcctcctgatgacaacttaaaacgytggacaaaatactacctgaggactctgcaaagcaagacagattgtggaggtgagccagaaattgctaaagcaatccaaattgggtgggtggtgagtccttcacctttgtttcttttctcttgatagagaaacagtaatcaattaatttctcttcagaaaccatggaagctgggaaacagtagaagaaggtcttgaagatgctgaaagaaaaaagctgtcagcaaaaaattctttatccaaggaaaatatccatcaggagggaaaatatagaaattttcatatgaaagaaaattgataattttatttagcagacttgttctaaaggaataccagatgaaattcttccagctgaagagaaatgataccagaagaaacttggatattgaggaatgaaggaagagtaagaaaaatggtaaatatgtggttaaatagaaaaaaacagtattttttttcacttaacttctttaaaatatagtaaatattgaaagcaaaaattataacattctttgatggagttttctgtgtatgtaggcataatatatatgacagttacagcataaaggtcttggagtgaaataaaaagattgatacagtagcaaagcttttacattttacttaaaatagtgcaatgttgactctaattatattataaaatggaagtatctatagtataatacctaaaggaaccagtaaaaaataatgcaaatatacctaaaaatctaatgtataaattaaaatgaaataccaaacaatagtaaaataatccaacagaaggcaagaaaatagaaagaggctctaaaatagaggacaagcaaaacaaataataaagtggtagatttcaactatttcagttaatgcattaaatataatggtatatatacaaaaaatcagagactggattaaacaaaaacaacatacatccatatgctattaaaaaaccctccttaagtatacaaatataactaggatcaatggttatattactttaacacaaagtagacttttgacaaataattttaccagagataaatagcaacattacctcctgataatggggtcatacctatacactgatgtgtatgttaagtacttaaatgtgtatgcacttaacatcagagtttcaggttacatgaagctcatattttacagataaaacatttcccaaaagattgaatcttctgggtgaaaaaataacagatttaaaaaagcaaaatcagctgggcacagtggctcacacctgtaatcccagcactttgggaggcccaggcgggtggatcacgaggtcaggagttcaagaccatcctggctaacacggtgaaacaccgtctctactaaaaatacaaaaaaaaaaaaaaaaaaaaaaaaaaaaattagccgggcatggtggtgggcgcctgtaagtcccagctacttaggaggctaaggcaggagaatggcgtgaacccgggaggcggagcttgcagtgagcccggatcgtgacactacacttcagcccaggagacagtgagactccatctcaaaaacaaaacaaaacaaaaaaaaagaagcaaatcatacaat

SEQ ID NO: 679744 - DNA, 1740 bp, Homo sapiens
ttgctataatgcttccactggagtgaattgttatagcattcccattccaatgaattcatcctcattctaaatgctttgaagtttctgaatacagtaagaaaaaatgaaactatatttcacttctgctgtggctgcaaaaacccagtataggcaactcctcctgatgacaacttaaaacgctggacaaaatactacctgaggactctgcaaagcaagacagattgtggaggtgagccagaaattgctaaagcaatccaaattgggtgggtggtgagtccttcacctttgtttcttttctcttgatagagaaacagtaatcaattaatttctcttcagaaaccatggaagctgggaaacagtagaagaaggtcttgaagatgctgaaagaaaaaagctgtcagcaaaaaattctttatccaaggaaaatatccatcaggagggaaaatatagaaattttcatatgaaagaaaattgataattttatttagcagacttgttctaaaggaataccagatgaaattcttccagctgaagagaaatgataccagaagaaacttggatattgaggaatgaaggaagagtaagaaaaatggtaaatatgtggttaaatagaaaaaaacagtattttttttcacttaacttctttaaaatatagtaaatattgaaagcaaaaattataacattctttgatggagttttctgtgtatgtaggcataatatatatgacagttacagcataaaggtcttggagtgaaataaaaagattgatacagtagcaaagcttttacattttacttaaaatagtgcaatgttgactctaattatattataaaatggaagtatctatagtataatacctaaaggaaccagtaaaaaataatgcaaatatacctaaaaatctaatgtataaattaaaatgaaataccaaacaatagtaaaataatccaacagaaggcaagaaaatagaaagaggctctaaaatagaggacaagcaaaacaaataataaagtggtagatttcaactatttcagttaatgcattaaatataatggtatatatacaaaaaatcagagactggattaaacaaaaacaacatacatccatatgctattaaaaaaccctccttaagtatacaaatataactaggatcaatggttatattactttaacacaaagtagacttttgacaaataattttaccagagataaatagcaacattacctcctgataatggggtcatacctatacactgatgtgtatgttaagtacttaaatgtgtatgcacttaacatcagagtttcaggttacatgaagctcatattttacagataaaacatttcccaaaagattgaatcttctgggtgaaaaaataacagatttaaaaaagcaaaatcagctgggcacagtggctcacacctgtaatcccagcactttgggaggcccaggcgggtggatcacgaggtcaggagttcaagaccatcctggctaacacggtgaaacaccgtctctactaaaaatmcaaaaaaaaaaaaaaaaaaaaaaaaaaaaattagccgggcatggtggtgggcgcctgtaagtcccagctacttaggaggctaaggcaggagaatggcgtgaacccgggaggcggagcttgcagtgagcccggatcgtgacactacacttcagcccaggagacagtgagactccatctcaaaaacaaaacaaaacaaaaaaaaagaagcaaatcatacaat

SEQ ID NO: 679745 - DNA, 1514 bp, Homo sapiens
tgggcctttatacttgcagtttcctcrgcccaaaacactgttccccagcatgggtgcttactttttgtcaactggtctcagttcacatatcacctcctaagagggcctattcctaacaatctatcttaagtaactccctcaccaacaaagctccagcacattaccctgttcagagtcttcaaagtgcttaccaccacctgaaattattttctattgctgtttttttttcttgttaaacgtatgtatccgtaactagaatataaattacataggagaagagatttttgtctgcaacactctctactatatccctagcatttagaagagcaaatggaacccagtaggcaatcacaaaatattctgaatgaatattggttatcgtatcatcattttgaatgagtgaatgtgatagatccaaactgagggtcagaggtattttcattatagatttttaaacctatactttaatacaagtttgtagcttattatggatatttgaagagctgtgtgccaaacctaacaaggctcctgaatgtttctaaatgtgcaattgtcgctatatttctgctgtcatttttcacaggtttccaaatgcgtcataaaatattattgggtcagggaccatgcaggctaccagatggttgagaatgatttatttccttgacttcagactactgaagaatgattgcaggaaaaaagccagtttttatctctgagcttacagaatatgaaagataagagagaccttgcggttcatctagtctggattcattcttaatttaaaaacccattctacactaccaatgacatggttatctgaccttgacttcaatatttttagtgatgagacactcattattttacaagataacctgtctcacaattggatggattttgatgagcaaggtcttccttctattgattcaaaatttccttcctgtaacttctggcccttggagcaacaacgtgtaagtctagttcctgttctgaattatgaactttgaaatatttgaacacatctcaactatctcccttcagtgctctcaacttctgaataaacatcccaaatacctccagctgttcctcacttatttctccttttggaaccctcatcttcctactgaatgatctctggacacaccgtaattaggaaacatatgttctccagggcaaagtagaattatgtcttatttttaattatggatttaattgtacttatgccataaaactactaaatgatcctcttttgtaaatcaactatacatataattgcatactgtataattaccaatatcagcatatgttattagttgtaaaatgcaaaagcaggttactctgatataataagcccccatcttagctggaagtctgtgtctaaagaacatctcatggctgacaatgccagcttgctattaaaattcttcagataaaaatatgaacaaatttcaaaataatctgggctatcaacttgcacatgcacaatagtatggcttgtttcaatttcaaaattcatg

SEQ ID NO: 679746 - DNA, 959 bp, Homo sapiens
tgcattactgacattcagggtggagaatatcacagttgattatttgaaagagagcaagacaagttacaattgaacaaagaccataagaatccctgggcaataggaggccgttcttgtgaaatccaggacaccaagcatgagtctagctctatcccttggtcccattttctgctgggctagctctccagttgygtgcagtgttgacaatgcaggcatagcattcattgcacagcattgaggcctgtaaatcagctagttcatacaattgaatgtgatgactaattatgtccaacattgctaaaaagtcccttagaaaatggatctaatttgttttatgtagttaatattattttattgagtatgcattattgattttatagagtagacaattctttgagagacatgtttatgaatttgtatcagctctagcaccgtttttttaaagcacaggagatgccagtgagggacttaaaattcaagtcctcattttgtgattgttaattttattccattgtcatttagattaatttcctcctgcatttcagaaaactaattttcctatttaaaggctgaattgtgagcccaagtctggttccctcagcctatatcttccataaatgccaaagctggattcattcctgcttcccacctctaggtccagccctaggtgcaccctgtccttctggtggagacagtgattatattatgatctgagttcaaaggcctgcaggctctgtagagtctactttgtacccatggggcttccccttagaaagtgttacaatgtgtcacagagcattggctatggagacagatgaacctgaatttcagtcccagctctgtcatataccagctgtgtaactttgggcaaatacactttttgtgctcaagcttcctcatctgtaaaatgggaatatgcaggtatactagttgtgagaatgctaagagaggatgtgttt

SEQ ID NO: 679747 - DNA, 959 bp, Homo sapiens
tgcattactgacattcagggtggagaatatcacagttgattatttgaaagagagcaagacaagttacaattgaacaaagaccataagaatccctgggcaataggaggccgttcttgtgaaatccaggacaccaagcatgagtctagctctatcccttggtcccattttctgctgggctagctctccagttgtgtgcagtgttgacartgcaggcatagcattcattgcacagcattgaggcctgtaaatcagctagttcatacaattgaatgtgatgactaattatgtccaacattgctaaaaagtcccttagaaaatggatctaatttgttttatgtagttaatattattttattgagtatgcattattgattttatagagtagacaattctttgagagacatgtttatgaatttgtatcagctctagcaccgtttttttaaagcacaggagatgccagtgagggacttaaaattcaagtcctcattttgtgattgttaattttattccattgtcatttagattaatttcctcctgcatttcagaaaactaattttcctatttaaaggctgaattgtgagcccaagtctggttccctcagcctatatcttccataaatgccaaagctggattcattcctgcttcccacctctaggtccagccctaggtgcaccctgtccttctggtggagacagtgattatattatgatctgagttcaaaggcctgcaggctctgtagagtctactttgtacccatggggcttccccttagaaagtgttacaatgtgtcacagagcattggctatggagacagatgaacctgaatttcagtcccagctctgtcatataccagctgtgtaactttgggcaaatacactttttgtgctcaagcttcctcatctgtaaaatgggaatatgcaggtatactagttgtgagaatgctaagagaggatgtgttt

SEQ ID NO: 679748 - DNA, 959 bp, Homo sapiens
tgcattactgacattcagggtggagaatatcacagttgattatttgaaagagagcaagacaagttacaattgaacaaagaccataagaatccctgggcaataggaggccgttcttgtgaaatccaggacaccaagcatgagtctagctctatcccttggtcccattttctgctgggctagctctccagttgtgtgcagtgttgacaatgcaggcatagcattcaytgcacagcattgaggcctgtaaatcagctagttcatacaattgaatgtgatgactaattatgtccaacattgctaaaaagtcccttagaaaatggatctaatttgttttatgtagttaatattattttattgagtatgcattattgattttatagagtagacaattctttgagagacatgtttatgaatttgtatcagctctagcaccgtttttttaaagcacaggagatgccagtgagggacttaaaattcaagtcctcattttgtgattgttaattttattccattgtcatttagattaatttcctcctgcatttcagaaaactaattttcctatttaaaggctgaattgtgagcccaagtctggttccctcagcctatatcttccataaatgccaaagctggattcattcctgcttcccacctctaggtccagccctaggtgcaccctgtccttctggtggagacagtgattatattatgatctgagttcaaaggcctgcaggctctgtagagtctactttgtacccatggggcttccccttagaaagtgttacaatgtgtcacagagcattggctatggagacagatgaacctgaatttcagtcccagctctgtcatataccagctgtgtaactttgggcaaatacactttttgtgctcaagcttcctcatctgtaaaatgggaatatgcaggtatactagttgtgagaatgctaagagaggatgtgttt

SEQ ID NO: 679749 - DNA, 959 bp, Homo sapiens
tgcattactgacattcagggtggagaatatcacagttgattatttgaaagagagcaagacaagttacaattgaacaaagaccataagaatccctgggcaataggaggccgttcttgtgaaatccaggacaccaagcatgagtctagctctatcccttggtcccattttctgctgggctagctctccagttgtgtgcagtgttgacaatgcaggcatagcattcattgcacagcattgaggcctgtaaatcagctagttcatacaattgaatgtgatgactaattatgtccaacattgctaaaaagtcccttagaaaatggatctaatttgttttatgtagttaatattattttattgagtatgcattattgattttatagagtagacaattctttgagagacatgtttatgaatttgtatcagctctagcaccgtttttttaaagcacaggagatgccagtgagggacttaaaattcaagtcctcattttgtgattgttaattttattccattgtcatttagattaatttcctcctgcatttcagaaaactaattttcctatttaaaggctgaattgtgagcccaagtctggttccctcagcctatatcttccataaatgccaaagctggattcattcctgcttcccacctctaggtccagccctaggtgcaccctgtccttctggtggagacagtgattatattatgatctgagttcaaaggcctgcaggctctgtagagtctactttgtacccatggggcttccccttagaaagtgttacaatgtgtcacagagcattggctwtggagacagatgaacctgaatttcagtcccagctctgtcatataccagctgtgtaactttgggcaaatacactttttgtgctcaagcttcctcatctgtaaaatgggaatatgcaggtatactagttgtgagaatgctaagagaggatgtgttt

SEQ ID NO: 679750 - DNA, 1599 bp, Homo sapiens
gacggatgaacggatggatgatgacagggacttctacactgcttactctttatttctctgtatttcctctccctctccccctattcactttatgtgccacctccctgctttctgaagtttaacagaagcactgtattaatttgttcttttgttgctaatacaggcatacttgagactgggtaattcataaaggaaagaggtttaattgacaatttggcatggctgggaggcatcaggaaacttacgatcgtagcagaaggggaagcaaacrtgtccttcacatggtgacagcaaggagaagtgctgagcaaagggggaaaagcctcttataaaaccctcagatctcatgaaaactcattcactatcatcagaacagcatggaggtaaccacccccatgattcagttacctcccaccaggtccttcccatgacacatggggattatgggaactacagttcaagatgagatttgagtggggacacagcaaaaccatatcaagcactaaactgggaattatcacatttgtgtactagctgtgtgacactgggagctctaattaatatttttctgggcctcagcttcttcatctgaaagatgaggcagttggacatgatctctaaatttcctttcagcttgaaaattctgtaattggtatttttttctctgagatgttcaaatcaaatatgtacttttagaccttactttttatattttcaaaggcatgcatttttagaaagagacaatttagagataatcagttcaactcactcgtgtgaaaggcgaggggaatggagccctatgatatgctcctccatttataaagtaaggctaccaatgatagtaacaatagcaatagttacagcaatgatgattgcttctcatcctttggctaagatcaagtgtaataatagtaatgataaaaagaacacctatatcaaaatattcttgtggaactaaaattagataaaacatataaaagtgtctagctaggagtaaatgttcaataaatattgattctcacagtggtttttaatattaaatgtcatgtgacttgcccccaaatatctggctggtgactggcaaagctgggactgaaccatttccttaaggcatacaagccattcatttttcttctaggccccttcttgtcttttcctccaacaatcagagctaaaccatccttcttcatacaatatggagataatacagtgaaatagttatgaacataccttaggggtaggataaaacctgggtttcaaactaaattctgatattctctttctgggacactgggtaagttactgaatgtttctgaatctcagtctcttcatctgtaaaatgaggataaagataatgggtaccaacctcaaagagatgtagtaaggataaaagacattatgtcaagtacttggaacaggtcatggcatgaataaggtcaataaatagtatctatcttaattatcaacttttcccccacgtgctaagtggcagaagttctccacattgtctcctcattgcctagacagaagttattacacgtactcttgaaagaagacttggacattaccactcatggcagaaaaatatatcaattcaaa

SEQ ID NO: 679751 - DNA, 2918 bp, Homo sapiens
tggggttatagaatctgatctgctccctcagcctcctactccatcctgcccctccaaccaaattcatcatacctgagcctcgtgttaagtcacataacctgaaaatccctacaatttttagctctggtaattccagttagtgccctggcattatggaacgtttcttagcctgctgcctaatggtgcaattaaatccaaactagagataaattaggaaaaatgttttcttgactcactcccatctccatcaagctcctcctttgctatatgaactcctccaccctctctctctctctacacacacatacacacacacacacacacacacacacacacacacccctctagctctagatcagcaccatccaacagcaaaatattgtaagccgataagtaatttaagatttttctagtagccacattaaaaatattaaaagcgatgcaattaattttaagatatattttatttaacccaacatgtctaaaatattgctgtttcaaaatgcagtcaatataaatgtatttaatgcgttattttacatttttttatgttaatctttaaaattcaatatttgttttatgttttcagcacacctcaaatcacagtggccacatttcaaatgctcagtggccacatgtagagagtaattatagtattggacagaacagtttggagaaatattttctcttcactacttctgttccatgtccccatagccttggacttctaaaaatgtgaatggatagtggtggctttttgagctggctccaccaggagaactgtttacctttaaccaagggctttggggagaattgcctgtcacagattgtgacaccgagaatgagggacatcggtaacttttgttgttttaccacatgcagcaggcagtcacctacctatctggcttatgagtccaaccagggtaaacaggactgaggagagatctgccccctgatgaaaagacactttgcaacttcagggcagggccatcgctgtccttaatatataccatcttgcccccaaagtgaatgacttcctattccacctcatgcctgaagttggctggctatctaagtgaatcaggagaagaaaatagaatgttagttatttatctaagcctattcaaaatcaactgcagtcatttcattggtgaagaaactgagctttggagaggagaaatgatttgcccacagttagacagctgccagaactggattggaattagaatcaggtcagtccattccatcaagtctcaagtcacttctgacaatgttgacagttaatgactcacgtcatttaccaatagaaagtcacaggacctactctagaagtacaggccactcaccttccccacctagctccaatcaggctttccaatgtcatctcckgacagcaaagctaagtaaacaaccaaccaaaagtaattactcactgtgataagtgctaaaaaggtcagaaatgggatgcagagataatgacaaggaggttcctgctttagaaagggcggtcagagaaggcattcctgaggacctgaaggatgagaaagatgatgtagagagaggctgatggggctccaggctgaggggctggcaagtgcagaaccctgggaccaggaagggattggcctgctgaggaactggaggaacagaagtaagggacaggagggcctgagaggcagctggggccacattatgcggagtcttgcagaaggaagctggacattcagctagaattttctttcctctgtctctttctctttttttttgagatggagtctcactctgctgcccaggcgggagtgcagtggcgtgatctcggctcactgcaacctctgcctcctgggttcaagcgattctcctgcctcagcctcccgagtagctgggactacaggcctgcaccaccatgcccggctaatttttgtatttttagtagagacgggcttttaccatgttggccagggtggtctcaaactcctgacctcaggtgattcgctcacctcggcctcccaaagtgctgagattacaggcatgagcccccgcacctggccagtctctttatgtttaatttttaataaaaaatatgaaatgctttgtggattgcctatcatccttgggcaggggccatgctaatcttctcagtattattccaattttagtatatgtgctgccaaagcgagcaccctctgtctcttttgttataatggtgagtttcatttcaatcttaaattttgctgtttcgagatcttctttgttgcattggaacctaaaaagacttagctctgccacctgcaagagtcattggagactggatgtgctacctccatttctagcagtgggtccttaagggactcaggcagtagcagcaggaaataaaagaatgtgctgcaaaggctagcaaccctgaggctgcagttgtgattgtatccaactgacaaacaagttcagacatgaataatttggcccagtatcttcagattggaaagctacagctagcactaatagtttgttcttaaatactcaagtgctttcatgctctctactttatccgagtttaaatttccagcttcaaaagtagatttttccacttctaaaatggatctatctccctccctttctctgccctcctcccctttctgctttagaaagatcttgggaaagcaagcctaggtgtaaatggtcttcatctgtgtagcagaatactagaaggttagctggaaggcatcttaaggaacagtagttctgaccttctcattctagtattattagtggtatttctaatagattcctatgtatcagatgatttatgtacatttaatatcacagcaactttgcaaaatggattttttaaaatctctgtttaacaaatcagaagactgaggctcagagaagttaataactgaccaaaggttgcatagcca

SEQ ID NO: 679752 - DNA, 646 bp, Homo sapiens
taaaaagtgaggaaaatagtactcttgcatcctcgaccaagatagtgtttgttgtgagtgctgagacggaccagcattctctttgttggtgaagaggagacagacccatccacaggagtcattggcttttttgaatactaagctctgactgccattcatcatctacacagggacagaaaacccggtctgggggacgtggcacgcagcagtgtgtgaggggaatgycaaggaatctggggagcgtcaaggaatctggggagcgggaagatggagcggggtagctgcctggaggcctcagtcccacagcagtgaggacaaggctggaggttagccaagccctgccctaggtgtggtcacgacctcaccagctcccttttccttttctctgaggccattgtctctcctgggcacagtccgtaaggttcagattccagactgtgactttaactggtcaccgtggctctggctggagcaggacatggtgacctggagtctccatccactcctccgatgtgcacttagccacctcctggggctctccccagcactggccgagcatcctggttagtggggaaacgtggagcaccaggctagaaatcaagacccttctgcctgcagactagcttggagacccatccacgtgtct

SEQ ID NO: 679753 - DNA, 606 bp, Homo sapiens
agggacaggactcggtgcaggtgtgcagtgagtggctggcatctctggaggtcagtatgtgagggtgggggtcccctccaggcagctgcgagggcttggctgctcccagaactgcctggaacctggggagactgtaaacaacctcttgcaaccccaagaataaagctgccatgtgtgagggcttgctctgagctaagcatgattctgagcaccggcagggagtacagcaagtggatgctgaggcctggagggcaggccccagagagctgagtgcccctccaggtttcatggctggcactgtggaccagtgtggcccactgcctgcttgccaccccacaacaaagcttcagaggtgcagaaccagtggcctgagctccagggacaggaagcatcttggcgtggggttctcatggtggcacttgcatgccctagtgcacaggggcggaaggggaagctctgttgcctgggccctttctctgtggcaacagatggggaagtctgcygtgaggatagagagtgcatggccatcccatcacagcacaggttgagtgctgagccaccccgagccctccccagcccagcggctctccccaaggaggcttcaaa

SEQ ID NO: 679754 - DNA, 980 bp, Homo sapiens
aaaaaaaaaaaagtagtttgtaaaagcactgcttctactctgtcttcagtcagattccctgaaaggagagcctgagataaggatttttttgtaagttatttcctgagggttttcgggagaaacctgtcaggaagtgggtttagaaagacagggcaggggaaagagccgagcaaagataagattttagaagactagccttagcctgatcccacagggagctctggagcatcaactgtatcactgttyttcccacgttaaagaaagcaagcaaggtgggcttttgtatctccatattgataagacttttgccaaggagcacactgggaaatggaggcagagcttcccagacttttgtgaatggggcaatcctctggagaagtgaatgtgaactgttagcattcagcaccacagaagctagggggtaggtggcctggcctgataaagggaatctggatgaggcacccatagcatctgttgaatactatttcttcttttctcaatctaacttaaatgtcaaatagtattaccaggttacaaaacattcatattatttatctcactggaccttataatttttcacacagtaggcatttgatagataaaagttaaaagaactgcttattgtgttttacaaaaaaggagaagctcttatatagttggaaattacttttgttactatttaatttagataatatattgtaggaaatggttattcgatgagaaagcagaaaatggaactcaacaattaaggcttcctggaaaaaaaagttctctattctttagcggagaatgaagatttaacattaagaatggcctgtcctcacaagtaaaattgaagttaaagtaacctcgaatttttttaaatttctatcaagtgatcttgttccaggaattaatattacacttagacttgatgattaccaggtaaagaacattcattagaactttaacaaaaaaaaaaaaaaacaaaaaaaaaaaaa

SEQ ID NO: 679755 - DNA, 913 bp, Homo sapiens
gggatcagaacaatgaatgtgaccaggaataaagagggaaattaagtagtgacaaaggagcccatccatcaagaattatcaatcctaaatgtgtatgcacctaacaccagaactcccaaattacctaccaactctaattaagtgatgtctttaaaactctctaaccaacgatagaagaatacatattctatttgtgtatttgttgttagtatttcatatattttggcattttatttttctaccaaaaacagaaaaaatgtcagtccaatggtagattttgtccagtatctgttgactaatgaatagtttatgcaaccaacttgaaaattaaaaatatacctaaacagggtaaagatcacataaggcctctgagtattatttcccacaactccatgcatatctacaacaaattcaaaattaacagtttaatgaatacctttctatctgtaggagagagataaatatctaaataatattagatctattattattccatccagattttatatctttacgcttgtttrtattttttaaagttgttagtactgaattgaattacatagtattagattttactttaaagcaattttaatggcttttattccataattcaataagctttataatatgcctctattaatctttttttttctattatccatttccatagattcctaccaaaaacagctatcataaatgaagattttttggaaataggacaaaagatgtaaatgccaaggtaaataaacatgacaaatattacaaacttttaagtatttttttaaatttaaatagttttgctctgcagccaaaaagcattgatttataatggtacctctgaaatacattagaaaaactcatttgatttacaaggcttggttttggttttggttttggttctgggtttctgttt

SEQ ID NO: 679756 - DNA, 913 bp, Homo sapiens
gggatcagaacaatgaatgtgaccaggaataaagagggaaattaagtagtgacaaaggagcccatccatcaagaattatcaatcctaaatgtgtatgcacctaacaccagaactcccaaattacctaccaactctaattaagtgatgtctttaaaactctctaaccaacgatagaagaatacatattctatttgtgtatttgttgttagtatttcatatattttggcattttatttttctaccaaaaacagaaaaaatgtcagtccaatggtagattttgtccagtatctgttgactaatgaatagtttatgcaaccaacttgaaaattaaaaatatacctaaacagggtaaagatcacataaggcctctgagtattatttcccacaactccatgcatatctacaacaaattcaaaattaacagtttaatgaatacctttctatctgtaggagagagataaatatctaaataatattagatctattattattccatccagattttatatctttacgcttgtttgtattttttaaagttgttagtactgaattgaattacatagtattarattttactttaaagcaattttaatggcttttattccataattcaataagctttataatatgcctctattaatctttttttttctattatccatttccatagattcctaccaaaaacagctatcataaatgaagattttttggaaataggacaaaagatgtaaatgccaaggtaaataaacatgacaaatattacaaacttttaagtatttttttaaatttaaatagttttgctctgcagccaaaaagcattgatttataatggtacctctgaaatacattagaaaaactcatttgatttacaaggcttggttttggttttggttttggttctgggtttctgttt

SEQ ID NO: 679757 - DNA, 1077 bp, Homo sapiens
atcttcagcatgaatttttcatcagggatgtaggatcttcctggggcagtataaagcaagagtgtgaaatggcttccaaagagataatgatactttaaattctattaataaacatggtgtctgtatcaacattgtctccacttctgaataacacactttaaatgggaaaatggcaaaatggaattttcaggaaaaatgcaaccagactgtcaaggtgattttagatattgtcatacatggaaaacttggagtaactcatgatttgactccctccccctcaaaaatgttttatcagttatccaaatttccatgaatgacaccactattcacccaaatgtcaaaaagcctaagagtctttcaggatctctttcctttcttcacctctctgaattaaatacaaatactattaccaattgtaatattaatgctaatgcaattattgctaatagtagctaaaattyaccaagtatttatgttctgtcagactctatcctaggagcttcacattctctcaatctccataacaattttaccttccatctttgatgaatttgagacttagagctattaatgtagttgcacatagtcataaaaatggtaaagtcaggatttacacccaagtttgttagatttcacaacctgactcaagtcccgtcatgtctgtctctaaaaatgtcttatctctgaccacttcttctcttctatgatactactaatctcattaaaaccagcatcatctcttacctagactattccagtagtctcctaattgaagttaggtgtttatatatattatatgaactaagcctgtctacaggtccatgagataaatatcgtatcacgcaaaggtgaagaaatttagaccagagaggttgagatgcccaaagtaacacagctaataaataaaggaggatcagatttgttatataatactcaatgacttaaatttagtttgaagaagttcaactggataaggagagtggaatgaaactaaatcaaaagtattcccctctaacattaataaaattaatgaaaataataacagcagcagaagataatacttattatttgcaatca

SEQ ID NO: 679758 - DNA, 610 bp, Homo sapiens
tggtctttattgtattgacataaattccttgtatacttcttttgtttagggttcttatcatgaaagaatgttgaaattcgtcaaatggtttttctgcatctcttgaggattttttgttttgttttgttttttgttctgttaatgtggtgtatcgcattgattaattcgcatatgttgaaccatccttgcatcccaggggtaaatctcacttggtcatggtgtatattccttttaatgtgctgttgaattcattgtgctagtattttattgaggattttgcatctatttcattagggctgtaggcctatgattttcttttctgtcatgtctttggttttggtatcagagtaatgctggtctcacaaaatgaatttggaagtgttcccccttctatttyttggaagagttggagaagaattagtattatttcctctttgactgtttggtagaattcacccttgaagtcatcttgccccgagcttttcaagaatgcccctctctctttccatctgaccctcctaacaattctaactattacttccttctagctatcttcccttattccaccagtggtaagtaatcttttctttcataggaactgcactgggaa

SEQ ID NO: 679759 - DNA, 675 bp, Homo sapiens
cacaaattgtttcattcttccagcttcagttccataattcgggaaatggggtagtgcttgttttatgggccccagtacttcagttctctagctatgccctttgccggctaacttacttgtatcttcctactctgactgtaggcttgactgtgccacgttgtctactgggatgttagcaagtgtgatgcaaacaaaaacttgaaaaatgcttacctgaatggacttgttcaggcttttaccctcagccattgatgtaaraagaaaatgcctaggttagcctgctccacaattacacaggtgtgatatgggaccaagttgtcctagccatcatagttgaggctgtcctagatcagccaaccgatagtcaatcccctaaacatgtcagtgagtccagtccagacaagcagaggctgtaatccctcatggaagctgatcatacgtttattgaagaggaccaactgagatcagcccagctctagcccaggtcatctgtactccacagactggtgagctaaaaaaatgttaaagtttatggcactgagatttggaggttttggttatggagcactgtcctgtcaatagataactgacacggatgagaatatttacttcatagaagttgctttgaaaaatagatgagacaatacctactgagatccagcacagagctgatgg

SEQ ID NO: 679760 - DNA, 675 bp, Homo sapiens
cacaaattgtttcattcttccagcttcagttccataattcgggaaatggggtagtgcttgttttatgggccccagtacttcagttctctagctatgccctttgccggctaacttacttgtatcttcctactctgactgtaggcttgactgtgccacgttgtctactgggatgttagcaagtgtgatgcaaacaaaaacttgaaaaatgcttacctgaatggacttgttcaggcttttaccctcagccattgatgtaagaaraaaatgcctaggttagcctgctccacaattacacaggtgtgatatgggaccaagttgtcctagccatcatagttgaggctgtcctagatcagccaaccgatagtcaatcccctaaacatgtcagtgagtccagtccagacaagcagaggctgtaatccctcatggaagctgatcatacgtttattgaagaggaccaactgagatcagcccagctctagcccaggtcatctgtactccacagactggtgagctaaaaaaatgttaaagtttatggcactgagatttggaggttttggttatggagcactgtcctgtcaatagataactgacacggatgagaatatttacttcatagaagttgctttgaaaaatagatgagacaatacctactgagatccagcacagagctgatgg

SEQ ID NO: 679761 - DNA, 626 bp, Homo sapiens
gtcttctagaagctcgaaaaggaaaggaggcagtttcttccttagagtttccagaaagcaacacagctctgtttgattttcacctgtaaaacccatcttggacttctgacctccagtactgtgaaataataaatgtgagttgtttcaagccagtagagtgtgtggcaatttgtctggcagcaatagaaaaataatacatcctcttttatcttctccagctacagacgaaagcctcaacggtaagatccacctatgcctgaggctggaagaaaacagatcagaatatggccaatgcagaataagtggaaaggctcggaatgtaaatggcttggaattttctaggaacaaacagcagctgaagtggcaggagcatgatgagcaaagaaaagaggaaatgctcaagatgaagtagagagktgggcagggcagtgcaggtgaggccttgaaaactatagtaagtagtttagattttagtcttagtacaatgagaaaaaccatttaagtatgttttgagcagtgagtgatgtgatatgatttttttttaagagacagggtcttactctgtcacccaggcttgagtacagtagcacaatcatacctcactgcagccttgagctcctaagctc

SEQ ID NO: 679762 - DNA, 626 bp, Homo sapiens
gtcttctagaagctcgaaaaggaaaggaggcagtttcttccttagagtttccagaaagcaacacagctctgtttgattttcacctgtaaaacccatcttggacttctgacctccagtactgtgaaataataaatgtgagttgtttcaagccagtagagtgtgtggcaatttgtctggcagcaatagaaaaataatacatcctcttttatcttctccagctacagacgaaagcctcaacggtaagatccacctatgcctgaggctggaagaaaacagatcagaatatggccaatgcagaataagtggaaaggctcggaatgtaaatggcttggaattttctaggaacaaacagcagctgaagtggcaggagcatgatgagcaaagaaaagaggaaatgctcaagatgaagtagagaggtgggcagggcagtgcaggtgaggccttgaaaactayagtaagtagtttagattttagtcttagtacaatgagaaaaaccatttaagtatgttttgagcagtgagtgatgtgatatgatttttttttaagagacagggtcttactctgtcacccaggcttgagtacagtagcacaatcatacctcactgcagccttgagctcctaagctc

SEQ ID NO: 679763 - DNA, 613 bp, Homo sapiens
tgtgcatggtggagttgccagatcctgagggaaaaaaaggaagccccaagaacaaagaagcaaacaaggaggtctcattgtccttggccatcctcaaaagttgacaccccgccactactttctgcctggctcactctccacagcccctctggtgttgggagcctcctctttaccagtgacttccaaatgccctgacttccggacccacatggccacaactgactgagtcttcctggaggtcccctggcctctcaaacttgccattccagtgcaacatgggctgacctctcaaacytccctgtgaccttgtgtctcccccatcacagcaaatggtctccatgtctctgcctatgagtgtgggccttgtgctccctgtcccccaccccatgggaccaccagaagtgagctctccgagtgcaaggggcctgtgaggtgcgtactccgcagcaaaccctcccggaagcttggctgaatagatgcagagaccacatgtggttgagggttaaccaccctcagatcctcccaggcctccctggcactccccagtgccaggaacctgggaataccaagaggccaaactggaattggagcttggcgagggcagcttcccttt

SEQ ID NO: 679764 - DNA, 528 bp, Homo sapiens
cttgtcatactttagctatggctttctttttcagattctcaagagttatgctgctctaatggtaggggaaaatgtccattacaaatacaatccatagtattatggattagaatttcccctggggacaatgattgcaattcatgcttaggtcagcaatagttacacttagtctgatatctctagcagcacagcatgagacagaggcttctatgagagtactttgctaggaagtaagatcccatagaccagaaatgagagatcgctggaaagagtaaaagacaattcaatgattgtaagtactgtgtggtggcatgggaaattcatttcaggaccatctttttttggtgggcaggggtgagaactcttttcccacattggtagaygttttcttccatggtactataactttaccacattctggcttatttgcacacatgtgagcaccaagggaattcctgcgacattcctcactgcagggacaacagacatgtccaggaggcagcaaacatcttcatgaagctggtaaaa

SEQ ID NO: 679765 - DNA, 912 bp, Homo sapiens
tgcagaaaggaaatggacttatgcagaggcccatacagcccccagtcaaccctgcctttgccatgtcagctgtgggggattttgtgctggtctcagcctctgagcgctctctgcctcagtttccctytgcagggtggagccagcacccacagccatgttttggcacgtggcaaactaactccttttgtgtactgtgcagtcttaggagtaatgaggcagcaatattattgttagttctctgttctaatgatcagctgtgaggacctaagcaaatgagagttgctatagtgttatgaagaaaagaccctgacttgttagagtggccatttgtttccccacagctattcatccccctggtgccctcatcaccagggcatatctaaaagatgccatgctagatacccatccagggtatggtacagacatcacaaggtaagtattccaaggccagagaagtgaaaatgttcacagcagctctggaagagaggaactcagaaacctctgggcaccttctggatggagcccattgcctccacatccaaacatggaccatgtattgctacaaaggaagcaatagtgtgctccacggaaggcccgggctgctgccggtccctccagagttcacggctgggcatgatgagaccaacctctctcaccctggccgcttctctagccagtgggagggcagaggctggcagaaaagcctccgtctgccttgttgactctgccgggttcagagagggcttcacatttgacttggcgaaggagagaagttctttatttccctcagcctcaggtctgccaagcccaaggctgaggtgagcagttttctcctccgtctctcattgccacatcattacctgcagagttcaatgaaaagccccatccagaatgggccaagccgagcctgca

SEQ ID NO: 679766 - DNA, 622 bp, Homo sapiens
gcttggtcaagagagacattagaaatttctccttgtcccttccttcccaaattcagattatcaggaaaaaaaaaaaaatgtctatattgtgactctctgactaaatctggctttaaggtactcgtttgttactgatcctttccctcgcagggactgctgtctctttccttgtttttctcaatttctgtcctgataacttggtttgattttctccctgttggggcatgcaagctgtcttgagttccccaaccaacttcaggggagggaactcaagaatacggctggacagaaatgtgggttgcaccctatttccagctatcctaccaagtattgccagctcttggggggtttatttgtatatttcttttgactctctttgggggtagttctggatttgggagggctgcactctcttttgagaaccccttcttagtccatggtgaagtcataaaaggctctttggttttggttgagtcacttagtaggtactttcagtttaaaacaagaaaaaggtaaatgtatatgtttttctcttgttaatctgtgttttcttgtagtgctctcagccacgaaccttgagataggtgaggaaaatatattayttttcctcccttacattgag

SEQ ID NO: 679767 - DNA, 726 bp, Homo sapiens
tgaagcaaatataataaacacaacaagcattgtaagtgataaatgagaggaagcatttcctccagggctagtgggatgcatggggagatgtgcagcccaggtccccttcaaaggaggacttgtggctattcccacatacctgtgggcagccagcctccagcagccaagagtcgcctcccctaaggtcacacccatcccagtgtgcccacatcccatgacctgtcaggygagggtaaagagacaaggccatcttggcccaatgtgggacaagtctgatgcatccatgtcagcccaggtgctgggttctgccagcctgcatcacagttcgacttctgcttctgtctaatcctgcctgtctccagttattgatcccaatggctccccctaataaacctccttcacactaaaggcagtctcagagtctgcttcccagagaacccaacttgtaacagttagcaattattctaccttgagggagagagagggagaatctcaaggcagggaggagtggaggatttactactgtaatatttacaaagtaaaaaaggcctacggaatttgtaatataatttgcaattgcttcttggccttttggctagaatcaagtgtaatataatgtgcagtctgcaaagcccaaaacagcctagtggctaggaggtcccaagttcaaaacagctgagtaaaaagacctatcctacccagtagctgggtaacattgggccagtt

SEQ ID NO: 679768 - DNA, 726 bp, Homo sapiens
tgaagcaaatataataaacacaacaagcattgtaagtgataaatgagaggaagcatttcctccagggctagtgggatgcatggggagatgtgcagcccaggtccccttcaaaggaggacttgtggctattcccacatacctgtgggcagccagcctccagcagccaagagtcgcctcccctaaggtcacacccatcccagtgtgcccacatcccatgacctgtcaggcgagggtaaagagacaaggccatcttggcccaatgtgggacaagtctgatgcatccatgtcagcccaggtgctgggttctgccagcctgcatcacagttcgacttctgcttctgtctaatcctgcctgtctccagttattgatcccaatggctccccctaataaacctccttcacactaaaggcagtctcagagtctgcttcccagagaacccaacttgtaacagttagcaattattctaccttgagggagagagarggagaatctcaaggcagggaggagtggaggatttactactgtaatatttacaaagtaaaaaaggcctacggaatttgtaatataatttgcaattgcttcttggccttttggctagaatcaagtgtaatataatgtgcagtctgcaaagcccaaaacagcctagtggctaggaggtcccaagttcaaaacagctgagtaaaaagacctatcctacccagtagctgggtaacattgggccagtt

SEQ ID NO: 679769 - DNA, 726 bp, Homo sapiens
tgaagcaaatataataaacacaacaagcattgtaagtgataaatgagaggaagcatttcctccagggctagtgggatgcatggggagatgtgcagcccaggtccccttcaaaggaggacttgtggctattcccacatacctgtgggcagccagcctccagcagccaagagtcgcctcccctaaggtcacacccatcccagtgtgcccacatcccatgacctgtcaggcgagggtaaagagacaaggccatcttggcccaatgtgggacaagtctgatgcatccatgtcagcccaggtgctgggttctgccagcctgcatcacagttcgacttctgcttctgtctaatcctgcctgtctccagttattgatcccaatggctccccctaataaacctccttcacactaaaggcagtctcagagtctgcttcccagagaacccaacttgtaacagttagcaattattctaccttgagggagagagagggagaatctcaaggcagggaggagtggaggatttactactgtaatatttacaaagtaaaaaaggcctayggaatttgtaatataatttgcaattgcttcttggccttttggctagaatcaagtgtaatataatgtgcagtctgcaaagcccaaaacagcctagtggctaggaggtcccaagttcaaaacagctgagtaaaaagacctatcctacccagtagctgggtaacattgggccagtt

SEQ ID NO: 679770 - DNA, 645 bp, Homo sapiens
acactgcatgttctcacttataactgggagctgaacaatgagaacacatggacacagggaggggaacaacacacactgggtcctgtcaggggaggatgtaggttaggggagagcattaggaaaaagagctaatgcatgcagggtttaacacctaggtgatgggttgatacgtgcagcaaaccaccatggcacacgtttacctatgtaacaaacctgtacatcctacacttgtacccaggaacttaaaaaataaaataaagccaagcacagtggctcctgcctgtaatcccagcactttgggaggccaaggcaggtggcttacctgaggtcaggagttcaagmccagcctgaccaacatggaaaaaccttgtctgtactaaaaacacaaaattagccaggtatggtggcacatgcctgtaatcccagctacttgggaggctgaagcaggagaatcgcttgaacccgggaggcagaggttgcagtgagctgagatcgtgccattgcactccagcctgagcaacaagagcgaaactccatctcaaaaaaaaataaaattaaaattaaataaaaaagaaagaaatcttcatggtaaccttgaaaaacatcgtagactctgccaaggagagagagggccaatgcactgag

SEQ ID NO: 679771 - DNA, 1709 bp, Homo sapiens
tcacttcatgagagcagggactctgttctgctcactgcagaaccttcctcagtccctttagggcagtgccttgcacacagtaggtgctcactaaaaagtcagccctgcttcagccccacttaggattcactctgggaaaaagaatcacccctgcccccctgagtcaggttggcctacaaatggcaaggcctcttcagtctcaaatctcacatgtggctcacacagctctgcctttccctccggctgaattagcctctcacctcaccctcccttcttgcatgatgtgcttcagccggaatgggttgtttcctcctggctcccacatgggccgtgtcctctacctggtgcattctttctgttgccatctgttggaaaactagttccagtccttcagattttaacttagatgtcatctcctccaggaagctttccctgattgcccaagtctgggtcaattgtccctcctctgagcccaagcttccgagtcttgttatgaacacactgcattgttgttgcttatgcacttgatcccaatcccatgcaggtaggggccagtcttgtatcccccagggcctaggacagtgctgggactcaagaaacgtgattggagtgaatcagtggatgaatgaatgctctgaatgacaccacctcaaaggacctggagcattctccttaatcactcttgtgggtgccaatctccttgggcgcctttagaagcactatattttcttcctgagtactgcagctctttttaggcccctgaaaggcacctggctctttcagttttaygggcatttgtgaaagaactcagcccaacagacctctgatgggcacacctagaaccacctccaaatggattcaccatggcacatgctgggaccaccttctaccttggagagagcttcccacccattctctcatttctgcctcccctaaacagtgagctggcctggaaaagtctggcctctccaggtggggaggatggagtcaggtgactatgtcctctttgatgagtgggcagtgaggtcccccaagaagaaggggcaatgctgagtagagaccccttccccaccctccagtcatctgagaccatgacttggttatcttcttggaacccacatggtaatcttggcacccatcagagactgtccttgtctctctagggctgggatgggggacatgctggaggacccagatgtgcacaccacaggtgcccacaacacacaaatgaaaacagcagcagtagcaggtgttgagtacttactcggtgccagatgctagtatcttatttattccactaaacaactccaagtctgtgttgttgctggaggcttagggtccttgggccacatgtggggctgaaaataatcctgatctctgtccgtctgtgataagagctagtaataataataatgtctgccttctgttgtctccctgtattcctgtattagtctgttttcacgctgctggtaaagacatacctgagactgggcaatttacaaaagaaaggtttaattagacttaacagttcaatatggctggggaggcctcataatcatggccaaaggcaaggaggagcaagttacatcttatgtaaatggaggcaggcagagagcttgtgcaggcaaactcccgtttttaaagccatcagatgtcatgagacttattcactatcatgagaacagcacaggaaagacctgtccccatga

SEQ ID NO: 679772 - DNA, 1448 bp, Homo sapiens
gagatggggatctctctctgtggcccaagctggagtgctatggcacaatcatagctcactgcaacctcaaactcctggcctcaagcaaacctcctgcctcggccttccaacatgctacaggcatgagctgccgtgtccagccatctcctcatttattcttgctgtgggtgttttccaagtactgcctatgtgctggctattacagatgcaaacaggccattcattcattcattcctttcttcttttaacaaatatttgagcaaggaagaagttgccagagcgttttgagcaaagaagtgacatgatgagactttaaaaaagacctctcttgcttgggtggtgggggcacgggtagaagtgggtagcagtgaggaggctaccacactggccccagagagaggtgccagggctcacaccaggctgcggagatggggaggttgagaaggggctgaattctagatctgtgttgaagacagagcccacaggatttgctgacaggatggatgctgtggggcgggagagagaacaggaaggctaataggagtcaagaatgattccacagccattggccttttccaagatggcggcctgtgggggtagcccgtgtgacaagccagcctgctgggcaagctgcaggacttcagattagcagaggaggctgttagcaggcgctcagggaagaccctccctcatcctagagggtcaggtttctttatcggggatgcaccagagttctctcggggaggggcccgacatacagcaggcactcaataagtgagcatgtgtattttattttattcttattttaacaggtatacagtgtttccttggtgccagacactggcctaggtgctttaagccctccctatgagataagtataattattaaacccattttatgattctgaaggttctttttttttttttgagacagagtctcactgtgtagtccaggctggagtgcaatggtgggatctcagttcactgcaacctctgtctcccaggttcaagtagttctcctgcctcagtctcccgagtagctgggactacaggtgcccacaacaacgcccagctaatttttttgtatttttagcagacacagggttttgccatgttggccaagctggtctcaaactcctgacctcaggtgatccacccacctcagcctcccaaagtgctgggattacaggcgtgagccactgcgtctggcagattctgaaggttcttatgagagggcggggtgagggagggaatgagggaagacccagcgaataggcaggcaggagggagggcacggcccacttcccaccctacaagcggggcccttggctggagcaagggggagaaggactggctgggatggcagctggaaggttggcaggccrgggacaacatcgtctgccaagccatggcagtagactcaaactctgtctctagggcagtgggga

SEQ ID NO: 679773 - DNA, 1448 bp, Homo sapiens
gagatggggatctctctctgtggcccaagctggagtgctatggcacaatcatagctcactgcaacctcaaactcctggcctcaagcaaacctcctgcctcggccttccaacatgctacaggcatgagctgccgtgtccagccatctcctcatttattcttgctgtgggtgttttccaagtactgcctatgtgctggctattacagatgcaaacaggccattcattcattcattcctttcttcttttaacaaatatttgagcaaggaagaagttgccagagcgttttgagcaaagaagtgacatgatgagactttaaaaaagacctctcttgcttgggtggtgggggcacgggtagaagtgggtagcagtgaggaggctaccacactggccccagagagaggtgccagggctcacaccaggctgcggagatggggaggttgagaaggggctgaattctagatctgtgttgaagacagagcccacaggatttgctgacaggatggatgctgtggggcgggagagagaacaggaaggctaataggagtcaagaatgattccacagccattggccttttccaagatggcggcctgtgggggtagcccgtgtgacaagccagcctgctgggcaagctgcaggacttcagattagcagaggaggctgttagcaggcgctcagggaagaccctccctcatcctagagggtcaggtttctttatcggggatgcaccagagttctctcggggaggggcccgacatacagcaggcactcaataagtgagcatgtgtattttattttattcttattttaacaggtatacagtgtttccttggtgccagacactggcctaggtgctttaagccctccctatgagataagtataattattaaacccattttatgattctgaaggttctttttttttttttgagacagagtctcactgtgtagtccaggctggagtgcaatggtgggatctcagttcactgcaacctctgtctcccaggttcaagtagttctcctgcctcagtctcccgagtagctgggactacaggtgcccacaacaacgcccagctaatttttttgtatttttagcagacacagggttttgccatgttggccaagctggtctcaaactcctgacctcaggtgatccacccacctcagcctcccaaagtgctgggattacaggcgtgagccactgcgtctggcagattctgaaggttcttatgagagggcggggtgagggagggaatgagggaagacccagcgaataggcaggcaggagggagggcacggcccacttcccaccctacaagcggggcccttggctggagcaagggggagaaggactggctgggatggcagctggaaggttggcaggccagggacaacaycgtctgccaagccatggcagtagactcaaactctgtctctagggcagtgggga

SEQ ID NO: 679774 - DNA, 640 bp, Homo sapiens
ttgtagaatataagattaatagacacaaataatgatattttatacacactggcaataaataatctgaagatgaaattaagaaagtgatttcatttacaataatacaaaacagaacaaaatggttaaagtaaatttaacaaaattcattagttatgttaatatgagatgaatttgtttattagtgtgagacttgtgcaataaaacctacaaatgttattgaaataaattatagaaaacctaaataaatggaggatataccatgttcatagattggaaaacttaatgttatcaagatgacrcctcaaattgatctacagattcaaagtaatctctataaaaaatcccagctggctcttttttttttttttttttttttttgcagaaattgacaaactagtcctaaaatttatagggaaatgtaagggactagaatagccaaaaaggttttgagaaagaacacagttggaggagtcaaacttccttatttcaaagcttactacaaagctacacttatcaacactgtggtactgacacatagatgtacatatagatcaatgggattgaactgagagttcagaaagaagtgcatatatttatgtttaaccgattcttgatgagggtgccaaaacaattcaatggg

SEQ ID NO: 679775 - DNA, 696 bp, Homo sapiens
ctaatgacacatttctcagaatgtatcctcgtcattaagcaatgtatgactgtttccatatgaccaagaaatttcacacctagttatatagtgaaaagaattgaccagatgcagtagctcatgcctgtaatcccagcatactgggaggccaaggcgggagggttgcttgagcccaggagtttgagactagcctgggtaacatggcaagacctcatctctacaaaaattaaaatgaaaacattttctgggcatggtggtatgtacctgtggccccagctactcaggaggctaaggtgggaggatcacatgagcccaagagtttgaggctacagtgagctgttttcacaccattgcagtccagcctgggtgacagagtgtgaccctgtctcaaaaaaaaaaaaaaaaaagaaaagaaaaaagaaagaaaaaggaaagaaaacaattgcggatatatgtccagaaagaaatgtacaaaccattgtagacaaatattcacagcaacattattcataataccaaaaaactggaaacaagcaaaatttctatcgactggtgaatggataaagaaatgtagtatatccatgcagtagaatgttatttagccatataagggaatgaactactgatacstgctacaaaatggatgaactttaaaaattcatgctaaagtaaagacaccagacacaaaaggcctca

SEQ ID NO: 679776 - DNA, 571 bp, Homo sapiens
accagtattgattgctacaattagattatagactaccgaataaagtttaaaatttgtttgtagctctgcttgctttattttactaaaagtgtatagtaaattctgtgttctaatgcaatgtgaaataattcttttctgtgtatttttatatcaccaacttgatataaactttgtttcagttttcagcttttcaggatcacaagtcaaaattatatatataacaatgtatattcagataaatcttgcttctctgtcttttccatcctatttccttccttctsctattagtaactgtttttattagtttttcgttgtatcattaacatttctttttgaaaacctaaaaaaaatgtaagcatatgtatggtatgttcttatccccccttctaatataaaaggtgacatatatacatactgttagataacttgttcttcttttcttactgtatcttgagtatcactccatatcagtatataggtatctgtatgattcactgtttgatccatagtactccatttgggaatgtaccatggcttattcaaccagtcccctattggtggacatctgggt

SEQ ID NO: 679777 - DNA, 533 bp, Homo sapiens
gtgctactttactttttgatcagaattmagtaagaacaacagttaaagatcaccctcatctaattcatttgtgtccctcaccactgacaccaaatagaagacttatgtgatatatgtatgtttcagtgcatgatgtaggtgctctttggtcctatattagtgaaaagagtgttgaaccaatagtcagggagcaaactcagcttttaataccacttctaagcacatcacttactttctctggtcctgttttctcagtagttaacaaacaaaaggagttgaaccaaatggtcttcagggttgtgtctgactctggttaatgctattttggttaagagcaccactagtatgtggtgtgaactttaatctaccttttattcccctgtgccttattcttttgcagtattcatgaaataaactttctcttctggatcttagttctttaatcttttctctaaaagatttttctttgttccagcattttcttctgtcctgcatttattagtttgtatctcttcctgctgattaagcaagga

SEQ ID NO: 679778 - DNA, 648 bp, Homo sapiens
caagtcatacgatgaaagcaggacttagctcctggtggtagtgtgcacagtggattggagtagggagaaactgaagtaaaaagaatccacctttataataaagaaggttggcatgtggtaatgtcattagcaataagaaagaaatgacaaaagatacaaaagagactactctagaagaatcaacaaaccttggtgactggatttagaaatcaaagaacagggagaagtcaaaggaggtgctaagtaacgttctcagtccagctaacagtgtctttagttatacatatggaaaagtgaagagcttactcatatctttatcttccccaaaagagaaaacatgggtaatttaggaagataagctgctttatttttaactgcagtgtgttttgaaagagactatgtcatgattcatcttactagcctcaaacatatcttctttgccaggactcgcctctgcacaaagccctcttttgggtagctgtggctgtgctgcagcttgatgaggtcaacttgtattcagcaggtacsgcacttcttgaacaaaacctgcatactttagatagtctccgtatattcaatgacaaggtaagcaaactttgccttgaggttcctagattactcaaatttagtactcttccatcttttctt

SEQ ID NO: 679779 - DNA, 916 bp, Homo sapiens
gttagacacttattttccatctctaacaagaataaataagccattttgtttataacccccagttaactcaccaactgtttagtgttttgacacatttgtttttttgtttcacttgattttttttttttttttttttttttttttttgagacaaggcttcgctcagtcacccagactggagtacagtggtgtgatcttggctcactgcagcctcaacttcctgggctcaagcgatcctcagcctyttgaatagctgggactaacaggtgtgtgccaccacgtcctgctaatttatttttattttttgtagaaatgggggtctcactatgttactcaagcttgtcttgaactcctgggatcaagcaatcctcctgcctcagcctcccaaagtgctgggattacaggcatgagccatcgtggctggctttcaccctacctcttatctgtctgtcttatctatccatctatcatctaactccatttctgttgttttgttttgcttgaaccattttcagtagatgaaagacatcttgacctttctcccataaatacttgacagtttcctgcccaaatgcagtgccatgatcacccagggatttcacattaattcagcgatgtcatctaagattcagctcataatcagatttccctagttgtcataacattgatgtttctgaggagtccaggccagttgtcctatagactgtcccatcacctggatgtgtctgtttcctcgaggttagatacacagtaagcgtttttggcagggacaggtggtggtgtgtcctcagagcatctcatgaggggccacatgatgttcatttgttctattttggggatgctgagttcaatcacttgattaaggtggtgtctacctcatctattcaacataatggtacttttccccttataattaa

SEQ ID NO: 679780 - DNA, 529 bp, Homo sapiens
ggccctcaggtgcctgactgagccctggatcatggagggtagtggcatcgcctccacactgtcagtgtcagccttgctggaggcctgggggccctcaggcgcctgactgagccccggatcatggagggcagtggcatcacctccacactgtcagtgtcagccctgctggaggcctgggggccctcaggcgcctggctgagccccagttcacacaccccatggatgttggcagcttgtcaggaccctcgagctgtcccctgttattctctgaggggctgaggggcactgcytgggcctccctcctggagcagccccatgttcctgtcaacctctgtggggctcccagtggggggtgcgctgcctcccctttgcctgcagcaccccagacaggcctgccctcacctggccactgtgtctctcacccagcagacaccatatggatgacagtgtttgataagccagcaaactcgacgcccatagccccaggagtggtgagggacagggttccagcgtgtgggcagctggcacc

SEQ ID NO: 679781 - DNA, 642 bp, Homo sapiens
agagtgaaaaccaacatgccaggagtagaatggccactgttccccaaagtaaaagtttcatctccctcattttggacattactttactcttagcaccattcacaaagccactatctgacagatcatgtgccaacaatacaaaggctcatgtacatcacccatgtcagtcctcccccaggcagtacagtgtggagagagatacctctgaatgggagaaggggaagtatgtgaaccctagactttgcctcagaccccaaaactgagcctttcccagtataacatggcactggtaggctcccagggccccacactccagtccagtacctgcaggctgagcttccaggtgcattcagatgccacgtgagatcctacagccacaggctccaggccagttcagtgaaccattggccctgggctacagatcagccccagttctggttcagccaagtgacccaaggcttcaggctgccccagcatgaggcctaccccacaggctatctctagggccactctcatgctaagctgatccccatggtcccaggcttcagggcaaccccagcaccaggycaggccctgcaactccaggttccaagctcatttgaggttccagaacagcccagaaccaagtcaacccacacaaca

SEQ ID NO: 679782 - DNA, 3123 bp, Homo sapiens
catttgtctttctctatatactttcaagtttatagcaatatagcatcttaccacatattgagagctcaaaaaatctatgctgagtgaataaaataagatatatatatataatacagaggggtttttcctttttataaaaataagatcagactgtatgtattattctgcaacatgcttttattgatgtgatttctgattgattcatttttttttttttttgcctgtaaaacactgcagtaatgaacctccttgtacatacacgattatgtactggtgcttttgtttttaaaaatattcttcaatgtaggattgtggggtctaaaagtaggcactttaaatttttgaatagatattgtcagttactttccaaaactggttgtagtagtgtacatgtttaccatcaatatatggacttttcatttcttaaaatgggaattctaatgcttatgtggtaggattattaagaagacatgatagcttgctttccctctgtctttatagatacggtgcctgacatacagttgtgccaaaaggctttttttttttccattttcatttccatgctttcttgttactggatatgtctcatgaaaactctgacatttttctgcctttctcattgactgtcataaggaatgtgaaatgtgtgggaaataggatccaagtacagtcaaaatagtttctgcttatgtaagtgctcttcggactgaccttaccagttaggggaatatctttctgttggccacaaagcgaaccctaggcaaggtgactgtgtacctcgcagctggcccagcgcagtctctgtttttccccgtcgttgcagtgtcttttctgtttagtgcctcttgtgactttcaaaagtgcccctatttatgtggttaccctgtctaaagctaaaaataatctatttaaaccagcaggaaaaagaacagactaaagcttatagatgaaattagagggaaaaaaaaaaaacttaaagactttaccgtagaggtactaagtcacccaataggcagcaagacttaaaaagcttaagacattaaggaagaacaaaatggaaataatcaattaaactttttctcctctttttcctggatgagtgaaaatgaaagcttccagttgagtatgtctgagagattatcccagttaatgttaggatgaagatttatatagtgtgcacattattgctttgccttgggaaccagaaatgtggagtgttttttaagtaggtttctgtttttgttgaacaggtatttttctcttatgacctggtttcactatatgattacatctctttgcataatttgtatttcatatatgcataaatccccgttttgagcagaccatatggaaagctccacgagtgccctgggacccaggggtatgcagtgattaaccatgggttctgctatttgtgcggcagatgagcagagctgtgaaataaaaggcatcacacaatggtttcatcgcccttattttgtcctttgtttggtgatgctttactaaggataagaaagtaaaacaaaataaaaataaatcccagacaagcaaggaagagaaatggcaaacagtttttcagaacagaattgaagaaggtaggctattcatggtacaaacttgacagcctgaagagtaaactgttttgtgaaaacaaaactaaaaatgaggttgctggtttctcaggaaccccaaagaacttctaatgtgtgtgagacaatgtgactggcagcaactggttttgtaattaaatttggtttaacaagtatttgtttaacaagtgttttatgtgcatatgttatggaagggactattgtggggcattcaaaagaatgtagctgcttatctttataaaatttgcaatctgtttgtggaaattcatctgacacaggaaatattaataaatatctagataaaatgataatttgaaattaagtccctagaaacatttaaccaatctgtaagttctaaaattcaatatctgaacttcaatttttaaaaaaatttgtaactaaattatttagtaagcatcgaaaagaagaaataaatatgggcttagtaagacatgttttaccttcttagtccagcattataaaacttggctccagctttctctataatagtatttttaaaattgtgctaaaaatcaaaattacctgygatgtttgttatcacaatagggttccaggttctttactcatgaatctgtgttagtggctgagattccaggacaatgaaaaggtgaaggataggtgtcttgtctgaagatactttagaactcctggagttcattctgtccactgccttactacttgagcaacctttttctaaaacttatgtaaatgagaattccccagtaagcatcttctccaatattcctcaaattattgctcatcttataataatctgagacaccattcagaaaaggagggtttgggaattttaataatgtaggaggctttttaactttcctcttagtggcttctttcagtttttattctttccttgtaaatgttggaccaacatggcaatggcactacaatttaccattgtgaaaggttcagctggattcagggactcctgattttggaactcttctcagagtaaatctcacttagccagaccatagtatttttgaggactggtgttttctaggctgtggtgagaagaaagccattttaagcacctgtgtattgcttgtaagtgtgtaatgatggatgtcccatttccagacacaggacattttctgggatacaaccatcaagcatgttctgcaatcctcctccaccatataagttttctactttttaacacctccctcacttttactcatagtcatttgatacttactcacatttatccattattttggggctgtacatttgcacctactatctcatttgatttccacaaatcctagtcattgatgacttctctgatatcccaatctaaacttggatacctggttctaactctctcaagtcatcctatgcttttcctccatttcacttatcaaagtttgtaagagtacaagactttcagctttacacaagcaggaactattctaattcttcaccaatgtatcattttactcttatacaaagtacaggacacagtatgtactta

SEQ ID NO: 679783 - DNA, 657 bp, Homo sapiens
aaattgctaattaatactttatattgaaattgagttacttaagattttgaagaaatgttcaatgaaatagtaatgggtaccaagatttcaaattactttgatttcaaaaggtaataaaacacaagaaaggaaatttcagccactaactttaaaagtctgttttagagaaagtagtgagtgttaattagataaaaatttctattaacccttagaagtgcattacttgattaaatacaaagaacttaaaacctgagtttgagtaaatgaaagaagcagagaggttagaatcttctgttttttttttgttacctaagagttttaaatttctttactggtgtggtgaaggagatgtaatgttggtaccggttggtggcaagggartggtgcttggctattggctggggaggagctgcgggttccagaggcagagccctgtgggctggaattttagagtaaccattttgtagatatcagatccaaatgaagctggatatacagagaagtgtgccgcagagagaggaagaaaatgcaccactttttgatggctacgatgtgccatattttgtgacatggactttcatatacattttctacttaatatgcacagcgatcctcaaagacaagtaaggagactacatctatctatgaatccgagat

SEQ ID NO: 679784 - DNA, 657 bp, Homo sapiens
aaattgctaattaatactttatattgaaattgagttacttaagattttgaagaaatgttcaatgaaatagtaatgggtaccaagatttcaaattactttgatttcaaaaggtaataaaacacaagaaaggaaatttcagccactaactttaaaagtctgttttagagaaagtagtgagtgttaattagataaaaatttctattaacccttagaagtgcattacttgattaaatacaaagaacttaaaacctgagtttgagtaaatgaaagaagcagagaggttagaatcttctgttttttttttgttacctaagagttttaaatttctttactggtgtggtgaaggagatgtaatgttggtaccggttggtggcaagggaatggtgcttggctattggctggggaggagctgcgggttccagaggcagagccctgtgggctggaattttagagtaaccattttgtagatatcagatccaaatgaagctggatatacagagaagtgtgcygcagagagaggaagaaaatgcaccactttttgatggctacgatgtgccatattttgtgacatggactttcatatacattttctacttaatatgcacagcgatcctcaaagacaagtaaggagactacatctatctatgaatccgagat

SEQ ID NO: 679785 - DNA, 2032 bp, Homo sapiens
taacattaaaaaagtaataaaagcactttctagtttagatgttatgagtcagattgataagtcagaagaaatggaaaacttgaattttattcatttgctccacaaatatttattaagcattaattatgttgctgtcatgttgctggatgttagtgtgatctctgccccacaggaacttaccaagaataacagacaaaacagaaaagaccagataggccaggaacattttcttcaaggcacacattactgaaagaactggaaattaaaactagacaggaattgtgtaattgtagattattgtgtatatttattcatactgaaatttaaccaacaaagtcttcacatgtattgcaatggtttagattgacagaggttcagtgtacagacgttgtagccagaatgtctatttccagtctcttgtttactacttaacagctgtgtgcccttgggcaatttattcaacctcttggttcctcagttaccttgtcagtcaaatggagatagtattcgtacctaccttaaaaggctgtcctgaggattaaatgagctagtacctgttaaacgtcagaatgataccttgtacatagaaaacgtgtgatacgttttgctaccattgcaattttaatgtattgtatttgctattggacagtccagttactttaatcctttgttgtcattttaagagctttatttaaagaacttcctaggttccattatatgctcaattttttgagtgatttttgaggtttgaagggctttttgaaacgctgtgtgtcttttttaggcagaagcctttgcaaaccagtgtactagttgtcattgtcacatcctttctcctgacttgggaatcgtggaatcaagggttgacatggtgctctgtcagccccagctggccaccaatggccatataacatgaggcagaaaaaagcctttgctgtttgattgaagtgtctgagatttcagggctgtatttgtagcattaactcacataacctgactaatatatgtggtatagcccagcgcagaagcaatgtatataacatgatgatgataatatatggtgcattgtaaatgcctaaaattgtattattttatggttattatcatgattctgttatttsatctgaagaatttctcatgaagataaaatggctcaaattttcttgtacatttattgagtaaaatattatgtatggtctctttctctctctctccccgcagaattgatcagtcagtgtctatcaggccctgtgcctgtgttgtaaaatgtttgtgaaccacaatatctctgctcttgatctgctgaaaattgttataattagttcagttaaaaagccattgattgagcacatgttatgtccagggactaagttaggtgacaattagaaaaaccttctggtattaacgaaatccttcttaggaagcttgtgatgaggtacatttttttggactcagaagaataatgtgcaaaatgcttgatgtttactccataccatggaattattaatcatggggtgtgactacaccctggaagtctgggatagaggactggagaggaggcacagagacctggagaatccacttgcggtaagttgtggagtatcggcagcaaaagaggagcttggggttgagagtttgcctgaggttgggaatgaagcgagcaagataaaactttgctgattttcagttgcagcccttgttgaagggaagaggaaaaaaaatccctgtagaatacatatttcataaaccgttattttaaccaccttttatatttcagttacaagttttaagatgaagggcataaggatataggaaaaatatcatgatacattgcttttcttttctgccatttctggtcccatttggaagtcacgatagtccttttctaaaagctgataagtcctttaaaaatgtttaaattgcagttgattgcactgacctaggaatcttctaatatctaattcttgcatgaaaatgtaactagcaagatgactcctgctggcttataatatgcttattacaaaaaagccca

SEQ ID NO: 679786 - DNA, 620 bp, Homo sapiens
tttttgagatgtagtgtcgttcttgttgcccaggctagagtacagtggtgtgatcttggctcactgctacctctgcctccccggtttaagcgattctcctgcctcagcctcctgagtagctgggattacaggtgcctgccaccaagccggacaaatttttgtgtttgtattagagacggggtttcgccatgctggccaggctggtctcaaactcctgatctcaggtgatccacccgcctcaatctctgaaagtgctgggattacaggtgtgagccactgcacctggcccaggtttttctcataacaataattttggttaaatgtataaattattttaaaggaatcaacaaattccgcaccagtcaatgtgctgttggttcactcagtttctatgtttgggtacaccatatataaataacacggaataagaatggagttttggagaactgctgattacatttttaaaaagtcaagatcaaggtgaatcatacctatcaaaaaaattatgtctamtcaaaggatgcattccaatcaatgagaacaaaataaaacaactagttcaggtgttttattataaaaataaaaatgcatatctgctaaggataaatgcctttagtagt

SEQ ID NO: 679787 - DNA, 661 bp, Homo sapiens
taaatactgtatattctcattgataagtggaagctgaacaatgagaacacatggacacatagggatagctacgcatattgtggcctgttggtgagggttgggggagggagagcatgggaagaatacctaattgctgctgggttgaatacctaggtgatgggrtaatctgtgcagcaaaccaccatagcacacatttaactatgtaacatactgcacttcctgcacatataccactgaacttaaaataaaaagtagaagaaaaaaatatatatctcttacactaccacttacatatggaaaattatttgaccaccggcatatattcttgaaataaaaaataaagccattgtctatactggttcaaagggtcccaaatggaccagctaatcggttgattaaaatacagagttaaaaatatctatgttttaaaataggtctaagttcacttggagctgaggagctagacctcaaatgaagatgtaatagagagttgctttcagttcagaaattgtattggctaagaatatctcattccaataagtttaagttcccattagttatggaattgggacagtccaaaacagtaaaccataaaatagtttatggaaaaggccataattttctgaaagaaaaataggggaatgtgatacacagattaaaa

SEQ ID NO: 679788 - DNA, 777 bp, Homo sapiens
tttgtccactgctagagccaatctatgaagtggttaaaagagtactaatcattctgtgtccatctccaaaatctcagttgtctttcttagagatgcccaattgccttctagaacatatatgccagttgtctctttctagtagggtagaggaacaatgccaaaaacaatcaccaaaataaatctaaatatgttacattaaccatacttttactatttgttttaaagttgtgatcaaatgactgtggttctaggacagtaaactaaaaagacagatccacagattttgctctaatcacatgaaagctgacaacagaagcactccaacacatatttaggggtatacgtgagtattgttcggcccatggtaattaggcataaatgtaataagacggttcgcagaaataagtcttgtgcttctttcatgtaaccaaatcaaggtttctcagtctgtgaggccaacttttcagtatatatatttaaagctttcagtgttgatgcatatcattatactagttattgttatgcatatagtttctttgcttatcgttatactagttaacaatctctsaccacctaggacacttgttcacttcagaacgctagaggtcagcttccaagagtgagaatatctttcccctaactttgaagttctttgtggtttactattgaatatttcaactctaccacttgtatttttccctagttcggagttccaaaatctcacattctgaagtgatatatccacaggttctgcattagcatcagtgtcacctgagg

SEQ ID NO: 679789 - DNA, 656 bp, Homo sapiens
gttggagaccatcatgggaaaacagaagagaccccatctctacaaaaaaataaaaataaaaactaaattaggcaaagtggtatgtgtctgtagtcctagcttcccaggagactgaggctggaggattgcttgagcccaagaatttgaggctgcagtgagctatgatcacatcactgcactccagcccaagcaacagagtgagatcctgaaaattcatctccaaaggaaggccaattagaccgagaacagattagactgagagcctccaaaggaagtcagaagacaatgaagtattacctccaaaatagagaagaaaatgttagtgttctcctcagtcaaaatatcttttccacaggtcacgtgtggtggtttatgcctataatcccaacacttggggaggccaaggtggaatgatcacttgaggtcagraatttgagaacagcctgggcaatatagcaagactccatctctacaaaaataaaataattaaccaggcatggtggcatatgcctgtagtcccagctacttgggaggctgaggagggaggataacttgagcctagaagttcgagactgcagtgagctacacaatcatcctgtctctgtctgtctctgtctctatctctctctctatatatatgtgtgtgtgtgtgtgtg

SEQ ID NO: 679790 - DNA, 653 bp, Homo sapiens
tggcccgttccacctctgtcctggggctcctgccccttcctctccctggagcggcatcytcctcccgtgccacctgccactaagtcaccatcctgcaccagctgtaaagctgccacctcatcccaaaagccttctcagagccctacctgcagcctaaagtcatctcccaactctcacccagtggctcctgtgtgacccctcctgtgtctggtcagaggctccctgttcttttggaagctcgccgaagacctcgcagactctccttctccattgcctgagtgggcagagcgttggcagccctagcctggaggggctgggtcctcctctagtgccactccaaggcagggcttccgctccccgcctgccccctctaggccaggttggagggcagcagcagggcaggctgggcagggggcccacctggtcccacagcccctggcctagcaggctgctgtggtctcttggcctccagggccatgggggtggcaggtgccactaggctgtcggtaaagatcagcaggccaggcacagtggctcaagcctgtaatcctagcactttgggagggtgaggcaggcagatcgcctgaggtcaggagttcaagaccagcctggccaatatggttaaaccctgtctctactaaaaattcaaaaat

SEQ ID NO: 679791 - DNA, 653 bp, Homo sapiens
tggcccgttccacctctgtcctggggctcctgccccttcctctccctggagcggcatcttcctcccgtgccacctgccactaagtcaccatcctgcaccagctgtaaagctgccacctcatcccaaaagccttctcagagccctacctgcagcctaaagtcatctcccaactctcacccagtggctcctgtgtgacccctcctgtgtctggtcagaggctccctgttcttttggaagctcgcmgaagacctcgcagactctccttctccattgcctgagtgggcagagcgttggcagccctagcctggaggggctgggtcctcctctagtgccactccaaggcagggcttccgctccccgcctgccccctctaggccaggttggagggcagcagcagggcaggctgggcagggggcccacctggtcccacagcccctggcctagcaggctgctgtggtctcttggcctccagggccatgggggtggcaggtgccactaggctgtcggtaaagatcagcaggccaggcacagtggctcaagcctgtaatcctagcactttgggagggtgaggcaggcagatcgcctgaggtcaggagttcaagaccagcctggccaatatggttaaaccctgtctctactaaaaattcaaaaat

SEQ ID NO: 679792 - DNA, 641 bp, Homo sapiens
cacccacaaacttcctttcacactcacaccacgtttctgtttttgttattggtgttgcctctggtgtaccttgggcattattgcccagggataaatgcataactatccctgcttgttccctgatacaaaaaaatgatggaayactcttattttgattttccttgtagaaggaacaaaagattaagtgagcctgcccttgacaggtgtgacacccccctccccccgcctcccaaacagcaccactgggcaaagcagccttttgtagaatcagccagtggaaactaaccccccacccccacctttaaacaaagccatttaatttggtcttaagcccaagtaagaaacaaaacaaaacaaaacaaaacaaaacagaaaacgaataaaggacaatataaagaagcatagcttgtcagcatgaacctacatgcaagccagagatctatgattttgtttcccagggagggagtgactaatgcgcgcaccctgaccatcaccgtaaagaggtaaagagagagtgaaatggctcaacgtacacacaccccgctccataccggggacgagtctccgagctgcggcttgtgctctcggagggccaggctgaagctgaccgcccccacggccacgctggacacccccagccc

SEQ ID NO: 679793 - DNA, 1446 bp, Homo sapiens
tatattgggaggtaatctaagtgagcacattgaaggagtgaacaagtgaggactaaaagggagagaagccagtaaaagttgcattaataagtgggttgctgttatggaaaactcctcagttctttccaggacctctaagagattctgtaaaaatatttcaccatgakaggaataaatagagctatatagctactcactcctgctattccttggtggagaggaaatcctggtggcagtaacttcctgccaagtagagtcccagggccaaaacgtggcccaaggtaaagagaggcagaaagctgtgggtgtgaataaaatctgcacgccaatgacttcaaaggtggactgagggaggtgggaggggaactcactgtctcatctacaatgtatatgtaaaaacctaaagcaaaagagagcaatgctaagatggattttagtttttaaaaatggagagagcatttgtcagaagttataaaagacgtttatcagctctgattttcccaatgtcaccatctctatcaacttagagatactggaagtacttgcagttttgatggataacaaatcctctctaaagaaaaaatgctctcaaacactctcttctttactacatgtattagcagtgtgatgtttgctactcactaaagcttgactcttgtcaagctgtcaagtgctattttcaaaggtattttattttgtagaaatgtaggacttcaggttcaggggaggtgttcaagagtccagggtgtcatttcctatcttaggagtttacgaggactctgagctattgaacaggtaggactgcttgctcttgaaggttagttctgaaagggttgagcaatgtttgaaggctgtggcaggtgttacttctactgtgtgactgaagaggaacattctagtttctgtgaaagggaagtcctttttaaataatgttgacaagaaatactaatatatccccctctgcactggtgatgtggtgtagatgctcttgggatggtctaggactctgggtttgtctcccatgtggctccttggaaacttgcaatggggggttgtgacttcaatagagaacagatagttcctcattgctgaattcagtcatgtctacatggttctttttctctgttacaccaagacctgcatacctgtatctctgtttttccccttagtcatctgaatttttatttcttgggaatgtgcaggaggagggagtctgtcactactgctttttattccagtcgatgtttatggcataaacttttttcctagagattttagagcttagacattttgagctcacctagtatagctcttgcaaatcaggaacattgactttaaagtctatatttagaaaataaaaataccaagaaaagttctacttggtttcagattctgctggggcatctatttcctgagatagaaccatcagagtagcccagctagctg

SEQ ID NO: 679794 - DNA, 1446 bp, Homo sapiens
tatattgggaggtaatctaagtgagcacattgaaggagtgaacaagtgaggactaaaagggagagaagccagtaaaagttgcattaataagtgggttgctgttatggaaaactcctcagttctttccaggacctctaagagattctgtaaaaatatttcaccatgagaggaataaatagagctatatagctactcactcctgctattccttggtggagaggaaatcctggtggcagtaacttcctgccaagtagagtcccagggccaaaacgtggcccaaggtaaagagaggcagaaagctgtgggtgtgaataaaatctgcacgccaatgacttcaaaggtggactgagggaggtgggaggggaactcactgtctcatctacaatgtatatgtaaaaacctaaagcaaaagagagcaatgctaagatggattttagtttttaaaaatggagagagcatttgtcagaagttataaaagacgtttatcagctctgattttcccaatgtcaccatctctatcaacttagagatactggaagtacttgcagttttgatggataacaaatcctctctaaagaaaaaatgctctcaaacactctcttctttactacatgtattagcagtgtgatgtttgctactcactaaagcttgactcttgtcaagctgtcaagtgctattttcaaaggtattttattttgtagaaatgtaggacttcaggttcaggggaggtgttcaagagtccagggtgtcatttcctatcttaggagtttacgaggactctgagctattgaacaggtaggactgcttgctcttgaaggttagttctgaaagggttgagcaatgtttgaaggctgtggcaggtgttacttctactgtgtgactgaagaggaacattctagtttctgtgaaagggaagtcctttttaaataatgttgacaagaaatactaatatatccccctctgcactggtgatgtggtgtagatgctcttgggatggtctaggactctgggtttgtctcccatgtggctccttggaaacttgcaatggggggttgtgacttcaatagagaacagatagttcctcattgctgaattcagtcatgtcyacatggttctttttctctgttacaccaagacctgcatacctgtatctctgtttttccccttagtcatctgaatttttatttcttgggaatgtgcaggaggagggagtctgtcactactgctttttattccagtcgatgtttatggcataaacttttttcctagagattttagagcttagacattttgagctcacctagtatagctcttgcaaatcaggaacattgactttaaagtctatatttagaaaataaaaataccaagaaaagttctacttggtttcagattctgctggggcatctatttcctgagatagaaccatcagagtagcccagctagctg

SEQ ID NO: 679795 - DNA, 1101 bp, Homo sapiens
tgcctccatgattcaattacctcccactgggtccctcccatgacatgtggaaattgtgggagctacaattcaagatgagatttggtggggacacagccaaaccataccacgtatacaaccaagctgtaccctgagcactttgggtacatgtcatcagaacttcctgaggctgtgtcatgggtacatccttcaccttggcaaatatactttctaaatagattgagacctgtctcagatacttttggtttacaggtgatagcgttgctggaaaagagggtcctgattcagatcccaagagagggttcttggatctcatgcaggaaagaattcaaggcaggtacagaktatggtgaaagaagcaaatttattagaaacgactttgttacagggtagggcatcctcagaaaggagaaggaggaatgcgccattctttgttagtgtcttcgttgataagaaattctaaggagctgtcattaaaattggaatgtgcagatgtgctcactaaaggtagggggtattggtgctgttaaatcaagtttagcctaaagctgcctccttacatattttaagtttggcctaaaatttctctgtacatggtgaactataacctaaaaggatgtgtaaacagactgcaacctactcttgtgccaatcactgagtttcggccaatcaaaggtggccaactgttcaaatctcgttcaaataaggccaatgctgagctataaccagtctggctgtttctgtacctcactttcattttcagtacatcattttccttttcctgtccataaatcttcttccaccacgtggctgtgttcaagactctctgaacctactctggctcaggaggcttctagatttgtgaattgtctgctcagttaaactccattaaattcaatttggccaagaattttcttcttaacagtggtattgatgaccattaatccttcaacctaaacctgctcattaatgctgcctttaagtgggctgaacttttaggacacctggacattttgtaggcttagtgggagatgttttgtatggccttaaatattctgcaattataattggtggtcagcttagactgtggctattttcaga

SEQ ID NO: 679796 - DNA, 1101 bp, Homo sapiens
tgcctccatgattcaattacctcccactgggtccctcccatgacatgtggaaattgtgggagctacaattcaagatgagatttggtggggacacagccaaaccataccacgtatacaaccaagctgtaccctgagcactttgggtacatgtcatcagaacttcctgaggctgtgtcatgggtacatccttcaccttggcaaatatactttctaaatagattgagacctgtctcagatacttttggtttacaggtgatagcgttgctggaaaagagggtcctgattcagatcccaagagagggttcttggatctcatgcaggaaagaattcaaggcaggtacagagtatggtgaaagaagcaaatttattagaaacgactttgttacagggtagggcatcctcagaaaggagaaggaggaatgcgccattctttgttagtgtcttcgttgataagaaattctaaggagctgtcattaaaattggaatgtgcagatgtgctcactaaaggtagggggtattggtgctgttaaatcaagtttagcctaaagctgcctccttacatattttaagtttggcctaaaatttctctgtacatggtgaactataacctaaaaggatgtgtaaacagactgcaacctactcttgtgccaatcactgagtttcggccaatcaaaggtggccaactgttcaaatctcgttcaaataaggccaatgctgagctataaccagtctggctgtttctgtacctcactttcattttcagtacatcattttcyttttcctgtccataaatcttcttccaccacgtggctgtgttcaagactctctgaacctactctggctcaggaggcttctagatttgtgaattgtctgctcagttaaactccattaaattcaatttggccaagaattttcttcttaacagtggtattgatgaccattaatccttcaacctaaacctgctcattaatgctgcctttaagtgggctgaacttttaggacacctggacattttgtaggcttagtgggagatgttttgtatggccttaaatattctgcaattataattggtggtcagcttagactgtggctattttcaga

SEQ ID NO: 679797 - DNA, 597 bp, Homo sapiens
gtatatcttggtaggtagggagggctttggagaggtgtggcagacatccttgggtggccagtgcaacccacgtccacagtcatctttgtagccaccttcaagttacaggtarccacatgacatttctgagcaatgaaatggaagaaaatttgcggatgaaacttctaataaaatcactgtgttcttgacctttgggtatcttttccttcttcctgcttggattgcaaacctgccatctggaggcaccgtggccgctttcagggccataagtactcaaattaacagctaaagagggtggagccaaaagccaaaggcagaaagatctgtgaacccaggggaacgtttgacaatgtctgaagacttttggttgtcactgggagaggagggctagtggcatctactgggtagagactagggatgctgcgcagcaccctacagtgcatgaatctggggttacctgcctgaggatcacttgtagtgggggcttagggggctgaccagctgtttaagctcctgtgagctgggtttcctttatttgtgtctgagttaatttcaggttgctacagtaggagaagttctttgattcaagcctgttac

SEQ ID NO: 679798 - DNA, 1079 bp, Homo sapiens
aagaccctgtctttaaaaaaaaaaaaaaaaaaaaaaaaagggctgggcgcagtgcctcatccctgtaatcccagcactttgggagtcccaggtgggcagatcacctgtggtcaggagttcgagaccagcctggccaacatggtgaaacyccatctctactaaaaatacaaaaaattagccaggcgtggtggcaggcacctgtaatcgcagctacccaggaggctgaggcaggagaatcacttgaacccaggaggtggaggttgcaatgagcaccactgcactccagcttgggtgacaagagtgaaactccgtctcaaaaaaagaaaaactgatgctggtgattgtttgccagtgtaccaatgttttttgtttgtttgtttttcatggtggagaggattttcagaggtctttaccattttcactaatgtcacgtttctcttcattaaatttagtgtttgtgggactcttgataaaagtggattactagtcgtgagtagtacagtctgaatgcaagacatggatatcagggctcctcaagaactcattttataattaagaatatgaatgacttaggccgtgtgtggtggcttacgcctataatcccggcactttgggaggtcaaggcaggcggatcacttgaggtcaggagtttgagaccagcctggctgacatggcgaaactccatctctactaaaaatacaggtgtggtgtacacccctgtagtcccagctactcaggaggctgaggcaggaggattgcttgaacccgggagtaggaggttgcagtaagctgagatcataccactgcactccagcctgggtgacagcgaagctgcatctcaaaaaggaagaaagaataagaatgacttaaatcggctgggtgcggtggcttacacctgtaatctttgtactttgggaggctgaggcaggtggatcacgaggtcaggagatcaagaccatcttggctaacacagtgaaaccccatctctactaaaaacacaaaaaaaaaaaaaaaagaaaaagaaaaaaaaaattagcccggcatggtggtaggcgcctgcgcctttagtcccagctact

SEQ ID NO: 679799 - DNA, 942 bp, Homo sapiens
gcacaatcaaattgagaaccactggcttagggaagaaaggtgggggaagggggcggtaggataaggatacagggctatctcagcagatgttggagccagggactggatgctggctcgcctccttcttgcctctctggtctcctttttcctctgtgcaccatccattcattcattcattctgtctctccctcttgctctcgatcttgactttggctgtctacctcgtagaaacatggtgaccccataactttaaagtgaacatattcatccagttcccagcagaggtgccccctccctcrttctctcgctatctcccctttttcttcccattccccatccctggaaaagccattctgcagctgggtctggtttctctctttccctttgtgctggtttcattccgttccacacccgtcatgcccacgaagtggctgccgcagctcccgctcttacattttctcagcttctgagctggtggaaagcaggggttcatgcccctaatgattgcactgatgtcctgggcctgactttcactagctgggactgggtcccaggcagcctctgaatcaatcacagtggctgggagtggggtgtgcagattggcttggacaagtcagggccctcctctggatctgaggatggacttgagcgcacccagaccatacaggcagaagggcaggagggtgactcctcaaaggaactttgggagcccatgttactgtaagtggagtgtatggaaaattaaaataaaagccacatttgcagtctcattactgatttctactggttaggtgtgtgaggcctaaagaggtcaaggctttgcccagggtcgcccagctggctgtatcgcagccgccaggagcagagagcctgccctgggcagaggtgggaggtgagccctgatgccaagtccgagtctctgctctgcataagaaaggctgt

SEQ ID NO: 679800 - DNA, 2358 bp, Homo sapiens
tcccttgcttaaaaacttctgctgccttccaatacctgtcctttcatttttttaaaatagggctccaaatcctggcctcaagcagtcctcccaagtcagcctcctgaattgctgggattacaggtgtgagccactgcacctggcctgcccttttcaactaagcccccaattccttggtttggccccatgccactcacgtagggtaggcatcctcatcacgcacggctccccacaaccgttccctgtcaggccattcccttagctcagaattccctcaacaccttcctgaggatctacccctaaggtcacctgctctgagaggtctcttcagcaacccattgcctgactcttatagttccagccactgcccaatctgcactcctgaaggactcaggggcacgctgtaaagcacctatctatgctgttgatgtgggtctgccatgctggatgtgggctccagagcaggccctggcagtcagagcacttggctcatggcaggcgggcctcttatgtgtagtgcattgaacgaaggtccctgttctctgccagagcaaacatccatccacccgcccgcccaagtgggtggcagcagcctgggctttttccggcattgcccctactctactgttcacctactctctgcctggctccagcctcttggtggcagtccagggtgggggatcccagaggaggaattagatcatacaaagcaaagcctggaggtcctcagagaaagatgcctctataaatgcagccttgatgaaccctgttggcacccatttggtgtgttaattgccacatcaacggcctggctgggcacccacagctgggttcccagggttgagaatctggcaaggctgggtgagaccaagagaggccaaggcaggtgggtgtccccttcctccctgaggcacacaagagtcatagcctagcccctcccctgccttcttgccacacagacctgaaggagctaggtaccctaacagcttagtcccaagataccactgtattcagtccccttgtctgtagagttagcttcctgagggcagagaaaggaggccttgacttcaacctggagggaacagggccaggtgatcagatgcccagcctgccttctgggatctcagagcctgtggggtagtgaagcacacaagaagccaggatgtgagcgtgggattgatcaggactgagcagggggaccggggctcatgggtgtcaagaatggggaataggcccagggcagaggggagcttttatttttttagagacgaaatctccctatgttgcccaggctggtctcaatcttctaggctcaagtgattctctcacctcagcctcccaagtggctgggactacaggtgcatgctgccactcccagctgtgggggtttaggtgcaggaagatcccagtgtagatggggagttagcagggagtggaaggtgggagagaaggaaatgtatggtaggttcaggtagaaaaacccaatgggaatgtgaagggaccagggtgcaggggaattagccccttcttgccctggccttgtggcacaaaagcctctagaacagggccctgctgtaatcagcaggtaagtgaacatggagttctcaaagcacttactcacttcagccttaagactgggatccagtggggcactgtggctcacacctgtaatcccagcactttgggaggctgaggtgggaaggatcacttgagcccgggagttcaagaccagtctggagaacacagcaagactccatctctacagaaaaatgttgttaattagctaggcgtggtggcacrcaccagtagtctgttacttgggaggctgagatgggaggactgcttaagcctaggagatcgaggctgcagtgagccatgatcacaccactgcactgcactccagtttggtgacagagtgagaccatgtctctaaaacgacgacaacaacaacaacaaaactggaatccatgggatcagcctctttgggaaaaggagattaacgcttccccccagaggagtgccaagcccatgcccatggaaggcctctgtctcctagctgcttagtgcaggctgaggctaaggcaggaggggctggctgtcaaacagggctatttattattttatttacttattcaagagatagcatctcaccaccttgctcaggctgggcttgaactcctgggcccaagggatcctcccacctcggcctcccaaagtgctgggattacaggcatgagcctccacacctggcccaaaccgggctctttaacctgcctcctcttgcccatgagttgggagagttttcccaactcctccttccagaaaggaaaacaaggttggcaacttggtataattaga

SEQ ID NO: 679801 - DNA, 1460 bp, Homo sapiens
gcttttgcccattcagtatgatgttggctgtgggtttgtcgtagatggttactattttgaagtatgttccttcaatgccaaatttgttgagggtttatgacatgaagggatgttgaattttattgaaagcccgttctgtgcctattgagatgtggtttttgttttaaattctgtttatcaactcatcatctaggttttaagccccacatgcattaggtatttgtccttatgctctccctcaccctttcccccacccaccaacaggccctggtgtgtgatgttcccctccctgtgtcaarccaccatggcacatgtatacctatgtaacaaatgtgcacgttcagcacatgtatcccagaacttaaagtaagaaaaaaagttctcatctttcttttcttatataaaagatagatacaatgatactggtgagaattaaataaatttatacatgtaaaacacctcacctagaacataacacccaaacacaggctacataaattaatgtttgtccataaaaaatgcataaaaaattccgtttatgtgctgaatcacatgtactgatttgcatatgttgaaaagaatgaagtcatgtcctttgcagcaacatggaggcagctggaggccatcgtcctaagcaaactaatgcgggaacagaaaaaccaaatgctacatgatcttactggtaagtgggagttaggcactgactacacatggacacaaagatagcaacaacacacactagaaactattcggtgggggagggagggagaggggcgtgggtggaaaaactacctatcagctactacgcttactacctgtgtgatggcaccatttgtacaccaaacgtcagcaacatgcaatttacccatgtaacaagcctgcacatgcacctcctgaatctaaaataaaagttgaaaagaggaaaattgttcctcctgagggtagatcttcataggaagaacagaatactctggcgtatttcaaaatgggtcattgttcctcctcccctaacagaagtatgaggggtcttttctcctgcttttacaatgaggacttgacagacctcttagaggtaaaaccaacaaaagtgtgggaaccccctccaataactgggtccccaggagttttgacctctcagatttgtctataccaagccttcagtaattcttcaattacagtaaacatttcccttctctgatattggttcctccagaggttgcaatggatggatttcttttacaataagttgtgattccctctacttgcctgttggtctttccaatttggggagctgcagtttgccctgtgacatcttttaccaatcaagactgctgagttttcagtttattcagctttttacttattgtcgggatccagcagcaactttcagcttcttacatgccagatcagaaactggaagtcaaatataagttcattttttatataactaccatatcaac

SEQ ID NO: 679802 - DNA, 1460 bp, Homo sapiens
gcttttgcccattcagtatgatgttggctgtgggtttgtcgtagatggttactattttgaagtatgttccttcaatgccaaatttgttgagggtttatgacatgaagggatgttgaattttattgaaagcccgttctgtgcctattgagatgtggtttttgttttaaattctgtttatcaactcatcatctaggttttaagccccacatgcattaggtatttgtccttatgctctccctcaccctttcccccacccaccaacaggccctggtgtgtgatgttcccctccctgtgtcaagccaccatggcacatgtatacctatgtaacaaatgtgcacgttcagcacatgtatcccagaacttaaagtaagaaaaaaagttctcatctttcttttcttatataaaagatagatacaatgatactggtgagaattaaataaatttatacatgtaaaacacctcacctagaacataacacccaaacacaggctacataaattaatgtttgtccataaaaaatgcataaaaaattccgtttatgtgctgaatcacatgtactgatttgcatatgttgaaaagaatgaagtcatgtcctttgcagcaacatggaggcagctggaggccatcgtcctaagcaaactaatgcgggaacagaaaaaccaaatgctacatgatcttactggtaagtgggagttaggcactgactacacatggacacaaagatagcaacaacacacactagaaactattcggtgggggagggagggagaggggcgtgggtggaaaaactacctatcagctactacgcttactacctgtgtgatggcaccatttgtacascaaacgtcagcaacatgcaatttacccatgtaacaagcctgcacatgcacctcctgaatctaaaataaaagttgaaaagaggaaaattgttcctcctgagggtagatcttcataggaagaacagaatactctggcgtatttcaaaatgggtcattgttcctcctcccctaacagaagtatgaggggtcttttctcctgcttttacaatgaggacttgacagacctcttagaggtaaaaccaacaaaagtgtgggaaccccctccaataactgggtccccaggagttttgacctctcagatttgtctataccaagccttcagtaattcttcaattacagtaaacatttcccttctctgatattggttcctccagaggttgcaatggatggatttcttttacaataagttgtgattccctctacttgcctgttggtctttccaatttggggagctgcagtttgccctgtgacatcttttaccaatcaagactgctgagttttcagtttattcagctttttacttattgtcgggatccagcagcaactttcagcttcttacatgccagatcagaaactggaagtcaaatataagttcattttttatataactaccatatcaac

SEQ ID NO: 679803 - DNA, 1460 bp, Homo sapiens
gcttttgcccattcagtatgatgttggctgtgggtttgtcgtagatggttactattttgaagtatgttccttcaatgccaaatttgttgagggtttatgacatgaagggatgttgaattttattgaaagcccgttctgtgcctattgagatgtggtttttgttttaaattctgtttatcaactcatcatctaggttttaagccccacatgcattaggtatttgtccttatgctctccctcaccctttcccccacccaccaacaggccctggtgtgtgatgttcccctccctgtgtcaagccaccatggcacatgtatacctatgtaacaaatgtgcacgttcagcacatgtatcccagaacttaaagtaagaaaaaaagttctcatctttcttttcttatataaaagatagatacaatgatactggtgagaattaaataaatttatacatgtaaaacacctcacctagaacataacacccaaacacaggctacataaattaatgtttgtccataaaaaatgcataaaaaattccgtttatgtgctgaatcacatgtactgatttgcatatgttgaaaagaatgaagtcatgtcctttgcagcaacatggaggcagctggaggccatcgtcctaagcaaactaatgcgggaacagaaaaaccaaatgctacatgatcttactggtaagtgggagttaggcactgactacacatggacacaaagatagcaacaacacacactagaaactattcggtgggggagggagggagaggggcgtgggtggaaaaactacctatcagctactacgcttactacctgtgtgatggcaccatttgtacaccaaacgtcagcaacatgcaatttacccatgtaacaagcctgcacatrcacctcctgaatctaaaataaaagttgaaaagaggaaaattgttcctcctgagggtagatcttcataggaagaacagaatactctggcgtatttcaaaatgggtcattgttcctcctcccctaacagaagtatgaggggtcttttctcctgcttttacaatgaggacttgacagacctcttagaggtaaaaccaacaaaagtgtgggaaccccctccaataactgggtccccaggagttttgacctctcagatttgtctataccaagccttcagtaattcttcaattacagtaaacatttcccttctctgatattggttcctccagaggttgcaatggatggatttcttttacaataagttgtgattccctctacttgcctgttggtctttccaatttggggagctgcagtttgccctgtgacatcttttaccaatcaagactgctgagttttcagtttattcagctttttacttattgtcgggatccagcagcaactttcagcttcttacatgccagatcagaaactggaagtcaaatataagttcattttttatataactaccatatcaac

SEQ ID NO: 679804 - DNA, 1460 bp, Homo sapiens
gcttttgcccattcagtatgatgttggctgtgggtttgtcgtagatggttactattttgaagtatgttccttcaatgccaaatttgttgagggtttatgacatgaagggatgttgaattttattgaaagcccgttctgtgcctattgagatgtggtttttgttttaaattctgtttatcaactcatcatctaggttttaagccccacatgcattaggtatttgtccttatgctctccctcaccctttcccccacccaccaacaggccctggtgtgtgatgttcccctccctgtgtcaagccaccatggcacatgtatacctatgtaacaaatgtgcacgttcagcacatgtatcccagaacttaaagtaagaaaaaaagttctcatctttcttttcttatataaaagatagatacaatgatactggtgagaattaaataaatttatacatgtaaaacacctcacctagaacataacacccaaacacaggctacataaattaatgtttgtccataaaaaatgcataaaaaattccgtttatgtgctgaatcacatgtactgatttgcatatgttgaaaagaatgaagtcatgtcctttgcagcaacatggaggcagctggaggccatcgtcctaagcaaactaatgcgggaacagaaaaaccaaatgctacatgatcttactggtaagtgggagttaggcactgactacacatggacacaaagatagcaacaacacacactagaaactattcggtgggggagggagggagaggggcgtgggtggaaaaactacctatcagctactacgcttactacctgtgtgatggcaccatttgtacaccaaacgtcagcaacatgcaatttacccatgtaacaagcctgcacatgcacctcctgaatctaaaataaaagttgaaaagaggaaaattgttcctcctgagggtagatcttcataggaagaacagaatactctggcgtatttcaaaatgggtcattgttcctcctcccctaacagaagtatgaggggtcttttctcctgcttttacaatgaggacttgacagacctcttagaggtaaaaccaacaaaagtgtgggaaccccctccaataactgggtccccaggagttttgacctctcagatttgtctataccaagccttcagtaattcttcaattacagtaaacatttcccttctctgatattggttcctccagaggttgcaatggatggatttcttttacaataagttgtgattccctctacttgcctgttggtctttccaatttggggagctgcagtttgccctgtgacatcttttaccaatcaagactgctgagttttcagtttattcagctttttacttattgtcgggawccagcagcaactttcagcttcttacatgccagatcagaaactggaagtcaaatataagttcattttttatataactaccatatcaac

SEQ ID NO: 679805 - DNA, 512 bp, Homo sapiens
ccaggcacagtgccgcgcacctgtagtcccagctactcgggaggttgaggcaggagaatctcttgaacctgggaggcagaggttgcagtgagttgagattgcgccactgcactccagcctgggtgacagagcgagactccatgtcaaaaaaaaaaaaaaaaacaaaaacaaaaacaaaaaaaactgctgcttactaggtgttgtaggttaggaattcaaaggactataagctcgactgacacgaggtacttacatctcttctctccctttaactgggggtgatgcccttcagggtgctctttccacacgttgcatctgctgctactacagcacccagcacattagagtacaatgttccgtttgctcatttgtctctcctcactagagagtaacctaattaggggtgactgtggagatggatgcctttcctctgtatcctcaaagcccagccagggcctagcatattgaagaaattcgggcaatgtttgctcagtgagttcatgaatgtrtca

SEQ ID NO: 679806 - DNA, 965 bp, Homo sapiens
tcgtaaaatacttaaagtactacgtgagtgtaggtggtgcaattgctgattgctggcattaattcttgttcctatgtctccttttatcatttttctgatgtattttgggggttaccaaaggtttatttttggcctctggcctcccaaagccattggatataattctttgtactcttgttacttctgagcctacccaacttctgagttgatacttgctatgccattttctcattttttttaaatgatctccagtactgcactctgcttcccaatttctagcttgttatgttccttccatactcttgccatcagcttcccttagatgcttatctgcaaagggttccatattttaaactctctatctccagcccagacctcacctcttaaatacacactgaatatatccaattgccagtcstctcaggctgttataacaaaatatcttagtcgaggtaatttataaatttacagcagtaacttcaatttactgttcaaggtggcagcagattcagtgcctggtgaggcctcactctatccttcaaagatggtgccttctcacggtgtcctcacatgacaagagggcaaaaggctatgtcctcacatgatggaaggaacagtaagctttctcaagcctcttatgtatggacactaatcccatttatgggggtggtccccatgtgacctaatcacctgctgaaggcccacctcttaatactgccacaatgaggattagatttcaacattaattttggaggaacaaaagcattcagaccatagcaccaaatatcttctagtttttatttggtaattttacaggcaccaaaaaattttaccaagcattatacttttatgattaagactatgagttttgaacctagaattgctagatttgaatctttattacttataactgtgtgaccttaaagaaatgatttaacctctaagatcaaatgattgtagatgtg

SEQ ID NO: 679807 - DNA, 965 bp, Homo sapiens
tcgtaaaatacttaaagtactacgtgagtgtaggtggtgcaattgctgattgctggcattaattcttgttcctatgtctccttttatcatttttctgatgtattttgggggttaccaaaggtttatttttggcctctggcctcccaaagccattggatataattctttgtactcttgttacttctgagcctacccaacttctgagttgatacttgctatgccattttctcattttttttaaatgatctccagtactgcactctgcttcccaatttctagcttgttatgttccttccatactcttgccatcagcttcccttagatgcttatctgcaaagggttccatattttaaactctctatctccagcccagacctcacctcttaaatacacactgaatatatccaattgccagtcctctcaggctgttataacaaaatatcttagtcgaggtaatttataaatttacagcagtaacttyaatttactgttcaaggtggcagcagattcagtgcctggtgaggcctcactctatccttcaaagatggtgccttctcacggtgtcctcacatgacaagagggcaaaaggctatgtcctcacatgatggaaggaacagtaagctttctcaagcctcttatgtatggacactaatcccatttatgggggtggtccccatgtgacctaatcacctgctgaaggcccacctcttaatactgccacaatgaggattagatttcaacattaattttggaggaacaaaagcattcagaccatagcaccaaatatcttctagtttttatttggtaattttacaggcaccaaaaaattttaccaagcattatacttttatgattaagactatgagttttgaacctagaattgctagatttgaatctttattacttataactgtgtgaccttaaagaaatgatttaacctctaagatcaaatgattgtagatgtg

SEQ ID NO: 679808 - DNA, 1205 bp, Homo sapiens
tcatgggkgtggtcactcccatgctgctgttctcatgatagtgagtaagttctcatgagatctgatggttttataaggggcttttcccacttttgctcagcacttcttgctgccaccacgtgaagaaagacgtgtctgcttccccttccaccacaactgttaagattcctaaggcttcccaagccacgctgaactgtgagtcaatcaaacctctttccctcataaattacccagtctcagttatgtcttcattagcagtgtgagacctgactaatgcagtgggcttgctatcttcactgggtccttcaacactgggcagctcagctctctctccttcttagctgagcccatgacaaatggaaatgagcaaattattgggctgtcttttcttccttctgttgggtctgttgcttggagattagttctgtttcatctggttcttcctcttttgaggcaagacaatagcagagggaattggagaattggaggctggataaaggatggaatgagtaggagtagaagcaggataaagaggtgggtgagcaagaagcaagataataagcagaagttgagcagccaaaacaaaggtgagataaaataagtgagtaaagagaccccatggccagcaagatctggaccaaacctgtcaggggcagctcctcagagatgggcatgtgcatttgaggaaaaggtatccttaaaatgaccgcacatgatcatcagctacttaaggttcatgcatatggactgcatatcgtgcatgtacttaaaagtatgggatggaggcaacatgcaagtgcacaagggtcaaagtaactaagtaacccacctatcaatcaaaaggcagacactggctaaagattaggcagccttgggaaaagaagagaaaaaaacatatcaaagaaacccaaatacacctaactggtgctgatctcatttctcaaaggtcagtccactctcccttttccaagagtgtaatactgtgcttaataaacttttgctgctttgctatctgtgtgcatctcacacaattctttgttcagggcatgaagagcctggaacagcgtgataccatctggtaacactttaacgcccttaggtaaatgctgggtaaacatggattgccctgctgatgagtgagggaccatgttgattattattgcttttgttctctttggttttagatttacttccacatcaggcct

SEQ ID NO: 679809 - DNA, 1821 bp, Homo sapiens
tttttaagctacttacatgcctgacggaaattcgaagtgtctagggcatgactggaggatatgagccccacagcaggttgaggatggagtcatgagtgaaatgggtgaaatgagcccatgggctttggaaactgcagatctgtccttctgcctctgaccccctggtgagtccatgaagaaagtgaaaccacctttgcgaagcataagatggtgagaggaagctagcttggctgaccgcatctcacctctagtctcaaactggccctcttctctgattcctggrcataggccagggtaagcatgggaggaatttatagtttaactttgaagcaaggatgataatagtccctccctaaaattagctcctccttgtcgggggctaccttggtaaatctaagaaaagaccacgaattatgggaggggcccaaattctgctaaaatgcaggcatagtttctataatcccttacttctcaggagtcatgtatccagaggtcacaagatttgtgactttcctagttgctcctatagatagcaagactactgtagaatctgagatttatcttttgagatgtttcagacttttgcattctggcaaccagctgacctcatctagactcatgaccaatggctaaaccagtcatgtggcccccactcagaggcagattcaacaaatacataccattttgcctacgtgcatcatttcatctccagccggtcaacagtacttattccttagacctttgccccttcaaagtttttgaaaaactctaacctcagagccattggggaaggtgatttgagtcataataaatttctgtcctcctttttggcagccttgggctaagcaaaaccattctttactacacatcaccttcacaataaattggctttgcctgtgcagagggcaagaacctgtcaggtgattgtaagaatggatggaggagtcactgatctctttcaggtggcctgtttcatgagtcagcctctcagagggaaagagccctggactgggacacagtggaagctcattctcctggtgacccggggacattgcctcattatggatcctggcaggggtggctactctggctgattttggtgcatttttcatttcccagaaggcaggacaggcctcagtgtgagcaggaaggaaatggaaccgtcaatcttgttagagagggtgtctgggtaagtcctcagggtggaggaagctgtgcaggacagggctcatcaggtagaatgaaagggggatgcacttttttcactgaacacctttcagatgtctcaccaactctggcctcactgggctctgcctttccttctgagcccagagccccgagccctgattcctgggagggaggaagagagagaggaagggtgaagctgggatgtgtgctgtccaggtttcttccatctctggaatcttgaaagcgagggaccctagtgtgttaccacagaggagaccatgggaaaaagctgtttctcaggggtgcctggcttatgaattgaggggaattcagaccaggttggactcgtgaactgcagggactctgttccatgtcagcaaccagctcctctagctcagtgtttctctctgtggctaattcttttgtgtgatttctgagcccatgctagagtcctcctcacgatgcctgatggtcagacctgtgtggggagacctaatgatggggtgggggtggtcttgagtgtcacacagagtgtccagggaacaggctttgtgactttctctaccccagccccacaacaagatctggatagtgggcttggtcagataaagtcagaatccatggagggagggt

SEQ ID NO: 679810 - DNA, 616 bp, Homo sapiens
atgtaacctaaggaagttgtcactgatacatgaagactttaaaatactgtcacatgaaaatgtgaatctttttgtgtaaaagaaaggcaattcacaactttatcacaaacattcctcatactattggtacttagcttatgggtcaggtagtgttatgagaggatatcgtatttttaaaatgaggaaaccagaacgcaaagaggttaagtaattctaaaggaatatttagtataatagatcctaaaaatagattattgtgtttagcattgtaaaatcagctatactagtcactgattcctcattcattttctcatcagatttaaacagcctgttctaattttgtacatgtaatttgacattcttatataatttcttattaaagtttaattactcattgaaggtgaaagctcagcttgacatctacagtgatctctccttatccaccaaactgatttgtcatttgagagttatgttttaaattaaaattaaattaaaactcaagtcaaagaagctacmaactctcctcttatttttcctttgaaagaaatttaaatctagtttagatgaaaaacattcaaaatttatttttgtatattcaaaaatctatacaaaggga

SEQ ID NO: 679811 - DNA, 1112 bp, Homo sapiens
atatgtgagacactattctaagtgttttacatttatttacttatgagaccctcactataatcctatgaggtaagcactattattatataatatggacgtacaaagagcttaaataattttcttaaggaatatagctagtaaacgtcataatcaggattgtgaatcagtctggctccagaacmagtgatcttaaccactgtgctatacagtatagggttactacttgtaagccagttttatgctagagaaaagctatctcacctctaaacgattattggttttagaaaatgtgcctctcttttaaatagtgattcagtcttatagctaatggtctattaaggttactcatatttaatgacaataaaactgcacttcacatgtatgataatgtttttgttggccgggcgcggtggctcacgcctgtaatcccagcactttgggaggccgaggtgggcggatcacgaggtcaggagatcgagaccatcctggctaacatggtgaaatcccatctctactaaaaaaaaaaaaaaaattagccgggcgtggtggtgggcgcctgtagtcccagctactcgggaggctgaggcggcagaatggcgtgaacccgggaggtggagcttgcagtgagccgagatcgtgccactgcactccagcctgggcgacagagcgaaactctgtctcaaaaaaaaaaaaaaaagtttttgtttcccttttctatgacaggaaggtatccatacatttattcattgaaccaatgtttactgagtgtcttctatgtcttaggcattattctaaatgctgaaaatagagaaatgaacagcacaaacactattcctgctgtcacaaagtttacactttaatggaaggagaaaaattatataccaaaaaataaataagaaaatatcaaagagcaataagcactatgcagagaattaaaacagggttatgtgaaagagaataactgggtaataatgttatttagatcaccaggttttgtttggattccgagatttatatatctagcccaaaattttcccctgagaaacaaatttgcattgatctttctacgtgacgtctctaatcataacactcaggtatgcttgtttttcctt

SEQ ID NO: 679812 - DNA, 1112 bp, Homo sapiens
atatgtgagacactattctaagtgttttacatttatttacttatgagaccctcactataatcctatgaggtaagcactattattatataatatggacgtacaaagagcttaaataattttcttaaggaatatagctagtaaacgtcataatcaggattgtgaatcagtctggctccagaaccagtgatcttaaccactgtgctatacagtataggkttactacttgtaagccagttttatgctagagaaaagctatctcacctctaaacgattattggttttagaaaatgtgcctctcttttaaatagtgattcagtcttatagctaatggtctattaaggttactcatatttaatgacaataaaactgcacttcacatgtatgataatgtttttgttggccgggcgcggtggctcacgcctgtaatcccagcactttgggaggccgaggtgggcggatcacgaggtcaggagatcgagaccatcctggctaacatggtgaaatcccatctctactaaaaaaaaaaaaaaaattagccgggcgtggtggtgggcgcctgtagtcccagctactcgggaggctgaggcggcagaatggcgtgaacccgggaggtggagcttgcagtgagccgagatcgtgccactgcactccagcctgggcgacagagcgaaactctgtctcaaaaaaaaaaaaaaaagtttttgtttcccttttctatgacaggaaggtatccatacatttattcattgaaccaatgtttactgagtgtcttctatgtcttaggcattattctaaatgctgaaaatagagaaatgaacagcacaaacactattcctgctgtcacaaagtttacactttaatggaaggagaaaaattatataccaaaaaataaataagaaaatatcaaagagcaataagcactatgcagagaattaaaacagggttatgtgaaagagaataactgggtaataatgttatttagatcaccaggttttgtttggattccgagatttatatatctagcccaaaattttcccctgagaaacaaatttgcattgatctttctacgtgacgtctctaatcataacactcaggtatgcttgtttttcctt

SEQ ID NO: 679813 - DNA, 605 bp, Homo sapiens
caagaaaatgactttttttttttccgactgtgtctcgctctgttgccaggctggagtgcagtggcatgatttcagctccctgcaacctctgcctcccaggttcaagtgattctcttgcctcagcctcccaagtagctgggactacaggtgtgcaccaccacgcccagctaatttttgtatttttagtagagayggggtttcaccatgctggcctggatggtctctagctcttgacctcgtgatctgcccacctcgtcctcccaaaatgctgggattacaggcatgaaccaccgtgcctggccatgtattagatttttttttaaaacaaaagcaaatatggcatcaggagatagacagacagatattatatagatagatagacagatattatacagctaaacttgattctcttcctctgtccatatagttttacatatcttcatcacttagtcatttttagttagttctatgtccagaactatggatatatattgaccttaactgtcaagtatatacaaaagagccaaactgcaggcataaaaaaaacaaaaaaacaaggacaagcaacatttatccacagtttattggtcaaattatgaacaaat

SEQ ID NO: 679814 - DNA, 605 bp, Homo sapiens
caagaaaatgactttttttttttccgactgtgtctcgctctgttgccaggctggagtgcagtggcatgatttcagctccctgcaacctctgcctcccaggttcaagtgattctcttgcctcagcctcccaagtagctgggactacaggtgtgcaccaccacgcccagctaatttttgtatttttagtagagacggggtttcaccatgctggcctggatggtctctagctcttgacctcgtgatctgcccacctcgkcctcccaaaatgctgggattacaggcatgaaccaccgtgcctggccatgtattagatttttttttaaaacaaaagcaaatatggcatcaggagatagacagacagatattatatagatagatagacagatattatacagctaaacttgattctcttcctctgtccatatagttttacatatcttcatcacttagtcatttttagttagttctatgtccagaactatggatatatattgaccttaactgtcaagtatatacaaaagagccaaactgcaggcataaaaaaaacaaaaaaacaaggacaagcaacatttatccacagtttattggtcaaattatgaacaaat

SEQ ID NO: 679815 - DNA, 605 bp, Homo sapiens
caagaaaatgactttttttttttccgactgtgtctcgctctgttgccaggctggagtgcagtggcatgatttcagctccctgcaacctctgcctcccaggttcaagtgattctcttgcctcagcctcccaagtagctgggactacaggtgtgcaccaccacgcccagctaatttttgtatttttagtagagacggggtttcaccatgctggcctggatggtctctagctcttgacctcgtgatctgcccacctcgtcctcccaaaatgctgggattacaggcatgaaccaccgtgcctggccatgtattagattttttttwaaaacaaaagcaaatatggcatcaggagatagacagacagatattatatagatagatagacagatattatacagctaaacttgattctcttcctctgtccatatagttttacatatcttcatcacttagtcatttttagttagttctatgtccagaactatggatatatattgaccttaactgtcaagtatatacaaaagagccaaactgcaggcataaaaaaaacaaaaaaacaaggacaagcaacatttatccacagtttattggtcaaattatgaacaaat

SEQ ID NO: 679816 - DNA, 605 bp, Homo sapiens
caagaaaatgactttttttttttccgactgtgtctcgctctgttgccaggctggagtgcagtggcatgatttcagctccctgcaacctctgcctcccaggttcaagtgattctcttgcctcagcctcccaagtagctgggactacaggtgtgcaccaccacgcccagctaatttttgtatttttagtagagacggggtttcaccatgctggcctggatggtctctagctcttgacctcgtgatctgcccacctcgtcctcccaaaatgctgggattacaggcatgaaccaccgtgcctggccatgtattagatttttttttaaaacaaaagcaaatatggcatcrggagatagacagacagatattatatagatagatagacagatattatacagctaaacttgattctcttcctctgtccatatagttttacatatcttcatcacttagtcatttttagttagttctatgtccagaactatggatatatattgaccttaactgtcaagtatatacaaaagagccaaactgcaggcataaaaaaaacaaaaaaacaaggacaagcaacatttatccacagtttattggtcaaattatgaacaaat

SEQ ID NO: 679817 - DNA, 650 bp, Homo sapiens
gtgttccttgtttgtggtattttccagaatggctaaagactattaatttcaaaagatgaattaaccttctccagtgatagtaccagaagattaaaacagaagaacataggcataaatgcttgttaatttagacaacatgatggagaggatctgagacagtttagtgcaatggttaggatgagctgtggggtcaggcctggattggaaaatctactgtgtcccttactgtttagataagttaactaacatatctaaacctttgtccccttatctgtaaaagggatgtaacaatatctgccatccagattgtctctaagcagtcaatcagataaacataaagcacttagttcagtgcctgacccatacctagtgcccaataataaggctgcttattactttgaagaaaaaaatgtaaaaactgtattactttcatatgcaaatgatagaggaatagaataaatgcaatggttttcttatggtagacgtggtgagctaattttcacatgatctcatgattgaaaacatttttcaattttgtttcaaagaccagtcttctagtgattctagtatgtttacatagcaataaacagacttrttaattttgttacacactctcatgaagggcagcatttaggtgctattaaagcaca

SEQ ID NO: 679818 - DNA, 645 bp, Homo sapiens
aaatcacattattggggtatgcttgatatatgaaaagttgtacatattaaaggcatacaactcaaggaatttgggaatatgaccttgatgaaaatgatcaaggtcataaacatattcatcacctgcaaagatttctttctgctccttttattattattgcataattactattatttttattattttgtgttgtaagaacacctaacataagacctaccgtcttaggaaaattgaggtagacaatgcactgttggttatttttgttttaagtgaggaaaattaaataaaaagagggtcctaggtagtattttaaacctttgatggatttggggaagggactaamcttaagtcagataatatatgtcactgcctaatcatcctccacatgaacttgaaataaggtttatatcactttcatcacttttcctgggagttttagtaatatctcccatttagttgttctatttagctctcttgcttgagacattgtgagagcaagtttcctatgggagccttgctgctgatcggggcagtgaccttgcatttccttggcagcaactgtgatcttacccattgttttcatttatttgctggaattctactggcttgatgtgggtagtattgagtttcgctctgactcaaaca

SEQ ID NO: 679819 - DNA, 645 bp, Homo sapiens
aaatcacattattggggtatgcttgatatatgaaaagttgtacatattaaaggcatacaactcaaggaatttgggaatatgaccttgatgaaaatgatcaaggtcataaacatattcatcacctgcaaagatttctttctgctccttttattattattgcataattactattatttttattattttgtgttgtaagaacacctaacataagacctaccgtcttaggaaaattgaggtagacaatgcactgttggttatttttgttttaagtgaggaaaattaaataaaaagagggtcctaggtagtattttaaacctttgatggatttggggaagggactaaacttaagtcagataatatatgtcactgcctaatcatcctccacatgaacttgaaataaggtttatatcactttcatcacttttcctgggagttttagtaatatctcccatttagttgttctatttagctctcttgcttgagacawtgtgagagcaagtttcctatgggagccttgctgctgatcggggcagtgaccttgcatttccttggcagcaactgtgatcttacccattgttttcatttatttgctggaattctactggcttgatgtgggtagtattgagtttcgctctgactcaaaca

SEQ ID NO: 679820 - DNA, 2011 bp, Homo sapiens
ctcttgaaggggtagtttcctggcagtgaggtggtgagccaaggagaggaccacatttctctgcatgcaaatatccgttgcccaaagcattacatgggaagtcaaactcaatcagcaaacaatgattgctgaaccttattaatatggtccgggagatagaaaaaagagtacggaggggtgtcagagtctgggggaaaaaatcaatggtaggaaaaaagttcatataatataaattttaaaaattagcttattaaaacattgcaattacttgaaaatttgcctttatgttgttaaaatcagttaaaagtaacccaactatatataatacacatggcatattatcaaatagaggctcataagaagtctcccgggtgtttctttttattataatgttaaagatggaatcgttacaccttatcttagcaagtatatttagtcaatatggtggaacgaactcctagcattctgcagcgttatacaaagatataaatatcacttagtgcagtttgcctcagtttttcaggaagcatccttttaaaaaaaagttttatggatatattatagttgtacctatgtatggaacacatgcagtattttgatacaagcatatacaatatataatgatcaaatctggctaattggggtatgcatcacctcaaccatttatcattactttgtgtcagaaacattataaatctatttttctgcgtattttgaaatagacaataaattattattaagacagtattccttttgctccccatgaagcagccatcaccagaacatttgggtcaaggtcattataggaggtcaccctcatggcttgaaaagggcttttcatctccttgagagtgtgttctccatcctatgctcctgagatcagtccttgaagcttcaaaaggcacctttgcctgcctgtggaggaatgattggcagggagatagatcaagcatctagaaacagatgttgtgggaacttgtgagctggtgtttaagtctggcttggagaagaaccaagcctggctagttctgagtcttttgactgatagttttaatggggcaagtatagtttgtgttaaacaatgtgtttaatttgtatgttagtatgttgagagactaaagagtttcttgtcaatcccatgtttctttggggaggaagggctctaggcatttttgttctttcaaactgactcaaaggccactgtcttggcgggttcacggcccagtgattgaagcttgagattttctccagaagaaggaaagggggatatttacggagaataacaagatggtgtttgcagaatcctacactgcactgtggagttgggtcagttgcatcatgaaatattagcattttccacacaggaacattttgtaacaagaaatgttagaaatcatttgtagagtagaagacatactagacgatagttggaaggaaaaagagactgtggaatgacgcataaatgcttctaattaaagggaggggactcaaaaagtgtaggaggcttgaggaatttagcacacaactacagatgtttcttcctcccttcctctagtttggttctattattagaataggaggatgtgagaattttcttgctgggaagtctgcctcagactggtagagtttatctggctggctaagggggtgcccccttcctgtgttatcatcacattttcttgggcagggttctggctgccaggacggatccttccctcccccagtactagaatagaactataattgaagcaatgtgtgctacattatcacaaggagagctatttattaaagcttatcctttttgtgctggtaggcttcttccagctaaaaactgcaagaagaaatacgaaggctgttcttaattttatacaaaaacatcttaggtctgcattagcccatgatcagggattttgtttcayttgtgatttcctcaaaattttaccccccaaaagaattactgagttagcaaataaagggaaaaataccatcacttgtgattgttaaaaaaaaa

SEQ ID NO: 679821 - DNA, 1673 bp, Homo sapiens
catactattctttacaaacatgtttcttgttagtaggaaaaccacatacatgccaagcacaatatttggcatgcagcagacactcaaatgttaatcgcttagatgaatggtcaatatgttcgaataaagttgaatcaaaagggaaaaaatgatccaatcatttcaaattttaggcacaaatctaaaatgcagacaaaaatacagtacaattttaaaggcaaaacagacatttaaaaagaatcttggaagccaggggcggtagttcatgcttataattctagcactttasggggctgaggtgggcagaccacttgagcccaggagatcaaaaccagcctggggaacatggagaagcccgcctccacaaaaattacaaatattatctgggcgtggtggtgtgtgcctataggcccagctactcgggagtttgaggtgggaggatcacttgggcccaggaagtagaggctgcagtgagccgagatcatactactgcagtccagcctgggtgacagagtgaggctctgtcaaaaaaaaaaatcttggggtcgggcgcagtggcttatgccagtaattccagcactttgggaggccgaggtgggcggatcacgaggtcaggagaatgagaccatcctggctaacaccgtgaaaccccatctctactaaaaaaaaatacaaaaaaattagctgggcgtggtggcgggcacctataatcccagctactcgggaggctgaggcaggagaatggcatgaacccgggaggcgtagcttgcagtgagccaagatcgcgccactgcactccagcctgggtgacaaagcgagactccatctcaaaaaaaaaaaaaaaaaaaaaaatcttggaggatcaaggtttgtatttcatatgtagaaatcttatgtaataggtaaataaattaaatagaaacctgatatctagactttcaatcagagatgaagtttctagagagctaatttataaatcttacagcggtaaaattaaaaaatgaatacttgaaggatgtatgtactgaccctgagattacactaaaaatgggagaacttttaggtatttaagatgatctttaaaaaaaaagactgacttttcattctgctttaaattgttaattgttgaataaatatttatgaagtgcctgttatgtgtcaacagggttccaggtgatgaagctacagtgctaagtgagacagattaagcctccactctcagggaatttacttacattcaagtgagtaaacacgagctcgacgaaagacaagacattgagtaaggaagagaattcatacagcaaaaagcgccacacaaaaaaacaaagggtagtggtatattaaggattgaaaaaattgttctgcaaagagccagatagtaaacattttaagttttgcaggtcaaatggcaaaacacatattttttaggcacttatataatgagaaaacaaattctcacaaaatagtttttcaaaactcaaaatataataatgcatacataaaacaggtaaagatacgtgaacacaaagattaggcaatactgtaaatgtctactaatggggactgcttaaaaaaattctgttagctgtttaaaaatttgtggtagaacaacacaccttgaaacagaaaagtattcaaaggtatattgctaaagtgaaacagttaagtggaag

SEQ ID NO: 679822 - DNA, 606 bp, Homo sapiens
tgagaactggcaccccttcccattggtgtgctgtggtctcgggaacacagcgagggccatgctggtcagacctgtgaatccagcctggatttcctccccggaaagaatgagcagcttccccaggtcagcccagagccatgcattgaggggaaaccagaatctgggtcccctccatcccacacagcactccagcctcaatgacacttagtacggggttaagggtcagcacttcaaagtcagatgtggctgggtttgagttccagttctgttgctttacaagtggtgtggcagggcagggccactgcacatagttgtgagggttggagattgaaatccactttgctctactctcttcttcctgtccccggagccaggcactgtgtctgcctgaggaaggtggcccttttctttcacaaagttctggctgctcagcaagctaccctctcatgggctgcatctgtgcaggggggtaggacagcagcacagtgagcctcgtgggggacctgaactggtggcatgttttggggtyggcctgccttggtgatgctgctttataagttaagtggcttatttacggcatcttatatggaagagataaaagcaaaa

SEQ ID NO: 679823 - DNA, 606 bp, Homo sapiens
tgagaactggcaccccttcccattggtgtgctgtggtctcgggaacacagcgagggccatgctggtcagacctgtgaatccagcctggatttcctccccggaaagaatgagcagcttccccaggtcagcccagagccatgcattgaggggaaaccagaatctgggtcccctccatcccacacagcactccagcctcaatgacacttagtacggggttaagggtcagcacttcaaagtcagatgtggctgggtttgagttccagttctgttgctttacaagtggtgtggcagggcagggccactgcacatagttgtgagggttggagattgaaatccactttgctctactctcttcttcctgtccccggagccaggcactgtgtctgcctgaggaaggtggcccttttctttcacaaagttctggctgctcagcaagctaccctctcatgggctgcatctgtgcaggggggtaggacagcagcacagtgagcctcgtgggggacctgaactggtggcatgttttggggtcggcctgccttggtgatgctgytttataagttaagtggcttatttacggcatcttatatggaagagataaaagcaaaa

SEQ ID NO: 679824 - DNA, 664 bp, Homo sapiens
aaaaaaaaaggaactcttgtyttatttttgatttttaaaggaaatgactttaacatgtcttcatattttaaaaagttatccttgatcaggttaaggaattttcacatgaatagttgtttggttctactgaaatttttcctggatttattgagatgatcatatgttttttcttctttaatggggtagtatagtaaattgaatcaccggattttgtaatgttaaaccaaccttgcattcctggaataaactcaacctcattatatcttatctttttatgctttgctggattcagtttgttaatattttggtgaatgttttacatttatatttttgaattaatgagtgtgaaatggcctgaaatctttatgtttgtgacctggtttaatgggttttggtataaaaattaagttagttttataaaataagttgggtaatattgtcttttatatttttctctgaaaagagtttaagtttgaaataatttatttcttaaatcattggatgaactcttctgtatctatcaggacttagtgggttcttaaaaatggggatatttgaaactatttctttaatggttataagaccatttagatttctttttttataaaagtcagttttggcaagttgtatttttctaagaatttgtccattttatctaaggcta

SEQ ID NO: 679825 - DNA, 664 bp, Homo sapiens
aaaaaaaaaggaactcttgtcttatttttgatttttaaaggaaatgactttaacatgtcttcatattttaaaaagttatccttgatcaggttaaggaattttcacatgaatagttgtttggttctactgaaatttttcctggatttattgagatgatcatatgttttttcttctttaatggggtagtatagtaaattgaatcacyggattttgtaatgttaaaccaaccttgcattcctggaataaactcaacctcattatatcttatctttttatgctttgctggattcagtttgttaatattttggtgaatgttttacatttatatttttgaattaatgagtgtgaaatggcctgaaatctttatgtttgtgacctggtttaatgggttttggtataaaaattaagttagttttataaaataagttgggtaatattgtcttttatatttttctctgaaaagagtttaagtttgaaataatttatttcttaaatcattggatgaactcttctgtatctatcaggacttagtgggttcttaaaaatggggatatttgaaactatttctttaatggttataagaccatttagatttctttttttataaaagtcagttttggcaagttgtatttttctaagaatttgtccattttatctaaggcta

SEQ ID NO: 679826 - DNA, 664 bp, Homo sapiens
aaaaaaaaaggaactcttgtcttatttttgatttttaaaggaaatgactttaacatgtcttcatattttaaaaagttatccttgatcaggttaaggaattttcacatgaatagttgtttggttctactgaaatttttcctggatttattgagatgatcatatgttttttcttctttaatggggtagtatagtaaattgaatcaccggattttgtaatgttaaaccaaccttgcattcctggaataaactcaacctcattatatcttatctttttatgctttgctggattcagtttgttaatattttggtgaatgttttacatttatatttttgaattaatgagtgtgaaatggcctgaaatctttatgtytgtgacctggtttaatgggttttggtataaaaattaagttagttttataaaataagttgggtaatattgtcttttatatttttctctgaaaagagtttaagtttgaaataatttatttcttaaatcattggatgaactcttctgtatctatcaggacttagtgggttcttaaaaatggggatatttgaaactatttctttaatggttataagaccatttagatttctttttttataaaagtcagttttggcaagttgtatttttctaagaatttgtccattttatctaaggcta

SEQ ID NO: 679827 - DNA, 664 bp, Homo sapiens
aaaaaaaaaggaactcttgtcttatttttgatttttaaaggaaatgactttaacatgtcttcatattttaaaaagttatccttgatcaggttaaggaattttcacatgaatagttgtttggttctactgaaatttttcctggatttattgagatgatcatatgttttttcttctttaatggggtagtatagtaaattgaatcaccggattttgtaatgttaaaccaaccttgcattcctggaataaactcaacctcattatatcttatctttttatgctttgctggattcagtttgttaatattttggtgaatgttttacatttatatttttgaattaatgagtgtgaaatggcctgaaatctttatgtttgtgacctggtttaatgggttttggtataaaaattaagttagttttataaaataagttgggtaatattgtcttttatatttttctctgaaaagagtttaagtttgaaatwatttatttcttaaatcattggatgaactcttctgtatctatcaggacttagtgggttcttaaaaatggggatatttgaaactatttctttaatggttataagaccatttagatttctttttttataaaagtcagttttggcaagttgtatttttctaagaatttgtccattttatctaaggcta

SEQ ID NO: 679828 - DNA, 593 bp, Homo sapiens
taattctcacagggattcagaatgttaggacaatctatgccaaggctgtgtcataaatcagtgcaggggtctgttaaaactataatttgaaagacaagagagagaatgattcaattattacaataygtaagtgagacaagttgaatacaaaatgtatctgtgctatggttcaaactttataaaatcacatacataaaaataggagggaagaaaattgcttgtgggtaatttaaaaaatcacactaattttagtgttgtttatccaaccactgaaaatattgtgttatataactggaagagtaaacagaaagagtgaaagtataatatttgttatgatctttcaaggcacattagctaaaatactagcttatgcagtactgagaaatgagtacctggcaataaaaaagtaagaaacaaaattccagaacctacgatattaactttatagacatttcctgggctatgaggcccaagaaagtatttctgacaaagtaaaataacaagtcaagtcagtgttaatgtgtggagctgagaacagatgatgtattatacatgcatttttgccctttatgagtagacatttattcatgaca

SEQ ID NO: 679829 - DNA, 593 bp, Homo sapiens
taattctcacagggattcagaatgttaggacaatctatgccaaggctgtgtcataaatcagtgcaggggtctgttaaaactataatttgaaagacaagagagagaatgattcaattattacaatacgtaagtgagacaagttgaatacaaaatgtatctgtgctatggttcaaactttataaaatcacatacataaaaataggagggaagaaaattgcttgtgggtaatttaaaaaatcacactaattttagtgttgtttatccaaccactgaaaatattgtgttatataactggaagagtaaacagaaagagtgaaagtataatatttgttatgatctttcaaggcacattagctaaaatactagcttatgcagtactgagaaatgagtacctggcaataaaaaagtaagaaacaaaattccagaacctacgatattaactttatagacatttcctgggctatgaggcccaagaaagtatttctgacaaagtaaaataacaagtcaagtcagtgttaatgtgtggagctgagaacagatgatgtattatacatgcatttttrccctttatgagtagacatttattcatgaca

SEQ ID NO: 679830 - DNA, 593 bp, Homo sapiens
taattctcacagggattcagaatgttaggacaatctatgccaaggctgtgtcataaatcagtgcaggggtctgttaaaactataatttgaaagacaagagagagaatgattcaattattacaatacgtaagtgagacaagttgaatacaaaatgtatctgtgctatggttcaaactttataaaatcacatacataaaaataggagggaagaaaattgcttgtgggtaatttaaaaaatcacactaattttagtgttgtttatccaaccactgaaaatattgtgttatataactggaagagtaaacagaaagagtgaaagtataatatttgttatgatctttcaaggcacattagctaaaatactagcttatgcagtactgagaaatgagtacctggcaataaaaaagtaagaaacaaaattccagaacctacgatattaactttatagacatttcctgggctatgaggcccaagaaagtatttctgacaaagtaaaataacaagtcaagtcagtgttaatgtgtggagctgagaacagatgatgtattatacatgcatttttgccctttatgartagacatttattcatgaca

SEQ ID NO: 679831 - DNA, 953 bp, Homo sapiens
aggacaccaatcatattggattaaagcccacccatctgacctcattttgccttaattacctctttaaaggccctatgtccaagaagagttacattccgaggtactgggtgttaggacttcaacatataaattctgcgggaaacaattcagtgcataacagggacactgaggtggaagagttgagaataaatagtaatcacctttcagctaatcttgagattctgaatgtatagtatatgtcatgagatcagtacattttccttggatccttcaggtcatatgtctctatctcttttctatgttatccccagggcttgccccaagggagacctcagcttgtagatggagggaggtcttgctagcagttaccagaataagagaaactgccatggtaattaacaacctgctgctgtgggaatccaaatagagtcagagcaatgtgtttacaatgcttggagacataatagtgagatcatgtaagtaatttccttaaaataagaacaaaagacaaaagtttagagaaactgtgataatggccaaagcttagcccagatgattttattcaggtgttactgtaataacttattttctctaaacatcctaagacatagagagtaactagaagctagtttaatgtctaaatccttattttataagactataacttgtagaaaaactagatctccaaacagcatctgtatctataataacttatacatgytcactagggaaacactgatggaaatttaacacactctattatgctgatgtgttcatatcaacaaagatagtcatcagcatccaagacaggatctacttaaaaagctaaaaaggcaataggttaaaacttctgttagtttctacattcattataaatgtaccttacctaatggtcagtttcacaggctcaggtgacccattgacattgaccaggaactcttcttcaaagtttc

SEQ ID NO: 679832 - DNA, 1318 bp, Homo sapiens
tgcaggatatttctacttttcagttgggatttaagtaaaagagaaagaacttctatttccttatagcaaaaactcaatatagcattttctatcaaatgggagagcaaacctcagaaataggtaacaagcctcaactttagaccccacttccagtttcacgtctttgaaagatttcatatgacttctttaacacttctgaaattaaattccatgtcatttatgtctctgcaaaaaaaactttctttctttattactcagttctaacatttctgaaaatcaaaacatccagaaatttccttcctggctctgacatcaatatcccttcttcccagttctacaaaacctgcctcatcacacggatccgcgtcccccattctgcgagccttctacatgtgacccccctcccatgactgcccattttcctgctccaaatgagaggttgagtacataggattgaatctgtaagtgactatgaccttctttgttgaaaagaattgtcaaaatggccttcagttatactgtaattatcttccttcttggtcttaatgttttctttcagattcgcaatgagtaaagtaattgcattttacttattaataaagtgacctactagaaaaaaatcaactttaaattttcaagcctaaagctaattcccatattgcgatttttgcccaaattattaaatatctctggacacggagtttcatgcttccttctggaacaagaataaacaaccaagtgactcgatggccacagttctgagactttctgaaagctgtctatgaacaaacagccactggtttgtgatagatgataaatatgatcatgagaaaggtgtcatttaaaagtgttcaccttttaaaaattatatcagcaatacttacaggggatctttaaaaaaaactcccttgaaaatccttaaacatctttttaaaaaattgtcttccttcccctctattacccctctacctcctttccttcgtttctcccttccttccttccttgaaagattatttcttacaaatcttgcccccctcccaaaaaaaaaaccaaagtgcaagaacagagayttatatacatatgtaattttcctggtttatctaaaaagtagtttacgactcaacttttacatttatcaaataaaatggttatgttctagttcccaacttacatttagaagaatgatccacgtttgcccactcaaatgctatgctttccaatcatactctctaatctgacaagacaaatgtatttaactacaaatcataatatacgtaaccacccactgagagctcatgttccacactgtgtaaagtgc

SEQ ID NO: 679833 - DNA, 1396 bp, Homo sapiens
atggggaagatgtgtgtctccagtgcagcagggttgaatgagtaatagtccctcatcttcaagtactcaaggcctgtaatctgctcccttcagcacccacaagaggtgccaactgaatgctgaggagattaaaaactaagagccatggtcttgagagctagaggaaatactcccatgtccacacttggcctggaacaaatggagccatccaccttcaaatggaaaatggatcatgtgactctaaasagttagcaactctgtgatcaatgttacaaatgaagaactagagatcctctccctgtttggcagtaccacgtaaatcttcggatttttgtataaaccctagggaaggaaaggggcctctaaacataactcagattaagtttattatgacacaggtggtaggctcaaagcccaattaaaactgatttatctaaggaaacatgtcatttcctccatctgcatattatagaataaatccatgctgaccactctgaggggctcctttgagaattgtaggagctctcgtacagagcaaatctagaattagagctggctgctattgagaaaacggctgtgaccttgctggagaaatggggagcaaaaatccttaaagcccatgccaagtctctgaatacagtgaacgtgataagaatgagcatgaaagaatcttgcagaatgttttaaaatccctcaggacaaggttgaggaagcaaggagggatgaatgcagcctccatttctgaagagattaatttctctgcaagtctcaggaaaacatcaaaagaaagaaataaaggtgaccttttaaaggtccctatacatctgattatcaagttaaaaaaaaaaaatttaaagtacagaacttcttcccacggggaggaatgtcattgcccaagtgtgtagcatgggaacaaccctctgtccccaaacctggacatgtgtcctaaggtttttagcaatactttgaggtaggtgtggaggaaggccaaacagtaaactgctggaaacgaattggtattcctggggctgaaattcctccactgcaagaagagatatccaagtctttgctcatcaagatacaagaggacaagaaaccttgatggctagaatgggacttgagtgtatctgttgaagctattagcattattgaagcgatcttagagcaactttcagcccctggagatgaatgccacaggacatgctttaagccatgttaaaatgctagaaaaacagtggacaggctcttcagtctgacctgaaagtttaccagaagttaaatcttttaactatagaggttgctgaaggagggggaacaaaggaagaaggtgcaccccattatgagcaaaagagtgagacatcaagagaataacgcctgattcagctctgcaggcctt

SEQ ID NO: 679834 - DNA, 1396 bp, Homo sapiens
atggggaagatgtgtgtctccagtgcagcagggttgaatgagtaatagtccctcatcttcaagtactcaaggcctgtaatctgctcccttcagcacccacaagaggtgccaactgaatgctgaggagattaaaaactaagagccatggtcttgagagctagaggaaatactcccatgtccacacttggcctggaacaaatggagccatccaccttcaaatggaaaatggatcatgtgactctaaagagttagcaactctgtgatcaatgttacaaatgaagaactagagatcctctccctgtttggcagtaccacgtaaatcttcggatttttgtataaaccctagggaaggaaaggggcctctaaacataactsagattaagtttattatgacacaggtggtaggctcaaagcccaattaaaactgatttatctaaggaaacatgtcatttcctccatctgcatattatagaataaatccatgctgaccactctgaggggctcctttgagaattgtaggagctctcgtacagagcaaatctagaattagagctggctgctattgagaaaacggctgtgaccttgctggagaaatggggagcaaaaatccttaaagcccatgccaagtctctgaatacagtgaacgtgataagaatgagcatgaaagaatcttgcagaatgttttaaaatccctcaggacaaggttgaggaagcaaggagggatgaatgcagcctccatttctgaagagattaatttctctgcaagtctcaggaaaacatcaaaagaaagaaataaaggtgaccttttaaaggtccctatacatctgattatcaagttaaaaaaaaaaaatttaaagtacagaacttcttcccacggggaggaatgtcattgcccaagtgtgtagcatgggaacaaccctctgtccccaaacctggacatgtgtcctaaggtttttagcaatactttgaggtaggtgtggaggaaggccaaacagtaaactgctggaaacgaattggtattcctggggctgaaattcctccactgcaagaagagatatccaagtctttgctcatcaagatacaagaggacaagaaaccttgatggctagaatgggacttgagtgtatctgttgaagctattagcattattgaagcgatcttagagcaactttcagcccctggagatgaatgccacaggacatgctttaagccatgttaaaatgctagaaaaacagtggacaggctcttcagtctgacctgaaagtttaccagaagttaaatcttttaactatagaggttgctgaaggagggggaacaaaggaagaaggtgcaccccattatgagcaaaagagtgagacatcaagagaataacgcctgattcagctctgcaggcctt

SEQ ID NO: 679835 - DNA, 1396 bp, Homo sapiens
atggggaagatgtgtgtctccagtgcagcagggttgaatgagtaatagtccctcatcttcaagtactcaaggcctgtaatctgctcccttcagcacccacaagaggtgccaactgaatgctgaggagattaaaaactaagagccatggtcttgagagctagaggaaatactcccatgtccacacttggcctggaacaaatggagccatccaccttcaaatggaaaatggatcatgtgactctaaagagttagcaactctgtgatcaatgttacaaatgaagaactagagatcctctccctgtttggcagtaccacgtaaatcttcggatttttgtataaaccctagggaaggaaaggggcctctaaacataactcagattaagtttattatgacacaggtggtaggctcaaagcccaattaaaactgatttatctaaggaaacatgtcatttcctccatctgcatattatagaataaatccatgctgaccactctgaggggctcctttgagaattgtaggagctctcgtacagagcaaatctagaattagagctggctgctattgagaaaacggctgtgaccttgctggrgaaatggggagcaaaaatccttaaagcccatgccaagtctctgaatacagtgaacgtgataagaatgagcatgaaagaatcttgcagaatgttttaaaatccctcaggacaaggttgaggaagcaaggagggatgaatgcagcctccatttctgaagagattaatttctctgcaagtctcaggaaaacatcaaaagaaagaaataaaggtgaccttttaaaggtccctatacatctgattatcaagttaaaaaaaaaaaatttaaagtacagaacttcttcccacggggaggaatgtcattgcccaagtgtgtagcatgggaacaaccctctgtccccaaacctggacatgtgtcctaaggtttttagcaatactttgaggtaggtgtggaggaaggccaaacagtaaactgctggaaacgaattggtattcctggggctgaaattcctccactgcaagaagagatatccaagtctttgctcatcaagatacaagaggacaagaaaccttgatggctagaatgggacttgagtgtatctgttgaagctattagcattattgaagcgatcttagagcaactttcagcccctggagatgaatgccacaggacatgctttaagccatgttaaaatgctagaaaaacagtggacaggctcttcagtctgacctgaaagtttaccagaagttaaatcttttaactatagaggttgctgaaggagggggaacaaaggaagaaggtgcaccccattatgagcaaaagagtgagacatcaagagaataacgcctgattcagctctgcaggcctt

SEQ ID NO: 679836 - DNA, 1396 bp, Homo sapiens
atggggaagatgtgtgtctccagtgcagcagggttgaatgagtaatagtccctcatcttcaagtactcaaggcctgtaatctgctcccttcagcacccacaagaggtgccaactgaatgctgaggagattaaaaactaagagccatggtcttgagagctagaggaaatactcccatgtccacacttggcctggaacaaatggagccatccaccttcaaatggaaaatggatcatgtgactctaaagagttagcaactctgtgatcaatgttacaaatgaagaactagagatcctctccctgtttggcagtaccacgtaaatcttcggatttttgtataaaccctagggaaggaaaggggcctctaaacataactcagattaagtttattatgacacaggtggtaggctcaaagcccaattaaaactgatttatctaaggaaacatgtcatttcctccatctgcatattatagaataaatccatgctgaccactctgaggggctcctttgagaattgtaggagctctcgtacagagcaaatctagaattagagctggctgctattgagaaaacggctgtgaccttgctggagaaatggggagcaaaaatccttaaagcccatgccaagtctctgaatacagtgaacgtgataagaatgagcatgaaagaatcttgcagaatgttttaaaatccctcaggacaaggttgaggaagcaaggagggatgaatgcagcctccatttctgaagagattaatttctctgcaagtctcaggaaaacatcaaaagaaagaaataaaggtgaccttttaaaggtccctatacatctgattatcaagttaaaaaaaaaaaatttaaagtacagaacttcttcccacggggaggaaygtcattgcccaagtgtgtagcatgggaacaaccctctgtccccaaacctggacatgtgtcctaaggtttttagcaatactttgaggtaggtgtggaggaaggccaaacagtaaactgctggaaacgaattggtattcctggggctgaaattcctccactgcaagaagagatatccaagtctttgctcatcaagatacaagaggacaagaaaccttgatggctagaatgggacttgagtgtatctgttgaagctattagcattattgaagcgatcttagagcaactttcagcccctggagatgaatgccacaggacatgctttaagccatgttaaaatgctagaaaaacagtggacaggctcttcagtctgacctgaaagtttaccagaagttaaatcttttaactatagaggttgctgaaggagggggaacaaaggaagaaggtgcaccccattatgagcaaaagagtgagacatcaagagaataacgcctgattcagctctgcaggcctt

SEQ ID NO: 679837 - DNA, 621 bp, Homo sapiens
aaaagaaaatgatgcaagagaaaaggaagaataaaagacaatattaaagagataggggtgtgagtgtcaggggaggtgaagtggggaaaaaactaaaatcaatgcccatccactgtggctgaattatattctctatagtttagcatctctgataaccattggtttaaatttttttagagtttaactgctgaaattaacgtccttacatagtttttggtattggcatggcatcaatcacatattatccatatagccaaacacacagacatggctgaaattaaagctggctttccctcttacaatgggtactcactctccacaaagggttatgcccacaggacaagaatgatactgaaacactactttgctattttactttctttacttggatctcctttccaactttcccttcaagcatgttgggccattttgatcgctggtgagcacatgtgaktgggggaaccagggcaaaggaagcagtactggatccttttccttgtgccttttaaaaccacagatatttctatgccataaagccagaggaagattttaggcataagtggtttttctttcctcattttttaaaagatggcacagtggcaattcagtgattaaagctca

SEQ ID NO: 679838 - DNA, 621 bp, Homo sapiens
aaaagaaaatgatgcaagagaaaaggaagaataaaagacaatattaaagagataggggtgtgagtgtcaggggaggtgaagtggggaaaaaactaaaatcaatgcccatccactgtggctgaattatattctctatagtttagcatctctgataaccattggtttaaatttttttagagtttaactgctgaaattaacgtccttacatagtttttggtattggcatggcatcaatcacatattatccatatagccaaacacacagacatggctgaaattaaagctggctttccctcttacaatgggtactcactctccacaaagggttatgcccacaggacaagaatgatactgaaacactactttgctattttactttctttacttggatctcctttccaactttcccttcaagcatgttgggccattttgatcgctggtgagcacatgtgattsggggaaccagggcaaaggaagcagtactggatccttttccttgtgccttttaaaaccacagatatttctatgccataaagccagaggaagattttaggcataagtggtttttctttcctcattttttaaaagatggcacagtggcaattcagtgattaaagctca

SEQ ID NO: 679839 - DNA, 624 bp, Homo sapiens
ccgatctgtcttgcaagaagacatgggtagtgagaatgaaagtgagaactcccactattgagtgagattctcaaagtgggggaagaagggaggagaccacccctcatattgtcttatgcccgatttctgcttccaaagaaagaagaagtaaaaactaaaaggcagaaatgaaatccacaagcagacagcccagcgccacaccctggctctggtagttaaagatcgamccctgacctaatcagttatgttatgtatagattacagacattgtatagaaaagcactgtgaaaatccctgtcctgttctgttccgttctaattactggtatatgcagcccccagtcacataccccttgcttgctcaatcgatcacgaccctctcatgcggactcccttagagttgtgagcccttaaaagggacaggaattgctcacttggggagctcggttgttggagacgtgagtcttgccaaagctcctggccgaataaagcccttccttctttaactcaatgtctgaggggttttgtctgtggcttgtcctgctacagtccatttaatgtttaataaagacattactactgatttattattcttctttttaaagaaaataactacaaaagggca

SEQ ID NO: 679840 - DNA, 3354 bp, Homo sapiens
ctgcagccttaaactcctgggcttcagcgatcctcccatttcagcctcctgagtagctgggattacaggtgcgtgacaccacgctcaactaatttatttattttttgtggagagagggtcttgatatgttgcccaggctggcctcaagtgatcatcccgcctccacctcccagaatgctgggactataggcatgagccaccacaccttgcttcttctctgttattatgtgagagtggctctttccaccaagccaaggattcagttattcagagattgagtcctggtcccatggagcccagaacaccagcagtaatccagctcatgcctctctctggggggcatgagaggacctgtggtgggaggtggaggccttagcagagggtcgagccgagttctgccacttggcccccatgaatttattagttgcatgctttgatacatgtctccgggttatcagcacaatcacactttgaaaaagtgttttgagtcccttgatttatctttttgtcattgttgttcagaatagttttcactcaaaggcaagaacatgcttttaaactgaccttttaaactttgtaaagcttatgccacaaagagacacatgaaaggaacaataagtacattctctatgtggaagcataattgaagtctcctctggtgatgagatctatgggaacccggcacaaagcatctgagctgggctcttgtgctgatggatggccctctgggtggaagtcccatgaccagagagagaggccaagctgtaccctacccagtggaaacattcccaccatctcagcgggctcatggccacctgcctaccctcaggagccaagggaaccacttgggagatttggcccttgtcctgcggtctgcaggaagccatggaagtttctgagcaggggaaggatgtggaaaatagaggcaagaccaaagtagagcatttgaagccagcagcctgggtttgaatcctgactctggcacttctaagttgtgtgaccttgtgtaagccacctarcttctgtgagaatcatctggcattgagcacccatttatggagcactggctacatgctggacacctgggatccagaggagaccaagagaatactgcagtcgtttcttcttccttgcttataactgttaccatgtgtattagtttaccattgctgccataacaaattaccacaaagtggcttcaaacaacatgaatttattatctcatagttctggagggctgaatttccactgagctaaagtcaaggtgttgaaagggctggttgtttcttgaggatccaggggagaatttgtttccttgcccttttcaccttctagtacccacctggattccttggcttgtagctccttcctgtctgcaaagtaaatcactccaatctctgcttccatgttcacatcgccttctcttctccctttacctctttatgataaggattcttataattacattggtcccatttaggtaatataggataatttccttgtctaaagatccttcacttattcttatttgcagaatctcttttgccgtgtaaagtaacattcagggattaggatgtggatataattgagggccgttattcagcctatgacaccacgtgacattgcatttagcgtctgttcattttacgtatctgtgtaatgtgtttcttctgggcagtgaggtaggcctgccagatagcctcacatgtgtgctgggtgagtgagtgaataaatgaatgaatgtgttctttggagctgagaagaagctgatgttccacttgggctttagaggattaatgtgagtttgtttgccagagtattctagatggaatgagcagcttatgaaaagatatagagacatgagctgagacgttcagcttggaggaaatgcaggcagagtgtgatggcccagagtgagacgaggctgggcagtaggtggccagatcatggagagccttgcaggataccttcatgggcctggattttatttttataaggaagcagtaaatgtagttattgcccttgtctttggagttatcgcctgggtttaaattcctgtgctgccacgggatagggttacttgctgtgtaaccctaggaaaattactaaacatctttgaggctcagtgaaataagtgcttcataaacctgttctgagaagcagatgacttttgaggcttgcaaagcacttagcacagtgtgtggaacggtcaagggagcctttaggaatgtattggcattcttgctgttattttaatacatgtgattattgttattattgatggtgatgatggggactctttgaagaatttcagccaggcttcagtgtcgtggtcagatttgctttctaggaagatgactttggcagccatataaagatgtcaggggccaagggtgggtgacactaagggtcgggaaaccagttcggagcctattaaaataatctaggtgagaggtgaagaggcagagagcagaggtgggggttcaagagagatgttattggatgcaggatgttggagagatgtctttgctgctgctgttccctgcttgaaatggttcaaggaggattttagaggcttagtaccaatgccttagtccttgattttcagaaagggacactgaggcacagcaaggggaggatgccttgccttcatctccagatgaaacagtgacagacgggataggcagggtagaaccgaggtcctcagccctttgttgcagagcaggcggaggtgggagaagtgtggctggaagaggcttctgatggaagtgcagttcttcatgggtgggggtgctctgacacaaactcagtgtcgactgccccttccacatccctctaaccacccctctatgccttaactcctctttccagctcattcttccaccagtccccacaggaatgcctgtagaatcctggtggtgttgggcagaggggttttgtggttttgaattaaggcaaatgacttgactgagttgaggaggacacatggaggatgaggactgcctgggagggagggtgagggagttctgtgttctagcgccagtgaaagaaacctggagtctgaagaagtgtgtactcagagatttggtactgtgcgtcctctagctcttccattcacgccccttcatacatcttcaggaggaaaccaattcaatggagtgcaccagggcaagattacgattgttacttcaatcatatcttaccctgcaaggatgttgaaggaaaatatatttcaatgccacactcaaaagagctgtcactttttaacatagtaaatgggttttcagagagtgatgtaatattgttatttttaatacattctgtttagaaatgattttactttagttcaggtca

SEQ ID NO: 679841 - DNA, 3354 bp, Homo sapiens
ctgcagccttaaactcctgggcttcagcgatcctcccatttcagcctcctgagtagctgggattacaggtgcgtgacaccacgctcaactaatttatttattttttgtggagagagggtcttgatatgttgcccaggctggcctcaagtgatcatcccgcctccacctcccagaatgctgggactataggcatgagccaccacaccttgcttcttctctgttattatgtgagagtggctctttccaccaagccaaggattcagttattcagagattgagtcctggtcccatggagcccagaacaccagcagtaatccagctcatgcctctctctggggggcatgagaggacctgtggtgggaggtggaggccttagcagagggtcgagccgagttctgccacttggcccccatgaatttattagttgcatgctttgatacatgtctccgggttatcagcacaatcacactttgaaaaagtgttttgagtcccttgatttatctttttgtcattgttgttcagaatagttttcactcaaaggcaagaacatgcttttaaactgaccttttaaactttgtaaagcttatgccacaaagagacacatgaaaggaacaataagtacattctctatgtggaagcataattgaagtctcctctggtgatgagatctatgggaacccggcacaaagcatctgagctgggctcttgtgctgatggatggccctctgggtggaagtcccatgaccagagagagaggccaagctgtaccctacccagtggaaacattcccaccatctcagcgggctcatggccacctgcctaccctcaggagccaagggaaccacttgggagatttggcccttgtcctgcggtctgcaggaagccatggaagtttctgagcaggggaaggatgtggaaaatagaggcaagaccaaagtagagcatttgaagccagcagcctgggtttgaatcctgactctggcacttctaagttgtgtgaccttgtgtaagccacctaacttctgtgagaatcatctggcattgagcacccatttatggagcactggctacatgctggacacctgggatccagaggagaccaagagaatactgcagtcgtttcttcttccttgcttataactgttaccatgtgtattagtttaccattgctgccataacaaatkaccacaaagtggcttcaaacaacatgaatttattatctcatagttctggagggctgaatttccactgagctaaagtcaaggtgttgaaagggctggttgtttcttgaggatccaggggagaatttgtttccttgcccttttcaccttctagtacccacctggattccttggcttgtagctccttcctgtctgcaaagtaaatcactccaatctctgcttccatgttcacatcgccttctcttctccctttacctctttatgataaggattcttataattacattggtcccatttaggtaatataggataatttccttgtctaaagatccttcacttattcttatttgcagaatctcttttgccgtgtaaagtaacattcagggattaggatgtggatataattgagggccgttattcagcctatgacaccacgtgacattgcatttagcgtctgttcattttacgtatctgtgtaatgtgtttcttctgggcagtgaggtaggcctgccagatagcctcacatgtgtgctgggtgagtgagtgaataaatgaatgaatgtgttctttggagctgagaagaagctgatgttccacttgggctttagaggattaatgtgagtttgtttgccagagtattctagatggaatgagcagcttatgaaaagatatagagacatgagctgagacgttcagcttggaggaaatgcaggcagagtgtgatggcccagagtgagacgaggctgggcagtaggtggccagatcatggagagccttgcaggataccttcatgggcctggattttatttttataaggaagcagtaaatgtagttattgcccttgtctttggagttatcgcctgggtttaaattcctgtgctgccacgggatagggttacttgctgtgtaaccctaggaaaattactaaacatctttgaggctcagtgaaataagtgcttcataaacctgttctgagaagcagatgacttttgaggcttgcaaagcacttagcacagtgtgtggaacggtcaagggagcctttaggaatgtattggcattcttgctgttattttaatacatgtgattattgttattattgatggtgatgatggggactctttgaagaatttcagccaggcttcagtgtcgtggtcagatttgctttctaggaagatgactttggcagccatataaagatgtcaggggccaagggtgggtgacactaagggtcgggaaaccagttcggagcctattaaaataatctaggtgagaggtgaagaggcagagagcagaggtgggggttcaagagagatgttattggatgcaggatgttggagagatgtctttgctgctgctgttccctgcttgaaatggttcaaggaggattttagaggcttagtaccaatgccttagtccttgattttcagaaagggacactgaggcacagcaaggggaggatgccttgccttcatctccagatgaaacagtgacagacgggataggcagggtagaaccgaggtcctcagccctttgttgcagagcaggcggaggtgggagaagtgtggctggaagaggcttctgatggaagtgcagttcttcatgggtgggggtgctctgacacaaactcagtgtcgactgccccttccacatccctctaaccacccctctatgccttaactcctctttccagctcattcttccaccagtccccacaggaatgcctgtagaatcctggtggtgttgggcagaggggttttgtggttttgaattaaggcaaatgacttgactgagttgaggaggacacatggaggatgaggactgcctgggagggagggtgagggagttctgtgttctagcgccagtgaaagaaacctggagtctgaagaagtgtgtactcagagatttggtactgtgcgtcctctagctcttccattcacgccccttcatacatcttcaggaggaaaccaattcaatggagtgcaccagggcaagattacgattgttacttcaatcatatcttaccctgcaaggatgttgaaggaaaatatatttcaatgccacactcaaaagagctgtcactttttaacatagtaaatgggttttcagagagtgatgtaatattgttatttttaatacattctgtttagaaatgattttactttagttcaggtca

SEQ ID NO: 679842 - DNA, 3354 bp, Homo sapiens
ctgcagccttaaactcctgggcttcagcgatcctcccatttcagcctcctgagtagctgggattacaggtgcgtgacaccacgctcaactaatttatttattttttgtggagagagggtcttgatatgttgcccaggctggcctcaagtgatcatcccgcctccacctcccagaatgctgggactataggcatgagccaccacaccttgcttcttctctgttattatgtgagagtggctctttccaccaagccaaggattcagttattcagagattgagtcctggtcccatggagcccagaacaccagcagtaatccagctcatgcctctctctggggggcatgagaggacctgtggtgggaggtggaggccttagcagagggtcgagccgagttctgccacttggcccccatgaatttattagttgcatgctttgatacatgtctccgggttatcagcacaatcacactttgaaaaagtgttttgagtcccttgatttatctttttgtcattgttgttcagaatagttttcactcaaaggcaagaacatgcttttaaactgaccttttaaactttgtaaagcttatgccacaaagagacacatgaaaggaacaataagtacattctctatgtggaagcataattgaagtctcctctggtgatgagatctatgggaacccggcacaaagcatctgagctgggctcttgtgctgatggatggccctctgggtggaagtcccatgaccagagagagaggccaagctgtaccctacccagtggaaacattcccaccatctcagcgggctcatggccacctgcctaccctcaggagccaagggaaccacttgggagatttggcccttgtcctgcggtctgcaggaagccatggaagtttctgagcaggggaaggatgtggaaaatagaggcaagaccaaagtagagcatttgaagccagcagcctgggtttgaatcctgactctggcacttctaagttgtgtgaccttgtgtaagccacctaacttctgtgagaatcatctggcattgagcacccatttatggagcactggctacatgctggacacctgggatccagaggagaccaagagaatactgcagtcgtttcttcttccttgcttataactgttaccatgtgtattagtttaccattgctgccataacaaattaccacaaagtggcttcaaacaacatgaatttattatctcatagttctggagggctgaatttccactgagctaaagtcaaggtgttgaaagggctggttgtttcttgaggatccaggggagaatttgtttccttgcccttttcaccttctagtacccacctggattccttggcttgtagctccttcctgtctgcaaagtaaatcactccaatctctgcttccatgttcacatcgccttctcttctccctttacctctttatgataaggattcttataattacattggtcccatttaggtaatataggataatttccttgtctaaagatccttcacttattcttatttgcagaatctcttttgccgtgtaaagtaacattcagggattaggatgtggatataattgagggccgttattcagcctatgacaccacgtgacattgcatttagcgtctgttcattttacgtatctgtgtaatgtgtttcttctgggcagtgaggtaggcctgccagatagcctcacatgtgtrctgggtgagtgagtgaataaatgaatgaatgtgttctttggagctgagaagaagctgatgttccacttgggctttagaggattaatgtgagtttgtttgccagagtattctagatggaatgagcagcttatgaaaagatatagagacatgagctgagacgttcagcttggaggaaatgcaggcagagtgtgatggcccagagtgagacgaggctgggcagtaggtggccagatcatggagagccttgcaggataccttcatgggcctggattttatttttataaggaagcagtaaatgtagttattgcccttgtctttggagttatcgcctgggtttaaattcctgtgctgccacgggatagggttacttgctgtgtaaccctaggaaaattactaaacatctttgaggctcagtgaaataagtgcttcataaacctgttctgagaagcagatgacttttgaggcttgcaaagcacttagcacagtgtgtggaacggtcaagggagcctttaggaatgtattggcattcttgctgttattttaatacatgtgattattgttattattgatggtgatgatggggactctttgaagaatttcagccaggcttcagtgtcgtggtcagatttgctttctaggaagatgactttggcagccatataaagatgtcaggggccaagggtgggtgacactaagggtcgggaaaccagttcggagcctattaaaataatctaggtgagaggtgaagaggcagagagcagaggtgggggttcaagagagatgttattggatgcaggatgttggagagatgtctttgctgctgctgttccctgcttgaaatggttcaaggaggattttagaggcttagtaccaatgccttagtccttgattttcagaaagggacactgaggcacagcaaggggaggatgccttgccttcatctccagatgaaacagtgacagacgggataggcagggtagaaccgaggtcctcagccctttgttgcagagcaggcggaggtgggagaagtgtggctggaagaggcttctgatggaagtgcagttcttcatgggtgggggtgctctgacacaaactcagtgtcgactgccccttccacatccctctaaccacccctctatgccttaactcctctttccagctcattcttccaccagtccccacaggaatgcctgtagaatcctggtggtgttgggcagaggggttttgtggttttgaattaaggcaaatgacttgactgagttgaggaggacacatggaggatgaggactgcctgggagggagggtgagggagttctgtgttctagcgccagtgaaagaaacctggagtctgaagaagtgtgtactcagagatttggtactgtgcgtcctctagctcttccattcacgccccttcatacatcttcaggaggaaaccaattcaatggagtgcaccagggcaagattacgattgttacttcaatcatatcttaccctgcaaggatgttgaaggaaaatatatttcaatgccacactcaaaagagctgtcactttttaacatagtaaatgggttttcagagagtgatgtaatattgttatttttaatacattctgtttagaaatgattttactttagttcaggtca

SEQ ID NO: 679843 - DNA, 561 bp, Homo sapiens
tggaaatttgtggcagattaggtaggctttctatggaaagggacaccgagaccaagagcttcgtgacttccctaggcagcatgcagagctggtacaagggrctggtgacccaagtcctcctgagcctgtgtccccctgtgcagggggagacatcagcattactctttgccattgtcagagcacttccacagacattgtctcaagaatgtgcaccataagccaaggaaataggccaggtgggtcttcattattcttattttgcaaagaggaaactgagggcagcataaatgaagtggctggcctgagatcacagaatgaagacgaggttgatttaacattgttgttgattcattcattccattcctacttccaaaaaaagactggaagttgctttgaaaagtaaatgatgtcctcagggctctgctgtgcccccgcatagtcagcttgccctctcttgcctgtggacctttgcacgtgcttctccttttggagcgacgttcacttttctgattccttactgtcccttaggtttctgttcagacatcgctttctccaaaaacc

SEQ ID NO: 679844 - DNA, 521 bp, Homo sapiens
tgtttccatggtcacatagcaaggagtggcagagcgaggatttaaattaggcggtcaggccccgggacaccagctccaaaccagagttgggaggaggactcactttggatgcaaaatctaagggggtgccaaaaatctcagaaattagcaaaacctatcttttttaaaaatcagagtttatcagaaaaatccacaatgaacaaaataccaaaatgttgatgttttaaaaatawatatatatatatataaatttaagacatgcatctacatggctgcctccttcgcctcaccagatcctgactctgctccaaacctgctctctgctgctcttagcacagcacagttcttctgagtaagggatctggaattagagatccctggagtcccagtgtgctgctgacaagctgtgtggccttgaactggtcactcagtttctgagcctcagttccacatatgctagagggcagtaatcatagtactgtcccccaggactgttagagtgttcggggtgataatgccca

SEQ ID NO: 679845 - DNA, 625 bp, Homo sapiens
ccgtgcttcttcaggttaaaaaacaaaacaaaacaaaaaactgtcgtgttactgcagtgctcacagccattcactacctttctgtggctctcagtaaagcccagaacccttacaagttcctgccagcttcccggcccctccccaccctctgtccccattgtttcgcactcagccatatctaggactgcacaggtgcctctaaagtgccaaccattgggtcctagtggagagcggctggtccagatgtgtgtggatcattcatgtcagtggagggcctcagtggagggcccagcagtgccaggygcaaagtaggttgtggcacaaaagaatgcatcacctgccgcctggcctctccattgctctctggggtcctaggtgtatttgtgtttcgtaagagactggtgtgtgggtttgtgtgaatttggaggggtgagatgagcaggatggaaaccgaactattcaaagcctccaagacaaaaccttcaggaagtggaggcaagagatgggctctcatctgggaccctgaagcttgatctctctttgtctctctcctcactctacgcttaggtggaagggggcatcagtgaactggaacggctcagaccccatcctgtgaccgttggat

SEQ ID NO: 679846 - DNA, 949 bp, Homo sapiens
tgaagcttttcctggagacccagggaaaccttcatctcctacccacgtcttaacatttcatttctcatttgttatttcttgaagttgcatgatctctaacatgtgcagtttacttatttattgtgtttttggttgctctctttccctcaacacgagctccacagccagggcctgtaggctgtgttgctcactcacgtattgcctgatccacagtgcctggtatgaagttggcccaccacaracatttgctgagtgaatgcatgaatgaaaagccccctccacatgaggccctgaaaggaaatatgtgcacagcaaatgaaataaatgctgaataaggtcgcctttcatgactatctgggtccctgtgcaggcctctcctccctatctcattgcctcacaatagtgaatcaccagcaaatccggccaatcccctgccagacccgtggtccagacccaagtcttgatggcactagtcccttggaagccagccagagcacacctggggctggccaggtcaggagagcctcccctggaactggcagagccatatccaagggagcccggagctctgtccctggggaccctgcaggaagaagtggagttccccggcccccacacccatcaccttacttggggtgaaatccacagagagtaccccctgctctgaggagtggccacagcaggaggaggtttggccctccttgatgggggacctctgtcctcccagcctgcacttcagaccaggaaaagtgtttaaagataatacttgggaacaaatactagactgataaaagacaacagaagggaataagggactattattctttaaaactgcggaataagagaggcatccttggcccaagcctatgataatttcagaaaacattttgaactcaagaaaaagaaaacatggactaccaagcagccaggactttgtgtgagctacatg

SEQ ID NO: 679847 - DNA, 1261 bp, Homo sapiens
agcctctcttctgccctgtgatagcagcgtctcttctaccttccacctttgtgttgaatatttctcatttctcccctgggcttctgagttattctctcttcccttccccaggccattttaatctggtctcctggaagtaagaatcttgccctgcacctttctctccaaaaaatgaatctttttctagtactgagacgggtagattttttgaattttatatctgccccattgtgggcttgttctggggaaaaaaatgaggcagaagagggaaaaggaatggaatacaagctgggagcgtggctcatgcttgtaatcccagcactttgggaggccaaggcaggtggatcacttgaggtcaggagtttgaaaccagcctggctaatatggcaaaaccctgtctgtactaaaactacaaaaaaattacctgggcatggtggtatatgcctgtaatcccagctactcaggaggctgaggcaggagaatcgcttaaacccaggaggtggaggtcatagtgagccaagatcgcgccactgtactccagcctgggccacagagagagactctgtctcaaaaaaaaaaaaaaaaaaaaggaatggaatatagagctgaacatccacgaagcagagactagggagccatggaaagctcttgtgtaggaaatgaatgattagctgtgtgactccctgaacacgttgttttaattcccgggaccttcactttctcatttcttaattaatgggttgagctttctaatctataaagactctcttgggcctaaaactcaatttgttgaagagaaaggaggtggcaaagggagggtggcagtgtgcaggatggattaaggacagccagagttatagagcgctgataaagattgtcataggaggccagtcaccaggggatggtgttaggactggatggaggtggtggccagaaagatggagaagaaagaaaagatatataagagacattttggccaggcgtggtggctcacrcctgcaatcccagcactttggaaggctgaggcaggtggatcaggaggtcaagagatcaagacaatcctggccaacatggtgaaactccgtctctactaaaaatacaaaaattagccagatgtggtggcacgtgcctgtagtcccagctactcgggaggctgaggcagaagaatcacttgaacgcaggaggtggaggttgcagtgagccaagatcgtgccactgcactccagcctggtgacagagtgagactctgtctcaaaaaaaa

SEQ ID NO: 679848 - DNA, 832 bp, Homo sapiens
tcattgtcgaagccatcgagttgcagttcctggtattcttccccaacacgcgcatactggtctaaaatgtcaataggagactggtgacggcccccacagctgacactagacgtgacccagtgctcaggaccataggcacctgttgaaagaagacaacacttcaatcctcatggttcaagggtcagggatgaaatgaataaatcttaggaagctgagcactgcatctctcaacatgtccccaatccaaagaggtgaatgtactgaaaactatgaatcaaagccattggcctgatgtgacaagaagatttcagaaaagatgttacttaagttagttttgcttcttgatttacaatcaaacatttgctaactttatctttaatcaggttaagagagttgtgtagaagggctattagggttgtccatatttctgacaatttttaaatgtttcctaaaataagcagagcatttattcacaaaaaaagcaccttcatcgagttagcatgttttgctattgtgggcaatatcctaaatacaactttcttcttagcccataaaagactgtaaacatgaaaaagggaaaaaaaattaaaggcaacagaaaactagatgagaggcattacaaatcatggaggcaataaaggcaggtttttccttyggctaattgtgaaagatttttcagtttggccctcatttgtacacttgagtgttaagacactcatctctccttttcaatccttctctctcgtagaaaatgcaggtataaagttaccttcagactggactctgtactcatataaataaagaatttggggggacatatgccacagaaata

SEQ ID NO: 679849 - DNA, 1223 bp, Homo sapiens
aagaaaagaatcataaacactgtgtaaattcaacaaatcatgcctgtgagccacaatggggcaaagtgcaagtaaccactactctaggccaatgtaagggttcattggacaaccagatgtctgctaggtttgtgcctattttggtgcttttggggggcaacattatgaacttcatatctaagcacagcaaaggcagasagaaagccaaaattaccaggaataatgggcacatgttgagaacaaaaaaagaagcatggatagtgaaaaattgaaatggtaaaaaaaaattattctagtacatgaagtaaatcagcatctggactactggtatctctgcagaacttggccttgcctaggcctgggcttttgggtcattctctttgtgtcactctgaataatgaatatgtgggtttataagcaccaagtcagagtatagcctttttacaagtagaggagttcaactctttttggccgttatttgtgggaccatgacagtgaggttctagtgcacaggagaagattgtgtttattatgcttaacacagaaactagtaccactcctggcatcgaatagatgttgaatagatgacaaaccgttcttcaatactaaaatgtaagatgccaggtttgaatttggaaatatacaccaagatttctctattttgggaagaaatatcaaactctcaaatttatcattcttatagagagcaaaaaaattaaaaaatgagatctaactagaatgccaaattgaagtaacaattttttttatttgcattgcatgacatagtgagaattcaagcatataagcacgtgtgtgcttacaagaaagacaaaggggccgggcgcagtggctgacgcctataatcccagcactttagaaggctgaggcaggagcatcacttgagcccaggagttccagactaggctgggccacaaagcaagaccttgtctctacaaaaaaataagaaaattagccggacatggtggcctgcacctgtagtcccggctactcaggaggctgttgcaggaggatccccttgaacccaggagttggaggctgtagtgagccataattgcaccactacacttccgcctgggcaacagggagatttgtatctaaataaataaataagaaggacaaaggaagcagcttaatacagctgctatctatgtaaaattatgtttttgtttgtttgtttgtttgtttgtttgtttgtttgtttt

SEQ ID NO: 679850 - DNA, 917 bp, Homo sapiens
attgccatcaagccattcctttaccagtatacattctgtgcattagtaccagtggaaacttgccaattttggctttaaataacccttacggcaactctcttatttattcatgtgatttttatttctctctttactgccctggttgaaggtttatgcccttgtaaatttttcatttgaaaagttccatctgggtggaccctaattttcccccaaaatatgttgagctctgaaagataatttttctaaatacctcgtgtatgagatgttttattcatctccacttatgaatggagacaaattgcccttcctttctatttccctagctgtgccatttatttgagcagttatgcctcagcacttattttttgtaacgtgaagatcacattasaaatgtttttttgtttcctctcttgctttcccatgaaggatagaaaagtactgctactgggatcctgggatgatatctagtgtttttataaaatagggcatattgtaagtgctatctcttgtaaataagtgattcagatcacttggctttttagcatgttcaactaactggtagtataaatttttaaaatttttaaaaatcagattttaattttacatgcttatgagatattttgatgtatttccttcattttcagtgaccattctacataatgtgaaactgtataacaatgttcctagaaattttttttgtacacttaaacaatttttttttagaggagcaaaaagagtctagtctggctattttgcatatcaattcctgttgagaactagatataataaagactcatatccagcatccatagcttttaacatggtttgtaaatgatatttaaataatgtaagtcattggagagaaagattgcatcaaaaatgttctcaaaacaagattatattttaaagtgtgcaga

SEQ ID NO: 679851 - DNA, 2193 bp, Homo sapiens
cccacacatcattcaatagactggtggatttgcttttggacctaatgcaccaacactcctgtttcaacgatcaacatggctcgtgtgcaactggccagttcattatctacccacccacgggcagagtccaagcatccggattcttcttctacagaatccaggtgcttcctctatgccatccactgttctaacactgagactccagaggccacactgtctctgaggctgacacccccaacaactgctctcacttggtgtctttgggtgtgatttgagggatatctggcaacggctggagattgttttggtagttgcgaccaggggagtggggctgctggcatccagtgggcagaggagagggatgctgctaaagctgcagtgcacaggacagcccctccctgccctccaacaaagcagtatctggcccaaaataacagggcaaggttgagaaatcttgctctaatgaaatatgctaagacctacggcagaggtagcaagacaggaagccaaatgaaggaacgattaacccccagggaggaggagggttgggaaaaaattcccagaggagatgcttaatacaatgaattgattgatgaacgatgggtgggaagggtttcccacagcagaggcaggggaggaaagaggagtttctggcagcgaggtgcgagagcgcttggcaggtttgggaagcttttactgggtatgatgcggctggagggcctggcactccttcttttcattcattctacacatccgctgtcatcttattttcattacttatttgctgagcaaaccttgtcaccaagcagcatggaatggtcagctctggccctggctggatcatcctcgattctgaatctgtggtctctgcaaaggcgggatggggttgagcaaaaggcacccatagagctgcacagagaggtgtgaccacgtgaaaacacaacagcactgtgaaaacacaacagtactttaaggttttcagcggcatcatctgaaaaggttacagcacgaggtgtgagatctccttgccgggaactgttaacgaggagttctctgggtggcaaatgaggagaatggatttttaagaatgcctgagcttctcaaagttggacaggaatgcaaacacattaaaaagtaatgctgggaaaacataattctgataatgtttgcttctttaaaaacaaaaacaagcctcgattgtggtgttggttgtttttaaatagctgtattgcttgctgagcccatcttcgcctgtctccctcccatgtccctctctgtgtctgcttctcttcctctagcctccccatctccgtctctctcctatcaagtggctgggctgtgatgtgtgcatgcttctctttgtctgtatttttgtgttgctttgcctgcgactgtcattcatgccctctcttttacggagttttgatttttttttccttctttctagtcacctgtttctggctgcttctctccccctgtcctacttcttgagccccttcctcctccttccccttcagcctctctccaagaaccggccacagcatacaactaaagagcatttgtattactagttgtatttactggagagagttacatgctccccattcttgatttttaaaagcaaatgacagaggcattttctatttttctctcccaaaagctccctgaatgaagctgcattttactttcatcttcctccattgaattattttttcattctgtaggtcattctcttgataggaaaaaagataagttctctactagaattttacagtaatttacagaataggtggcccakgtgatgtgcgatgtgccacggagcggggatcagggggaggctgcagcgtggctctgggctgggggtgccccagggctccacattgagggcttttcatgttgaatttgatttcagtggagccaagacctgctttgggtttaacagatgcagctctggagaaatatctacagatgcctaattcatcaccgtggattccctcgccttcaatgcaggctgtagtggctgaagagagacagaaaatgattgaagatgagtgtcagggagcaaatcttttatatcttaaaaggagagagattttcagcctggcaggaacattaaagtggctccaggaaacctggtactttactgtcttttctatgcaggatacattttagcttggttagcagctccagctt

SEQ ID NO: 679852 - DNA, 2193 bp, Homo sapiens
cccacacatcattcaatagactggtggatttgcttttggacctaatgcaccaacactcctgtttcaacgatcaacatggctcgtgtgcaactggccagttcattatctacccacccacgggcagagtccaagcatccggattcttcttctacagaatccaggtgcttcctctatgccatccactgttctaacactgagactccagaggccacactgtctctgaggctgacacccccaacaactgctctcacttggtgtctttgggtgtgatttgagggatatctggcaacggctggagattgttttggtagttgcgaccaggggagtggggctgctggcatccagtgggcagaggagagggatgctgctaaagctgcagtgcacaggacagcccctccctgccctccaacaaagcagtatctggcccaaaataacagggcaaggttgagaaatcttgctctaatgaaatatgctaagacctacggcagaggtagcaagacaggaagccaaatgaaggaacgattaacccccagggaggaggagggttgggaaaaaattcccagaggagatgcttaatacaatgaattgattgatgaacgatgggtgggaagggtttcccacagcagaggcaggggaggaaagaggagtttctggcagcgaggtgcgagagcgcttggcaggtttgggaagcttttactgggtatgatgcggctggagggcctggcactccttcttttcattcattctacacatccgctgtcatcttattttcattacttatttgctgagcaaaccttgtcaccaagcagcatggaatggtcagctctggccctggctggatcatcctcgattctgaatctgtggtctctgcaaaggcgggatggggttgagcaaaaggcacccatagagctgcacagagaggtgtgaccacgtgaaaacacaacagcactgtgaaaacacaacagtactttaaggttttcagcggcatcatctgaaaaggttacagcacgaggtgtgagatctccttgccgggaactgttaacgaggagttctctgggtggcaaatgaggagaatggatttttaagaatgcctgagcttctcaaagttggacaggaatgcaaacacattaaaaagtaatgctgggaaaacataattctgataatgtttgcttctttaaaaacaaaaacaagcctcgattgtggtgttggttgtttttaaatagctgtattgcttgctgagcccatcttcgcctgtctccctcccatgtccctctctgtgtctgcttctcttcctctagcctccccatctccgtctctctcctatcaagtggctgggctgtgatgtgtgcatgcttctctttgtctgtatttttgtgttgctttgcctgcgactgtcattcatgccctctcttttacggagttttgatttttttttccttctttctagtcacctgtttctggctgcttctctccccctgtcctacttcttgagccccttcctcctccttccccttcagcctctctccaagaaccggccacagcatacaactaaagagcatttgtattactagttgtatttactggagagagttacatgctccccattcttgatttttaaaagcaaatgacagaggcattttctatttttctctcccaaaagctccctgaatgaagctgcattttactttcatcttcctccattgaattattttttcattctgtaggtcattctcttgataggaaaaaagataagttctctactagaattttacagtaatttacagaataggtggcccatgtgatgtgcgatgtgccacggagcggggatsagggggaggctgcagcgtggctctgggctgggggtgccccagggctccacattgagggcttttcatgttgaatttgatttcagtggagccaagacctgctttgggtttaacagatgcagctctggagaaatatctacagatgcctaattcatcaccgtggattccctcgccttcaatgcaggctgtagtggctgaagagagacagaaaatgattgaagatgagtgtcagggagcaaatcttttatatcttaaaaggagagagattttcagcctggcaggaacattaaagtggctccaggaaacctggtactttactgtcttttctatgcaggatacattttagcttggttagcagctccagctt

SEQ ID NO: 679853 - DNA, 690 bp, Homo sapiens
gcgtcttccccagcttccagaatgtagccatcaaagaagggagcataccaagactgcataaaccctaactgtcaggaaagtaaagaactccacctctagctatctaaaccccaatcgcaaaaggacacaatgaaatgtggtgaaaaagaactgaaggccaggtgcgggggctcacgcctgtaatcctaacactttgggaggccaaagcaggaggactgcttgatcccaggagatggagaccaacctggacaacatagagggaccctgtctccacaaaaatgaaaataaaaataaattagctgggcctggtggctcatgcctgcagtcccaagtacttgggagactgaggctagaggatcatttgagyctgtgagattacagctgcaataagccatgactgcaccattgcactccagcctaggcaacaaaacaaacctgtcttcaaaaaacgaaaagaaaagaaaaaagaaatggagacattagtgagtgttatcagctataatgtgagacactctctaggagaataaaagggggagggatcaggccacactgaggaggtagcctggagtatctgttgctccttgtaaacttaggcagtctgccgtaaatttcaccgtatttccagaagctggaaaccatcattctcggcaaactatcgtaaggacaaaaaaaccaaacaccgcatgttct

SEQ ID NO: 679854 - DNA, 2919 bp, Homo sapiens
tgcacatttgacgtctactattcaactaatttgagagaaagtatctgaatgcaatacccatgtggtggccctgatttctttaactggaagggggatgtttctcatctaactagctaagttgttgcatcatcaagaagacatgaccaaattccaactttgtacataagtggaccagttttgagaggctacgaagctcaaccaaggctaaatcattatatgatgtccctaaaggccgtcattaaattttggttgccatgccaatttgtttctctgtagctgctgagctacaagataaaatttcattctattttgactcatcacatctttagaaaagctgtgagatcatgttattaaatcctggtgggcaaccaagaactgtgaagacttttaggaaagtgacttcctggttgaagaatggagagtgtctactgttagcaataatagggaggatatgagggaaaactaaaccttgcttgtttcccctgggaaatgtaagatctagttgttcatatttaggagaaagctactgaagttttggattaaacctgggccttgtctgcatggctcactcaggttagtaactacttaaaggaaggagtagaccaggcacagtggctcacgcctgtaatcccagcactttgggagtctgaggcaggtggatcatgaggtcaggaggatcacgagttcaggagtttgagaccagcctggccaacatagtgaaaccccatctctactaaaaatacaaaaattagccaggtgtgatggcacgcacctatagtcccaactactcaggaggctgaggcgggagaatcgcttgaacccaggaggcagaggttgcagtgagccgagaccgcaccattgcactccagcctgggtgacagagtgagactccgtcttgaaaaaaaaaaaaaaaaaaaagaaggaaggagtagtacctggtctagggtwatggttatttttatgggtcaacttggctaggccagagacccacatacttgatcaaacacatctggatatggctgtgaagcaatttaaatcagctgactttgagtaaagcaaattaccctccataatgtggtgggtctcatccaatcagctaaaggttttcagaaaaaaactgatgtcacctgagaaaaagggaactctgtcagtagactgcctttggattcaaactgcggtatcaacttttccctgagcttctggcttgcttgcctactttatacactttggactgtccagcttccacaatcacataagccaactccctaaaatatttatttcaatatagatagatacctgtatagatacgtatatatatccatatatgtaaaaatctatatatgggcatatagatatgtatgtatatatgtgtacattttatacatatacagcctattggttctgtttctctggagaaccctgactaatacacctagcttctgagagggcattactaaatattgacaacctagatgcactaggtccagagggtgagttgcccatgtctttctcaatttcctctgggtggatgtcagatggtacatgttttgtaattgtctttgtaaaagggcagagactggcccagcccatgggcctccataaagtgacaactcacccagcactgagaacgatttgctgaatttacattaaaaacgctggagtcaccaaaaacaaaaaaaaaagcaaagatagacttaaattctgcctcctttcaaaaagtatgagttctgtttttttatgtttttaattttattttaagttctggggtacatgtgcagatggtgcaggtaaagcatgagttcttaaggcactgaaaaaatctatgaaactttggaaaaacttgatgtaatgtaatttttattttgtaaaaacataaattttcatataatcccaaattactagagaggttgcttcttaaatttctaatttcgtggtgcaatactttctttttttaagataacttcctgcatcaatacagaatgcatttggctgcaagtatccaaccaatatgctgcaaatagattatgggcgtgcaatgactctatcactcccatcaactcttagatcagcagagagtctggattgtccagattacctaggccaattacctccaggcatgagctcttcaaagggctcttcaaagggctgctccaggccgggcgcggtggcttatgtctgtaatcccagcactttgggaggccaaggcaggtggatcatgagctcaggagttcaagaccagcctggacaagatggtgacaccctgtctctactaaaaaaaaaaaaaaaatacgaaacttagctgggagtggtggtgggcgcctgtaatcccagctactcaggaggctgaggcagagaattgcttgaacctgggaggcggaggttgcagtgagctgagatcgcaccactgcattccagcctgggtgacagagtgagactccatctcaaaacaaaaacaaaaacaaaaacaaaaaacaacaacaacaacaaagggctgctccagcagactaaagattgatggtgtgttgcatggtcctcacgggcagcaaaaaccaagaggggcatccagccatttgctgttctatgatggacatattacatacagtcaagtatgccatattatctgaacaactacttaatggccagtaacaaggcacactgtgcactgctgcgcatcataggcagaagctcacagagctactggtagcattcctgttccaggtgcccagagagcatagcatatataggtcaaggtacagctgcaaagggttggctggtacgctgagcaggaggctggcaagcatgtctcaggcagtggcctccaaccttcacatttgttggatacttctctttgatgatgcttatatgccctttagtagtatggaagtgagtaacagggtaactcttttaattactaatgca

SEQ ID NO: 679855 - DNA, 637 bp, Homo sapiens
cacacctacagtgcattttatcctttaaattatgttaaatcagtagtcaaattttacttaggaattaaggtttcactttattgatgccttcctttaagtaagctgcatttcattgtggtattggaatgagatttattaacatttttattctcccagactttgccacctttccccactcctcactctccacctagagagtgttagcttggaccactcagctttcctgccctctatggagaatttcatcttgccatttcaatgcctctcctcatattttctgggcatcttcagggataccctcagagtaacctgaatatcctctgagccctgatagttatgggtcccaggtaaccctaatttcccagtcgtcaaaccaagcacagtagcatcaacagaatacctctattgtccattaaacaacagcaaggaggatagaaaccagtaacttcatataatcagaccagctgcttgcaattctgaagaacatctgctaacaagtctcatactttctttttgataggccagcatgtgttgttaagtggtctattcaaatcttaactctggccctaataatatcccctgttaaaawagcgagaatatcaaagcagaaaatatgcaaaaaaattactagatatga

SEQ ID NO: 679856 - DNA, 628 bp, Homo sapiens
ccagtacacattcaacaaatgcttattgaacaaactcatactactttgtagcatccataacaagttccacagtcttctgtatatgaatggtattcagtaaatacacattggaaaagttatgacctctttattaaataaagaagaacatcttactcaaaatataacagtaaaagcatttaatgttttaatgcaaaacctcaaatatgggtggccaaaagaaatcatggtaaggtgacttccctaaaataagacccaccaaatcgctaagatccaaaataaaaatgagagatttttattaatatatttaatcccayctaacatctttcccactcaactttgaaaacaacaggaagtagaagaaaatgccaagttattagttggtctaggacagtcttagaaacaattttaaatttataactccaaatctgaagactcaagtatttcttctaaaaatatttatttagaaataatttaataccataaagatatataaaacctttttttcaggtttacaatttagtgtagggtctgagattcaaatagttaaaaaaaggaaagaaaaaaaagaagtaggattttctctttcatatatttattctaataggtataattttattagcatctgtct

SEQ ID NO: 679857 - DNA, 628 bp, Homo sapiens
ccagtacacattcaacaaatgcttattgaacaaactcatactactttgtagcatccataacaagttccacagtcttctgtatatgaatggtattcagtaaatacacattggaaaagttatgacctctttattaaataaagaagaacatcttactcaaaatataacagtaaaagcatttaatgttttaatgcaaaacctcaaatatgggtggccaaaagaaatcatggtaaggtgacttccctaaaataagacccaccaaatcgctaagatccaaaataaaaatgagagatttttattaatatatttaatcccatctaacatctttcccactcaactttsaaaacaacaggaagtagaagaaaatgccaagttattagttggtctaggacagtcttagaaacaattttaaatttataactccaaatctgaagactcaagtatttcttctaaaaatatttatttagaaataatttaataccataaagatatataaaacctttttttcaggtttacaatttagtgtagggtctgagattcaaatagttaaaaaaaggaaagaaaaaaaagaagtaggattttctctttcatatatttattctaataggtataattttattagcatctgtct

SEQ ID NO: 679858 - DNA, 569 bp, Homo sapiens
aacacaaatgagacacaatacctaccactcatgggccactatgtaggaattttaacagtgatctctaaggtaggctgtaataactgtggcttcccctattttaataatgcattgtaacaattgttaacagtgattaagtttcgcaaaagcacgtgctgaatcagttaagaaaaacttaggatgcaagctgaacaagagactccagagagcctaaaagatgatggaacatatgcatatataagaatcacaagtaacacaatgatacacaggtctggcgacgatatttcaaacgtatgcaagctcatgtgagaagcagaaaaccaatcaaggacacgctttaagacacaaggaggacacgctttaagacacaagtcctctcccttagtctcgcccacgctgggaagctggtggggtcgtgtttgaatagcaaagrtgtgcgaacaaaccaaattaggaaaactgcagagtaccttagcctttctagacgctgcaagagccttctctcctccctgtccaaatactaatcctgccgggagtgaggcctggaaggaggcccaggggaagcggga

SEQ ID NO: 679859 - DNA, 569 bp, Homo sapiens
aacacaaatgagacacaatacctaccactcatgggccactatgtaggaattttaacagtgatctctaaggtaggctgtaataactgtggcttcccctattttaataatgcattgtaacaattgttaacagtgattaagtttcgcaaaagcacgtgctgaatcagttaagaaaaacttaggatgcaagctgaacaagagactccagagagcctaaaagatgatggaacatatgcatatataagaatcacaagtaacacaatgatacacaggtctggcgacgatatttcaaacgtatgcaagctcatgtgagaagcagaaaaccaatcaaggacacgctttaagacacaaggaggacacgctttaagacacaagtcctctcccttagtctcgcccacgctgggaagctggtggggtcgtgtttgaatagcaaaggtgtgcgaacaaamcaaattaggaaaactgcagagtaccttagcctttctagacgctgcaagagccttctctcctccctgtccaaatactaatcctgccgggagtgaggcctggaaggaggcccaggggaagcggga

SEQ ID NO: 679860 - DNA, 569 bp, Homo sapiens
aacacaaatgagacacaatacctaccactcatgggccactatgtaggaattttaacagtgatctctaaggtaggctgtaataactgtggcttcccctattttaataatgcattgtaacaattgttaacagtgattaagtttcgcaaaagcacgtgctgaatcagttaagaaaaacttaggatgcaagctgaacaagagactccagagagcctaaaagatgatggaacatatgcatatataagaatcacaagtaacacaatgatacacaggtctggcgacgatatttcaaacgtatgcaagctcatgtgagaagcagaaaaccaatcaaggacacgctttaagacacaaggaggacacgctttaagacacaagtcctctcccttagtctcgcccacgctgggaagctggtggggtcgtgtttgaatagcaaaggtgtgcgaacaaaccaaattaggaaaactgcagagtaccttagcctttctagacgctgcaagagccttctctcctccctgtccaaatactaatcctgccgggagtgaggcctggaaggaggcccmggggaagcggga

SEQ ID NO: 679861 - DNA, 872 bp, Homo sapiens
tattagctaaaaattagtttgcttcttactatcatcaagtgatagcaattctaaacaatgtcgctcataaattactcctcctgctcccaatcctggtccctgtcccctcttgtttcatgtcttcatctgcaaatcgtggatttaagagtgctcattcttcccatatggcgcacaaagtcctcggtaacttttgattctctaaacttagaagcagtaggtggcgtgcgtcaccaatgtacactgtgcgttcctggaggagtcaagcagacccactaggaaagaggacgagacacaaggttaactgccccctcacctccgcgccactatttagaagcccaggaggtgcctcatccctgaagtcaacaggcttgacccccctagtctagaatgcctccacagtgtcaagggagagggcaggatgggaagcggatgttagaaaagttcaacattaacaaggcagggtgtcctgacacaccacttaatgaaaaaatgcaggcaaaacctactgtgtgtgtgtgtgtgtgtgtgtgtctgggaagagagagagagattcatctggaaagatgttcatcaaaatgtgaataacttatgggatttgagtgtacttttatttttactttatatcttacagatttgcaaaaaagaaaccttttacattttaataaaataagtgatacaagaaatctatcatttatttcattaaattttttttyaattaaaaaaagacccagaggaaggatagagagagtggagcagagatgaggccaggagggaatccaggtggagacaggaaaactggagacagtcggtgaggagagaggcctgggtgttggcagagggtggcgtgccctgggagtcacctcctggcaagg

SEQ ID NO: 679862 - DNA, 1197 bp, Homo sapiens
ctagaaaaaaactaggtgatccccacagttccagcatgcctcaagtgatgctayacacacacatacacacacacgcacaaagtccagggacacccacccctaaactgtccccctgtacaaagttctgggactctccttgcaatctggccctttcccactgctccaggaaacgtcccaatttgtccctctacataccctggggcatctccacgaaaaccctctctcccccatgctgagatgcccttacagccagtgccttcatccgcaacccatgacaaacctaccccgaacctgttccctcccacacagccccaacttcttccctacacacactactggaacgcccccctcaatctagcctcccccacataactctctcccaaattgctccctctcactctgactgcagacactcctccagccagcctcctcccacttggctgtaggtggtctctgaaatggccaaggcctatttcctcccttgaaactgagggtacccccacagctgttcttgtccctgacatgcctagagcattctcataggctgtttcttcccccaaagaccttggacagctccataacctggccccaggcacacaggtgtgagatgtccccacagcctggctgcccccggccagtcccaaaatattcccacctcctgtctcatcctctgaagcccccactccccctgtggactgtctcctcagcacggtcagacctgagacacccacgtccgcttctgctcctgaggacccagtcacccacaccgcagcaggcgcacgccctgccatgggagctcctacagctgcaagcacccccagaggcagaggcaccctcccggcctcgggaatggctccaccgtgtctccttctccacaggcctgagacaccttcagagcctgtctccccctccacaggtccaggaaccctggcagctgtgggcccctcagtggccagtctccttccccatatgcctgagccgtcatccccagagcccgtatcccctaccattggccctggaagcccgggagctgtgggcactcccacggccatggaacctctagcagccacaggcctcccagcagtctgccttcttccagacaggccagagacatgctcaaagatggtcccctcccccacagaccccagcagccccacagccatggacactcctgtagtctgtctgcctcccaacaaa

SEQ ID NO: 679863 - DNA, 1258 bp, Homo sapiens
ggctatttaaacttaaatttaaattaattgaatttaaataaaattaaaagtatttctcgatcacactagccacatttcaagggtttgataagaacttgtggcttgtgcccactttactgacagcacagttgtagaacgctgccattgttgcagaaaggtctactggactctgccgccctaggtcttctttgccttcccaggcctgaaactccggcctggatgtaaacagcatttcctctctggccagtttcccattcttccctgatttttagtctcccctggttccyagtctgaggagtctgagtctgggctgctctcttctgagtgtttcagcccctctgccctgctcacctcttgaccctcatgggtgaagtcaggctgccacgcatttttccaagctcttctcccagcccatattcctcagcaagctgttcagctgagtactgtcttgtgcttccccagcctaggagtctaaatggcagttcttcaaatgaaacctagattttctctccccatttgaaacgaaagctccaccagagggtttgagacatgcttctgccccttatggggtgattcaaataactttgggcaaatcactgaacccttcagaaaagcacagaaatacatcagaaggacatgatgaagtttccataatcctacaaagttcccttcatggtccttggtctacattctcttcctgtgagatggtagtcagaaatcctcctggcttctccagtgaaggcatgccacatcttattgaaggctctacctgtcaaccctttcctttcacatcactcctcttccctgccttaacatgcactccagtctgactcgagtctcacatatgccacgtgttcctctggggacccgtggaggccttgccttgcccagaagtcatcctgggtgggacggtgctcctggtttgtggagagctgagtgacagttcttggccaggacagaggctgctcctgtcccattggctcagctgtctttttgctgcctgtttgctgcttcagaacacagtgtgtccagagtcctgacatcactccctagcattagacccacatcaatgtggatgtctattaagaagaatgctgtgccttctccatccagcctccttaagaagggagactttccacaaagatgttgaaaatcatggtgtctatgtataggatccctttgatgtgagtgttgggcattgcattgggtttcttgtccctgcctctcacaacaagcatgcaagctcagtagtattgat

SEQ ID NO: 679864 - DNA, 1258 bp, Homo sapiens
ggctatttaaacttaaatttaaattaattgaatttaaataaaattaaaagtatttctcgatcacactagccacatttcaagggtttgataagaacttgtggcttgtgcccactttactgacagcacagttgtagaacgctgccattgttgcagaaaggtctactggactctgccgccctaggtcttctttgccttcccaggcctgaaactccggcctggatgtaaacagcatttcctctctggccagtttcccattcttccctgatttttagtctcccctggttcccagtctgaggagtytgagtctgggctgctctcttctgagtgtttcagcccctctgccctgctcacctcttgaccctcatgggtgaagtcaggctgccacgcatttttccaagctcttctcccagcccatattcctcagcaagctgttcagctgagtactgtcttgtgcttccccagcctaggagtctaaatggcagttcttcaaatgaaacctagattttctctccccatttgaaacgaaagctccaccagagggtttgagacatgcttctgccccttatggggtgattcaaataactttgggcaaatcactgaacccttcagaaaagcacagaaatacatcagaaggacatgatgaagtttccataatcctacaaagttcccttcatggtccttggtctacattctcttcctgtgagatggtagtcagaaatcctcctggcttctccagtgaaggcatgccacatcttattgaaggctctacctgtcaaccctttcctttcacatcactcctcttccctgccttaacatgcactccagtctgactcgagtctcacatatgccacgtgttcctctggggacccgtggaggccttgccttgcccagaagtcatcctgggtgggacggtgctcctggtttgtggagagctgagtgacagttcttggccaggacagaggctgctcctgtcccattggctcagctgtctttttgctgcctgtttgctgcttcagaacacagtgtgtccagagtcctgacatcactccctagcattagacccacatcaatgtggatgtctattaagaagaatgctgtgccttctccatccagcctccttaagaagggagactttccacaaagatgttgaaaatcatggtgtctatgtataggatccctttgatgtgagtgttgggcattgcattgggtttcttgtccctgcctctcacaacaagcatgcaagctcagtagtattgat

SEQ ID NO: 679865 - DNA, 1258 bp, Homo sapiens
ggctatttaaacttaaatttaaattaattgaatttaaataaaattaaaagtatttctcgatcacactagccacatttcaagggtttgataagaacttgtggcttgtgcccactttactgacagcacagttgtagaacgctgccattgttgcagaaaggtctactggactctgccgccctaggtcttctttgccttcccaggcctgaaactccggcctggatgtaaacagcatttcctctctggccagtttcccattcttccctgatttttagtctcccctggttcccagtctgaggagtctgagtctgggctgctctcttctgagtgtttcagcccctctgccctgctcacctcttgaccctcatgggtgaagtcaggctgccacgcatttttccaagctcttctcccagcccatattcctcagcaagctgttcagctgagtactgtcttgtgcttccccagcctaggagtctaaatggcagttcttcaaatgaaacctagattttctctccccatttgaaacgaaagctccaccagagggtttgagacatgcttctgccccttatggggtgattcaaataactttgggcaaatcactgaacccttcagaaaagcacagaaatacatcagaaggacatgatgaagtttccataatcctacaaagttcccttcatggtccttggtctacattctcttcctgtgagatggtagtcagaaatcctcctggcttctccagtgaaggcatgccacatcttattgaaggctctacctgtcaacyctttcctttcacatcactcctcttccctgccttaacatgcactccagtctgactcgagtctcacatatgccacgtgttcctctggggacccgtggaggccttgccttgcccagaagtcatcctgggtgggacggtgctcctggtttgtggagagctgagtgacagttcttggccaggacagaggctgctcctgtcccattggctcagctgtctttttgctgcctgtttgctgcttcagaacacagtgtgtccagagtcctgacatcactccctagcattagacccacatcaatgtggatgtctattaagaagaatgctgtgccttctccatccagcctccttaagaagggagactttccacaaagatgttgaaaatcatggtgtctatgtataggatccctttgatgtgagtgttgggcattgcattgggtttcttgtccctgcctctcacaacaagcatgcaagctcagtagtattgat

SEQ ID NO: 679866 - DNA, 609 bp, Homo sapiens
catttttgtcccaaatggcgaaatataaatcacttatttgtaaattctggaaagagacctcacacatttataagctttgccaactatagatcagtaacaaccacattacaggatcacagagtcctgaacattaagtgaaattaaattcctcccttttgctttttccaaagccacgactctaaacctggaaagacagaagtgacggtgatttttgtagctgtacagataaagatgtratgtaaagttaaggcacacaccctcagtgtcacaaatctgggtagtataacaaggcatgaattcaggaccctgattctacagtccagaggacaagtcctctaacatacaggaaaataacatgttaagatttaagcatacatccaaggaatatcaaaagaaagaaaagtttacatttttgccattaattaaaattcagaacctggaatgtttatttaagcagagatgaacattccttatcttacccaaactctaaatcaaggaagtggcagtctttggccaatgaattgggtaaatactgtgaagttttataagctcaaagaatagtatcacttatttcctccatccaatcctcttagcaggaatataagagaa

SEQ ID NO: 679867 - DNA, 447 bp, Homo sapiens
tgtgaaattcaacatgcttcttctccagtgggaacctcatctagatacgcatgcaaaagacatttcaaagtatcttaggaagggtggggaagggaaaacacaggagggtgaaataaataatcatttcaggattttccaagtaagaaacttcacaggaagtgggttccaaagggagtaggttgaggtaacttgccactctgaaatagaatgccaacttattaattcagttcaacgaagggctcagctctgggaaggtcagcttgctaagatctcattcactacggacttcagtggcccaggttccttttcttcatcttcttcccctattgtttcctggtataatttcatgagctttgtgattattattattattattattattatttagaaggagtcttgctctgtcgcccagactggagtgcagtgtcrcaatctcagctcactgca

SEQ ID NO: 679868 - DNA, 639 bp, Homo sapiens
atggcagaaggcaaggaggagcaagtcacatcttacatggatggcagcagtcaaagagcaagcttatgcaaagaaactcccatttttaaaaccatcagatctcgtaagacccattcactatcacaagaacagcacaggaaagacctgtccccatgattcagtcatctcccactgggtcccttccacaacatgtgggaattatgggagctacaggatgagatytgggggggggacacagatccaaaccatatcagtgacaaaactctaaagcaaagcaggaaatcactttttataagagtccagattgaaatatctttgtggggagagggaggagatgtacagagagaggctggcagagtctcttttttgctctaggtggcaggttcaagggtgttcagtttattttggaagcagtgcagagaagggagccagactagaaacagggaggtgatcaactgggtcttggttacatacagaaaacagcagagacagctgaaagatccttctctgtgttcagagccatcatctatcattagcatccagtgatagcaggaacattgatgccaacatttttcaaagtctgcagaaatgacttggcccctccacagagccttgtgagtcagttcagaagaaatcaat

SEQ ID NO: 679869 - DNA, 633 bp, Homo sapiens
aaacaaagagaacagagaagagactaaaacaacacccttattactaacaaatgtgacttgtgcctacaggcaagaaagcctgctaacaatgaactctggaactggtcttccccactgtggcataaacagctactgttcacccatgcctgtgtttgtcccctcttccaggcacaactacactatatctttctcagcctcccttatggttaactctgttcatgtcattgaattttggccaatggaacgtggaaaaaaattctgcgcaccctcctaatatggtccataaaaatttctcaagtgtgtttcatgctttcacaccctcccctcatttgcaagctgaatgaagaggactctcagggcttagaagagggcaaagccaccagatggaagaacactaggtctcagcattactgcatggaatagagcctgtttctttaccaccaatcctcattgaacggtsatataagtgagaaacaaacatttatttttgctcagctacggaatgtttggaagttgtttgtttcactggttagcctatcctgcctgatacacccacaaaatctctggaagggctgatgcgggacaggttttcctgtggcaggaagtgaactgctcaggtgagacagagacgcg

SEQ ID NO: 679870 - DNA, 447 bp, Homo sapiens
gagcgacactctgtttctaaatgaatgaatgaataaataaataaaatatccatgtggctagccagttaacccagtgccatttatcgaatatgtcaacttaaaaaagagtatctgccagatttcatgtgtttgggatcagatacatgaaataagtgtattttattggaaataaaaatatatttatttatttgtatatatttatgctgcacaacacatttggatatatgtatacatagtggaatggctccatcaagccagttaatatatgcattacctcacacatttatcatttcktttggtggtgagaatgcttaaaatctactctcaataattttcaaatatacaataggttgttataactatagtcaccatcatgtacactagatctcttggtcctcctgcctaactgaaattgtgtgtgctttgatcaacatcaaaaagatgaac

SEQ ID NO: 679871 - DNA, 608 bp, Homo sapiens
cccaaagtgctgggattaccggcatgagccaccacacccggccatatttctagtttttaaaatacctaaaactatacatattgataggtataagccacataagcaaaagttctttagggtcctcatyttcatgagtgtaaatgggttttgagaccaaaaagcttgagaatctctggtctacagtaaatctgtaacagtctgggttatttgagcagattggatggaaatctgtctttttcactattatgatctcaaggcctagcacaaagcttaatacacagaagtctctcgataaatgattattcagctattgtttcagcaaatatttgagtacctactatcttattaggttggtcaaaagtaatagtggttttcgcaattacttttaatataagacccaatgctaggtcaacttcatggttcattgtaaatcaaattgaaatggcccctgccataacttatttatttaatatgtcttcagagtttcagtccagctgggaagagacattcaataaacctttaaagattatggtaaatgctttaaacaaacaaacaaacaaaaaacccaggatgccgaaatgaggatggttatgtttgtatggtagata

SEQ ID NO: 679872 - DNA, 608 bp, Homo sapiens
cccaaagtgctgggattaccggcatgagccaccacacccggccatatttctagtttttaaaatacctaaaactatacatattgataggtataagccacataagcaaaagttctttagggtcctcattttcatgagtgtaaatgggttttgagaccaaaaagcttgagaatctctggtctacagtaaatctgtaacagtctgggttatttgagcagattggatggaaatctgtctttttcactattatgatctcaaggcctagcacaaagcttaatacacagaagtctctcgataaatgattattcagctattgtttcagcaaatatttgagtacctactatcttattaggttggtcaaaagtaatagtggttttcgcaattacttttaatataagacccaatgctaggtcaacttcayggttcattgtaaatcaaattgaaatggcccctgccataacttatttatttaatatgtcttcagagtttcagtccagctgggaagagacattcaataaacctttaaagattatggtaaatgctttaaacaaacaaacaaacaaaaaacccaggatgccgaaatgaggatggttatgtttgtatggtagata

SEQ ID NO: 679873 - DNA, 1418 bp, Homo sapiens
gtgcctagggggctgggctccgggcggaaggtgtggcctggagcagcgaggccagggtacatgaagcttcagagcacacccggctcaggcccccttgtgtcctcagggtgccaggcccaacagctggccgtgcgcctggagcctcaggggctgctgtatgccaagctgaccctgtcggagcagcaggaagcccctgccacagctgagccccgcgtctttgggctgcccctgccactgctggtggagcgggagcggccccccggccaggtgcccctcatcatccagaagtgcgttgggcagatcgagcgccgagggctgcgggtgagcacccaccccaccccaaccctctggcccccagacctcagaccactcttcaggacaccctatgtacagatgccagacccctacccccaggcctgagccactcctagctccaatcccaacctagacaagggcagaaggcgcccccttgactgtagcaccctgggcagaacccatgggtcatccattgatttaaaaacaggatccaagccctcctggggctcagagtctgatgggggaaaagatacgactctagtcattcacaaatgtaaaactataactgggactggagttggggtggggtgtacctagggtctgggagagcttaaaacaaaacctggggtagtcatggaaagcctcctcaaagaagtgtcagtttcctaagtcaaaggagatggcagccaagacaagtagtccaagcagagggtttacaaggccaggttgtcaaggtagttccaacctcccagcccacaatgcccattgctgcctggcccagaattccagtgctcaccccactgggccctgattagtctgtggccccggcaagaagacattcactctctcttcccacccccaggtagtgggactgtaccgtctttgtggctcagcggcagtgaagaaagagcttcgggatgcctttgagcgggacagtgcagcggtctgcctatctgaggacctgtaccccgatatcaatgtcatcactggtcagcatggccccctctcccctgcctgctcacccccattcaatgcctcacttcaaggccttggggctcctctgggacctcagtcctcctatctgaccttgctttcacccacctcctcttcccccttagctgtgccctccttagccttagaagccagtggtgccctgaccagaggggrccctgtgttcacaggcatcctcaaggattatcttcgagagttgcccaccccactcatcacccagcccctgtataaggtggtactggaggccatggcccgggaccccccaaacagagttccccccaccactgagggcacccgagggctcctcagctgcctgccagatgtggaaagggtgagttgggcctggtgggagtgatgggacttgagagtgg

SEQ ID NO: 679874 - DNA, 637 bp, Homo sapiens
atgtagagaaacaaagtgtaataayaataatcatctctcttaatcatcttccctcttaatttctgagtattccttgaacgtgaagtcctaacattaccaagatcgcctgcactacttggcagtctcaagcttaatacaatctattcactattttaacagcagagtgttggatgcaaactatttaaatgtctagcagaagtcaactgcccttcacttgatagtctcttgaattatgaaagaatattatatcatttatctaacaaaaccatttattactagacaataaaagtggcaaaatgtgatagttctctaattatgcaaagactcctggtgctttcaagagcaagaaggttttcagaatttatttataaaaattaatgataatgatgaaattgtatttaactttcatataactgctctctgacactaatttatcaaagacagtggtgaatacaattcttcacagtatataagcatattctgttttagagtagtaatgtattatatttagcaaaaggttcctaatacacaccattaacagtaatcccttcaactgcctttctttagcctttggtagttcaaaattatgtcaggtattaaaatctgaatccaccaaaatgtagagaacaaaaaatct

SEQ ID NO: 679875 - DNA, 655 bp, Homo sapiens
tatctttctcattaaaagtgtaattcatatgcacctggacatggtggctcatgcctataatcccagcactttgggaggccaaggcaggtggatatcttgagcccagaggttcgagaccagcctgggcaacatggcaaaaccccatctctgcaaaaatacaaaagttaggcaggggtggtgacatgtgcttgtggtcccagctacttgggaggctgaggcagggaggattgtttgaacccaagagatcgaggctgcagtgagctgtgattgtgtcactccagcctgggcaacagagcaagacctggtctcaaaaaacaaaacaaaccaaaaaaagagtaacacatacttattaaaatatatgggaaactatgaaaattgcaaacaaagtaaaatcataccaccaagagatcaccactcttaacattttggcatatacacattaaaaaaaattcttcagtttcttaacacacatatagaccaatactttgcataagtgtttatgtgttcatgtatatagtaaaaacaaatgttrggtctttatactctgttgtaacctgcttttaattttactgtattatgtcatcagcaatataactttaatggctatatatttcttataaatttgctataatattagctataatttattacatac

SEQ ID NO: 679876 - DNA, 1773 bp, Homo sapiens
tatgagtatttatatacactgaggtgtgattggggattaattgtctccatgcttctccaagatttccacgggcaagtatgaccctcaaaaagattattgcattttgttatgaggctcagttaagaatcttccaccctacatagcagataaaacattttaacaagaaaaaagtactttaagctcagttatagcctatataataatacgtatgtgcttatgacaatagggacggaaaaatgttcctatttctttatgcatcttaggttcattggctggcgccctgtaaattagactgacaaaagataaattaacaagagaaaaacagaagtctcaacagtggttagaacttgggtttatatactaccttaaaaagaatacattttgtagagaaactgacaagacaaaggaaaaagactttaagcttcttggastcagcaaattgagggaaagtaaacattttcgggagctaatgtaagataagggcaagttagtaaaggttcattatataggttcctctgttgccctttgtgggctgataagggtctagagttgtctctggtgattaatttctgtccttcctcgtagagagaggagaggggccacctttacaaatttatgtcctgctttggagcatatagggggaggaaagagtcctattcttgtatcagctttttctctattaccttgagctcaaaataatccttattccagaatggcatattttgaggtggtatattctgctatccttcatgaccaacaacaaggacactcactatggaaataaaaacaaatgtttctatcagtctgagaagaaggaaaccaaaggatacagaagaatagctcagtttttataagttgtggaagagcagaggacctaaaatgtagaaagacagggactgctggctaagagatatggtctctaacatctctgacatttgatcatttacataaggtaaaatgcatttttccaaagctaacactgtgctgtcataagcacttggtactgctgaggatgactctgaatcctctacaaactcgaagggaaaaagtacctctaagaaagatgaatcagaagtagattgaactggtcagctgggagaatcacaggatcatagaggtgggaaggaattaagaaattagaccaaacctcccatccaatgcagaaccctccctacaacacctccaattggtgtgcattcagtttctgcttgattacttccagtgactagaactcctctgaagaaggagaatgtaaaaatattcttcctttggttgaacaagaatctgccattcataacttccattcacaacttccattcactgactgtttctaaccacagaagttataaaagatacacacataaccccactttgatctggcagttcttcaaatatttaaagacaggcctagttaccttgcagagagacaatataagaaatgtaagtttaaagtcaatctaaaactgcaacacacatatacagaactgaacatgctgttccagatatattctgaccagcacaatccacaatatagactactaagccctcttcctgatagacttctattaatatagcgcctaaagttgtccttttattcccatcatatcacactaatgttgcataccaagtaaaatctgttttatatataatcttgctattaagccaagaagctcttatcttatctttgataccttaatttcttgagctttaatgaaacacattatagacaacattgaattatacctgagccctgtgctcctacaaaacaaatta

SEQ ID NO: 679877 - DNA, 642 bp, Homo sapiens
ttcttgaagtcagcgagaccaagaacccaccggaaggaaccaattccggacacaatactacaatcaaccaatgttcataacttccatttggatcgacatctgtgccttactatacctataactaactgaataaatacagggttccttttaaagttttgctccaaaagaatagtgtcaaaaacaaccaaaggctaatttaagattataattaatgatcaggctggacaccaaggctcacacctataatcccagcctttggaaggcctaggcaggtggattgcttgagctcaggagttcaagaccagcctgggcaacatggcaaagctccgtttctacaaaaaatacaaatattagccggacgtgatggctcatgcttgtagtcttagctacttgggaggctgaggctggagaatagctgagcctgggaagaggatgttgcagtgagccaagactgtaccactgcactccagcctgggcaacagagtgagaccctgtcaaaaaaaaaaaaaaaaaaaatatatatatatagaatggatcatattacttaaaagtcaatagtacaaaataaaaascctatatcatccttttgttccctgcattccttcttaaatgaagatatgatactgagctcatcataacttt

SEQ ID NO: 679878 - DNA, 635 bp, Homo sapiens
ttcagaattttctcacataaatactgaggaagaccctgccctctcctcactcctctggacttggccctgagctggacctggtccactggggtaggcagggcgatggggaacctgtttatgctctgggcagctctgggcatatgctgtgctgcattcagtgcctctgcctggtaagtcctttcccaaccctcactccttgccaaggaggcccccattgtctcatccccattcacctctgcctcactttttctctttttggtaggtcagtgaacaatttcctgataacaggtcccaaggtaggatgatctccagyttctgtttttacccactgagggccctaaggggactcttctggagaaaagaggggcggggacagtgccagagcccctcacccagaggaacccatggttgattcttaatggagagctggcccatctgagtcctgcctgctcccccaaccacagatgacccataccgggcagaagctcacagcccttttccctttgccaggcctatctgacctacacgactagtgtggccttgggtgcccagagtggcatcgaggagtgcaagttccagtttgcttgggaacgctggaactgccctgaaaatgctcttcagctctccacccacaa

SEQ ID NO: 679879 - DNA, 670 bp, Homo sapiens
gaggatgatccaagccgagttctgactcctttctaactctaaaatttgctgaaaaactgaggctactttggaatatatcataatctggagttcttcaaacttcttatttagctaagataaattccattgtttctgtctttctgaattccgatgcttctggtgagaaacgattctgccaataatacataaggactatccaaaagccaagaaaatttgtacctgcaaataaaactgcccaaaaaatgaggttcatgttccaaaaagagagtaaggtaatatataattttagttccctgaaggttgtcttgcatttttccaaaaggacttattcctgaaatctttattttatttatttaatattattattattttttgagacggagtctcactctgtcacccaggctggagtgcaatggcacggtcttggctcactgcaactttcacctcccggaggcaagcaattctcctgcctcagcctcccaagtggccaagattacaggcacgtgccaccacacccggctaattttcrtatttttagtagagatggggtttcactatgttggccaagctggtctcaaactcctgacctcgtgatccgcctgcctcaacctcccaaagtgctgggattacaggcatgagccaccgtgcctggcctattcctgcaatctta

SEQ ID NO: 679880 - DNA, 431 bp, Homo sapiens
cagaaatttctttgttgtcgacctgctcagaaaatagaacaactatacttctatattaggtcaaagaccttgatgtccatagtgaacctgatcaataaatctgcttagaaatgaaaacaatgcatctctttctggataatagcacttgaacatttttgttccctccctggcctcctctcatgccatttaagccttggctaatttccttgtctgaaggccccctggagacagagcatatccagtgtgagcacaatgcctgagacatcgttgatactcaaaaatgatttcttactgaatggcttcagctcctgatggagcagcagatgccacaggaggaaggtcagagagttcagtcctccgkgaagcgctgccagaggattccagactctgaagggaaatgatcagactagcaagacccttgctagggtgtc

SEQ ID NO: 679881 - DNA, 566 bp, Homo sapiens
tcaccttccagcactttccttctcactcagaggagagataacccagcaccctgcaggagcccagcaacccccatggcctgtgtcctctgcttctcctgctttcggcctggttgaatgcatcactraggattttctattggttcctggaatttagtgtgattgtgtctaccatttgtggtagactgttgcttggacagttatcctgtggcatgtcagaagagtcctggcgtccaaagatgtgactaggagcagaataatgttttccaatgcatggactaaaacccttacgatttgaaaggcaatggagttgtgatattgtgacatgtgtgtttcttcattatgcattaaatacaacgagatccagcagaatgtgtagcaagcaccgtaatttcattttattttattttatttttatttcactttaagttctgggatacatgtgcagaatgcgcaggtttgttacataggtatacatgtgccatggtggtttgctgcacctatcaacctgtcatctaggctttaagccccgcatgcattaggtatttgtcccagcgctctcccttccc

SEQ ID NO: 679882 - DNA, 566 bp, Homo sapiens
tcaccttccagcactttccttctcactcagaggagagataacccagcaccctgcaggagcccagcaacccccatggcctgtgtcctctgcttctcctgctttcggcctggttgaatgcatcactgaggattttctattggttcctggaatttagtgtgattgtgtctaccatttgtggtagactgttgcttggacagttatcctgtggcatgtcagaagagtcctggcgtccaaagatgtgactaggagcagaataatgttttccaatgcatggactaaaacccttacgatttgaaaggcaatggagttgtgatattgtgacatgtgtgtttcttcattatgcattaaatacaacgagatccagcagaatgtgtagcaagcaccgtaatttyattttattttattttatttttatttcactttaagttctgggatacatgtgcagaatgcgcaggtttgttacataggtatacatgtgccatggtggtttgctgcacctatcaacctgtcatctaggctttaagccccgcatgcattaggtatttgtcccagcgctctcccttccc

SEQ ID NO: 679883 - DNA, 606 bp, Homo sapiens
tttaaatgagatcaacgttgaaaccagcagactttgagtaacgcaggtgaccctccacagtgtgagtgggcctcatccaatcggctgaacatcttcagagaaaaagactcaggtcccccgaggaagagggaagtctgcctccagactgactttggactcaaaactgtaatatcaactcttccctgagtcttcagcctgttggcccgcccrgcagatgtcagacttgctggcctccataatcacatgagccaattcctctgtctatagataaatatagatagatggacatcgagatagagctggagaaatacagatacagacagatttctaccacctattgattctgtttatatggactactacagattttaataccaaggatggttctagaggaacagaatcttaagcattttgagaatccttaagatcttaaatcttcaggagctttctgaattgcttctggggtttctggaattggctctctaagctgattacctttaaaggcactgatgactactcctaatagtagagagaatgcagatagtccatggtgtgatgtaacagtagagttaggtaaaacatcactgttgaatactcataatcaaa

SEQ ID NO: 679884 - DNA, 606 bp, Homo sapiens
tttaaatgagatcaacgttgaaaccagcagactttgagtaacgcaggtgaccctccacagtgtgagtgggcctcatccaatcggctgaacatcttcagagaaaaagactcaggtcccccgaggaagagggaagtctgcctccagactgactttggactcaaaactgtaatatcaactcttccctgagtcttcagcctgttggcccgcccggcagatgtcagacttgctggcctccataatcacatgagccaattcctctgtctatagataaatatagatagatggayatcgagatagagctggagaaatacagatacagacagatttctaccacctattgattctgtttatatggactactacagattttaataccaaggatggttctagaggaacagaatcttaagcattttgagaatccttaagatcttaaatcttcaggagctttctgaattgcttctggggtttctggaattggctctctaagctgattacctttaaaggcactgatgactactcctaatagtagagagaatgcagatagtccatggtgtgatgtaacagtagagttaggtaaaacatcactgttgaatactcataatcaaa

SEQ ID NO: 679885 - DNA, 1833 bp, Homo sapiens
ggccaacatggtgaaaccccatctctactaaaaatacaaaaattagacaggtgtggtggcgcatgcctgtaatcccagctactcgggaggctgaggcaggagaatcgcttgaacacgggaggcagagattgcagtgagccgagatcatgccactacactccagcctgggctagagagtgaaactgcatcaaaaaaaaggaaaacaaaaagaaagagaaagaaagaagaaggaaggaaagaaagaaagaaaaagagaaagaaagaaagaaagaaagaaagaaagaaagaaagaaagaaagaaagaaagaaagaaaagaaagaaaaagaaagaaagaaagaaaaaaagaaagaaagaaagaaagagagagagagaaagaaggaaggaagaaaggaaggaaggaaggaaggaaggaaggaaggaaggaagggagaaaagaaaaaattgagtatcaccaaagatgaagaggaactggaacctaaaatttatccagccaacaggaaattagagtcagacccaaacagcatttatcaagcatgctctcgtctgtgtcacttcattaattccaaggcttagggcagtcaggaacctccaggtgaatggtcaggtcatgatcactcagagcccagtctgaccttttcccaccatagccgctaagactgtttgcattccaactatgtgtttttactgaccacagagcaggcactaaggcctaaaagacttctgctcctctgcgggatcccctgcttcctggctgcttttatagctcctgtgttatgggactttagttctgctctccattcctagatccctgtttatttatccacttacagaaacatttaccaagtaccagtatgtgacacacactgaggatagaaaactaagagtgtggcaagggcagtttagcaggtattcgagaaaatgtgaatttgaagtttaattaaaaaccataactattttctcccttgactgaattcctgagttatgaaaactccattcatccaacatttcttcatgcctgctccattgctgtttctgctcagccctgacatctagccctggtccagtcagagggaggtcaacacacatgcacagtgacagcgggggatgggaataaagtcatcccaggctaaggaagcaggtgaattttactatgaggatagtgtgctgatttaacacagactggatgtggcaggaggcttgtcagctggagagtttacttataatcccaaatgtctgcgtccaagtcctacatacagaggcatacacgcacatgcaaagcacacacagaaacacrgaggcatgcatgtatgtgggcacagacacacagatgcacatgaacatgcactcacacacacacacacaaagacacacaccatgctcatgcacagacacagatgcacgcaaacatccacacagagatacacccagacacacgtacacaaaaaaaacacagagacatgcatacacagacactcaaatacacacagacacacatgcacacacatgtgcacacacacatgaggaacctagtatccctcagcgccttttcggtaaggtcccggggaaatgtgagtacagcagacatttgtccttcctaggaggttttggatcagaacacttagctcagccctgtgagcctgatgaccctcaggggacacttgcccgggcacagtgacagagggtgtagaaccaaccaggacaggtggccccctttcttccgtctcccaggctcaatgggctctctgcactttaccactccagtgacaagaacagcctgtccaaaaaaaagcaaacagctggagggtaacacaccagaaggtatgcccttacct

SEQ ID NO: 679886 - DNA, 1833 bp, Homo sapiens
ggccaacatggtgaaaccccatctctactaaaaatacaaaaattagacaggtgtggtggcgcatgcctgtaatcccagctactcgggaggctgaggcaggagaatcgcttgaacacgggaggcagagattgcagtgagccgagatcatgccactacactccagcctgggctagagagtgaaactgcatcaaaaaaaaggaaaacaaaaagaaagagaaagaaagaagaaggaaggaaagaaagaaagaaaaagagaaagaaagaaagaaagaaagaaagaaagaaagaaagaaagaaagaaagaaagaaagaaaagaaagaaaaagaaagaaagaaagaaaaaaagaaagaaagaaagaaagagagagagagaaagaaggaaggaagaaaggaaggaaggaaggaaggaaggaaggaaggaaggaagggagaaaagaaaaaattgagtatcaccaaagatgaagaggaactggaacctaaaatttatccagccaacaggaaattagagtcagacccaaacagcatttatcaagcatgctctcgtctgtgtcacttcattaattccaaggcttagggcagtcaggaacctccaggtgaatggtcaggtcatgatcactcagagcccagtctgaccttttcccaccatagccgctaagactgtttgcattccaactatgtgtttttactgaccacagagcaggcactaaggcctaaaagacttctgctcctctgcgggatcccctgcttcctggctgcttttatagctcctgtgttatgggactttagttctgctctccattcctagatccctgtttatttatccacttacagaaacatttaccaagtaccagtatgtgacacacactgaggatagaaaactaagagtgtggcaagggcagtttagcaggtattcgagaaaatgtgaatttgaagtttaattaaaaaccataactattttctcccttgactgaattcctgagttatgaaaactccattcatccaacatttcttcatgcctgctccattgctgtttctgctcagccctgacatctagccctggtccagtcagagggaggtcaacacacatgcacagtgacagcgggggatgggaataaagtcatcccaggctaaggaagcaggtgaattttactatgaggatagtgtgctgatttaacacagactggatgtggcaggaggcttgtcagctggagagtttacttataatcccaaatgtctgcgtccaagtcctacatacagaggcatacacgcacatgcaaagcacacacagaaacacggaggcatgcatgtatgtgggcacagacacacagatgcacatgaacatgcactcwcacacacacacacaaagacacacaccatgctcatgcacagacacagatgcacgcaaacatccacacagagatacacccagacacacgtacacaaaaaaaacacagagacatgcatacacagacactcaaatacacacagacacacatgcacacacatgtgcacacacacatgaggaacctagtatccctcagcgccttttcggtaaggtcccggggaaatgtgagtacagcagacatttgtccttcctaggaggttttggatcagaacacttagctcagccctgtgagcctgatgaccctcaggggacacttgcccgggcacagtgacagagggtgtagaaccaaccaggacaggtggccccctttcttccgtctcccaggctcaatgggctctctgcactttaccactccagtgacaagaacagcctgtccaaaaaaaagcaaacagctggagggtaacacaccagaaggtatgcccttacct

SEQ ID NO: 679887 - DNA, 1833 bp, Homo sapiens
ggccaacatggtgaaaccccatctctactaaaaatacaaaaattagacaggtgtggtggcgcatgcctgtaatcccagctactcgggaggctgaggcaggagaatcgcttgaacacgggaggcagagattgcagtgagccgagatcatgccactacactccagcctgggctagagagtgaaactgcatcaaaaaaaaggaaaacaaaaagaaagagaaagaaagaagaaggaaggaaagaaagaaagaaaaagagaaagaaagaaagaaagaaagaaagaaagaaagaaagaaagaaagaaagaaagaaagaaaagaaagaaaaagaaagaaagaaagaaaaaaagaaagaaagaaagaaagagagagagagaaagaaggaaggaagaaaggaaggaaggaaggaaggaaggaaggaaggaaggaagggagaaaagaaaaaattgagtatcaccaaagatgaagaggaactggaacctaaaatttatccagccaacaggaaattagagtcagacccaaacagcatttatcaagcatgctctcgtctgtgtcacttcattaattccaaggcttagggcagtcaggaacctccaggtgaatggtcaggtcatgatcactcagagcccagtctgaccttttcccaccatagccgctaagactgtttgcattccaactatgtgtttttactgaccacagagcaggcactaaggcctaaaagacttctgctcctctgcgggatcccctgcttcctggctgcttttatagctcctgtgttatgggactttagttctgctctccattcctagatccctgtttatttatccacttacagaaacatttaccaagtaccagtatgtgacacacactgaggatagaaaactaagagtgtggcaagggcagtttagcaggtattcgagaaaatgtgaatttgaagtttaattaaaaaccataactattttctcccttgactgaattcctgagttatgaaaactccattcatccaacatttcttcatgcctgctccattgctgtttctgctcagccctgacatctagccctggtccagtcagagggaggtcaacacacatgcacagtgacagcgggggatgggaataaagtcatcccaggctaaggaagcaggtgaattttactatgaggatagtgtgctgatttaacacagactggatgtggcaggaggcttgtcagctggagagtttacttataatcccaaatgtctgcgtccaagtcctacatacagaggcatacacgcacatgcaaagcacacacagaaacacggaggcatgcatgtatgtgggcacagacacacagatgcacatgaacatgcactcacacacacacacacaaagacacacaccatgctcatgcacagacacagatgcacgcaaacatccacacagagatacacccagacacacgtacacaaaaaaaacacagagacatgcatacacagacactcaaatacacacagacacacatgcacacacatgtgcacacacacatgaggaacctagtatccctcagcgccttttcggtaaggtcccggggaaatgtgagtacagcagacatttgtccttcctaggaggttttggatcagaacacttagctcagccctgtgagcctgatgaccctcaggggacacttgcccgggcacagtgacagagggtgtagaaccaaccaggacaggtggccccctttcttcygtctcccaggctcaatgggctctctgcactttaccactccagtgacaagaacagcctgtccaaaaaaaagcaaacagctggagggtaacacaccagaaggtatgcccttacct

SEQ ID NO: 679888 - DNA, 1393 bp, Homo sapiens
cctatgacttgtaagccctcatgccccctacttcaagatatcctgcctctttaggttgaaccaatgtatatcttccaagtattggttcatgattttatctagaatccctgtctccctaaaatgtctaagactaaactgtaacccaaccacctcaggcacattttctcaggacttctttagactattccccaggccatggtcactcatactggctcagaataaacctctttcaatattttacagtttgtttttctgttaacaggaggttgtgaaacagagtgtcatgaaagagaccatagagaaggctactttgggcctgatggggaaggcaactctgaggaaacagtatctgacccaagacctggaggctgagaacttagagtaagtgcggtgtagtaataatgtttggtctttgtcctaaaatctgagtgacagtagggtcctttgttatccataacaagcccgtttgatcacacctgagtttatgctaaaaggtgacttagtgtggggcccctagatagcctctggatggggttggtcaccagaaagaccaagggatccaagggtgggaattttcagctccacccactggcctctgggaaggaggaggggtagctggaggttgagctctgtaaaaacgcttgaacaagatttgatgagcttccaggtttgtgaacatgtggaggtgctgggagggtggcacccctgagaatctctgtaccaccaccaccactaactcatcctctgcatctcttccatctggctgttcctgagttgtttataataaactggcaaatgtaagaaaagttctgtgagccattctagcaagttattgaacccaaggagtgggccatgggaacctggattaacagctgtgttgccagaagtacaggtggctccagggacttgtgaatggtatgtgaagtgggggaagtcttgtgggacccggcccctaacctatgggatctgacactaacttcaggtagacagtttcggaaatggattggattgtaagamacccagttggtgtccagagagggagaattgcttgctgtggggaagaaaatcacacatttcgtgttagaagtgttgtgtgagtagagaagcagtttcccagaatcaggaaaatgacatttcattcatccctgaatttatttattcactacactatgggtacactaagccttctggaaagggatcagctccttaatgccacaggttctggttgttgatactccttaatctatcctaaaattgtagcccactgtttttccaaacaggaccagtgaacctgttggaaatctctaaggaacaatagatctaaaataaaggatgttgggaaaaaaagaatggttaatattaaaaaaaaaatacattctgtaaagtacaaatc

SEQ ID NO: 679889 - DNA, 1393 bp, Homo sapiens
cctatgacttgtaagccctcatgccccctacttcaagatatcctgcctctttaggttgaaccaatgtatatcttccaagtattggttcatgattttatctagaatccctgtctccctaaaatgtctaagactaaactgtaacccaaccacctcaggcacattttctcaggacttctttagactattccccaggccatggtcactcatactggctcagaataaacctctttcaatattttacagtttgtttttctgttaacaggaggttgtgaaacagagtgtcatgaaagagaccatagagaaggctactttgggcctgatggggaaggcaactctgaggaaacagtatctgacccaagacctggaggctgagaacttagagtaagtgcggtgtagtaataatgtttggtctttgtcctaaaatctgagtgacagtagggtcctttgttatccataacaagcccgtttgatcacacctgagtttatgctaaaaggtgacttagtgtggggcccctagatagcctctggatggggttggtcaccagaaagaccaagggatccaagggtgggaattttcagctccacccactggcctctgggaaggaggaggggtagctggaggttgagctctgtaaaaacgcttgaacaagatttgatgagcttccaggtttgtgaacatgtggaggtgctgggagggtggcacccctgagaatctctgtaccaccaccaccactaactcatcctctgcatctcttccatctggctgttcctgagttgtttataataaactggcaaatgtaagaaaagttctgtgagccattctagcaagttattgaacccaaggagtgggccatgggaacctggattaacagctgtgttgccagaagtacaggtggctccagggacttgtgaatggtatgtgaagtgggggaagtcttgtgggacccggcccctaacctatgggatctgacactaacttcaggtagacagtttcggaaatggattggattgtaagacacccagttggtgtccagagagggagaattgcttgctgtggggaagaaaatcacacatttcgtgttagaagtgttgtgtgagtagagaagcagtttcccagaatcaggaaaatgacatttcattcatccctgaatttatttattcaytacactatgggtacactaagccttctggaaagggatcagctccttaatgccacaggttctggttgttgatactccttaatctatcctaaaattgtagcccactgtttttccaaacaggaccagtgaacctgttggaaatctctaaggaacaatagatctaaaataaaggatgttgggaaaaaaagaatggttaatattaaaaaaaaaatacattctgtaaagtacaaatc

SEQ ID NO: 679890 - DNA, 534 bp, Homo sapiens
tgactcctctgctctgtaacctgccagagctcccacctcattcacagtaaaaacacaaaatgtgcataatctgccttcccacccattccctcttgggtcttctcacctgtttttctctccctgcctgactcactccaccccaacccagtgactcagtatccttgctgttcctccaacacatcaggcatacatctacctagggatttagcactgactgtttcctctgtctggaacactcttctctagacagcccatggctaccacccttacctcaagtctttgctcagatgtcccctcaataccctaacctctgtatttaaatggtaccattccatccagcaatctgctggatggaatgattgctggatggaatggtaccacttaaatacactacttcctctcctttgggtttttacccttggaggcccaaggaacgggttacgattttttaaaattttatttatatatttatttcaatagttmttggggaacaggtggttttcggttacatggatacattctttagtggtgatt

SEQ ID NO: 679891 - DNA, 588 bp, Homo sapiens
gccaacaagccttgtggatctttcttccagttgctggagtcaggaactggaagaaattttagcagcagaagtcaaaattgcaaaattatggaaccaacctaaaagcccatcaaccaatgagtggataaagaaaatgtggtatgtatacaccatggaataatagccataaaatggaatgaaataatggcctttgaagcaacttttatggagttggagaccattattctaagtgaagcaactcaggaatggaaaaccaaacattgtatgttctcacttataagtgggagctaagctatgaggatgcagaggcataagaatgatacagtgagctgggcgcggtggctcacgcctgtaatcccagcactttgggaggccgaggtgggcggatcatgaggtcaggagtttgaggccagcctggtcaacatggtgaaacctcatctctactaaagatacaaaaaattagctgggcgtggtggcacgcgcctataatccctacttgggaggctgagggaggagaatcgcttgaacccgggaggtggtggtttgmagtgagctgagatcacgccactgcactctagcctgggcgac

SEQ ID NO: 679892 - DNA, 497 bp, Homo sapiens
tgagcttggccagaggcacgctgtttaatttcaaagtgctgctgactcaaactcatgagtcctggaggcaggtagaggcacttgtaggctgaggacccgtagagcccggtgtgccctgcccaagccccacctgggaatggagttatctctgtaaagatcttgctgcctttgagcaagcactgcaaayggggtaactggaacagccttgtcgcgtgtttccacccttcgtatgaggcaggtaccatgggtcttcaccaacagcacggcctgttgtctccaggaaatggtagcccctcacagtgctttctgtctgcttgtttagctttggcatttgaatgtgcagaatggtggactttgaaattaatgtccttctgttgactgcagaatttctgctggaaatgcagggaggctgcttgtggggttcgcgtgctgtgggaagtagggaaaatgagctggtttactttgtgtctttttgtgcatgcagactgtttggattt

SEQ ID NO: 679893 - DNA, 651 bp, Homo sapiens
atctacttagcttaatgatatttagtagcagttagcacgttgcaaacaataatgtgtaaataaactataaagaacaggatgtgtcatggtaagaggagagtgattattttatcacacaggtatgttataatctatcataatggcttttgaggaaagaatgttaaacttaaataaaatgactcatttccttcctttgtagaaaagaaaaatagcaattcactacgttagttgtctagaataaattacacaatcttgtcagtatgtactttccagaagacatgttaaatagccatcaaatttattttccccactatgtcctttgcacatctttggtggctacgtgcttcttgtgtatttttaagttacagcagcaggtgaagtgcctgaaatgcctcattcacttctctaagagggaaatatcccaggttaggagagcagtgtgcctggaggtggtgtcaatggaataacaagcacattattaccacgggaaagcctgctctgttgggtccctaagtactcagaaacaggaatgaacttttgactacctataaaaaatatacacatgtctcaaggtagaatatgtgcaggaaagcatgacatcaaaaatcttgataaggagataactaattcacgcttgagamcctgttgtca

SEQ ID NO: 679894 - DNA, 931 bp, Homo sapiens
tgcttaaaatattttcaccatcagaacatacatggtaacagaattttgtcacctgtcagccaactttggatcttctgctttgtacagaattagatattaaaaaggaaattttacaaatttcatttttttctggcacaattttactatttcttcaaatatcgtccatatatcgtaatcttcccaaatatgcacatatatgtggatatttgtatgcaaaccatatgtatatatcaacttgtagaaataatttatgcacacatttaaatttcagaaatttggaatttttaaatttatttatgtttagtgatatgtagtaaagatgttacttattgaaggatatttgcatttgaaaaggcattctcaaaaactttaagaaaaaacatgtaggacaaaacgaacaatttcataatggtaaaacagaaattggggtagttacttgtatctcagtcttacaatttagagcaggggtccccaacctccaggcagactggtaccagtcagggtcctrttaagaacaggctgcacagcaggaggtgagcagcaggccggccagcactaccgcctgagctccgccttctgtctgatcagctgctgcattagattctcgtaggagcgtgaacacttttatgaactgtgcatacaagggatctaggttgaggtctccttgtgagaatctaattaatatctgatgatctttggtggaacagtttcaccccaaaaccatcccctttttggcctgtgaaaaaattgtcttccatgaaaccagtccccggtgccaaaaagattggggaaccactgctttaaagtcagttagacatgggttaaaattattcaggcattttccatttgctgtgtgactataagaaagttacttagaatctctgagcctgagtctcctcaactaaaaatgagattaatgatatattcatgt

SEQ ID NO: 679895 - DNA, 409 bp, Homo sapiens
aaggaaggaaggaaggaaggaaggaaaagagtttgtattcatgtgaatcacagctgaaataaatgagagctgttagtctccagagaggagggacagaaaatccactacataatatctaaattgaaatggcatttattggctggacacggtggctcaygcctgtaatctcagcactttggtagtccaaggcgggtggatcacgaggtcaggagttcaagaccaacctggccaacatggtgaaaccctgtctctactaaaaatacaaaaaaataagctgggcttgatggcgggtgcctgtaatcctagctactcgggaggctgaggcaagagaattgcttgaacctgggaggtagaggttgcagtgagccgagattgcaccactgcactccagcctgggtgacagagcaac

SEQ ID NO: 679896 - DNA, 409 bp, Homo sapiens
aaggaaggaaggaaggaaggaaggaaaagagtttgtattcatgtgaatcacagctgaaataaatgagagctgttagtctccagagaggagggacagaaaatccactacataatatctaaattgaaatggcatttattggctggacacggtggctcatgcctgtaatctcagcactttggtagtccaaggcgggtggatcacgaggtcaggagttcaagaccaacctggccaacatggtgaaaccctgtctctactaaaaatacaaaaaaataagctgggcttgatggcgggtgcctgtaatccyagctactcgggaggctgaggcaagagaattgcttgaacctgggaggtagaggttgcagtgagccgagattgcaccactgcactccagcctgggtgacagagcaac

SEQ ID NO: 679897 - DNA, 3431 bp, Homo sapiens
aactacataagggatctctaagcatcaattggaagaagttgtaggaaaataaatactatagctacagattttggagttatacagttataagtaagaacacaagccatcaccacagtacttatcttttagatgtgcaaactaggacaagttccttaaactccctggtcccaagttttatagaagatgggatgaataatgtatcttttaagagttaatgtatcttttaagagttactgaggtgaaattagataatgcctataaaaatactagaacaagcatttcctagtaagcactcaattaaatatttcctgtttgtataagtagaagttaaatatttgtaggttgatcttcttgaccagatgtagcaaattacagtccagatggagtagactgaaaactatatatattttttttctttttttttaacctatcttactaagtgtcctaacttgtaaacatcagtaattttgtatggtggagggaaaataagaatagcagtatgttctttgatttacactaatattaaatgtaatggcattttaagaacaatgaagtattccttcttgttttccagtttatgtattctcaattctaaataataaaaggaatgactttctatatcacagttccaaacaatgaaaatattttcccaattgaaaaatatgttccagggtgaattctgtaaattagtttggacagaattactgtttcctacgtacagacaacttacggaagtttttggtggcttatgtatgaaatcatcatgaaaacaaaccacagttttaaactgttacttctcaacagtttgattttttaaaaaagacaatactttcctggcatatgtgttagcagctgtcttccactgctttcaaatgtgcttaattttgtctcattattcctttcactccaaatcctttagatgttcttctccaacacgagatttttatattgctttataacttagagaagagtcttaaaaactaatgtcagtgaacaatacaaattctggattgcttaggttatatcaccactttccagtgtgagattaaatagaaattgggtgaaattttattcaatagattaaatagaaacatgggttaaaatcagacacatttttttttccaaatctagttctcagattcttcagtattctgttttccttagttaaatgcatgactttgattttcctagatgtagagacaattagctgcctccaatattaaataactttgaatgtactccttcagaattttaagtctttctttcgtttcagttatgtatcttacaatgacataaactgctatgggaactatagtaaaattcagtaatgtgaaatgtgtgttattcttccaccttcttacatcttgcctatgctcatattcagttaaacaacaattgttgtttttaaaaaacaagctaagtttctataaaattaatttgactatggtgaatctgaataggccaaagcttttagaggcattaattctctttgaatgtaattgtttttctctggttgagagattacttcaacttctacatgctgtgtcgagctataagagaagcaaatgtaggattgtaattaaagatgccatttcagaacactctttaataaagtatgtattcttaaatttggaaggtgactaaagaagcattctgttcactccagattcaccaaaggatttagtgtgtttatgagttgcttaatgacaaaatggaaaacatactgactgtaaaaccagacacagacatgcagtttgtgctcaataactgctaattattgtcaccattcttactattatataagacaatgaagacgacaagctttagtgcatagcttgcggggcagaaaaaatcaacttaaataatttcaagtagcagtgttgtcaattataaataaattgtactctcttgtgatgtagtttcacaaagtagaggagtctcatgaaattcaagattcytatatgtaaagtccatttgatagatttctatttaagagtatgttacaacagaataaattataaattataattgatctctaatatgctaccagttaatcgtgggagaaaaaccatattttataatgagtcaattttaatttttattctatttatttatctataaatgttcatatttacttttccccccaagagtaatcataatctctaatgtatatttacttttaaaaagaagcatttgaagggagaaattgatagcaatcaccatcagttccatatttgagatattaatggttgttttataaactagtgttcttctcatgcatgtgttttgttaaatggaaagaaaaaagacactcgcaccaaaatcatgcacgaggattgggaacacttacacaaaaataataaatgatgattcacccctacataccaagactgtatgtttcctgttgtgttctgattttctttaggatgaacacagatttacaaagatggttacattataatgactgggtcagattctcaaaaaggcaatgaaattaatacagatttctggtttgcaagagtgcccagaactagactttttatagtgggaggaagaactcctgtatatttgaccttcaaatccagacaatatccaccctgttctttatatttctgacttctgttatatttctctgtctctctttttccaagtttggtaacatgaaaggtaataggaccccaccagttgctggactcaaatgaattgcctgtattcattgatggctttaggcttatgtcctttttccatgacttgaactttgtccttttcatagaacagtcaaagaacccattgaagtagtcaaaggctgggtctatatgatgccaaaacattttggctaaatgatgaccacatctagatatttgtaaatattggaaagttcagtaaggtccaacagttttagatcctatattttagtacttcctggattttattttcaatttcatgaaccaaaaaagttccagaatagaggctgaaatgaaagttcacaactttttcttgcattataagaacaaaaaaacaaaagcaaggactatttgctatcattgtcatttcattagaaaaaagggggtgggagccattttattttatgaacaaaatgatcaaaatgagcaaaaacatgaacaacgaataatcttcagagataaataaatttgcataatggaaaaattcaatctattttctttatttcaccaaggactagtttttaacattttattacacgcaagattaggacctttccacagactgatgtttggcaagtactgctctaaggtaactgtgtggaggatgaattctactcctactatttctggtcagtgcatcttgtcattgcgtagatggggccaataccaatgggcatctatatgcttttatttatttggtgatgccgagtatattctcttattctacaatgtttgcttaaaatatgc

SEQ ID NO: 679898 - DNA, 1440 bp, Homo sapiens
aacattttatttataccaaactttgtttcagcaaagccttgtcattcaagcgctgtcataatggtatgatgtaactatatgattttcttttagcaaattagtgaagacttcaaaaataattgttattttgacaaagttattctgggaaagagacaattctgtcaattcttagcgataatgcacattttagagaataatttgggaatttggaggatccttaaaaatgtccataaaatttaacttgattattttactgtgaatatatctttatgaaaagaaaagaaaaaaaatcaaagcaagaagttcatcatggtgaactcagtatttaaaatactgaaaaattttaatgccagttggggggaatggcaaagtattgcctaactatgtaattgattatgagataggtgttaaaaatagatgtttaataactctactatttcattgtggaagcaacatgaaatattgtgacaactatttaagatgtgtggagaaacactttgaagaaaatgcattaaaatattaggtctttaacatatggaatttgggaatttattctattttataaatgtttttctctattttaaatactttttacaatgaccatacaagatatgtattacaataagtagggtccctgtatcccattatgtaagtccttaaactgacagtgcatggagtgaatctagcccagagacatgctttatttacttgacacagagttgtgaaatcttgaatttgaaggccttttcatgaaacctaaggggttttcaagggagaatttaatgtttcaattactccctattattttgcatttttaaaaaagctattactatgtttctatatttttatatcacctgcatgagcactgtagacatttgagtttgcaacccctctaaaccattgtaactcatttgatctccaaaactatcctgcatttatcttctaaatacttgccattctttagctttacttcaaatagcaaagttttcagagggttgtggtcttgctctcctgtctcatggtggaggtactatatagtttagcaattaatcatggttggacaaggaagttaatggaaacgtcaaagtgatttgaaactctagtttaattgtcatagtatcataaatctccatagcttttcactcattgctttattattatacatgtaattatgtaatatatatgttatatatacacatatatatacacacatactgctatttaacagtatgtctctgttttatttagaaaaagaaaaccctgactgtttcaaatatttatgtctaaattaagtgttgaactgtagggatatatatttaatgattgcaaaatacaggcagggcggttcttagttacgtagataytaagtgacttcttttgctatcagcttaatcaccatagaggtactctgtattaccagttgaattgacttttaggtca

SEQ ID NO: 679899 - DNA, 637 bp, Homo sapiens
ttcctgtcttaattcaattttatttatyattatcataatattgtaaaaatggtatgtgtgtgtctatatgctggttgattgggaatacatttttgacatctatttaaatatgatagaatcattaattaacatttgacaataaaatttgacatattcagaaaacaatatgaaatgcatgattctatttatttttccaccttcctgcctaacattaaaactacaagaatatgaaatagtagttggagaatttaaaaatgcatagggtgcaatttgatctagttgatgtttaagttacttgcagccatgattaatacatgaaagtattcctttgtgagtgagaagcctcccttgttgctcagaatgttctttcatgttaatgtttttttttcaggattttaaacagtgagggagggggttttatttgttcaaaaaagcaaagttattttcttaacttttcagagcttacagtaagagtaaaaaaaaaaaggcattgaagtaataattctcctaagacacaataatgagtcaatttagagctgttaggaagaagaatgccatttggtgaaaacgtatatgtaaacactcatcttgagcaccactttgcagcatattgtcagaggagtagtgcaaaatactt

SEQ ID NO: 679900 - DNA, 637 bp, Homo sapiens
ttcctgtcttaattcaattttatttatcattatcataatattgtaaaaatggtatgtgtgtgtctatatgctggttgattgggaatacatttttgacatctatttaaatatgatagaatcattaattaacatttgacaataaaatttgacatattcagaaaacaatatgaaatgcatgattctatttatttttccaccttcctgcctaacattaaaactacaagaatatgaaatagtagttggagaatttaaaaatgcatagggtgcaatttgatctagttgatgtttaagttacttgcagccatgattaatacatgaaagtattcctttgtgagtgagaagcctcccttgttgctcagaatgttctttcatgttaatgtttttttttcaggattttaaacagtgagggagggggttttatttgttcaaaaaagcaaagttattttcttaacttttcagagcttacagtaagagtaaaaaaaaaaaggcaytgaagtaataattctcctaagacacaataatgagtcaatttagagctgttaggaagaagaatgccatttggtgaaaacgtatatgtaaacactcatcttgagcaccactttgcagcatattgtcagaggagtagtgcaaaatactt

SEQ ID NO: 679901 - DNA, 1526 bp, Homo sapiens
tctttagaacactctgaccctcgctagatgttgttattctagttgtttggcattcaggaatccttttcataatgtagttattctgtgaaagcaattcaaagttgatagagaacttttaaagttgtgtgtgtgcgcatataaagtaatttcttgctaaaacaattcatataatttatagaaacaaaccacgtatatactttgactcatttatccctcctaacctgttttccagaattttaaaattaagtgaacttccatcttgaccgacttattactattttatttcttggtgttcacgtatccagcatgtggggtttcccctggtttgaggtgatgctcatgtccaggacatgtggaatgttattttattgtgtgacaaatttgaataacctaataataaatttacgccccctaatgagtggacccagccacagctcacattggygcttgcaaagtgatgcaagctgtgtgtgtgtgtgtgtgtgtgtgtgtgtgtgtgtgtaaaagaaatctaattacaagtgctcatgacagaaataatgaggtttataaaacagtgttcttattcaaaaaattgaaattttagataaacctaaaagtagaaccctaaaggctccaaaaggattaatgcatttttcaattatattgtactgtatttagagatattgtgtgctatattaatctccaccaacttaaacttaatttagataggagctagagctacgtctttttctcaaagatgctttagccctttttaaaatactgagtcaagtctttagggactacagatttacgaagaattacgtagctccaaggaagttcaggtagagaggctctgcttgtctggcagaggatgagatgcttatgtaaaaattaattacattttcctcatatctagtctcccctcatgcacccccttccattgttctccagagctcgttttgcatatgttcctgtggaaaaaagatgaatgagctgaaactaattgctattctagaatgtgatccagatgtaaggaatcagagtcttctggttagaagagaccttagggataatctactccaacaccctcgtatttcagagaacaaaagtaacatttggagcagacagctaggtcgtagcagagtctagaacagggcccccaggtgttccgtgtgaggctcagtctggtgtgctgctttccctcttcctcttgacataaactgtctagtttgtgtttcctgaatgataaaagtggctaaagtaaattctgaaagtccaaaagctttatgtcattatgaaacttcaggtatctcattctctttctgactcttattcccttctcctcataaaaccagctccttctgtctgtggagtctcatagggagactaggtcgaggttgaagtagctggaagaaaagctcattttcttgatatactggtaaagagatgctctccataactactgagagtctcatgagaaggtgtgaaggtatccgagacatcggagggcggggggctaggatatgggcagtcaagatgttttg

SEQ ID NO: 679902 - DNA, 1436 bp, Homo sapiens
tgtcctgccaccccttgggcttcctgatctttccttcatgcttgcccttgagcatcttatggcctctttgagctttcactgtttctgcaatggggccatttccatatcgacagctctagtgtttctgtcactactggattctcccattcgctttgtgatgcatcatggctctagctacacatcctgcctctgtctcagactccatgtgtctgtgaccagccccctgactccctccagccactcaccctggctgtccccaccatcaggggcctggccacaccatctgctgctgagctgcaggacatggctgatcagaaatggagcacaacagtcaggggcagagcccattgaccaaagccttgaatataccatgatttccaagatgtgtcttgctcttctgtcttcagagtacaaaaaggtaaactcctctcaggcaaggattctactttctctctttttgataaattagcagcatagttattttcctgcttgctaggttagataagcagtgagatctgtcacctctttgtcctcctctggttgaattgcttctttaattcaagttttagtttaggaggtagaactttttttttttgtttttttgagacatggtctcattctgtcgcccaggctggagtgcagtgacacgactacagtccactgcagcttctacctcccgggctcaagtgatcctctcacctcagccttctgagtagctaggaccacaggtgcacactaccattcctggctaacttttttattttttattttgtagagagggggtttcccagactggtttcaaactcctgtgctcaagcaatcttcccaccttggcctctgaaagtgctggaattataggcacaagccactgcactcggccaaatatttttaaggtatattttattaaaaccttactaaaatattacagaaaatttccgttgtttttttttttttttttttgagatggagttttgctcttgttgcccaggctggagtgcagtggctcaatctcggctcactgcaacctccacctcctgggttcaagcaattctcctgccttagcctccyaagtagctggaaatacaggcacccaccaccatgcctggctaatttttgtatttttagtagagacggggtttcaccattttggccaggctggtctcgaactcatgacctgaaatgatctgcctgccttggcctcccaaaatgctgggatcacaggcgtgagccactgcacctagccagacaattttaagtgaacaaaatttcatacacaatcttaccatcctagtgcacctgttgtcttcatttttgttttttctggtttccttctactttctactaacatgtacatctgtttttacattgtaattatagtatgtagctgcatatagtataatgaaacaaaattgttttctgtttttcctcctgcttta

SEQ ID NO: 679903 - DNA, 1436 bp, Homo sapiens
tgtcctgccaccccttgggcttcctgatctttccttcatgcttgcccttgagcatcttatggcctctttgagctttcactgtttctgcaatggggccatttccatatcgacagctctagtgtttctgtcactactggattctcccattcgctttgtgatgcatcatggctctagctacacatcctgcctctgtctcagactccatgtgtctgtgaccagccccctgactccctccagccactcaccctggctgtccccaccatcaggggcctggccacaccatctgctgctgagctgcaggacatggctgatcagaaatggagcacaacagtcaggggcagagcccattgaccaaagccttgaatataccatgatttccaagatgtgtcttgctcttctgtcttcagagtacaaaaaggtaaactcctctcaggcaaggattctactttctctctttttgataaattagcagcatagttattttcctgcttgctaggttagataagcagtgagatctgtcacctctttgtcctcctctggttgaattgcttctttaattcaagttttagtttaggaggtagaactttttttttttgtttttttgagacatggtctcattctgtcgcccaggctggagtgcagtgacacgactacagtccactgcagcttctacctcccgggctcaagtgatcctctcacctcagccttctgagtagctaggaccacaggtgcacactaccattcctggctaacttttttattttttattttgtagagagggggtttcccagactggtttcaaactcctgtgctcaagcaatcttcccaccttggcctctgaaagtgctggaattataggcacaagccactgcactcggccaaatatttttaaggtatattttattaaaaccttactaaaatattacagaaaatttccgttgtttttttttttttttttttgagatggagttttgctcttgttgcccaggctggagtgcagtggctcaatctcggctcactgcaacctccacctcctgggttcaagcaattctcctgccttagcctcctaagtagctggaaatacaggcacccaccaccatgcctggctaatttttgtatttttagtagagacggggtttcaccattttggccaggctggtctcgaactcatgacctgaaatgatctrcctgccttggcctcccaaaatgctgggatcacaggcgtgagccactgcacctagccagacaattttaagtgaacaaaatttcatacacaatcttaccatcctagtgcacctgttgtcttcatttttgttttttctggtttccttctactttctactaacatgtacatctgtttttacattgtaattatagtatgtagctgcatatagtataatgaaacaaaattgttttctgtttttcctcctgcttta

SEQ ID NO: 679904 - DNA, 1576 bp, Homo sapiens
atttctttgattggaaacactttttacacctttactgaacaattctggatcttttttttttttttccatcacctggttgttcatcttttactttttgttgctagtttttaaaagtttttaaaaacatattatgatttttatatcaatgtattgcaaatatttttccagtttctcagtttttaatttgttgatttttgtacttacatgaacttttaattgttatgttgccatatctaccaagtttcctttgtatttatgyttacaagggcttttttttttttttttggagacggagtctggctctgtctgtcgcccaggctggagtgcagtggtgcgatctcagctcactgcaagctccgcctcctgggttcaccccattctcctgcctcagcctcccgagcagctgggactacaggcacctgccaccacgcccggctaattttttgtatttttagtagagacagggtttcaccgtgttagccaggatggtctccatctcctgacctcgtgatccacccgcctcggcctcccaaactgctgggattacaggcgtgagccactgtgcccagccacaagggctttttaaaatttagagaacagaaaaatactgaattgcttttagtatcacttttctatgcattcttcctctttgcacattgaagtctgtaattctttggaattcattttagcatctaacgtaaaatagaaactattttttaaagtatagtcacataattttcttagcaaaatttgtcttcatccctgtttatttatttgtttgtttatttcagagttttacactgcaggatccccgttcatttaaattgccagtttcagtatgcactacttcttatgtaaacagtattctgacattctaatcagttccagtgatccttctgcctattcttgcatttgtgacatactcttttaattacgatggctttgtatttatctttaacatcagttggtgcagtttctgttttcatttcaatagcaatcttaaaaaaaaaaacagaaaagaaaagagaaagaaaacatattgcataacttccggatggccacttaacaaccaactcccgccaggacataaatgctctcatttctgtttgtaattgctgccaaatgctactgctttaattttggttacctattgagaaaagaacataggccaacttaatacaaaaatgatatttggcccaagtgaaagcaaattacataaaagtatgctctgtgggtggagatttgatagtagtttgattagaaaaaagtagtagcaaaattgaattatcacaaacttatagtgtataggcaaaatgaactcaaaacaagctacactgaaaaaattctcattgaaagtggaaatttagtttactaatacagtcatgcattgctgagcctgaacgatggagatgtattctgaggagtgtgtctctaggcaattttgttgtcatgcaaacatcacagaatgcacttcacaaactgccactgtatagcctactacatacctaggctatatgctatggcccgttgctcccaggctacaaatctgtacagcatgttattgtactaaatactg

SEQ ID NO: 679905 - DNA, 657 bp, Homo sapiens
tgataaaagccagtagaaaagcctgtaaatttagagaacggttatctgtccttagcacatcgaaaaattatgtgtaggcagaaaaatgatgaaataaatactgaaaaaatatttaccttatgttaaatacgttaaaactggaatatgtttaactttcatctgtcagagctgacaaatctatctgctattcacataggcccaagctggcactttaatcaagaaatttaaatactcttgggtttctgaaatggcaagagaggaatgtttttatattgtaaatgttattctatgttttgctgtgttggtggatactcatcctaatcaaatagtaggaaaagtagtgaagtaattcctaatgctgcctgtagtagtaagcattgcttgggcttccccttgcagagtttataatatggtttgaaagtgaaasttgtaggattaaataattgggtaatggagcaagaacaacatggttattttctgcatccatataaaaatataaatgtgtagtgttttataggtttggagatgacatgtcagagcctcaatcaactgactaaacttgcacaaaacttaagaaaaaaataacaacattcagagggctaaaatatcccagtcatttatttctaaactattactattgcatttattactactact

SEQ ID NO: 679906 - DNA, 632 bp, Homo sapiens
tagatagatttgtgaaaaatattccaaaatagatacactaataatcaacaaatcagtcatctcatataatttaagaacagcagagtaagataacaaatgtaacttatttagatatataattatttttagttttaagtactgtggttaaagtactcagtttaaatacttgtgaggatcacttaaaaatagtgttattaataawaagtcccatatggtgaattcttacagtgtgcagatactgtgcgaaatgttgcacataacttactccacgtggtcctcccaacaacccttttaaggatgtcattattattattattcccactttacagatgaggaagttgggagttagagatgttaaataacaacaaaatgtcatactcccatgcaatgtcagaactgagattcaaaatcagttctatcagatgacaaggtgcctgtttataaccattgtgctgtacttgtactaatgatccttaaactataatctgtggatgcataataggacagtgtgaatatgctgtcatcttaatatttttgcatgagttaaactacagcttgttacggttgttgaactttgtacattttattcgtgaagaaacagaactgaatgcatatgcaatgcctccttcctc

SEQ ID NO: 679907 - DNA, 632 bp, Homo sapiens
tagatagatttgtgaaaaatattccaaaatagatacactaataatcaacaaatcagtcatctcatataatttaagaacagcagagtaagataacaaatgtaacttatttagatatataattatttttagttttaagtactgtggttaaagtactcagtttaaatacttgtgaggatcacttaaaaatagtgttattaataataagtcccatatggtgaattcttacagtgtgcagatactgtgcraaatgttgcacataacttactccacgtggtcctcccaacaacccttttaaggatgtcattattattattattcccactttacagatgaggaagttgggagttagagatgttaaataacaacaaaatgtcatactcccatgcaatgtcagaactgagattcaaaatcagttctatcagatgacaaggtgcctgtttataaccattgtgctgtacttgtactaatgatccttaaactataatctgtggatgcataataggacagtgtgaatatgctgtcatcttaatatttttgcatgagttaaactacagcttgttacggttgttgaactttgtacattttattcgtgaagaaacagaactgaatgcatatgcaatgcctccttcctc

SEQ ID NO: 679908 - DNA, 632 bp, Homo sapiens
tagatagatttgtgaaaaatattccaaaatagatacactaataatcaacaaatcagtcatctcatataatttaagaacagcagagtaagataacaaatgtaacttatttagatatataattatttttagttttaagtactgtggttaaagtactcagtttaaatacttgtgaggatcacttaaaaatagtgttattaataataagtcccatatggtgaattcttacagtgtgcagatactgtgcgaaatgttgcacataacttactccacrtggtcctcccaacaacccttttaaggatgtcattattattattattcccactttacagatgaggaagttgggagttagagatgttaaataacaacaaaatgtcatactcccatgcaatgtcagaactgagattcaaaatcagttctatcagatgacaaggtgcctgtttataaccattgtgctgtacttgtactaatgatccttaaactataatctgtggatgcataataggacagtgtgaatatgctgtcatcttaatatttttgcatgagttaaactacagcttgttacggttgttgaactttgtacattttattcgtgaagaaacagaactgaatgcatatgcaatgcctccttcctc

SEQ ID NO: 679909 - DNA, 632 bp, Homo sapiens
tcatctgagcgaatagctgtgagaaaaatagatgggaggacatggtgttcgggaactattccagtccttgtctaggctgcagtgtgtgcgcttctctgcctcaaatattttctcttatttaccagaattcaagagatgtttatgataacactgtgtatttatgcgttgtttatgcacaggttttggccccagaatgtttcagacatggtgtatttttctcactggaggagaacagccgtttgggaatggaggcagtagtagtagtagcagcagcggcrgaggtattagtagtagtagtaggagtattactaatgttcatggaattcccattatagtagtaaatattcatagaaatttcaaagctgcagcttgagacgataaagattaatgatatcaacacctttaatttaaagatgaaaaactgaaacccaaaaagattatcaggctcttcatgattttaaaagaaagattgtacacccttagctgtgtgttgggaaaatagcaaataagaaaaagtatgaacctggatgctttcactcattagtgatttttttctttatcagattcactataagatacttattccagtatcttattccagatactggaataagaaatacttttctcaccca

SEQ ID NO: 679910 - DNA, 621 bp, Homo sapiens
attctgagcatatttgggccaagaggaagtttctgataaataatatagaagatatttttatgtaacagttatttctgggtaattcacactatgtttcagagcttggattttcttcgggtaggtgtggacatggagtgtagttctaactttacaaccagagcacctgctttgagacaaattcatgagcaaccatgtaggccagcaagcacctttttttccacaggcagcgtccttgtgaactttccgcttggatcctgactctgctgttagtagcctatgaccttggatgaaatgtaagggaatagaaactgaagctatctgtaaagtgaaagagctggtgcctgccttattgggagcctctgggtttatgtatgagtcagatgcgtagagttgctcaccatggagggcccagggtaggcaggcattattgaacaactgctccatgtgytcttttcaatctttgcagaccccacccacgtctcccttgctcagacctggctccccatggcttatgaaagggggctgagtgcagaaggtggcaggcaggacactggacaaccctctgtggcttttccttacccttcgtagtaccatgagattctggctcttcccgtctctgtg

SEQ ID NO: 679911 - DNA, 654 bp, Homo sapiens
ctctcaccaactggaacattatctttcttcatcttttaatgctcagcatttagcacagtggccagtcaatggtgggtgttgaacaascgtgtgttgcatgaatcaatgggaagagggcccttggtgatagcactgttgatgaagagccagaatcagtgaaacatgtgaaaggctccctaccgactcttcacaatcataggacactgttggacgagtacagagaatctcggcctactggtagagtgatttaaacacccccaaaataattcaaccaactcaatgtcagctgacttaacattgcggccccaaaatacatatctaattagcaaatgacctaaaatatttatacacacacacacacagacacacacagagaatacttctgtgagtattctgtatgcccaataaacaatgcgtgatgttaagcttgcctataatctatatatctctatagcatctatctacctattatctatcatctatatgtctgtctacctaacatctgttacctatctgtatcatcaatatgcctacctgtctatcatttatgatctgtctggctatttgtgtatctttctggggacagagagtagcaggtacatttattaccatgtgttgaatctccattgtgccctgggcagcacatgttaatac

SEQ ID NO: 679912 - DNA, 654 bp, Homo sapiens
ctctcaccaactggaacattatctttcttcatcttttaatgctcagcatttagcacagtggccagtcaatggtgggtgttgaacaaccgtgtgttgcatgaatcaatgggaagagggcccttggtgatagcactgttgatgaagagccagaatcagtgaaacatgtgaaaggctccctacsgactcttcacaatcataggacactgttggacgagtacagagaatctcggcctactggtagagtgatttaaacacccccaaaataattcaaccaactcaatgtcagctgacttaacattgcggccccaaaatacatatctaattagcaaatgacctaaaatatttatacacacacacacacagacacacacagagaatacttctgtgagtattctgtatgcccaataaacaatgcgtgatgttaagcttgcctataatctatatatctctatagcatctatctacctattatctatcatctatatgtctgtctacctaacatctgttacctatctgtatcatcaatatgcctacctgtctatcatttatgatctgtctggctatttgtgtatctttctggggacagagagtagcaggtacatttattaccatgtgttgaatctccattgtgccctgggcagcacatgttaatac

SEQ ID NO: 679913 - DNA, 654 bp, Homo sapiens
ctctcaccaactggaacattatctttcttcatcttttaatgctcagcatttagcacagtggccagtcaatggtgggtgttgaacaaccgtgtgttgcatgaatcaatgggaagagggcccttggtgatagcactgttgatgaagagccagaatcagtgaaacatgtgaaaggctccctaccgactcttcacaatcataggacactgttggacgagtacagagaatctcggcctactggtagagtgatttaaacacccccaaaataattcaaccaactcaatgtcagctgacttaacattgcggccccaaaatacatatctaattagcaaatgacctaaaatatttatacacacacacacacagacacacacagagaatacttctgtgagtattctgtatgcccaataaacaatgcgtgatgttaagcttgcctataatctatwtatctctatagcatctatctacctattatctatcatctatatgtctgtctacctaacatctgttacctatctgtatcatcaatatgcctacctgtctatcatttatgatctgtctggctatttgtgtatctttctggggacagagagtagcaggtacatttattaccatgtgttgaatctccattgtgccctgggcagcacatgttaatac

SEQ ID NO: 679914 - DNA, 630 bp, Homo sapiens
tctggttgaaaagtgggaataaaggaagataagaaaacataacactgttactatcttacatgaactggggaagtatgtttattccttagaaacgacagtgtaatgacactgttatgtaaaagggggatcataatgacgtctacttgaattcattttgtgaaatttaaatgactgtctcagtctattttgtgctgccatcacaggacacccaagactagataattgagaaagaaccaaaatttatttcccatgattctggtgggtgggaagtccaagatcaaagcaccagaatcagatgagagccttcttgctgtgtaataacatggcagaaagcatcatacgagtgaatgtgagagaaagagggggaagcagaggacaaattcatccttttatgaggatcccactcctacgataacaatattaaaccattcctgagggtagaaccctcatgacctaatcacctcttaaagtttccacctctcagcacwgttgcattggggattaagttttcaaaacacaaactttgggagaaacaatcagcacattgttaccacagcaatgagatactctattacccgatgacagcagtgtgcctgacagacagacaatacttattaggagtaactattt

SEQ ID NO: 679915 - DNA, 630 bp, Homo sapiens
tctggttgaaaagtgggaataaaggaagataagaaaacataacactgttactatcttacatgaactggggaagtatgtttattccttagaaacgacagtgtaatgacactgttatgtaaaagggggatcataatgacgtctacttgaattcattttgtgaaatttaaatgactgtctcagtctattttgtgctgccatcacaggacacccaagactagataattgagaaagaaccaaaatttatttcccatgattctggtgggtgggaagtccaagatcaaagcaccagaatcagatgagagccttcttgctgtgtaataacatggcagaaagcatcatacgagtgaatgtgagagaaagagggggaagcagaggacaaattcatccttttatgaggatcccactcctacgataacaatattaaaccattcctgagggtagaaccctcatgacctaatcacctcttaaagtttccacctctcagcactgttgcattggggattaagttttcaamacacaaactttgggagaaacaatcagcacattgttaccacagcaatgagatactctattacccgatgacagcagtgtgcctgacagacagacaatacttattaggagtaactattt

SEQ ID NO: 679916 - DNA, 630 bp, Homo sapiens
tctggttgaaaagtgggaataaaggaagataagaaaacataacactgttactatcttacatgaactggggaagtatgtttattccttagaaacgacagtgtaatgacactgttatgtaaaagggggatcataatgacgtctacttgaattcattttgtgaaatttaaatgactgtctcagtctattttgtgctgccatcacaggacacccaagactagataattgagaaagaaccaaaatttatttcccatgattctggtgggtgggaagtccaagatcaaagcaccagaatcagatgagagccttcttgctgtgtaataacatggcagaaagcatcatacgagtgaatgtgagagaaagagggggaagcagaggacaaattcatccttttatgaggatcccactcctacgataacaatattaaaccattcctgagggtagaaccctcatgacctaatcacctcttaaagtttccacctctcagcactgttgcattggggattaagttttcaaaacacaaactttgggagaaacawtcagcacattgttaccacagcaatgagatactctattacccgatgacagcagtgtgcctgacagacagacaatacttattaggagtaactattt

SEQ ID NO: 679917 - DNA, 630 bp, Homo sapiens
tctggttgaaaagtgggaataaaggaagataagaaaacataacactgttactatcttacatgaactggggaagtatgtttattccttagaaacgacagtgtaatgacactgttatgtaaaagggggatcataatgacgtctacttgaattcattttgtgaaatttaaatgactgtctcagtctattttgtgctgccatcacaggacacccaagactagataattgagaaagaaccaaaatttatttcccatgattctggtgggtgggaagtccaagatcaaagcaccagaatcagatgagagccttcttgctgtgtaataacatggcagaaagcatcatacgagtgaatgtgagagaaagagggggaagcagaggacaaattcatccttttatgaggatcccactcctacgataacaatattaaaccattcctgagggtagaaccctcatgacctaatcacctcttaaagtttccacctctcagcactgttgcattggggattaagttttcaaaacacaaactttgggagaaacaatcagcacattgttaccacagcaatgagatactctattacccgatgacagcagtgtgcctgacagacagacaatacttattagkagtaactattt

SEQ ID NO: 679918 - DNA, 1403 bp, Homo sapiens
cgatcaagaagtgatcaaggcttctttcttcatctatttcattaaataccagatacagttaactggattgatcatttgtttgtagctgcacattggaagatcttatccctttgtaagaacctgcactggatgcatacagattgtcaggagctgctttaagttacattcaaagaaggcaagagtggcaaaaccattattttaattttctcttgaactgacataagccagggaagaatttgatggataatttttgtctttgtgagctcacaccactagttaagtgcctgcatcactctgtttatgccttacctcttagctgatatctcagtgcaccttgacctttaagcccatggtatcctagttatgtttcccagggagtaatcaccacattaagtccatgaaacaagacttgtctagttatctcctaaagaaatatttaggcttctgtttaaagtgaataccttaaatacccccaaatttgagaataacttcttatgaaaactctgcagtaggtcaatgccccacaccaagccacagtttcctacctgtatttgggtgaatgtttgcaaagtatgtttctgggcccgggattctttgaatgctttaggttgaggatttttgtgttttttgagagacaagtctgtcctagttcaaaatagaagcttattttagtactttaatgggaaactaattagatatgtgcccacagagttaccttctgaagcatgttagctggaatactcaaaatccaccacaggacaagctccagccataaatgcatgggggtgggaaactaacttttaaaaataaaggtaaataaaatttcagactattgaatgttatgtattgcagatttaaaagcctgaattcaataggagagaagtctatggttaacaacgcttattaaaaataataaaaaagttttgcaatctttattctcttattattcctggaccaattccaggatattttcagtatgatacaatgggatggcaggatgatagcattttaactttattgaagcatatattgaatcagctagaaaaatatggttccttgctctgaagagtgggggttctaacttgaatcagcctcattggatcaagtagaaggataggccaggacaccaggaaagcatctcccacagggtgtggcattctgtttgggggctcacctgtggtaactctcagttagagaggtgagtctaatgagcactttctgagcatgctaatgaaaaagytactcagaaattgaatccaatgcatccgacaaggcattgtataaagttactgtgactagtcacccatccacagctctattctaatgagaaggggtcccaccatttctgctaggaattaaattgctaataatcaagttgctttttaaatcaaaataggcatgaa

SEQ ID NO: 679919 - DNA, 485 bp, Homo sapiens
agaagatctcagcactgggttgcagaggaagagaacatttggggagtgaaccatgcccccttgcattcagtctctaattgttcagttttcaattctccatcctccctctgtcacattacatggttaggaagagattccagttggcacaaatccctttctcattctccaggttgtattttttttcctttctctcttcttttgcttaaaacaccagttgaagaaakagtaacttcagttactcccaagctctaaggtggagagagaaatagaaaacataaaagaattaaggagacttgaagacagaggaagcctttgtagagactctgaagatggtattattaatgtgaagtagatagcgttatctaggtcactgtattttcctcaaatccaaatagctttgttgttttgctcactttaagaataaacacacggccgggcgcggtggctcacgcctgtaatcccagcactttgggaggccgaggcgg

SEQ ID NO: 679920 - DNA, 633 bp, Homo sapiens
ctcaaatagacatttatattttttaaccctttgaaaatataaacagtgttgcaatgactacatatacactctttcatgtgcagttatattagtattataaattcttggaagtgaacttgctgggtcaaggatatgccaatttaaaattttgatagatatttccaaattgccattcaaaagttttgtcccaagttatgtttccaccaagaatgtatatgagagctgtttttcatatcctttccaactttttgattattagtattttcttagattaaaaaatagctacttatttcaattatttgcatttacttaattttgagtgaggttgagtaccttttacgtgcctaaggccatttatattgctttgttctatggactgttcattccctttttgagttagtcacttaagctttctaagtttagtttccttatctgtaaaatgaaggttttgagggattaaagattatctaaggggttttgtacagtgtctggcagaaaataggcaattaatataaatgttgactattrctggcattatttctcctactccatatttgcatctttgtctgtcatttggacctttcttaggagttcctgattcatatttctattcacatattttgttcaaaacca

SEQ ID NO: 679921 - DNA, 633 bp, Homo sapiens
ctcaaatagacatttatattttttaaccctttgaaaatataaacagtgttgcaatgactacatatacactctttcatgtgcagttatattagtattataaattcttggaagtgaacttgctgggtcaaggatatgccaatttaaaattttgatagatatttccaaattgccattcaaaagttttgtcccaagttatgtttccaccaagaatgtatatgagagctgtttttcatatcctttccaactttttgattattagtattttcttagattaaaaaatagctacttatttcaattatttgcatttacttaattttgagtgaggttgagtaccttttacgtgcctaaggccatttatattgctttgttctatggactgttcattccctttttgagttagtcacttaagctttctaagtttagtttccttatctgtaaaatgaaggttttgagggattaaagattatctaaggggttttgtacagtgtctggcagaaaataggcaattaatataaatgttgactattgctggcattatttctcctactccatayttgcatctttgtctgtcatttggacctttcttaggagttcctgattcatatttctattcacatattttgttcaaaacca

SEQ ID NO: 679922 - DNA, 2934 bp, Homo sapiens
aaacccaggcctcatctcccttggttttgtaattctttctccaaccatggccgcttatagtgctaccagaaggtacataatgggaattttattttgtgccttttattctaatttgtatgtttttggtcttctgaaggctaatcgaggacttgcctctttcatgttcgccttcatataggaatttctgacctagatcaatcacctatagctgtggaaccaagaataaatctacattgagtttctacatctgtaaaatgggcacaatggtaggactcatgtcaaagcttctgagggttaaatgagataatctctgtatcagactgtgtacagtttctggaagatagtaagagctcaataaaaacagctaatgccattgcttctgttaagatgatgggttttgtaactgtcaacttcatcttttagcagcctactgaacttcaacaactctgttttgaattctgcagtaagttctcttaatgtcccaatactaattgtggttgaagagtctttggactcaaacctttcagaggcagataattttgttccttgcatttgcaaatcatcacgtatggggctctgatagatgggatgtgattacaagattcgtgtccaagagaatttcatgtgattggctgtttcgttgtcagggctgtgacgggagggtaaaataacagcaacgtctgtccccacgtgctggggaagattcggcctatctagggatgttctcttccttcttcagtgttctatacagaactctctggaaagggggtggccttctcatatcgaaaaggacccttcttcattctagggagtctgaattttcatagcaccattgagttatctgttccagttccaraaaattctggtggtataatacaggggatcaagctactaaccacaatgaacaaagagaaaggaactaaaatttactaagtgtgtatgatgtgccaggtacttcacttgggtagtttagagctattctcacatttagtgtcaccaactccactgaagtctgactggggctaatggttgagtgggtggtgctcttactattaaacggttgattcattcatgagaccctgggctgtgcagactgaacattttcttagccaacattggcccatctgaaaataatgggcaaatattaggatactgtgatttagaaagaaaagctcaagattcctgctttgctattccatttgacaaaactactcagactcatggcatattagtattatgaatgacatgttgaaaggacctgccttaacatacccttaattcccttagctggacatttaacctccaccaacaaattcaaacctgctctcagttaagggaccaatttaatggatgtatcaggagaatttctctgcatctcaatagctttgctgggtcatgttttggtctgatgccctggttcaaggtaaattggttcttgatttaattaagccaaacaaatcttactctattgagcctatgtcttggtccctccaacactcaagttctgcggtatcttcagtggaaaagccagaggctattgtattcctgagtcccagccttaaaaggagtgtccttcagtatcctactgacttagtctggctctttgaaatatcctctcaaggcatgtgcttgatttgtgcattcaaagtccacagttttccaaaccaaatatttaaatgcttttctgctaataaaaaataatttcatgaatgctacttagagggaaattaaccaaatcattctggcagtaattcagattaattttaaaaaacacaggagagattaaaagaatgcatgaatggtaatctaatgagtacagaaattactagactaacttaaatccatgtattccaatgttacagtaggaggtctggggagttgcagagaaatagctgcttgtagttacacatacacaggctgttttttttttttttaagcaaattgtaaatttaattagctgattacaactttgtaaccaaattgtttacttggtacttcatagaaaggagtatagttttcattctcatttaaccttctctgagtgaaggaatgtggaagtgatgattcattttttgtggtcctacatttataactggggagcgctttgcttcctgtgaagcagatcggttccaatgtttgtgggaacattttgactacaactgtttactagtataaaaatctgtgttataaaatgtgagaatcactgttttctatgtaagatgtcaatagttttaaaatggcaataaatatttaagggggaaggagacaaaatatttaagtgattctaaagcttgatatcccaagcgatataatttaatcacaacagccccaccttccaggtctttaatgttttaccaaatacattttatgaataaatattagccaagtacttctggtgtttgtgattaaatattaacagggttatttttacaaaatgcataagaacatttcacaggactgtgtctatgaatgtaaataggttgacagacattttgacagatgcttatgatttcttgtagtgacacctgcgacacctgctttggttattatttactattagaaaaacatttttttttgcctaatgttcaccagttgccttcttcctcatcagtgtagcttgtagtttattatcctctgaaaatgtaattttaccagagcaatgaataaaaaattttgtaatttatactaataagcttgaacgggaatccacttgctttggacatttccagccaggcataatttatccctatccttggctgtgaaacagtgcggattttcttaactgagtccctgacagatggtttcagtgttttcaggactccatttccaatcattttgcccatattgcaaaattggccttgaaaaagggtaaagagttgttatgctgcattaacatcccttcagaattgcttgctgtgaagggcatgaagaaat

SEQ ID NO: 679923 - DNA, 2934 bp, Homo sapiens
aaacccaggcctcatctcccttggttttgtaattctttctccaaccatggccgcttatagtgctaccagaaggtacataatgggaattttattttgtgccttttattctaatttgtatgtttttggtcttctgaaggctaatcgaggacttgcctctttcatgttcgccttcatataggaatttctgacctagatcaatcacctatagctgtggaaccaagaataaatctacattgagtttctacatctgtaaaatgggcacaatggtaggactcatgtcaaagcttctgagggttaaatgagataatctctgtatcagactgtgtacagtttctggaagatagtaagagctcaataaaaacagctaatgccattgcttctgttaagatgatgggttttgtaactgtcaacttcatcttttagcagcctactgaacttcaacaactctgttttgaattctgcagtaagttctcttaatgtcccaatactaattgtggttgaagagtctttggactcaaacctttcagaggcagataattttgttccttgcatttgcaaatcatcacgtatggggctctgatagatgggatgtgattacaagattcgtgtccaagagaatttcatgtgattggctgtttcgttgtcagggctgtgacgggagggtaaaataacagcaacgtctgtccccacgtgctggggaagattcggcctatctagggatgttctcttccttcttcagtgttctatacagaactctctggaaagggggtggccttctcatatcgaaaaggacccttcttcattctagggagtctgaattttcatagcaccattgagttatctgttccagttccagaaaattctggtggtataatacaggggatcaagctactaaccacaatgaacaaagagaaaggaactaaaatttactaagtgtgtatgatgtgccaggtacttcacttgggtagtttaragctattctcacatttagtgtcaccaactccactgaagtctgactggggctaatggttgagtgggtggtgctcttactattaaacggttgattcattcatgagaccctgggctgtgcagactgaacattttcttagccaacattggcccatctgaaaataatgggcaaatattaggatactgtgatttagaaagaaaagctcaagattcctgctttgctattccatttgacaaaactactcagactcatggcatattagtattatgaatgacatgttgaaaggacctgccttaacatacccttaattcccttagctggacatttaacctccaccaacaaattcaaacctgctctcagttaagggaccaatttaatggatgtatcaggagaatttctctgcatctcaatagctttgctgggtcatgttttggtctgatgccctggttcaaggtaaattggttcttgatttaattaagccaaacaaatcttactctattgagcctatgtcttggtccctccaacactcaagttctgcggtatcttcagtggaaaagccagaggctattgtattcctgagtcccagccttaaaaggagtgtccttcagtatcctactgacttagtctggctctttgaaatatcctctcaaggcatgtgcttgatttgtgcattcaaagtccacagttttccaaaccaaatatttaaatgcttttctgctaataaaaaataatttcatgaatgctacttagagggaaattaaccaaatcattctggcagtaattcagattaattttaaaaaacacaggagagattaaaagaatgcatgaatggtaatctaatgagtacagaaattactagactaacttaaatccatgtattccaatgttacagtaggaggtctggggagttgcagagaaatagctgcttgtagttacacatacacaggctgttttttttttttttaagcaaattgtaaatttaattagctgattacaactttgtaaccaaattgtttacttggtacttcatagaaaggagtatagttttcattctcatttaaccttctctgagtgaaggaatgtggaagtgatgattcattttttgtggtcctacatttataactggggagcgctttgcttcctgtgaagcagatcggttccaatgtttgtgggaacattttgactacaactgtttactagtataaaaatctgtgttataaaatgtgagaatcactgttttctatgtaagatgtcaatagttttaaaatggcaataaatatttaagggggaaggagacaaaatatttaagtgattctaaagcttgatatcccaagcgatataatttaatcacaacagccccaccttccaggtctttaatgttttaccaaatacattttatgaataaatattagccaagtacttctggtgtttgtgattaaatattaacagggttatttttacaaaatgcataagaacatttcacaggactgtgtctatgaatgtaaataggttgacagacattttgacagatgcttatgatttcttgtagtgacacctgcgacacctgctttggttattatttactattagaaaaacatttttttttgcctaatgttcaccagttgccttcttcctcatcagtgtagcttgtagtttattatcctctgaaaatgtaattttaccagagcaatgaataaaaaattttgtaatttatactaataagcttgaacgggaatccacttgctttggacatttccagccaggcataatttatccctatccttggctgtgaaacagtgcggattttcttaactgagtccctgacagatggtttcagtgttttcaggactccatttccaatcattttgcccatattgcaaaattggccttgaaaaagggtaaagagttgttatgctgcattaacatcccttcagaattgcttgctgtgaagggcatgaagaaat

SEQ ID NO: 679924 - DNA, 2934 bp, Homo sapiens
aaacccaggcctcatctcccttggttttgtaattctttctccaaccatggccgcttatagtgctaccagaaggtacataatgggaattttattttgtgccttttattctaatttgtatgtttttggtcttctgaaggctaatcgaggacttgcctctttcatgttcgccttcatataggaatttctgacctagatcaatcacctatagctgtggaaccaagaataaatctacattgagtttctacatctgtaaaatgggcacaatggtaggactcatgtcaaagcttctgagggttaaatgagataatctctgtatcagactgtgtacagtttctggaagatagtaagagctcaataaaaacagctaatgccattgcttctgttaagatgatgggttttgtaactgtcaacttcatcttttagcagcctactgaacttcaacaactctgttttgaattctgcagtaagttctcttaatgtcccaatactaattgtggttgaagagtctttggactcaaacctttcagaggcagataattttgttccttgcatttgcaaatcatcacgtatggggctctgatagatgggatgtgattacaagattcgtgtccaagagaatttcatgtgattggctgtttcgttgtcagggctgtgacgggagggtaaaataacagcaacgtctgtccccacgtgctggggaagattcggcctatctagggatgttctcttccttcttcagtgttctatacagaactctctggaaagggggtggccttctcatatcgaaaaggacccttcttcattctagggagtctgaattttcatagcaccattgagttatctgttccagttccagaaaattctggtggtataatacaggggatcaagctactaaccacaatgaacaaagagaaaggaactaaaatttactaagtgtgtatgatgtgccaggtacttcacttgggtagtttagagctattctcacatttagtgtcaccaactccactgaagtctgactggggctaatggttgagtgggtggtgctcttactattaaacggttgattcattcatgagaccctgggctgtgcagactgaacattttcttagccaacattggcccatctgaaaataatgggcaaatattaggatactgtgatttagaaagaaaagctcaagattcctgctttgctattccatttgacaaaactactcagactcatggcatattagtattatgaatgacatgttgaaaggacctgccttaacatacccttaattcccttagctggacatttaacctccaccaacaaattcaaacctgctctcagttaagggaccaatttaatggatgtatcaggagaatttctctgcatctcaatagctttgctgggtcatgttttggtctgatgccctggttcaaggtaaattggttcttgatttaattaagccaaacaaatcttactctattgagcctatgtcttggtccctccaacactcaagttctgcggtatcttcagtggaaaagccagaggctattgtattcctgagtcccagccttaaaaggagtgtccttcagtatcctactgacttagtctggctctttgaaatatcctctcaaggcatgtgcttgatttgtgcattcaaagtccacarttttccaaaccaaatatttaaatgcttttctgctaataaaaaataatttcatgaatgctacttagagggaaattaaccaaatcattctggcagtaattcagattaattttaaaaaacacaggagagattaaaagaatgcatgaatggtaatctaatgagtacagaaattactagactaacttaaatccatgtattccaatgttacagtaggaggtctggggagttgcagagaaatagctgcttgtagttacacatacacaggctgttttttttttttttaagcaaattgtaaatttaattagctgattacaactttgtaaccaaattgtttacttggtacttcatagaaaggagtatagttttcattctcatttaaccttctctgagtgaaggaatgtggaagtgatgattcattttttgtggtcctacatttataactggggagcgctttgcttcctgtgaagcagatcggttccaatgtttgtgggaacattttgactacaactgtttactagtataaaaatctgtgttataaaatgtgagaatcactgttttctatgtaagatgtcaatagttttaaaatggcaataaatatttaagggggaaggagacaaaatatttaagtgattctaaagcttgatatcccaagcgatataatttaatcacaacagccccaccttccaggtctttaatgttttaccaaatacattttatgaataaatattagccaagtacttctggtgtttgtgattaaatattaacagggttatttttacaaaatgcataagaacatttcacaggactgtgtctatgaatgtaaataggttgacagacattttgacagatgcttatgatttcttgtagtgacacctgcgacacctgctttggttattatttactattagaaaaacatttttttttgcctaatgttcaccagttgccttcttcctcatcagtgtagcttgtagtttattatcctctgaaaatgtaattttaccagagcaatgaataaaaaattttgtaatttatactaataagcttgaacgggaatccacttgctttggacatttccagccaggcataatttatccctatccttggctgtgaaacagtgcggattttcttaactgagtccctgacagatggtttcagtgttttcaggactccatttccaatcattttgcccatattgcaaaattggccttgaaaaagggtaaagagttgttatgctgcattaacatcccttcagaattgcttgctgtgaagggcatgaagaaat

SEQ ID NO: 679925 - DNA, 872 bp, Homo sapiens
taaactacctgtgcctaagactttacatcagtctttgccttcagaagaatctcagactgtgacatcatgaacattttagcacatatatttaataataccatatttctctcttttttcactctaggaattttggggccatcactgaagcgctaggaatattttattctatttttgcacttctctctccttttcacatatttcttccttctttcattcttttttatttcttaagcacttgctatgtactaaggattattttatcagtttgggatacatacatgaataaaacagacaaagattcctgcccttagagagctgacattctggtggagggagacargcaataaacagtaaaccacatagtctgttagaaggtgataaaaactatgagaaaaacaaaaattaaggagggtaaggggaaatcaagagttccaggggttggatgggtgttgtaaatttaaatagggcagtaagagtaggcttattgaaaagatgacatatgattaaagacttgagggagaggagggaattacccttgcagataacaggaggaaaaactttccatcagaggcaaaagctggagcaggcatgacacattcaaagaacagcaagagtgaattccttttctttttgtcttcagtcatcttactttctgctattggctattcacttatggcaggtgagcttcgcacaccatgatgcactttcctgtatggttattcatggctcctgctcagtctcccatgaacttctaatttcttcacattgtcctccccattttcctctttttccttcacacactcctaacaatattttgccatttattcaaaggtaatcttaggtatatccttcctctcatgttgatggagcaa

SEQ ID NO: 679926 - DNA, 605 bp, Homo sapiens
cctgtgggatttggagaaagttatataacctaaacatgactcagctttcaaatatgtaaaatggggacattcgttgcacttatctcataggttgttaaaagttttttgaaaaattaaccttttccataatgctaggaacattttctggcaccaagtaaacattcaacgttattctgcttagtatttacatgattattaagcaataatttaaaaatttacataaattagataacgttacrttaaagatatttaaaattccagctaatcaaatggatgatcaaatattctatcttatgaaagtcatttatttttattaactaggaatctctttcacaacatctcttatcgaaggtaagaagaaaccactgaaatatcaaaatcctttgataactggaatgagaatatattagtctgtactcacactggtaataaagacatacctgagcctgggtaatttataaaggagagaagtttaatggactgacagttccacatggttgacctcacaattgtggcctcacaatcatggcagaaaacaaaggagaaaaaaaggcacatcttacatggtggcaggcaagagagagcttgtgcaggggaatgcctat

SEQ ID NO: 679927 - DNA, 584 bp, Homo sapiens
ttcagccaacgctcctctcctcaaggaagcttttcctaaycaccaactgtgaacattccagtcatctgggctcggcagaggtctgcttatgcatccctttcctgatttgcctctcgctgcggtcaaactgacaacctccactcatcttttgctctttttgtgggactaggttattagaccttcatgtgggacctgggccaggagtgctgagtgttcagggagaaagctttccagccacagaagtccgtcttgttgggcagatatgggaaaagttaaataccaagtcaagaaataagcagtatttttgtcatctttgctgacacacagattgtcttattcatttaatattttttattcctgtgcattaggcacagtcctgggtgtgggagaaacaacaggaacccaaccagacaacggtcccactctctgtagtgggtggtaagagacataattgagtgtgagacacggtcacgcgccaaggaaaacaagaggacccagggaagagacgtgggtgttgggggcgcaactacaggcatggcgtcagggctgggggttgggggccagtggagggggaaggggccaaa

SEQ ID NO: 679928 - DNA, 633 bp, Homo sapiens
cagggcatacaggaatattagcatggttgaacagaacagactgccaccaaaccaaaaatcattacactgaaagttcctcaagggcaggttcattcattattgtttccagtgccaggcaccagtttgttgcatagtaaatgttcaataaatgtttaaataatattcttgaggaagaaaatggatttttacaaatacacttataaaaatgtacactggctagggggtacaatcgtgcagtatcttattgctaaatataccataaatgacaacgaaagttgtcttcctcttttaaatgytaaaaatagacatactcaccaaaaaggaaataaaatttaaatggcaaatagaaactacaacataatggacgattaatagatcactatctaccttcacagaatccatatagaaagccattgggaaaaagacagttaaacaaaacccaggaagtaatctatctagtactatcgcaacattttgtagattaagaaaataaaaacaagagataaaaattgactggctgacaactggacagctaggtagtaattagcagaaaagccatgagtagaaatcctatttctttactctcacaaagtaaaacaaaagttctgagatagctgattgaaaaatgtcaga

SEQ ID NO: 679929 - DNA, 1325 bp, Homo sapiens
tattttcctaacaacagaggactgcatgctcttaaatcaaagcataaaatcattattctatcttttcaacaaaaactgatgtaggacctttcattggttttcactgtacaatgggtaagctcttcttattatcataattaatcctgtgatttgctatgttagaaggcttaaatcactgaaatgtaatttccaccatcacaaatagtggcctagattttatgatcaagggaatacatggcatgcataagtasaatgctactatgcatcctggaatccactgtatttcattatacttatattctgtcttactggcagtcttgggcaagcctaagtacacctttattaacaagtcaataacatagctctgtgttaagcttttgtattgatctaatatggttcaccctggtatgccaaacaggtccacatttcaaaacaacctctttcttaactgtctctgatcttgggagtctcatgtgtaaagtaatagaaacatttctggttttagcaatgtaaaggtcacacctgccacaatgaggaagcagtatcttgttttatgcgtatgagagccagaagcaggaaggcatggccagcatcatgactaacccattgctttgtttggtagagccacctttttccttctggatcccttgcatcttgggtgctttttttatatgtactgcatgtccttcttgtgttcaattttgctgctagctaattcctgacaatggcttaaactataattgaggaggtagctgatggaaattagatgatgaaatgaaaatgggtaaaacaaataacactcacgtattttacatagcaacagttaaataaattaagtcaactactcaaaaaatataaggaaattatgaaatgcatagctagttgcatttatagttctaaaaaagagaaattctctccgagtttctactagctccgaagtaaactgaatcgatcttactccatatagtgagtcctatgggtctctccagcttcatattagataatggcagccctgctttcctattaaaatggaagaatctgatgtgacatttatgcttgtttattaactaactgctgtaacagaaactcactcatataaaagtgtttatcaaataaactttattagcttttagcatagttgagaataaaaaccatggcatttgagacagtattaggtaactgattaaggaacctcatgagagattatattagaagggaaagtggactggttagttttgtgggggagagagtggcctgaagttggtggtataatccactgaccatacaataagcctagacaactgcccctgaatataaatccaatt

SEQ ID NO: 679930 - DNA, 1325 bp, Homo sapiens
tattttcctaacaacagaggactgcatgctcttaaatcaaagcataaaatcattattctatcttttcaacaaaaactgatgtaggacctttcattggttttcactgtacaatgggtaagctcttcttattatcataattaatcctgtgatttgctatgttagaaggcttaaatcactgaaatgtaatttccaccatcacaaatagtggcctagattttatgatcaagggaatacatggcatgcataagtagaatgctactatgcatcctggaatccactgtatwtcattatacttatattctgtcttactggcagtcttgggcaagcctaagtacacctttattaacaagtcaataacatagctctgtgttaagcttttgtattgatctaatatggttcaccctggtatgccaaacaggtccacatttcaaaacaacctctttcttaactgtctctgatcttgggagtctcatgtgtaaagtaatagaaacatttctggttttagcaatgtaaaggtcacacctgccacaatgaggaagcagtatcttgttttatgcgtatgagagccagaagcaggaaggcatggccagcatcatgactaacccattgctttgtttggtagagccacctttttccttctggatcccttgcatcttgggtgctttttttatatgtactgcatgtccttcttgtgttcaattttgctgctagctaattcctgacaatggcttaaactataattgaggaggtagctgatggaaattagatgatgaaatgaaaatgggtaaaacaaataacactcacgtattttacatagcaacagttaaataaattaagtcaactactcaaaaaatataaggaaattatgaaatgcatagctagttgcatttatagttctaaaaaagagaaattctctccgagtttctactagctccgaagtaaactgaatcgatcttactccatatagtgagtcctatgggtctctccagcttcatattagataatggcagccctgctttcctattaaaatggaagaatctgatgtgacatttatgcttgtttattaactaactgctgtaacagaaactcactcatataaaagtgtttatcaaataaactttattagcttttagcatagttgagaataaaaaccatggcatttgagacagtattaggtaactgattaaggaacctcatgagagattatattagaagggaaagtggactggttagttttgtgggggagagagtggcctgaagttggtggtataatccactgaccatacaataagcctagacaactgcccctgaatataaatccaatt

SEQ ID NO: 679931 - DNA, 1325 bp, Homo sapiens
tattttcctaacaacagaggactgcatgctcttaaatcaaagcataaaatcattattctatcttttcaacaaaaactgatgtaggacctttcattggttttcactgtacaatgggtaagctcttcttattatcataattaatcctgtgatttgctatgttagaaggcttaaatcactgaaatgtaatttccaccatcacaaatagtggcctagattttatgatcaagggaatacatggcatgcataagtagaatgctactatgcatcctggaatccactgtatttcattatacttatattctgtcttactggcagtcttgggcaagcctaagtacacctttattaacaagtcaataacatagctctgtgttaagcttttgtattgatctaatatggttcaccctgstatgccaaacaggtccacatttcaaaacaacctctttcttaactgtctctgatcttgggagtctcatgtgtaaagtaatagaaacatttctggttttagcaatgtaaaggtcacacctgccacaatgaggaagcagtatcttgttttatgcgtatgagagccagaagcaggaaggcatggccagcatcatgactaacccattgctttgtttggtagagccacctttttccttctggatcccttgcatcttgggtgctttttttatatgtactgcatgtccttcttgtgttcaattttgctgctagctaattcctgacaatggcttaaactataattgaggaggtagctgatggaaattagatgatgaaatgaaaatgggtaaaacaaataacactcacgtattttacatagcaacagttaaataaattaagtcaactactcaaaaaatataaggaaattatgaaatgcatagctagttgcatttatagttctaaaaaagagaaattctctccgagtttctactagctccgaagtaaactgaatcgatcttactccatatagtgagtcctatgggtctctccagcttcatattagataatggcagccctgctttcctattaaaatggaagaatctgatgtgacatttatgcttgtttattaactaactgctgtaacagaaactcactcatataaaagtgtttatcaaataaactttattagcttttagcatagttgagaataaaaaccatggcatttgagacagtattaggtaactgattaaggaacctcatgagagattatattagaagggaaagtggactggttagttttgtgggggagagagtggcctgaagttggtggtataatccactgaccatacaataagcctagacaactgcccctgaatataaatccaatt

SEQ ID NO: 679932 - DNA, 999 bp, Homo sapiens
caaaatcagtgtaaacactgtgtgtgtgtgtgtgtgtgtgtgtgtattttacacagccatttaaatattaaccgcctttgagtattaggggaaaaaacagaaactaaaagcgaatatatttgtttcctgaatcctcccaccaaaccactttttaaattaattatatttcctgccttagtgaggatcttcctattcatcaaagataaaataccaaatataatttactctccttctctacctcacccccaatattcaacaattccctattttattttgattttacttcctattgtctctcagtgcatccttactactggtttctggcctcaatgtctctttccataaatacttcctccagggcttcagcagtgtatattgcaatccatgagtgtgatgcccttataagctgtacaggcacaacccaggcaaacatacacaatgaccataatcataacagtcattactggtgcctttactctggtyttatccatcccccaacaatcctttaatcctccactagagtttattcttttaagtgaaaatctggattcttatctcccctagtatgtatctcttagtgaatttttatatgagatagtcatcaccatcacctattcatcatcccattccatccactgaagttattttacgctatggccttcacaaattactttgagtcctttaaatagattaaaaagtttcttgactctttttgtacatgtcattctgtccaaagtgcaaatttcactattgtccacccaaagaatactaagttttcaccgtcatttaagcctttaatctcaggatctcacaataaatacaatcactctttcctatatgcctaatcttctgcttgagcataattttaatgtgctaactattctgtaattatatatatatttttaattcagccacttctctcactagaaagtgagtttgttgaaatcagggtaagtatattttatgtttggatgaattccccatcacaatacttcacat

SEQ ID NO: 679933 - DNA, 1174 bp, Homo sapiens
atgccatcttgttggaagagataatgtgaaaattgtggacctcaaaaaagcattctaggatgtgtatcctttcacactgtctgattttggaaggtcaaagtgtgaactctacctagcagcgtgcctggcttccagagtgcgctaaatatgttactttcatttcctcttgttaagagagagaagataaacatctgcttacatcaatgtgtttataaaccagggaaattctacagtgccatacttatgatcaagtcttataatgatcacatatagaataatagtcatcattggttcacttgcttgactaatgaatagtttaaagctaattttatgatcatttaytaataacataattatttaaaaatgaaataagctacttgtccttctcttaatatttgttttccttaaagtctttaaaagattatgatcttcagtaagttagaaaagatgatttgttctaatgctttccttttggttttggattttggaaggtcacatgattcagtgtcacactaaatcaaattgacataatattaaaaacacattttctaagtggatttttttagctaaaattttacttggatgaagattatcaatattaccttgaacttctcagagccaggaaaagaggcaaaatagagtgttttatttctccctttatacttgcaggactgttgcccagtccacctccaaaagtcaagcctttcttggtggagtcttatttactgtgtcaaaaggcataaatattgcatctcatcctgaatttgagggagttgacacctcttaaccaaaaccagcccttagtcagaattatgactaactcataatgggcacattctgtgctcactgcgtgtcttaactcacttaactttcatgaatatctcaagagacaggtactatcgttatacccaactcacagatgagagaagcaaggcacagaaggtgaagttaatgtctggcctggaaggcaatcttaaagactttggtttatattctgggggaaataagaaactgctgtagggttctgagtctgagagtaacacaacgtgatttaagtgtcatatgcccactccagatgcttcgttgagtctggactgtggtgagttgaagaaaaaggtaggaagactactcacgcctgtaatcccagcactttgggaggccgaggcgggcggat

SEQ ID NO: 679934 - DNA, 632 bp, Homo sapiens
tgaaaggaatacagagaaagggacatagaaaaataaataaatgaaaaatgaggcaatcgctaacatgaggaaaaaaacaaaagtgtttttaagaaaggatatataatcatgatacactctaggattagcaggaattaatgcttacaatttataataatgagtaatcagtatgaataacgagtagacaaagaaagtgaagaaactagactttcatcttgagaagcattaatatgaaataatatataaaatatctagcactataaaactaaaacatggcagtataataatataatttagaaaaacaagtaaatacctcaaaaaattgctgatgagtctgtgtgcttcattagacagcagagtcagggtgaaagggtcaagcaaggcactgtttttaaaaaatgcaatatttgagtttataaaccgtgtacaygttcctacattttcacaaaattaaaagttttaattgaaaatgagaaataacgagcaaaaaacacagatacatattttggggaaattatttaggggaaatttttctgctccaagctttctaaatgtgaagtataattagtttggctctcctcactctacctcattaaaaacggagttctggcagttatatcaaagtgagatat

SEQ ID NO: 679935 - DNA, 632 bp, Homo sapiens
tgaaaggaatacagagaaagggacatagaaaaataaataaatgaaaaatgaggcaatcgctaacatgaggaaaaaaacaaaagtgtttttaagaaaggatatataatcatgatacactctaggattagcaggaattaatgcttacaatttataataatgagtaatcagtatgaataacgagtagacaaagaaagtgaagaaactagactttcatcttgagaagcattaatatgaaataatatataaaatatctagcactataaaactaaaacatggcagtataataatataatttagaaaaacaagtaaatacctcaaaaaattgctgatgagtctgtgtgcttcattagacagcagagtcagggtgaaagggtcaagcaaggcactgtttttaaaaaatgcaatatttgagtttataaaccgtgtacacgttyctacattttcacaaaattaaaagttttaattgaaaatgagaaataacgagcaaaaaacacagatacatattttggggaaattatttaggggaaatttttctgctccaagctttctaaatgtgaagtataattagtttggctctcctcactctacctcattaaaaacggagttctggcagttatatcaaagtgagatat

SEQ ID NO: 679936 - DNA, 661 bp, Homo sapiens
aatacttaccatgtgttacagtggcctacagttttcagtacagtaacatactgtgtaggattgtagcctagggggcaaaaggctatataccatatagcctagatatgtagtaggctgtaccatgtagttttgtataagtacactctgtgatgttccacaatgacagaactgcctaaggacacatttcctagaacttatccctgttgttaagcaacacatgactgtacaaacattttgggaggtagaggagaaacctgattccgtgtcctgtccaaccactaagtgaaacctcagagactggaaatttcacccttgattataatcttgattttagggtatctcagaaaggtgctcacccttcccaaakatagttgttttctaatatgggaaatgagaacttcatacaagaatgaaataaagtaattacaaaaccaactgtcagtgtaagatgtgttgcaaatgagtgacaaggaatagcggtgctgttctacaactccactccgaacagcattcttatggctcagaactgggagactacctcgtgagatagtggtttggtctattactagactcttccttgggtgctgttttgtggtctttattaactgacagccatcttgggccattggattgatatcccacattgaatgtaggacatctt

SEQ ID NO: 679937 - DNA, 1089 bp, Homo sapiens
tcactgtccgagattctgtactgggggtacacgcgtcctctgccctaaggcatctttgagtccaagagatattttgaggactggaaatcataggaaactgcccatgagttcacacatatttccaatggtgtccccaatttcagggagtccacggatcacctaaagccagcccctccagtttggctaagaaactctatatatcaagttttgtatcatatgtattgctcttaactcagaaaattccaccatttatagcagtggtttatttattyataccattgaaggaaatggtttatttatgaatctatattatggatattctataagatactgggtgtacaaaaagactaagtcgaaaaatctcagctgtgcacagtggctcatgcttgtaatcccatctctttgggtggccaagggaggaagactgcctgaggccagcagttcaagaccagtataggcaacatagcaagagcccatctctaaaacaaaacaaaacaaaacaaaacaaaattagccaggtgtcgtggctggcacctgtgttccaacaacttgagagactgaggtggcaggaggattgcttgagcctaggagttaggggctgcagtgagctgtgatcgtgacaccgcactccagtctgggcaacacagcaagaccttgtgtcaaaaaaatttttttaattaaatataaaagagtttcatgacattcagagaccatccaaagaacctgtgggttccggccaggcacagtggctcacgcctgtaatcccagcgctttgggaggccatagcaggtggatcgcttgaggtcaggagtttaagagcagcctggccaacatggtgaaaccgcatctctactaaaaatacaaaaaattagatggggccaggtgccatggctcatgcctgtaatcccagcactttgggaggccaaggagggtggatcacgagatcaggagatcgagaccatcctggctaacaccccatctctgctaaaaatacaaaaagtagccaggcatggttgcgggcacctgtattcccagctactcaggaggctgaggcaggagaatggcatgaacccaggaggcggcacttgc

SEQ ID NO: 679938 - DNA, 1154 bp, Homo sapiens
ttaacaaccagattgcatgggaactaacagtgagaactaactcactcccatgagaatggtgccaaaccattcatgagggatctgcctccaggacccaaatacctcccaataggccctaattccaacactggggatcaaatatcaacatgaaacttggaaaggccaaacaaaccatatccaaaccacggcagagactttcagtaaaaaccatgccttggttagtagtagatttgcggcggcagcaaatctctatattttttgtgaattacaatgacacgttcacttagctttatcatcggtgtggggtgacaacacttcagaccaataacagattcaactccactgagctggtgggggcatgtagaataaagaggaaaaaaatagtgatttttaaatctaaattcaaagaccataggatgtcttcattcactgcaaggtgataatttgtgaacatattgaaagacccatggaagttaatacccatattttctgaagaagacttttgccgaaggagatttctgcttcaggtggtgaaggagtttagaacacaccactgcaaaatatgccattctggcaaattttacttacatattttacttacttttccacaactgcctttcttggtttaacctagtataaaagcatttaagttttatcagttctttcagtaatcatttccttatgagrgctcacttgtcacataaacccatattaaataaatgtgtatatgttttcctagtgttaaatctgccttatgtcaagttaggtctcaggcacaaccagagaccctaagaaaagagaggtagagttttgcctcttctacagtgggaaataaaagctgttagatttagatttatttataaagactagtaaagtttagaacacattgatgcaacatgagattggataagtacaaatttcctataaaaacagaagtgctttgggcatttggcattaagtaatgagaaataaatgtcagggtaaacctcaattcttccccagtataactcccattaaaattatatgttcagaggaaacattttattttataaatacatttacccctttcccagacctattctgtaaataattactcactttacctgttggagccttttttttttctttttcttttatttttatttttttgagac

SEQ ID NO: 679939 - DNA, 592 bp, Homo sapiens
ttttgagaaagaaaaaaacttatggaaaataaacaagaattgaagaaataataaatcaaaaaacatatttattttggatggagactaaaacttgagtgccagacaggattcattccttcagttgttcagtctctcaacagatgtttattcagcaaatattgtatgccagatgctgttgtaagtgctagggatatggcaggaagtacatgttgttaggagggaaagacaggcaagaaacaataagtactagattatggaaagacactgttttagtctattctcgcagctataacagactatcacagactggtaaattataccgaataggaatttctttctttttttttttttcctgagacagagtcttactccctcccccaggctggagtgtagtggcgcgatctcagctcactgcaacctccgccttctgggttcaagcaattatcctgcctcagcctcctgagtagctaggattacaggsgtgcaccaccacgcccagctaattttttttgtatttagtagagacggggtttcaccatgttggccagcctgatctcgaactcctgacctcgtgatccacccgcctcagcct

SEQ ID NO: 679940 - DNA, 634 bp, Homo sapiens
aagaagaaagggatgacacccttcgcatccctacagggcctcccttactgctccgagggcagaaaaccaggttggatacagccctgtcccatgtatttcaattttttaaatctgtaatttttctccaattaaagaaatagttacattactaaagcatcttttttaggtgaaatcttcatagatttaatgtttttgtgctaagaagaaaatggatatggttttaaaatcaaccaaggaaagtttcttaaagaaaggtgatggttagactgcaagttggagaattgtgtagaaagagattcgtcatgctgtggcataacgatgctcacagtaaatacttgctcaaatcaattaattgcatccagaacggtttcaaacttctatcagtgggtaatcgaggttctccaagagtgttgcctcaatgtgtatttttagccttctctctcayagaatttattaaacaaagaaataaatacagccttgctttatagctaggtaaatacattcattgtgatctaaacatatcttctcatttctaactctgtgattatatttcttgcactgcttctctcacctggaaagcccaccttagcttttttatctgtttacatgctatacttacctaaagtataaatag

SEQ ID NO: 679941 - DNA, 1202 bp, Homo sapiens
cctagggagactcagtaactggaaggttatcaggctgcaccatgctcagcacccaagccmcctgtttccaaagacctttcacccaggcccttgttattaatgacctgtcttttgttcttgtatgctgtcatgatcttacattttaagattcttctgaaatatttttctaacctcttgattgttttttccaacataaaaaatcctgtattttactattgttgtatgaacagtaaatttgaggctataagattatgtcctaataattttagggatttagctccctaaattttaaaaagtaggaaaacatacatctattttatctaaattcatgtttttcttaaaaatcatgatccaaacttaataacagtaattagaatttattgaatactatctcttgtcactcatttcacgtatttatatgtgtcaattaaattgatttccatgggaactcttggcagaagttactattattgttgcattttacaaatgaggaaattaaagcacagagaggttaagtaacttgttcagtttcacaggaagtttggcaacagaacctggtttcattatcactctgcttcttccagggcattttcagattattggctgaaactacttgcaggatattatggcagacattctgaacaaatgtgcccagaaaataggttaaatttgtgacttctgtatcttctcatatgggctatggcccaagtactcatggaatatagtccatgacttcctataagaatttgtatcattttgatttcggtttaagtcaaactacagctctatcagaatttttagaaatgtgtttgtcattcaatgcctaaaaatctagaaacagttcatcatggaagcagtcatcccagaaagcagactctttcttagagtttgtcattcttcagattataatcaaaagaacaaataaatcctgaaccatttgaatagaaaagtctaaagttatgctccttgagaggagcattttgaccagagaatgtatcatgaatgtcacgatacgttgattgtcttcaaaggccagccatacaggcagttaggcaatgtggaagaagttaaatgagtgtgagtcactaacctctgaggatcctggaaatatgaacatttagatacctgaaaattcatatattttccttagatatatgaatagttatgctgctaaaaataacattgcctcctgaaaatacgtc

SEQ ID NO: 679942 - DNA, 596 bp, Homo sapiens
gtacagtggcacaatctcgactcactgcaacctccacctcccaggtacaagcgattctcctgcctcagtctccctagtatctgggattacaagtgtgcatcaccacgcctggcgaattttggaattttcagtagagatggggtttcaccacttttgatgaggctggtctcgaacttccgacctcaggcgatctgcctgcctcagcctcccaaagtgctgagattacaggcgtgagccaccacgtctggccccaagaaacactattacagtaattgaagattttgaaaagcttatgggcgctgcactataatataagcttcatgaagcttcatgtctacttttttcaccactgtatccccggctgctaacaaagtgcctgcacagtaaatgctattgacyaaatgcatgaatgatgcttcaaaactaagaaccaagttcatcattaatgtaattattgatgggctgcaaatataaatataaatacaaatattaacttttaagaatcatagattactagagtgttagggactcagtcctaagtcctaaatcgtctagttaatctcataggcttcaagtagaattcctcataactatca

SEQ ID NO: 679943 - DNA, 596 bp, Homo sapiens
gtacagtggcacaatctcgactcactgcaacctccacctcccaggtacaagcgattctcctgcctcagtctccctagtatctgggattacaagtgtgcatcaccacgcctggcgaattttggaattttcagtagagatggggtttcaccacttttgatgaggctggtctcgaacttccgacctcaggcgatctgcctgcctcagcctcccaaagtgctgagattacaggcgtgagccaccacgtctggccccaagaaacactattacagtaattgaagattttgaaaagcttatgggcgctgcactataatataagcttcatgaagcttcatgtctacttttttcaccactgtatccccggctgctaacaaagtgcctgcacagtaaatgctattgaccaaatgcatgaatgatgcttcaaaactaagaaccaagttcatcattaatgtaattattgatgggctgcaaatataaatataaatamaaatattaacttttaagaatcatagattactagagtgttagggactcagtcctaagtcctaaatcgtctagttaatctcataggcttcaagtagaattcctcataactatca

SEQ ID NO: 679944 - DNA, 596 bp, Homo sapiens
gtacagtggcacaatctcgactcactgcaacctccacctcccaggtacaagcgattctcctgcctcagtctccctagtatctgggattacaagtgtgcatcaccacgcctggcgaattttggaattttcagtagagatggggtttcaccacttttgatgaggctggtctcgaacttccgacctcaggcgatctgcctgcctcagcctcccaaagtgctgagattacaggcgtgagccaccacgtctggccccaagaaacactattacagtaattgaagattttgaaaagcttatgggcgctgcactataatataagcttcatgaagcttcatgtctacttttttcaccactgtatccccggctgctaacaaagtgcctgcacagtaaatgctattgaccaaatgcatgaatgatgcttcaaaactaagaaccaagttcatcattaatgtaattattgatgggctgcaaatataaatataaatacawatattaacttttaagaatcatagattactagagtgttagggactcagtcctaagtcctaaatcgtctagttaatctcataggcttcaagtagaattcctcataactatca

SEQ ID NO: 679945 - DNA, 596 bp, Homo sapiens
gtacagtggcacaatctcgactcactgcaacctccacctcccaggtacaagcgattctcctgcctcagtctccctagtatctgggattacaagtgtgcatcaccacgcctggcgaattttggaattttcagtagagatggggtttcaccacttttgatgaggctggtctcgaacttccgacctcaggcgatctgcctgcctcagcctcccaaagtgctgagattacaggcgtgagccaccacgtctggccccaagaaacactattacagtaattgaagattttgaaaagcttatgggcgctgcactataatataagcttcatgaagcttcatgtctacttttttcaccactgtatccccggctgctaacaaagtgcctgcacagtaaatgctattgaccaaatgcatgaatgatgcttcaaaactaagaaccaagttcatcattaatgtaattattgatgggctgcaaatataaatataaatacaaayattaacttttaagaatcatagattactagagtgttagggactcagtcctaagtcctaaatcgtctagttaatctcataggcttcaagtagaattcctcataactatca

SEQ ID NO: 679946 - DNA, 596 bp, Homo sapiens
gtacagtggcacaatctcgactcactgcaacctccacctcccaggtacaagcgattctcctgcctcagtctccctagtatctgggattacaagtgtgcatcaccacgcctggcgaattttggaattttcagtagagatggggtttcaccacttttgatgaggctggtctcgaacttccgacctcaggcgatctgcctgcctcagcctcccaaagtgctgagattacaggcgtgagccaccacgtctggccccaagaaacactattacagtaattgaagattttgaaaagcttatgggcgctgcactataatataagcttcatgaagcttcatgtctacttttttcaccactgtatccccggctgctaacaaagtgcctgcacagtaaatgctattgaccaaatgcatgaatgatgcttcaaaactaagaaccaagttcatcattaatgtaattattgatgggctgcaaatataaatataaatacaaatawtaacttttaagaatcatagattactagagtgttagggactcagtcctaagtcctaaatcgtctagttaatctcataggcttcaagtagaattcctcataactatca

SEQ ID NO: 679947 - DNA, 596 bp, Homo sapiens
gtacagtggcacaatctcgactcactgcaacctccacctcccaggtacaagcgattctcctgcctcagtctccctagtatctgggattacaagtgtgcatcaccacgcctggcgaattttggaattttcagtagagatggggtttcaccacttttgatgaggctggtctcgaacttccgacctcaggcgatctgcctgcctcagcctcccaaagtgctgagattacaggcgtgagccaccacgtctggccccaagaaacactattacagtaattgaagattttgaaaagcttatgggcgctgcactataatataagcttcatgaagcttcatgtctacttttttcaccactgtatccccggctgctaacaaagtgcctgcacagtaaatgctattgaccaaatgcatgaatgatgcttcaaaactaagaaccaagttcatcattaatgtaattattgatgggctgcaaatataaatataaatacaaatatwaacttttaagaatcatagattactagagtgttagggactcagtcctaagtcctaaatcgtctagttaatctcataggcttcaagtagaattcctcataactatca

SEQ ID NO: 679948 - DNA, 767 bp, Homo sapiens
tagttattacacaattaatctggatcatatttcayactatattcaacaaaaaagttcagatatatcaaagagttacaaataaaaaataatccataacataaactattgatcctaaaaccatatcctggctttgggagagagaaggagaaaaaataatttctgagtaaagagacgagagagatgaatagtaaacttaaaggagttctgacatacaaaacttaaacctttgcaaagttcactccttcaataactactttttaaatacatacgacatttcacacactgtgcttaggccctgatttttcagagtttgaataaagcacatatgagccctcacctcacagaactgaaatctaccggaaaacacagtaaatagcacaaaaagtgtacggaaagttgcaataaataagtactagaggaaaagacacatatctccaagggaacacgaacttaggagggaccacagatggaacggtcatgaaagtctccaaggcatgacatcaaagctgacgacagaaggaagaactcgcaccttggccaggcacagtggctcaggcctataatctcagcactttgggaagccaaggcaggtgaatcacatgagaccaggagtttgagaccagcctggccaacagggtgaagccccatttctaaaagaaaaaaagaacacatgccaaccagatgaagactggggaaagccagcagcacaaaggcccaaagcaggtaaaagaggaccaaccttagtgacaccaacaaaacaagggcga

SEQ ID NO: 679949 - DNA, 767 bp, Homo sapiens
tagttattacacaattaatctggatcatatttcacactatattcaacaaaaaagttcagatatatcaaagagttacaaataaaaaataatccataacataaactattgatcctaaaaccatatcctggctttgggagagagaaggagaaaaaataatttctgagtaaagagacragagagatgaatagtaaacttaaaggagttctgacatacaaaacttaaacctttgcaaagttcactccttcaataactactttttaaatacatacgacatttcacacactgtgcttaggccctgatttttcagagtttgaataaagcacatatgagccctcacctcacagaactgaaatctaccggaaaacacagtaaatagcacaaaaagtgtacggaaagttgcaataaataagtactagaggaaaagacacatatctccaagggaacacgaacttaggagggaccacagatggaacggtcatgaaagtctccaaggcatgacatcaaagctgacgacagaaggaagaactcgcaccttggccaggcacagtggctcaggcctataatctcagcactttgggaagccaaggcaggtgaatcacatgagaccaggagtttgagaccagcctggccaacagggtgaagccccatttctaaaagaaaaaaagaacacatgccaaccagatgaagactggggaaagccagcagcacaaaggcccaaagcaggtaaaagaggaccaaccttagtgacaccaacaaaacaagggcga

SEQ ID NO: 679950 - DNA, 767 bp, Homo sapiens
tagttattacacaattaatctggatcatatttcacactatattcaacaaaaaagttcagatatatcaaagagttacaaataaaaaataatccataacataaactattgatcctaaaaccatatcctggctttgggagagagaaggagaaaaaataatttctgagtaaagagacgagagagatgaatagtaaacttaaakgagttctgacatacaaaacttaaacctttgcaaagttcactccttcaataactactttttaaatacatacgacatttcacacactgtgcttaggccctgatttttcagagtttgaataaagcacatatgagccctcacctcacagaactgaaatctaccggaaaacacagtaaatagcacaaaaagtgtacggaaagttgcaataaataagtactagaggaaaagacacatatctccaagggaacacgaacttaggagggaccacagatggaacggtcatgaaagtctccaaggcatgacatcaaagctgacgacagaaggaagaactcgcaccttggccaggcacagtggctcaggcctataatctcagcactttgggaagccaaggcaggtgaatcacatgagaccaggagtttgagaccagcctggccaacagggtgaagccccatttctaaaagaaaaaaagaacacatgccaaccagatgaagactggggaaagccagcagcacaaaggcccaaagcaggtaaaagaggaccaaccttagtgacaccaacaaaacaagggcga

SEQ ID NO: 679951 - DNA, 767 bp, Homo sapiens
tagttattacacaattaatctggatcatatttcacactatattcaacaaaaaagttcagatatatcaaagagttacaaataaaaaataatccataacataaactattgatcctaaaaccatatcctggctttgggagagagaaggagaaaaaataatttctgagtaaagagacgagagagatgaatagtaaacttaaaggagttctgacatacaaaacttaaacctttgcaaagttcactccttcaataactactttttaaatacatacgacatttcacacactgtgcttaggccctgatttttcagagtttgaataaagcacatatgagccctcacctcacagaactgaaatctaccggaaaacacagtaaatagcacaaaaagygtacggaaagttgcaataaataagtactagaggaaaagacacatatctccaagggaacacgaacttaggagggaccacagatggaacggtcatgaaagtctccaaggcatgacatcaaagctgacgacagaaggaagaactcgcaccttggccaggcacagtggctcaggcctataatctcagcactttgggaagccaaggcaggtgaatcacatgagaccaggagtttgagaccagcctggccaacagggtgaagccccatttctaaaagaaaaaaagaacacatgccaaccagatgaagactggggaaagccagcagcacaaaggcccaaagcaggtaaaagaggaccaaccttagtgacaccaacaaaacaagggcga

SEQ ID NO: 679952 - DNA, 2012 bp, Homo sapiens
ctcctaagcgcgatggcacagtgagacagaaggcatctgcaagccaagaacagggccctcctggaacctgaccatgctggcagcctgatctcagactttcggcctctagcactgtgagaaagaaatgtctgttgttttaagccacccagtctatggtattttgttatggcagcccgggtcaactaagacagtgatgtatatagaaatatgtaagggagaaataatatgcaagagatataacaataatatgccaactgcttttaaatacagttgcaaaaaagaaaaaaaatggaacaaaatcttaatgattgttaaatttaggtgccaagtacttaggggtttcatatgctatcagctcagtttctaagtctgaagtttcctataattaaaaaaaactttaaaaaagaaagaatattaaaaaaaaaaaaaactttttcaatgtaactcctagaaccaaaaccctgaaaataaaatgttttaagataaagtactaatttgaaattattacaaggcaaaaataaaaggtgagtagaaactttaccatctttaaataaatttagtaaaaattgttacaagtttttttgttttgttttgttttttgtttttgagacagtctcccaggctgcagtagcatgatctccgctcactgcaacctccacatccccagctcaagcgattctcctgcctcagccttccgagcagctgggattacaggcgcaggccaccagcaccaccacggctgactgatttttttgtaattttagtggagtcggggtttcactatcttggccacactgatttcaaactcctgacctcaggtggatccacctcaggtgatccactcagcctcctaaagtcctgggattacaggcataagccactgtgccccgcagatttttaagataatatgaaagtccaacctaagggtctcaagctaaaagcactgaccttaaaggctagtattctgttgtaattaagtggcctgttcaaatcacttttatcaggggttaaattttcttaattatgaaagagaaataatttttgaatcctgttgtaaataggatgattttcattgtatatatccaataaattattgttgaaatatttcacttttttcctgtagtttggaactgtttattttgaccctttttggttataatagttctcaaattagaatcttggatttttcaaaaagataataccacctgaaaataataagttttgcttctttctaacctgtttggggtgtttttgtctgattgcactaacactactaaataccataatactacacaacaaaaagggagagcagtcaactcaatattgtccctgattttgaaaggaataataatagttatgacattaactattaaaactaattttttcaataattttgagaaagtgtctatttgtattttacaaagttttgaaaggacagatattcaartacgcgcctttgatccattcttgcgttaattaagtcacagaaatttgttctaaagcaaagatgaataatttcatattttatgtataattctgaaacatcactgtaaactattcaaagttctatgcccaaaatacatgccctcaggaattttgaatagaggtacaaaaagccattcctcctctagttaaataatccaaactagttttggggttcttaaatctgtttatttcaatcacctcattcattccataagcacttattaattatctgtgatccagggtctatgaaccaaacatagaagaatataatgattaagagacaacttctcatcttcaaggagctcacctaattgtcttaaatattgttaacataataatgaaggaagaaacatccacctgagatatccagaagaattcagaggaaggaacagcagtcctgaacactgagtgacaatggtcaatggcatctctccaagtatgggccatgaactcctgtgatccctgagaatactactaaaacactgtttgcttttttcattgatagtgcaatagcaaaggtacgtgcc

SEQ ID NO: 679953 - DNA, 572 bp, Homo sapiens
atctctacattttcccccttaggttaaattgtaaatttttttttttttttttgagacagtgtctccccccattacccaggctgaagtgcagtggtgccatcgtagctcactgcagcctcaaactcctgggctcaaaccatcctcccgctttagcctccccgtgtagctggggatacaggtgtacactaccaaacctggccaaaacttttaaatgtatcaccaaattgccctccaagtgaagttacacatatgtacactctcatgagtracatttgagtggctatttccccatgatctctccaacatcggttattgtgattttttaaaagaccttgccaatgtcataggtaaaaaaaatagcatatcattgtttgaatctattgttattttcattatactgttttatttctggtagaatgtaaaattgcatacatactatttttacaactttataaaaatacatggaacacgcatgtttcaagtgtggaaagaacaacagaaaaatgtcagtagttgtatgatgggattgtaatataattcttttatgttgtaaattttttaaattaaaaaga

SEQ ID NO: 679954 - DNA, 572 bp, Homo sapiens
atctctacattttcccccttaggttaaattgtaaatttttttttttttttttgagacagtgtctccccccattacccaggctgaagtgcagtggtgccatcgtagctcactgcagcctcaaactcctgggctcaaaccatcctcccgctttagcctccccgtgtagctggggatacaggtgtacactaccaaacctggccaaaacttttaaatgtatcaccaaattgccctccaagtgaagttacacatatgtacactctcatgagtgacatttgagtggctatttccccatgatctctccaacatcggttattgtgattttttaaaagaccttgccaatgtcataggtaaaaaaaatagcatatcattgtttgaatctattgttattttcattatactgttttatttctggtagaatgtaaaattgcatacatactatttttacaactttataaaaatacatggaacacgcrtgtttcaagtgtggaaagaacaacagaaaaatgtcagtagttgtatgatgggattgtaatataattcttttatgttgtaaattttttaaattaaaaaga

SEQ ID NO: 679955 - DNA, 572 bp, Homo sapiens
atctctacattttcccccttaggttaaattgtaaatttttttttttttttttgagacagtgtctccccccattacccaggctgaagtgcagtggtgccatcgtagctcactgcagcctcaaactcctgggctcaaaccatcctcccgctttagcctccccgtgtagctggggatacaggtgtacactaccaaacctggccaaaacttttaaatgtatcaccaaattgccctccaagtgaagttacacatatgtacactctcatgagtgacatttgagtggctatttccccatgatctctccaacatcggttattgtgattttttaaaagaccttgccaatgtcataggtaaaaaaaatagcatatcattgtttgaatctattgttattttcattatactgttttatttctggtagaatgtaaaattgcatacatactatttttacaactttataaaaatacatggaacacgcatgtttcaagtgtggaaagaacaacagaaaaatgtcagtagttgtatgatgggaytgtaatataattcttttatgttgtaaattttttaaattaaaaaga

SEQ ID NO: 679956 - DNA, 1381 bp, Homo sapiens
agaggctttgaagtagaactactgactaggtacttgaaaatgcaggtctgacactcaaaagagggacaagaggtacataagtggattcaaaaattgttcatgtagctcccataggaggaacaaagacagaactcaaaacaaaacaaggaaaatcatctggactttgcaaagataaatcatagagatagtcaaagtagatttcataaagtatgatcagaaagacaaaaagagaaggaaagtagagggccatgaaagccacagaaagtttcacaaagggacaaacagtaccaagcatcaagctctgcaaaggttagctggaagaagcaattggtggtggtggcggtggctagattcagtcattagaatggagactatatataggcatctttttgactctgatcaaactcatttaatgaaaggagaccaggatttactkagacaatgtgtgatgcatcagatagcagagatgggttggtaagcatgtgttaaaactgtaaagaaaacacaattgaatcacagtgaaacaaactatagtttctagttggaattttaacactattaaattatttaatttcctggtaagtcattgctgtcctctgtgaattaaacatattcaattaagtataatgtaagatctcttacagctccaaaaaatatcagagttccactgaaaaggatgtaactgcttgtgaaaatactggttaaaatgggttaaatgaaaattttccattaaagaaaaagaaaagaatatttttccaaattatgctgattataaataacctttcaatattaaacacattgaataaaactgctaacagatacattatattaaaaatcatgctaaatattaaactgctttgtgaaattttagaatgacttttgctttggattttagttacgtcatttttttttccttttttcttttttctttctttctttttttttttttttgcaatcactttatggctgaccacacattaaataaaaccttgttgactcttacgtaaacaaatggttaagtaaacagaaacttacataaagacacattactttatgttaaagggggatattgatttttatatccatagtagagaaaataaataaaactagataacttctttatcactccatatgattttgatagattatttgataggcataagaaacagggaaataaatgtggtatttatgctttatgtaaacttcataaagctgtgaaaagaccaaagttcttcattatagtcaaacaagtgttatacttctttaagaatgtcattcattgtttgaggaacttcacttatataattaccattgagcaacttgtatacttaggttaaaaattagtaatttcacacatgagagtgtgagaagttagtaaaat

SEQ ID NO: 679957 - DNA, 1109 bp, Homo sapiens
cacctaggacttcaatgaacagactcttatccctgaagactagatcagggaataagagtacaccagctgatccctgccatggtaccattaaataggatatcaacagtctcttaaagaggaaaagtgattataggctatctcagaaaagcacacgatcaaataatgttggagccattccagactaaacctaaagctattagctggtagttcacctgcttatattattttactcctagtacagatatagctgttaccattataatctttctgctatgtttacagaaaaaaatggaaaaaaattacttttgtctttcttgttatgtttgccatctgtcaaatcttaaataagtttttcaacaagctatagtaactgattagtaacaacaactacaaatctgaaaagagatctccctrtaatctataaattacttataagcaagcagagttgcataaacaaaaattttcatggtataaacacatgtcccaaagacaagtttataaagatcacttataggtcagccagatgcctcaccctcgtatcagtcacatagatgagatttctcctcaattctggaagaatgagttaagaacctggcagggtactgtcattagtgaaagaagaatcaatttaaatttattctattctgctatttaaatgccaaatacacacagagtgttggattcatgtatatttttctatttctgttacatccaaaagaaatttatactgaaaagttaaagcacaatgtcatttaaagatactggcttctggttttttgttcatctccatgtaaggagcgtggaagtcactacttcattctaacaataaccaaaaagctgaacaaactgaaaaaccaacaactcttcttagatctgtaagagaagtgaagtcacaggtcacacaaatactctcaaaattggagagacaggtagatacagagaagcacaacttaccagtgcagaaactcagaagcaaaaccttctacggaaaccagtactggggctggaaaacctgaactttaattgacaaattgctggagtcttggtgtggacaagcctgagagtttgaatccaggaagaacaagtcactaatgggagttatgctttta

SEQ ID NO: 679958 - DNA, 918 bp, Homo sapiens
cacgttgtgcacatgtaccctagaacttaaagtataataataaaaaaaaagacatgaagggaaaaaaaaaaaaggaatactgagaattaagagagtctgtggaactagaaaaaaaaaaaaaaagaaacctaggctctcgattgctggctttctcttttgcttctctaccacgcctcccctccaagaccttgacccagggaagggaggtcaggagattcatcttgcccctgtgaagctgtctcaatctctrtgcactcagcttaaagattaggactaagaccagagggtttctgctcaggcacacaggctataatgcagtgaagagcttcactgcttcattcacgaacttcttcaagttcaacttagctgaacgctacactgctgggacagacacctttcaggacgtgagattgctcaacagggcaaagcatttgcttattaagcaactatgtatgtatcaaaactcacttttagttcctcacctcactatgccccccaaacctaaactattatatcaagaacttcgcccagccccagtgagaccacctgttaacctcacaatgggtaggctccgtctcttggtgggtaccaactcaatgaccacaaacagggaggatttaacaagggggattttattacttgcaacaagttcaggagagcacagaggagagttccccagagcatccccagctgagtcgggttttataagcatagcgtaatgaggtgtgatctgattggatcctgcaataaggtgatgtcaggaggcatgatctgactggacactgtcatggggtgaccccagagcttgatctgattggatcctggattctgccatgaggtgtcggcttcttaattcagtccccacccctcagtcgagcacttaggtttcccctatgcttgcacacttggttcatctgg

SEQ ID NO: 679959 - DNA, 466 bp, Homo sapiens
aaactcctcccagactggaaggggtacatgtatccccctgcctctcagatttgtatctttttggaatatcccatagttgttggccgccctcccttaagccttctcgttcacctgcttgtgtgggatacaggatacagaactctcactagtatctaaatgtctgctgtttccaattgtcttctcatccacaaattcagagataatttatttcctctgcagtgacatgaactttggagatactgacttcacaatatttctgccaaatccccctgtcttatatctagcccttagctcttcaaaactaaaaatgcaatgatttgatttgatgttccagtctcccctgggccagaagctgcaggggataggggaactcatgttaaaagtggcaacattcagggactaacagaaagaaaaaagaacatgttaaccaatatccttcacartgtcaccctgaaacatgggtgac

SEQ ID NO: 679960 - DNA, 624 bp, Homo sapiens
atttcaaatttccgaaggaagcctgagttattgaaaacagatgttttaggaaaaggaatagaaacttttaagcggtaactttttaataagccataatagttcaaagagtgtcagaggaacacagcccggagatattcacctttgaaaagtsccagatggccaagtaacattcccacaaataaagaaaaacccaagaagagaaagtttttgcaaaaataccaaaaccaaccgtatttgcacctcacaacatgacacctcccagatctggaaggtcatttgaagataaagtcccagattccatggaccaggcagcagaaactcaatcctctggactgattagaaagaaagtcaggtcctaaagcagtgggaagtgtcattttgagacatttgggaagtaatgtagttttattaacctgatatacatttagaaatcaaccattgacagagaggcctcactgaactctgtttacaaagagataaaaattatttgtaatctacgtttatatttaagtccatgtttgcaagagtaaagctatagagagatgatagatagatagatagatagatagatagatagatacattagataggtgatttattgattgatagataaatagattataa

SEQ ID NO: 679961 - DNA, 624 bp, Homo sapiens
atttcaaatttccgaaggaagcctgagttattgaaaacagatgttttaggaaaaggaatagaaacttttaagcggtaactttttaataagccataatagttcaaagagtgtcagaggaacacagcccggagatattcacctttgaaaagtcccagatggccaagtaacattcccacaaataaagaaaaacccaagaagagaaagtttttgcaaaaataccaaaaccaaccgtatttgcacctcacaacatgacacctcccagatctggaaggtcatttgaagataaagtcccagattccatggaccaggcagcagaaactcaatcctctggactgattagaaagaaagtcaggtcctaaagcagtgggaagtgtcattttgagacatttgggaagtaatgtagttttattaacctgatatacatttagaaatcaaccattgacagagaggcctcactgaactctgtttacaaagagataaaaattatttgtaatctacgtttatatttaagtccaygtttgcaagagtaaagctatagagagatgatagatagatagatagatagatagatagatagatacattagataggtgatttattgattgatagataaatagattataa

SEQ ID NO: 679962 - DNA, 577 bp, Homo sapiens
agtcttagctccaaacacaatcacattctgagatactggaggttaggacttcaacatacgaattttggaggaacacaatttagcccataatagtcccgtttcctcaaatccccactaagccacgtggatttactctttcaatttaagatgtcaggatcttaaatatttcccttcttggagctgccatgctaaattttaactgtgagcagaaaaaggttttctcctaaccaaatctggaatctggctgcaggtttgggcccataacataaagattaagattgagataaaagcagaaaaaaggcactgcccagggaggcacaggtcatcctcttaaatgaaggtcaattaccaggggaacagagagaaagcaacctcctccaaggctggactgggacaaaggcccatgaggactgcctgggccctgagcccttgggtatccctgggaatgacctcagattcccaatatccttgcrtgagcctcctgacctcaggctgggggtggagggcccctgtccgggtgctgtcagcccagggcagggactctgaatgctaccggacctgcactgaaccatggaag

SEQ ID NO: 679963 - DNA, 1002 bp, Homo sapiens
agcactttgggaggccaaggcaggcagatcgcttgagctcaggagtttgagaccagcctgggcaacattgcgaaatcctgtctctacaaaaaatacaaaaaatcagccaggtacggtggcactggcctgtagttacagcatcttgggaggttgagcctgcgaggttgaggctgcagtgagctgtgattgtaccactgcaccccagcctgggtgacagagtgagactctctctcaaaagaaagaaagaaaaaataatactatcaagagtactcttactataatacatacatttaaaataattttctatgatggtgggtggacaacggtaatgggtttsagacaatccacctacattcagttgctgatgtgacctcagttgggtcagggtgaatttgtcattgtgatgtctgtaaaacgaaggtatgtgtaagggacaaaatccatggccccagcttcctgacgtcatgttttcctttttctgctaacaatctttcaagtgtattagctgttaatgactgagggactttatagctcttcccattgtaaatagattggctagttaagtattttccaagtatgttgaacagaatactaattctagggaatgacaatagtcgtcatatcagagaaggtttctacagtcaaatatgtatgagaaatgctgtattaaaaatgtaaaaatgttaaacacatttctttactgcaagagtcacgtacattgtgattttccgaaaggagtatatagccggtgttgatgcacatatatgatcacaaggctctatttattattattttttctagctttcctttttaaaaaaatttaattttttttttttttagcagagctctcagatatatctatttgggaaatgctgtatcaaacagctatctggtatttctgttcacacagactcaatctttggtttaaagcatgtggactgtgctatttatttttatctaaaccctatatatattataaaggagcatcattttcttttattc

SEQ ID NO: 679964 - DNA, 1328 bp, Homo sapiens
catttggcttagacctgagaaaaatctggactcattcatctgaacaggagttatcatccttggtaacggggcagaggatgcagagagactgtcaatcacttgggataagaggaaaattttagatgtactttctacaatgtagcagttgctttttatttcttgaaactctataagatactcaaggaaccaacatgatttgctaacgatctcaataacaacctcaagaggatgttttagaatccattcttatttaatctcaagtgtgtttgctgctttaatgatgttccaggccaaatgactcatgccaattccatgacagagacaggaatttaatcagggccatgcattcaagggttggctgactatgaatacagtactgcctgtcatgaactagtataactctgaggtctaaagtcttgctggatwgttgtgagcacggagcttctggataacgcatttcagtgctgtacagagagacgggcgagcactaatgtcaacaattgagagggaaaagttttgctgttggttatggcaacactaacaacacagatagaaaagttctgtctaggatttcctagcagctcttgaaagataatggtttacattttgcaggattctcactaaagaggctttcagtgactcaatgattaataaacttaataataatttgcattttataacattaatgcttttcaaagcactttcacatccatcagctcatttgatcctcacagccttgtgaataatgaattttatataattagtgcaatttataaagaaacagaatgcctagttaggattgttcactttggtttttaataatgttgaaattggaattcaagttactcttgttccactgttctatataatataagattccctctttaattgggataaactcaaaaagtacaaatttcccctttctttaaacaaaattagtttagaatagtgttgtctgtgtttctggtcataaatccaggatggaaagaaatagaagatgtgaaaggacattttggtgcctttgaggattgctgagaaatgattcacataagggctagaatttggtatttctctgtaagctatacttgacccaactccctagggagaagcacagaaagtgagattggctactggcacaggtaaatcataagtcatttgtactagtctaaagtaagcaaatttgcattagttaaggtctaaacttcagaatactaaaataaaatttagtaatgttaaagttgataaaagcaagtttttagaagacctcttttaacaaaaagcaaagataaacttatttacatgtcaatttatttttagatatttatttt

SEQ ID NO: 679965 - DNA, 591 bp, Homo sapiens
ccatcagctgctccgtagggctgggttatcaattatcataagcaacctccagttggtagtcaagctatggctcaagagctccggtgaytgtctcaaccccacccttgaagataacaaacctcattttgctttgtgccaaaaatgacaaactcctgcatgttcatgcagggatagcaaaatatgtccttatttcttatgctggaatggcaaaaaacaaaacaaaaaagtttcttctcttaatgatttgtgtgtatgctggagtatgcatatgtaaataccaagcaagagttgaagtagttacatagtggatctcacatccacttttctttatatcttcactttttttaatgaataatagctattaaactaaagtccaagctgaaacattctaagttttaatgagaagagagggcaaacaatactctatcatgttttcatttgacatttatatatattacgatatattttaatgaaaaattaattttgaaaacatcttcagatttggggaaagggcagcagtaacaacaatgtctggcaaaggtcagatcagggagaagagataacagtaaaattatctgtgaggaagaactg

SEQ ID NO: 679966 - DNA, 591 bp, Homo sapiens
ccatcagctgctccgtagggctgggttatcaattatcataagcaacctccagttggtagtcaagctatggctcaagagctccggtgactgtctcaaccccacccttgaagataacaaacctcattttgctttgtgccaaaaatgacaaactcctgcatgttcatgcagggatagcaaaatatgtccttatttcttatgctggaatggcaaaaaacaaaacaaaaaagtttcttctcttaatgatttgtgtgtatgctggagtatgcatatgtaaataccaagcaagagttgaagtagttacatagtggatctcacatccacttttctttatatcttcactttttttaatgaataatagctattaaactaaagtccaagctgaaacattctaagttttaatgagaagagagggcaaacaatactctatcatgttttcatttgacatttatatatattaygatatattttaatgaaaaattaattttgaaaacatcttcagatttggggaaagggcagcagtaacaacaatgtctggcaaaggtcagatcagggagaagagataacagtaaaattatctgtgaggaagaactg

SEQ ID NO: 679967 - DNA, 659 bp, Homo sapiens
cgatctgtcttgggttgtgtttcctctgagtgagcgccattctcagacacagggtgggtgtctttggtagcttctgctccttgttattcaatgcccctgtcctatggacaagaagtggcattttttcccattgttttaataaaggccctgaatttactctgatttgattgtgtagtcggataccaacctgaattaatcccaaggaccagtggaatatggtggtgttttgacagaatattagagatcactyctttgagaaacatttggactgagtgtagagaacagggtgtttcccagagaaaaattaggatatggttactaaagacgggaaacttacaatgagaggctgaaaaaccttaaacgttcattccagagttgttctgaatcattcgagctcttcgattgtcttgaaatattaggatttacaaacttctggctaagcaagagcttgccttttagtgtcattcagagtaaccaaaataatatcatgatgctgtgtattccattaattctaaaattgcttaggaattgtacagaagttctaagtttacttagaattcatgaaataattctgatataaaagggatataactgatatatctctttcaaagaatattgatacttctgttggtttttcaatggtgttgttacaccctgtg

SEQ ID NO: 679968 - DNA, 741 bp, Homo sapiens
tgatacatcttcaaatttcccatttcccatttacagttttttaaaatctggaacccaattaagaatgtcacatttcaaagatttatgtcatttttgtttaattaataataatttctcacctttattttttgtctttcataatattatcatttcaaaagagtccaggccagttgtttttcagaatgtcaccttcgtctccaaatttccccagactatataaactgctgatatttggtcacttttgacctataaaaacaaattcttatgattcaacataataaatagttgatacagcctatctataccagcaaggtatagasccatataatagcattttcattattagtggttttattaaatttaataagtggttaatgttaatatctactcgagttttccattgaaaatttgttatcttactttgtaattaataatctctgaagtgggctgggcatggtgactcatgcctgtaatcccagcattttggaaggcctaagtgggtggatcacttgaggtcaggagtttgagaccagcctggccaacatggtgaaaccctgtctctactaaaaatacaaaaaaaaaaaaaaaaaatcagccaggcatggtggcacacacctgtagttctagctacttgggaggctgaggcacaagaatttcttgaaccctggagttggaggttgtagtgagtcgagatcacactactgcactccagcctgggtgacagagcaagactctgtctca

SEQ ID NO: 679969 - DNA, 741 bp, Homo sapiens
tgatacatcttcaaatttcccatttcccatttacagttttttaaaatctggaacccaattaagaatgtcacatttcaaagatttatgtcatttttgtttaattaataataatttctcacctttattttttgtctttcataatattatcatttcaaaagagtccaggccagttgtttttcagaatgtcaccttcgtctccaaatttccccagactatataaactgctgatatttggtcacttttgacctataaaaacaaattcttatgattcaacataataaatagttgatacagcctatctataccagcaaggtatagagccatataatagcattttcattattagtggttttattaaatttaataagtggttaatgttaatatctactcragttttccattgaaaatttgttatcttactttgtaattaataatctctgaagtgggctgggcatggtgactcatgcctgtaatcccagcattttggaaggcctaagtgggtggatcacttgaggtcaggagtttgagaccagcctggccaacatggtgaaaccctgtctctactaaaaatacaaaaaaaaaaaaaaaaaatcagccaggcatggtggcacacacctgtagttctagctacttgggaggctgaggcacaagaatttcttgaaccctggagttggaggttgtagtgagtcgagatcacactactgcactccagcctgggtgacagagcaagactctgtctca

SEQ ID NO: 679970 - DNA, 687 bp, Homo sapiens
attgctgaggtgccaagcacctgctctatgggctgccatggggagtatggagaaggttaaccttagccctgccctcaaggagcttcacagtctagtcgaggggagacgagattcatttaaacatggctggaaggggatcggacatcgagttctgtagagcccagaaggtggcaggcagggcctgagtgggatggtcaacccaaggccacctcgtgctgccctcaggactggcccctctctctgcagatatcgtcacaagagatgagttcctcagaaggcagaagacggagaccatcatctactcccgagagaagaaccccaacgcgttcgaatgcatcgcccctgccaacattgaagctgtggccgccaaggtgaggcggggactgggaggttggatggggccaggaccctccgtgatgatcctcatgaggccacctgggccagggacaagggtgggatgaagagttgttttcacctccccgtggccagacctctccttttccccttgtcccagcagctgccccgtsttaactccctctctgcacccttgttccctgggctctgaagtgagtttttattttggagctttctatttgtgttggcttcctggagctggtgtgtgttcgcattatttaggagtgtgtgtgtctggttgtgataacaagggccagagatagagaacgagct

SEQ ID NO: 679971 - DNA, 701 bp, Homo sapiens
aaaaataaaaaataaaataaaaaccttggctgttgactccaaatatcctgcttcatcatctctccactccagaaacttttcacattcttacaaagggtgttcgtttctcctctaagtatttgctcgccagccccacctgcaagaaggtggaagtagggcctctgcctgggatggtaactctcaaatgtaaggcaagacctgtctctccaccaatatccccaggactgaaggactgtgaaagtctgcatattgatcaagcttctccctcccttatctgaagggacttacttccttcaagacacttttcctcttcccacctagctccatgcccccatccagtcatcttccaacccatctctccccacctgcatgccacacaagaggggcgtgaccacagcacctggaagttccttaaagtkgaatggtgtgtcaggccgggtgcggtggctcatgtcagtaaccccagcactttgggaggctgaggcaggcaggtcacttgaggtcaggagttcgagaccagcctggccaaaatggtgaaactccatctctactaaaaatataaaaattagctgggtgtggttgtgcttgcctgtagtcccagctacttggggggctgaggcaagggaatcacttgaacctgggaggcagaggttacagtgagccaagattgcaccattgcactccagcctgggtgatagagt

SEQ ID NO: 679972 - DNA, 701 bp, Homo sapiens
aaaaataaaaaataaaataaaaaccttggctgttgactccaaatatcctgcttcatcatctctccactccagaaacttttcacattcttacaaagggtgttcgtttctcctctaagtatttgctcgccagccccacctgcaagaaggtggaagtagggcctctgcctgggatggtaactctcaaatgtaaggcaagacctgtctctccaccaatatccccaggactgaaggactgtgaaagtctgcatattgatcaagcttctccctcccttatctgaagggacttacttccttcaagacacttttcctcttcccacctagctccatgcccccatccagtcatcttccaacccatctctccccacctgcatgccacacaagaggggcgtgaccacagcacctggaagttccttaaagttgaatggtgtgtcaggccgggtgcggtggctcatgtcagtaaccccagcactttgggaggctgaggcaggcaggtcacttgaggtcaggagttcgagaccagcctggccaaaatggtgaaaytccatctctactaaaaatataaaaattagctgggtgtggttgtgcttgcctgtagtcccagctacttggggggctgaggcaagggaatcacttgaacctgggaggcagaggttacagtgagccaagattgcaccattgcactccagcctgggtgatagagt

SEQ ID NO: 679973 - DNA, 701 bp, Homo sapiens
aaaaataaaaaataaaataaaaaccttggctgttgactccaaatatcctgcttcatcatctctccactccagaaacttttcacattcttacaaagggtgttcgtttctcctctaagtatttgctcgccagccccacctgcaagaaggtggaagtagggcctctgcctgggatggtaactctcaaatgtaaggcaagacctgtctctccaccaatatccccaggactgaaggactgtgaaagtctgcatattgatcaagcttctccctcccttatctgaagggacttacttccttcaagacacttttcctcttcccacctagctccatgcccccatccagtcatcttccaacccatctctccccacctgcatgccacacaagaggggcgtgaccacagcacctggaagttccttaaagttgaatggtgtgtcaggccgggtgcggtggctcatgtcagtaaccccagcactttgggaggctgaggcaggcaggtcacttgaggtcaggagttcgagaccagcctggccaaaatggtgaaactccatctctactaaaaatataaaaattarctgggtgtggttgtgcttgcctgtagtcccagctacttggggggctgaggcaagggaatcacttgaacctgggaggcagaggttacagtgagccaagattgcaccattgcactccagcctgggtgatagagt

SEQ ID NO: 679974 - DNA, 1420 bp, Homo sapiens
aagttcacacagtttgtaaaagctagagtctgtgccttaattcacataatctctattcagagcctgtactgttaaccactcaaggattctggaacagaagctaacagttttctgcaacgagtctttgacttaaacatctgaaataacattggaaatagattataagaggagtcagtgtgtttttctatagtttcaaaatacttttaacatcttattgtcaaaaagattggataactgactttctttgctcataataactctaaattctagttcctgagtacattaacacatcttctttacctaactaccaatgtcccccatcatcgacttatcagcttgtttgagacaatgagaaagactgattttattttcaagaatatagactcttggttcaaaacattttcaggaaaaatattttaaaaccctacagttgaacaggtgtgtttccgtgttgatgatgtgctcaggatacaaaggtgaaataaacattttttctgccttcaggaagccctcaatctagaagagtagaggtccaaaggtgccatatgttcacactgtgagcctgcaagatctccacgttaacaaaggaaaactcttcctatgaatcttcatgatgataggccatgtctcttcttatttttgttttaaataaacatccaccttatcatgatttcttttggtttattgtggggttttgtccttgtctttttaaaaaaattttcagtttttagcaagaattattccatcaacatctagtgtttctctagagatgatgtatgcactttatgctaatcaggaacccagagaggagaattttatttctggagcaacaactaaatggtagttcattgtgccccaatttgatccctgcccctttctgtaaacactgatagaatcttcctgtcagattttaaattacacaaatttaagaaagaagtttgtgtacagactcaccctcagtttccactttctgcagcttccattttttaagacactactggattgactcatgctgtccctgtattgttcttagaatgtatgtcttagaaaaatctgagacagtccattattctttatctggaygtagcaatgagaaacacactacttacaggctttttctgtggccaccttcaattatactgctgtatttgagggaactatacatgccaagatacaatgtatcattcctcatttctttttacccctgctcatgctttaagttggaaattgtttctaaataattatagaaagactgatgttgatggtctagaagaagctgactatacctctgtctacctaaaaaagtctcttcacccatttgggtactggctgcccagatttcaaattggtgtagatcctgtgccttagctacttggaggtaacagaaaaggaccaaaatctttttcctgcctacttccca

SEQ ID NO: 679975 - DNA, 658 bp, Homo sapiens
tgtattccagtttttcacctttactgctccatggaagatgttgctttagtcataagtcaaattagcttcacacctgtgcccaactgggaatttgctgggagagtattttacctacatcaaatttactaagctctaatacccaaacattacatctagtcatccatgattcctctttcttttgcgctccacatccaatccattataaaaattatcatagctaactctttaaaataaatccagaatttgactatttattaccacttctaccatcatgttggtcatgctaccatctttttatgcstggactagagccagtgccctgcaactggtcttcctgcctccacaatttccccacatattgcattctcagccccaggttgatctgttaacacataaggcacatactattttccatgtgattaccatggccttcaccacccaatgtgatagattcagttcctcactaccactctgataacttctattctcatttttctcctttcactgctttccaaacactggtcttatttttccaacctacaggtcctttgtacatgatgttgttactttagtctggatactgttgagtagttgtaggtttcatggttcattgcctgacatcctctgttccaacatgatcttaccagaaaggccaccc

SEQ ID NO: 679976 - DNA, 1455 bp, Homo sapiens
tgctcttgacacctttgtcagaaatcagttggctgtaaatgcatggttttacaggcatttttattgcatttaatccctatcatcagatcatgttgagtaggcatggacatcttaacaattaagtcttccaactaatgaacatgagatatctttccatttatttgtgtcttcttccatttctttcataaatgttttatagttttctctgcagtgatgtttcaccttcgtggctaaatttatgacacaatattttctgtattagatcaagtttaatgtttttcaaaatttttataaacttgattattgttgatttattttcttagttactgagttttatcaaaatcgtttatataattgtggaattctcctcttagttatgctaatttttggtttccacatttaaatctatattattaagtataaaatttagaattattatatcttcttgatagtttgattttagtcattgaaaagtgttgcttattatctcagtagttccccttatcttaaaatttactttgtttgtatttatatagctatagagcaactatatttgagatcatattggttgtatgtcattttccttcaggaattctgtgttctggctgggtgccactgctcatgcctgtaatcccagcactttgggaggccgaagtgggtggatcacttgaggtcaggagttcgagaccagcctggccaacatagtgaaaccccatctctactaaaaatacaaaaaatagctgggtgtagtggcatgtgcctgtagtcccaggtactcgggaggctgaggygggagaattgcttgaacccaggaggcagaggttgcagtgagccaagatagtgccaccgcactccagcctgggagacagagtgagactcggtcaaaaaaaaaaaaaaaaattctgtgttcttataacaatacatacatatctcctgttagcagcatatattttaaaattaacctggtaacctcttactttagttgcagctcacatgtgtgctaaataattaatcatataatgctggtttaaatatatccctctacctttttttttccctatttttgctatcagttctatcttctttttttccatttctttgtcttctgctagattaataccgtattttttcaacttgtcacttttcatgcttaactcctttatgatacattcctttactcttgtttttattattaccttagaaattactacatttgctattaattcattagattgtttgactatttgattattaaataaatgaacaattttacactttcacagagtaaggactttttataatattttaacttcaattaacctctaccttcaatagtttttttcatgttatgtatttaatgattggtacattttaaagctcatcagtttttcaggtcattttataaattcaatatttatatattagccatatatttacactttttgttgaaaatca

SEQ ID NO: 679977 - DNA, 607 bp, Homo sapiens
cggggccaactttcaaagggacagctgtgtcagcgcagctgcctgggcctgtgggaagggccgacagcccccacctggcccacatctctggcttcaggtgtctgcccccccattgtctgctcaccctttcaatctggtccaccaggccaatacctggtggaactgtggaaggttccaaccttcctgcaggaaaggaaggcgttactgggcagagatgggactggctttctgggtggttgttagtattctaagttttattcatgaccttttttttttcttcaaacaacagtatccaaaaagccattcccgtacctcaagtaaaaggttaaacctgaggtcagtgctgggcctgtgcagaggccctgctcgtgcarcacagcctgggtccacctccccagactcatttgttctaactgctctacaccagcatcgatctacagatctacagatttgttctaactgctctacaccagcatcgatctacagatctacagatttgttctaactgctctacaccagcattcgatgtacagaaagtactgtctcatttggttctcactgaagggaagacactattattcccatttcacagataaagctaaggaag

SEQ ID NO: 679978 - DNA, 644 bp, Homo sapiens
taaagatacatgcacgcgtatgttcattgcaacactattcacaatagcaaagacatggaatcaacccaaatgcccatcaatcatagaccagataaagaaaatgtggtacatatacacatggaatactatgcagccataaaaaggaatgagatcatgtcctttgcagggacatagatgaagctgaaagccattatcctcagcaaactcacacaggaacagaaaaacaaacactgcatgttctcacttatgagcgggagctgaacaatgagaacacatggacacagggaagggaataacacacaccttggcctgttgggggatggtgggagggagagcatcgggataactagccaatgcatgtggggttgaatacctaggcgatgggttgatgggtgcagcaaaccaccatggcacacatttayctatgtaacaaacaggcacatcctgcacatgtatcctggaacctaaaataaagttttaaaaatgtcccatttaataagtgaaaaatggcctcttgttttaattttaaattagtagaaaggttaattttttcatatttgatcatctatttacatgagtgcttttatactggctaatatgctttgctcttttttcaattagattgctggttttctaactaattt

SEQ ID NO: 679979 - DNA, 596 bp, Homo sapiens
tctcagattcaacatggtctgaactgaacacatcatcttccctcttcccctgcagaatccaatttattcaatgtgctcttcttccagagttttctgtcttagtgaatgggttggttaacaaagtggttctgagctctattttcagaaaggtatggttaagagaaagggattcacatctcagtgagaaacttgagtaatcatgaagctattctgtggctaacaaagagaaagcactagagtaggtcccaaggaaaggtaaaatgggagaaagaatgttctttgagttgggaaataaagytctaacccgtagatatttcaatggccctgagaggtctttgggagacaagagtttctgaggattgcttcagtgtaaggattccataaatagcctccccagtattcaactcgcaaagtcaatctccaaaggtcacatattccaaaacagtttctaaatttgcttcaatgatttgcattcataggaagatgcacctgcagatcatgtagggcaacaactaagcagtagaattgaaatcctctgctggtggtccatggagggtggtaaatgcagtttctaaagcaggtggaagcctttcaaa

SEQ ID NO: 679980 - DNA, 596 bp, Homo sapiens
tctcagattcaacatggtctgaactgaacacatcatcttccctcttcccctgcagaatccaatttattcaatgtgctcttcttccagagttttctgtcttagtgaatgggttggttaacaaagtggttctgagctctattttcagaaaggtatggttaagagaaagggattcacatctcagtgagaaacttgagtaatcatgaagctattctgtggctaacaaagagaaagcactagagtaggtcccaaggaaaggtaaaatgggagaaagaatgttctttgagttgggaaataaagttctaacccgtagatatttcaatggccctgagaggtctttgggagacaagagtttctgaggattgcttcagtgtaaggattycataaatagcctccccagtattcaactcgcaaagtcaatctccaaaggtcacatattccaaaacagtttctaaatttgcttcaatgatttgcattcataggaagatgcacctgcagatcatgtagggcaacaactaagcagtagaattgaaatcctctgctggtggtccatggagggtggtaaatgcagtttctaaagcaggtggaagcctttcaaa

SEQ ID NO: 679981 - DNA, 869 bp, Homo sapiens
ttgaatagaggaagaaaaaacaaagtaggatatttctttcatctgtattcttagatgtaatttttttttttttcaatttcagaagttttagaaggaggagatgggcaaggagaaaaacatcaggaaagagagagagaaagagtcacacacataatttcacacactgctgtggctcactggcaccatggagtattcagggtgtcaattaatatgaatattatttggtgtattagataccaagtagagttaattgcaaaaggtcttaattgatcacaatgtactatttattctctctcaaattgcacagaaaatgcatgtattctcttcccctgacttttggaatgctttgatgtcactaaggataacttcagttttacaaggaagactcttgaytcataaattattcattctttatataatcgcctgggaacatttctttattgtcttaaccattcattgcttagcacacagttttaagcagaggaataaagtcatatttgtaaaataggtaaactttaatttcttgggggagccataaaataatatggtggataattagctgaaatattcagctttaaaaatacgttctgctctacagtatatattttgatctgctaatttgcaaaacaattttggtagttagatataaaatttatatttatccccattacatttattctgttcatttaattcagttcataaacattttatttgcttttccgtaacttgattctctaatgtaacatgtgagtcgtttgagtcggatttggtacgtcacactgagatattgacgaaagtgacaaaagagtctagcgtaggctacagaatatttgaacagttgggaaggacccactaaacaggagtcttag

SEQ ID NO: 679982 - DNA, 690 bp, Homo sapiens
gttcattcctagaaagtgacaaattagaaaattacccaatatgactctgtccttaatggtgcatctctatctgtgggtgatgcagtctttcatttaaaaaatgagagaaagagaataaaagcttctacctctctctccatagccttgttcttttaatttaatttttgattgtccaaaagagtgcatgtatttatcaggtataacatggcgttttgaaatatggtgaaatacaatggaatggctaaatttacataactgacacatggatgacctcacaaacatcatttttttgtagtgaaaacatgtaaaatytactcttttagcaattttcaaggacagaacacaggcataccttggagatattgcaagttagttccagatcacagcattataatgaaatcacatactttttaaaatttctcaaagcatataaaaactatgtttacactacactgtcatctattaagtgtgcaatagcattatgtctaaaaaatgcacctaccttaattaaaaaatactttattttaaaaaaacgctaatggtcatctaagccttcagtgaaacataatcttttccgctgatgaagggtcttgcctctatgtcgatggctgctgactgatcagggtggtggctgctgaaggctgagatggctgtagccatttttaaaaataaaacaatggagtttgccac

SEQ ID NO: 679983 - DNA, 1015 bp, Homo sapiens
gaatccatggaaatagctcatgctgttatttcatgggtagagctagctcagcactgaagacacaatgatcaaaattgtatgaccagattcagaatagtcattttccagatcgtgtactagccctcatatgtgaaatatgtcaccaattacaaaatactgctaagtaggcaggactgtaagttctgaaaagagtaaggatttcctattcactttggcttgtacatgttttatgtatagggtaactttgattgatgagctttaaagttgttrcaggaaatgtttggagcagatacagacgacaaaatcaatagtaccgggatagactgggttcgtgtaagcagatttattatcctgacctttcattccgaattccctgtcttgtttctttataacaacagctaaatgtacttatttgtaaagtaacagaaaacagatcactttaatgtggcaacattaactgttaaaatctcaaggcctgaatatacaataatttatgatcccaaaactatttttggcttcttttagattatgttcccagatgaagagcattccattgttttccctatccaactaccttgagtactcaggacaaccaaattctgctctattttttaaggagcagctaaattattttcagttccaaatgaattcagaagcaggttaaggtaaatttgggtatgatagagttagctgagcttatctggactgtaagtatgaatgaatttgttacaagtcagaatcaatataaccaaagtctcttttttcaataagcatagataactgtttatgtgtgtactttgctatgaatttactacttacgtatgtacttaaacacttaaaatttgtcaactccctttactcagtatatttgtcagtttcatggctcaaaaatatcatctattggggtgattgactcaaaattatttctctagtcttatcaaaaaattttcaccactaaataccaaacatacattcaatgccatacccaacatctctgattgtatgttgagtaggc

SEQ ID NO: 679984 - DNA, 1015 bp, Homo sapiens
gaatccatggaaatagctcatgctgttatttcatgggtagagctagctcagcactgaagacacaatgatcaaaattgtatgaccagattcagaatagtcattttccagatcgtgtactagccctcatatgtgaaatatgtcaccaattacaaaatactgctaagtaggcaggactgtaagttctgaaaagagtaaggatttcctattcactttggcttgtacatgttttatgtatagggtaactttgattgatgagctttaaagttgttacaggaaatgtttggagcagatacagacgacaaaatcaatagtaccgggatagactgggttcgtgtaagcagatttattatcctgacctttcattccgaattccctgtcttgtttctttataacaacagctaaatgtacttatttgtaaagtaacagaaaacagatcactttaatgtggcaacattaactgttaaaatctcaaggcctgaatatacaataatttatgatcccaaaactatttttggcttcttttagattatgttcccagatgaagagcattccattgttttccctatccaactaccttgagtactcaggacaaccaaattctgctctattttttaaggagcagctaaattattttcagttccaaatgaattcagaagcaggttaaggtaaatttgggtatgatagagttagctgagcttatctggactgtaagtatgaatgaatttgttacaagtcagaatcaatataaccaaagtctcttwtttcaataagcatagataactgtttatgtgtgtactttgctatgaatttactacttacgtatgtacttaaacacttaaaatttgtcaactccctttactcagtatatttgtcagtttcatggctcaaaaatatcatctattggggtgattgactcaaaattatttctctagtcttatcaaaaaattttcaccactaaataccaaacatacattcaatgccatacccaacatctctgattgtatgttgagtaggc

SEQ ID NO: 679985 - DNA, 762 bp, Homo sapiens
ggagtggttctagcataataaagaagacacaaacatttaaggggatggatatcccatgtacactgatttgatctttacaaatcatatgaatatattaatttaccccatgtgccctgaaattatgtacatcaattatgcatctatttttaaaaattttaagagaatagaatttaaagagaatatatgttgactaaattaatgaactaatgcacaattagatactgttttagccagatcrttactgtaaccttagcttttttccttccaaactattttacattcagtaagattaattctcctagagaacagctctgttcatgttgattatttaagaaaaaataattataaaaaccaaatttgatcaaaatatctggcctaatatttaaagttattcacaattttatccaactatcttaaattttacttattctcattgggaacactattatgactgaactacattcctacaaccatgactcattttctttaccctgccctgcctgttttattttcctgtaattagtagcctctactcctcatctttgcctagggaaattttgcctatattcaaggccaaatttctagatgcttgttttaatggcatttgtccaattaattcggagacaagtgattatttttacctctgaaattatccttaatttttacatttaaaatgcatttattatattcttccctttactttattgacttctcttctctggattatagtctatgtgaagttaggaatttacctgattcatt

SEQ ID NO: 679986 - DNA, 1427 bp, Homo sapiens
gggatcatccccatcatctctcttctatcaccttgactatatatttgaaatttttcatttgaaatgctgaggattcacagggaaagaaagtagaatggtggcagccaggggctgaggaggaggacaggagtctcagtttaggatgatttttaaagttctgaagatggatagaggtgatggttgcacaatagtgtgaatgtagttaatgccactgaattgtatactcaaaaggttaaaatagtaaattctatgttatatatattttgccacattaaaaataaataattttaaaatgttgggggacagcaattaattattctgaaaatttgctatagcaacaatggttactcttgacaatacacagaaaagatgaaacaaaagtagagagatttacaaatattgttatataaacatgaaaaaaatgaagtaaaatacactaaataagccagaccccaaaaatagtttattttctaaaaaagaaagttatacacagattatttgctttcaataatagaaagtacctacaggagtaaatgttatctttgccattataaagaaccttcaggggaatgaggaaataggatgttacttctaagaatttccaatacataactgtgtgctgttcctcaaagcactgtcttcacctatgtcttactcctccgtgttaatgttgtcatctagaagaaaaatgttggattaagagatattccaggtccttttcacctctaacattttatatttttgccatctttttcatgttctgtacaagtccttgtacattatacagttagataatgaggacattaactaattaaaaacccaacaaacctacctctctggattccttttatttgcaaatcaagtcggaactccttggcatggcaaagaaggcctcccatgcctacagttccagcctcctcatctcccatcactcttacgtttcctagactataatcatatgcctttactcaagtgcaccatacaccatgcctttacatatgctctttccatgggccagaggcccctgcaatgcctcctctctcccaacacccactctctacatgggtacccattcctctgctttactctgacatttccttcaacctaactcaattatcaccccttcagtgagctcctctctgaccttcactttcccatgcccccacccctcattgtcagcatcaccaacataaaagcagttgttgtaccttctacatccccgttttctactttcaactatccactgcactcacattgaaaaaaagcattttttggtaatatgcttatccccacagcaagtgaatctgtgtcagagaagagtcccttagactccatcccaygcccagtgtctagcatagcacaggtagtgcatggcaacttttcagtttttattgacagtatagaagaaaggaagggagggaagaatg

SEQ ID NO: 679987 - DNA, 1387 bp, Homo sapiens
ccaaacctctcccaaagcttctaataggagagcgtcatttgtttctttaaaaatttcacttggtctctgttcaacctatggaaaaactcatacataagaagtaaaacgccccataagtcggcacggagagggaaagagaaaaaaactaggcactttggtaaccagcatagctcaaatccacagcatagaccaatcaacctagggatgctgagcaaatatcactgaggaagatggcggggagtttaaggagcttagggtgtaccccacatgcctgaatagaaagcaaggatttcccgcaaaattattcttccagaacaaaggagggacttggttagctacgcagttgtttacttactctttattgttttgggacgttgaatacttatagttccttgatgttggttaggatagaagccccataaggttttgaacctcagagtctgtcattctcaaagatgacacaaataagaaattgatcatctaaaaccatggcagaggaagtgttcatcaatatagttgtatgaacatttgcacttagggtaggaatatgtgaggaaagaaaatgccccagactgatagaatatttcttccattctgggtactaccacttttaagtgtttggttgtgaatttctcatttgagaagctctggttttacttaagacatgaaaaaattaaaatgggttgatctgctcgtccatggggtgcccctctggttaggaaccgaagccccaaggatcctgtctttggctgaatccttataacgtctctcggattagaagtgctctccaatgtcttcatttttatgcacacttatttagaaaagaaatgattatacatgtccatctgctattatttacataaataaaaataattcagcaagatgtgcaaaaatcactgttcttttacaactagacttttctaagaaatggctatagataagatgttctaactgatgctgaaaatacaaatcttaaatgcatttataaatatcttttcttgttccaaacctagtacaactcttattttactcagagagacttttcttttttcttttcttttcttttcggtgagacagagtgtcactctgtcacccaggctggagtgaagtggtgcgatctcagctcactgcaacctccgcctcccagttttaagygattctcttgcctcagcctcccaagtagctgggattacaggtgtgtgccaccatgcgtggctaatttttttgtattttgtcctttctgattaattaatttcaacccacttacgaattagcttaatttgatgccaggattttcagtctctgagcactggaaaccacatctggctttactgctgttcttgagacctgtatctttcattactggaagccacgtctggctttactg

SEQ ID NO: 679988 - DNA, 1393 bp, Homo sapiens
catacacacacacgtgtggcactgtttctacaatttttaaaaagtggataaaatacagcaaatattcagggtcgctgtgttgcatcattccagggtgctgtgtaattggtaaagttataaaatgtgcaacctgtgtgtctgcacatggttgccctggcaaccaccatcatctctccagtgtttcatgtattaagacctatcatattaatgtctgctgctctttgagctaataacatatttttaacgattggtgaattggtctgttttccctcygcatgattactaggagctatgagatgttttgaattccacagtaagagcttctcctaacctaggatctttggaataattatttgctacctctcctagacatttggctctggcattttaatactcgttttaccagttagagttttattgtgtcttttattgtaagttgccttggattctttttttaaagcaagcttggtgtaaacaaataaaatcttggtggtaataattaggtacaagggaaacagaaaaaatctagggcagctttcctctacccctccaggaaatgattatggctgaggaggtaaaaatgaaatatgtgaaaaatgtcacaagagaaacacttcagtctttgccattggttggaaaatttggttccttgaggctggcctaccagataacaaggagctatactataattgcccagtgtaaaatggtagtgacaaagggggcacctggatttgaaccagggacctcttgatctgcagtcaaatgctctacccctgaactataccccccaaggtactcatcttctttcaataaagatatattaataatcacagtcattcacaagctacgctctggccactctgtctccagagtgtggagttatgtaatgcacaacagagcagctcttctgtacaaccccctccacacctgccggcacctggccaattaagctgcagccttagctttttgggaaaaggagagtggtggggttaaatccagatatagacatagcttgagggcctgggttcgggccctgggcctgattgttctggagtgcaaggagcccctacttgatagtaattgatgttccaatattgagccatcagtgcatttctgttttaagtctttcttggttatgtgggattgtactattggataaggttttctactattttgtctagattactctgaaatgagattggcctatagctttctttgtggtatatgctcttgtaatttattttttatatcaggattatgtgaattttctagaatgatttggagagatttaaagcgttctacgctggaacattatatataacataaaattacatattcttaactaaagattagcagaaacttgcttgtaagcctctgggtggggtgccttttg

SEQ ID NO: 679989 - DNA, 1793 bp, Homo sapiens
tgtttaaaatgctagggggcacccagatttgaactggggacctcttgatctgcagtcaaatgctctacccctgagctatacccccagttacattagtaaggtccaattaacaacctttccctgtgcagccacacccagacctgctgtcctagattccgcttcaggatgggtttctgagttacaaggcctgacttgctgccaactcaacaccstgtcttagaggaagcaaccagttccttctcccacagctctgccacctctccactctcagttcctgagtaagtgcagggatctggggagcagtcccccgacagctggaaggctctctagtgacacctatgttgtgggttttgtgccggggcctgcaaacagagactcaaaatgcccaatggtttggccaagcctgcaacacttcaaagatagaacccacattttctggatactggatttgccagcttttcagctaagatcactttttaatgaccgccccccaccccccaccgccacccaccgtgtgaaaccaggacgacctccctgaattctccttcaaattccacatttgtttaaggcagttgaactttaaaacagtattttagcttttttgcctcatatatcgtggtgctttgttagggcagccctagaaaactaaaacattcctccacaattatgttgaattctctctgctaaagtaactggtgcagtttttgtctcagaactggaccctgaatgatacagaaatagctaccagtggggcactaggaaacataccttcaaggagggtattgggatggacttggtcttgtccttggtctctaaggcagtgctgagcacctggttggatcctgaattgtaggggatggccataggaagaaggtcataaaggcactgtttcataagctcatcagcttccttctgtgagtggactgcactatggtctctactcaagtaaaactcgattttgtcagttcggctcaaggaggaaaatgaattctttaaagggggcacccagagttgatccagggacctcttgatctacagttaaatgctctaccactgagctataattgagaatagtatataatttatactttcttatagttccatacatacatacaggtgctcatgctgactcaacagagttgctggtcctgttcaactgtaagtggatctccttatgccataactatcttccttttccaaaaagaaacgaacatttcttgacatcagcttggatgtccactggaggttctgtatgagacaacaaagtctgtacctggcttcgtatacaggcagaagatgaagcccagagggaaggtgctgcttacagagccaaggattcaaactttctttgccagcttttcagttgagatcactttctaataacccccagtgtgagaccaagatgacctccctgaattctccttcaaattccacatttgtttaaggcagttgaacattaaaacagtattttagcttttttgcctcatatgtcgtgccccttacaaagcaggttcactgtgcactggttaccacttcggcccactgcatctcaggctgcacccttacagaatccctggggtgttgctttgccagccagaaacctctatgaccagtggtgcctttgcctgagttttgctctggccttctgggcttgttctacccactcagcctgtcagacagtgcccagctcacactactggcctgaatcccacacttgccaaggcaagccaggcatgaagtggcaaggggtccgtgagtgagcgtggggtctggccactgtccatagccagaca

SEQ ID NO: 679990 - DNA, 1793 bp, Homo sapiens
tgtttaaaatgctagggggcacccagatttgaactggggacctcttgatctgcagtcaaatgctctacccctgagctatacccccagttacattagtaaggtccaattaacaacctttccctgtgcagccacacccagacctgctgtcctagattccgcttcaggatgggtttctgagttacaaggcctgacttgctgccaactcaacaccctgtcttagaggaagcaaccagttccttctcccacagctctgccacctctccactctcagttcctgagtaagtgcagggatctggggagcagtcccccgacagctggaaggctctctagtgacacctatgttgtgggttttgtgccggggcctgcaaacagagactcaaaatgcccaatggtttggccaagcctgcaacacttcaaagatagaacccacattttctggatactggatttgccagcttttcagctaagatcactttttaatgaccgccccccaccccccaccgccacccaccgtgtgaaaccaggacgacctccctgaattctccttcaaattccacatttgtttaaggcagttgaactttaaaacagtattttagcttttttgcctcatatatcgtggtgctttgttagggcagccctagaaaactaaaacattcctccacaattatgttgaattctctctgctaaagtaactggtgcagtttttgtctcagaactggaccctgaatgatacagaaatagctaccagtggggcactaggaaacataccttcaaggagggtattgggatggacttggtcttgtccttggtctctaaggcagtgctgagcacctggttggatcctgaattgtaggggatggccataggaagaaggtcataaaggcactgtttcataagctcatcagcttccttctgtgagtggactgcactatggtctctactcaagtaaaactcgattttgtcagttcggctcaaggaggaaaatgaattctttaaagggggcacccagagttgatccagggacctcttgatctacagttaaatgctctaccactgagctataattgagaatagtatataatttatactttcttatagttccatacatacatacaggtgctcatgctgactcaacagagttgctggtcctgttcaactgtaagtggatctccttatgccataactatcttccttttccaaaaagaaacgaacatttcttgacatcagcttggatgtccactggaggttctgtatgagacaacaaagtctgtacctggcttcgtatacaggcagaagatgaagcccagagggaaggtgctgcttacagagccaaggattcraactttctttgccagcttttcagttgagatcactttctaataacccccagtgtgagaccaagatgacctccctgaattctccttcaaattccacatttgtttaaggcagttgaacattaaaacagtattttagcttttttgcctcatatgtcgtgccccttacaaagcaggttcactgtgcactggttaccacttcggcccactgcatctcaggctgcacccttacagaatccctggggtgttgctttgccagccagaaacctctatgaccagtggtgcctttgcctgagttttgctctggccttctgggcttgttctacccactcagcctgtcagacagtgcccagctcacactactggcctgaatcccacacttgccaaggcaagccaggcatgaagtggcaaggggtccgtgagtgagcgtggggtctggccactgtccatagccagaca

SEQ ID NO: 679991 - DNA, 1793 bp, Homo sapiens
tgtttaaaatgctagggggcacccagatttgaactggggacctcttgatctgcagtcaaatgctctacccctgagctatacccccagttacattagtaaggtccaattaacaacctttccctgtgcagccacacccagacctgctgtcctagattccgcttcaggatgggtttctgagttacaaggcctgacttgctgccaactcaacaccctgtcttagaggaagcaaccagttccttctcccacagctctgccacctctccactctcagttcctgagtaagtgcagggatctggggagcagtcccccgacagctggaaggctctctagtgacacctatgttgtgggttttgtgccggggcctgcaaacagagactcaaaatgcccaatggtttggccaagcctgcaacacttcaaagatagaacccacattttctggatactggatttgccagcttttcagctaagatcactttttaatgaccgccccccaccccccaccgccacccaccgtgtgaaaccaggacgacctccctgaattctccttcaaattccacatttgtttaaggcagttgaactttaaaacagtattttagcttttttgcctcatatatcgtggtgctttgttagggcagccctagaaaactaaaacattcctccacaattatgttgaattctctctgctaaagtaactggtgcagtttttgtctcagaactggaccctgaatgatacagaaatagctaccagtggggcactaggaaacataccttcaaggagggtattgggatggacttggtcttgtccttggtctctaaggcagtgctgagcacctggttggatcctgaattgtaggggatggccataggaagaaggtcataaaggcactgtttcataagctcatcagcttccttctgtgagtggactgcactatggtctctactcaagtaaaactcgattttgtcagttcggctcaaggaggaaaatgaattctttaaagggggcacccagagttgatccagggacctcttgatctacagttaaatgctctaccactgagctataattgagaatagtatataatttatactttcttatagttccatacatacatacaggtgctcatgctgactcaacagagttgctggtcctgttcaactgtaagtggatctccttatgccataactatcttccttttccaaaaagaaacgaacatttcttgacatcagcttggatgtccactggaggttctgtatgagacaacaaagtctgtacctggcttcgtatacaggcagaagatgaagcccagagggaaggtgctgcttacagagccaaggattcaaactttctttgccagcttttcagttgagatcactttctaataacccccagtgtgagaccaagatgacctccctgaattctccttcaaattcyacatttgtttaaggcagttgaacattaaaacagtattttagcttttttgcctcatatgtcgtgccccttacaaagcaggttcactgtgcactggttaccacttcggcccactgcatctcaggctgcacccttacagaatccctggggtgttgctttgccagccagaaacctctatgaccagtggtgcctttgcctgagttttgctctggccttctgggcttgttctacccactcagcctgtcagacagtgcccagctcacactactggcctgaatcccacacttgccaaggcaagccaggcatgaagtggcaaggggtccgtgagtgagcgtggggtctggccactgtccatagccagaca

SEQ ID NO: 679992 - DNA, 1793 bp, Homo sapiens
tgtttaaaatgctagggggcacccagatttgaactggggacctcttgatctgcagtcaaatgctctacccctgagctatacccccagttacattagtaaggtccaattaacaacctttccctgtgcagccacacccagacctgctgtcctagattccgcttcaggatgggtttctgagttacaaggcctgacttgctgccaactcaacaccctgtcttagaggaagcaaccagttccttctcccacagctctgccacctctccactctcagttcctgagtaagtgcagggatctggggagcagtcccccgacagctggaaggctctctagtgacacctatgttgtgggttttgtgccggggcctgcaaacagagactcaaaatgcccaatggtttggccaagcctgcaacacttcaaagatagaacccacattttctggatactggatttgccagcttttcagctaagatcactttttaatgaccgccccccaccccccaccgccacccaccgtgtgaaaccaggacgacctccctgaattctccttcaaattccacatttgtttaaggcagttgaactttaaaacagtattttagcttttttgcctcatatatcgtggtgctttgttagggcagccctagaaaactaaaacattcctccacaattatgttgaattctctctgctaaagtaactggtgcagtttttgtctcagaactggaccctgaatgatacagaaatagctaccagtggggcactaggaaacataccttcaaggagggtattgggatggacttggtcttgtccttggtctctaaggcagtgctgagcacctggttggatcctgaattgtaggggatggccataggaagaaggtcataaaggcactgtttcataagctcatcagcttccttctgtgagtggactgcactatggtctctactcaagtaaaactcgattttgtcagttcggctcaaggaggaaaatgaattctttaaagggggcacccagagttgatccagggacctcttgatctacagttaaatgctctaccactgagctataattgagaatagtatataatttatactttcttatagttccatacatacatacaggtgctcatgctgactcaacagagttgctggtcctgttcaactgtaagtggatctccttatgccataactatcttccttttccaaaaagaaacgaacatttcttgacatcagcttggatgtccactggaggttctgtatgagacaacaaagtctgtacctggcttcgtatacaggcagaagatgaagcccagagggaaggtgctgcttacagagccaaggattcaaactttctttgccagcttttcagttgagatcactttctaataacccccagtgtgagaccaagatgacctccctgaattctccttcaaattccacatttgtttaaggcagttgaacattaaaacagtattttagcttttttgcctcatatrtcgtgccccttacaaagcaggttcactgtgcactggttaccacttcggcccactgcatctcaggctgcacccttacagaatccctggggtgttgctttgccagccagaaacctctatgaccagtggtgcctttgcctgagttttgctctggccttctgggcttgttctacccactcagcctgtcagacagtgcccagctcacactactggcctgaatcccacacttgccaaggcaagccaggcatgaagtggcaaggggtccgtgagtgagcgtggggtctggccactgtccatagccagaca

SEQ ID NO: 679993 - DNA, 1793 bp, Homo sapiens
tgtttaaaatgctagggggcacccagatttgaactggggacctcttgatctgcagtcaaatgctctacccctgagctatacccccagttacattagtaaggtccaattaacaacctttccctgtgcagccacacccagacctgctgtcctagattccgcttcaggatgggtttctgagttacaaggcctgacttgctgccaactcaacaccctgtcttagaggaagcaaccagttccttctcccacagctctgccacctctccactctcagttcctgagtaagtgcagggatctggggagcagtcccccgacagctggaaggctctctagtgacacctatgttgtgggttttgtgccggggcctgcaaacagagactcaaaatgcccaatggtttggccaagcctgcaacacttcaaagatagaacccacattttctggatactggatttgccagcttttcagctaagatcactttttaatgaccgccccccaccccccaccgccacccaccgtgtgaaaccaggacgacctccctgaattctccttcaaattccacatttgtttaaggcagttgaactttaaaacagtattttagcttttttgcctcatatatcgtggtgctttgttagggcagccctagaaaactaaaacattcctccacaattatgttgaattctctctgctaaagtaactggtgcagtttttgtctcagaactggaccctgaatgatacagaaatagctaccagtggggcactaggaaacataccttcaaggagggtattgggatggacttggtcttgtccttggtctctaaggcagtgctgagcacctggttggatcctgaattgtaggggatggccataggaagaaggtcataaaggcactgtttcataagctcatcagcttccttctgtgagtggactgcactatggtctctactcaagtaaaactcgattttgtcagttcggctcaaggaggaaaatgaattctttaaagggggcacccagagttgatccagggacctcttgatctacagttaaatgctctaccactgagctataattgagaatagtatataatttatactttcttatagttccatacatacatacaggtgctcatgctgactcaacagagttgctggtcctgttcaactgtaagtggatctccttatgccataactatcttccttttccaaaaagaaacgaacatttcttgacatcagcttggatgtccactggaggttctgtatgagacaacaaagtctgtacctggcttcgtatacaggcagaagatgaagcccagagggaaggtgctgcttacagagccaaggattcaaactttctttgccagcttttcagttgagatcactttctaataacccccagtgtgagaccaagatgacctccctgaattctccttcaaattccacatttgtttaaggcagttgaacattaaaacagtattttagcttttttgcctcatatgtcgtgccccttacaaagcaggttcactgtgcactggttaccacttcggcccactgcatctcaggctgcacccttacagaatccctggggtgttgctttgccagccagaaacctctatgaccagtggtgcctttgcctgagttttgctctggccttctgggcttgttctacccactcagcctgtcagacagtgcccagctcacactactggcctgratcccacacttgccaaggcaagccaggcatgaagtggcaaggggtccgtgagtgagcgtggggtctggccactgtccatagccagaca

SEQ ID NO: 679994 - DNA, 1702 bp, Homo sapiens
tgcccaagcctcttgatctctggggaaaaggttgacatctgaggagatttctttgtttcactttgttccagcaaactgtttgtaatagtcaggcttttgactgaaatttgagtcttctttctgtcccttaggtactgtctaaaatttttcagtgttttaaaaaagatttctaattagttgagggacctccagggtgaataatactattattaaataaatgaatacaaattaaacttttatggtttctaagctactgctttttttttttttttttttttttgagatagagtcttacagtgttggctagcaggctggtcttgagctcctgtgttcaagcaatcctacgtcagcctcccaaatagctgggcctacaggcatgtgccactacaccctatgctgctgctttttaatggaatgtttaatgcataagttttaggctccaatacaatattagtaagacttattaacttagcagatcaatgtggcaatattatttatcccaggaatgttcaggtgttcgtgtgtggtgtgtctatatgattggaaacccatcaactggctgtgaaagcagcagtttaggattgcccaaaagacaaagatttggaaaagctttaaaaagttttgaccacaaaggtcataaattttagtctagtgatgcagatttactggatcctgatgagcaacaggagtgaaaagcattttctagaagaaaaacctgtggtgatttctaggtaaaggacttcagatgagatcctgaagtaataacatattggcagctttagtagactcacaaacatgaggttaggcagcgatctaaggtgatagacagatgacatcagaaacaaaataagtactaggcaaggccatagccttgaatttttattagagttaggaattgaggatattctgaaccccgaggatttcaaccaagagaaagagtagcaaggcaatttagtttaaaaaataattctgatgtatattgggaaggattttattcaacttaaaatcagaaaaacaaccacyaatagtttatgtgatgcttcttctaattcttacctggtattttagttctaggttcctattaaggttcaataaaccgcgacaattgaccaagggctgggctgtgataaagtcttccattttaaacaaatacaaataacattgaaccagaaagagacatcaagtccatttaaggcattggtgtgtttgtacaagacctgggttatgtaggaatagcagtaaagaacaaagcctcagacatctgatagacattgcttttacttcctttttatgtgactttaagtgggcctatgacttaatctatttgacctttactaggcctatagttatctttagtacatattgccagttttctaagtggttttaccattttacattcccaccagcaattttttagagttttagtgtctccacatcctcaccaacattcagatgaggggatggtggtttctcattgtgattttagtttgtatttctgtgatgacaaacggtatatatcaccttttcatatgtttattggattcttagatatcatatattgtaaggtgccttttccgatttcttgcctattttttaaaatgaggttaggtttttgagggttggttggttgtttttttgttttttgtttttttttgtctcttttattgattagtagtttaaaagaaagtatattctagaatat

SEQ ID NO: 679995 - DNA, 597 bp, Homo sapiens
ctgttagaatcctcttttgtaggggcccgggactttaaatttcgtactttttcctttaatgatgctttcttaatattatgaaatttctagtcatgatcaaatttctaattgtcttaaatatcrtaactttaaaaaatatatagtttgaatcaggatccaattacatttacattgccattgtttttaaaaataaggtttttaggtatattttaatgcataagctttttccttccaatgccttcattctcattgcaatttatttgaaaaagatatctctttgtttaatatagagagtttcccacagtctacttttggtttattgcatccctgtgctatagtttaatgtgttcctctattctctatataacttttgtattagttttctagggctgccaaaacaaatatcatagactggaagaattaacagaagtttatttcttcacaattctggaagctggaagtccacaatcaagatgttggcccttctgaaggcctctcttcttggcttgtagatggctgtcgtcttgtggtgtcttcatgtagtcttatccctgggcctgtctgtgtccctatctcttcttcttataagtcatgttg

SEQ ID NO: 679996 - DNA, 597 bp, Homo sapiens
ctgttagaatcctcttttgtaggggcccgggactttaaatttcgtactttttcctttaatgatgctttcttaatattatgaaatttctagtcatgatcaaatttctaattgtcttaaatatcgtaactttaaaaaatatatagtttgaatcaggatccaattacatttacattgccattgtttttaaaaataaggtttttaggtatattttaatgcataagctttttccttccaatgccttcattctcattgcaatttatttgaaaaagatatctctttgtttaatatagagagtttcccacagtctacttttggtttattgcatccctgtgctatagtttaatgtgttcctctattctctatataacttttgtattagttttctagggctgccaaaacaaatatcatagactggaagaattaacagaagtttatttcttcacaattctggaagctggaagtccacaatcaagatgttggcccttctgaaggcctctcttcttggcttgtagatggctgtcgtcttgtggtgtcttcatgtagtsttatccctgggcctgtctgtgtccctatctcttcttcttataagtcatgttg

SEQ ID NO: 679997 - DNA, 2365 bp, Homo sapiens
caagttcttgtcctgtgttcaaggagaatgaggttgtgctgacaattgaagggtgaggagggcggagaagaattttatggagtgatgaaacagctctcagcagagggtgggtgcgagggtggtcccccacccaaagtgagctggtctctccgtcagtgtggctaggtctggggcttttatgggctcagaatggggagggggtgctgattgtgagtatgcaaaaaaggctaaaacaaaggcaccactcaaaggcatggcagtgtaaaaaaaaaaaaaaaaaacagggaaggttaggtatatgtaaatagaggaaaacatgccaaacgggaaaaggggttctcaatcctgtctgtggatttacccgagacttgtagctaggctttaaactgtcctcggcttgaacatcaggtttcgttggggcccgcgccagtctgcctaagattgtctgcctcctgccactgtcagatggccccagtaatggtaaatatcccgcagggaccatggtggtgccactcatgtaaatattgtcccctcaaaatgccagcagacccttttgacgaacattgacgtgatttttctaaagaagaaaacaatacgccaacacaaacaaaaaatgaccaagaaagagctctctccataaaaaaaactagaaagcaattgtaagtcatgcctaattgtgtcaaaaacatctcagcaaaatactaacaaaataattttttttgcatgtacgtgaaataagaacaccagggcagaatgcaacatttcagggaagagatggcaaagcagtgggaagaaattaaattttagctgccagagctcaggaaacaagcagaaagcaaaagaatcaaaaataaaaacaataaaggcattattggaagaaaaataagaaagaacagatattactgaatatcctgtgaaagatcaaggggatttacttgaaggaaaaaatccttatttataagaaacaataaacagaaatagatatctgagcacatctgtctatacacaaacacagacacatgctcataacaccccagcgaaacaggctgcttggccattttaaaaaaatctataaagcagaaagcttaaaataattatataatagatgtaataccaacatatacattcaaatgaacagagattaacaaccctgtctgtgaagttgtatgaaccattttaaacagaatagccacaaaggatggaaataacaaatgggcaaacatataccaggcaactrccaattacataaatatatagaaggaggtaggtggatagagagatacaatagataatagaacaacttaatagaggccgtaatcttatcataaaataaggacatctttaggctaagaaccacagcttaaaacaaaaaagcactaaaaaatgtcaaaggacacatttcataatcaaaatataatatgtatagtttttaaattatgaactatcatagcataaatgtttgtaaagcaaaaattacaatttataaaactagaagtaaatgcacaacaactaccgatgttgtgtttcctcctttattttatgagagcttgagaagtgtcttcaccttagtagcatggatagatccaattgtattctcaatgctacaacgcagacacctttttaaaaatgtctattgatcatttacagacactgatcacaaaacccttcaaaatttctaaacagtagctgtattgtcttgctaaaaagggaaaggaagacataattttgtgtaagtttggagctctctactccttgtaatgttttgttgaattcatctgcaaatccatcagagaatgtgtgggaagttttacataattattagctcaattttgtcaatggaaataaatgtattcaaacattctatttcttcttgagccagcactcctgtgattttaatttatttgatatccaacaggaaagagtagccttgtattattctacaaaagtccacacatgcatatcttttagcggaacaataaatgcggccataccggaacagaagttaactcttgaagtatgtttctcaataccgataccaggaggatcttgctatgtaaaaacactgtaataagttctcctgaagaaaggtagtatataacttcacacagtgttttaggtttgcaaccagggtttttgtcaacttcctgtaacagttttcatctgagaaaatctgtccttttatttatgagcaatgctttatctgttatattttcctttactatcagtccataatccttgaaaaatctatcttcctcagtatgtcagtttggacaaagaacaatcaagtaatagatatttattggaagtttattttgtgtttagataatggatatagttctacaaaacaacaccctgggaagctgca

SEQ ID NO: 679998 - DNA, 2365 bp, Homo sapiens
caagttcttgtcctgtgttcaaggagaatgaggttgtgctgacaattgaagggtgaggagggcggagaagaattttatggagtgatgaaacagctctcagcagagggtgggtgcgagggtggtcccccacccaaagtgagctggtctctccgtcagtgtggctaggtctggggcttttatgggctcagaatggggagggggtgctgattgtgagtatgcaaaaaaggctaaaacaaaggcaccactcaaaggcatggcagtgtaaaaaaaaaaaaaaaaaacagggaaggttaggtatatgtaaatagaggaaaacatgccaaacgggaaaaggggttctcaatcctgtctgtggatttacccgagacttgtagctaggctttaaactgtcctcggcttgaacatcaggtttcgttggggcccgcgccagtctgcctaagattgtctgcctcctgccactgtcagatggccccagtaatggtaaatatcccgcagggaccatggtggtgccactcatgtaaatattgtcccctcaaaatgccagcagacccttttgacgaacattgacgtgatttttctaaagaagaaaacaatacgccaacacaaacaaaaaatgaccaagaaagagctctctccataaaaaaaactagaaagcaattgtaagtcatgcctaattgtgtcaaaaacatctcagcaaaatactaacaaaataattttttttgcatgtacgtgaaataagaacaccagggcagaatgcaacatttcagggaagagatggcaaagcagtgggaagaaattaaattttagctgccagagctcaggaaacaagcagaaagcaaaagaatcaaaaataaaaacaataaaggcattattggaagaaaaataagaaagaacagatattactgaatatcctgtgaaagatcaaggggatttacttgaaggaaaaaatccttatttataagaaacaataaacagaaatagatatctgagcacatctgtctatacacaaacacagacacatgctcataacaccccagcgaaacaggctgcttggccattttaaaaaaatctataaagcagaaagcttaaaataattatataatagatgtaataccaacatatacattcaaatgaacagagattaacaaccctgtctgtgaagttgtatgaaccattttaaacagaatagccacaaaggatggaaataacaaatgggcaaacatataccaggcaactaccaattacataaatatatagaaggaggtaggtggatagagagatacaatagataatagaacaacttaatagaggccgtaatcttatcataaaataaggacatctttaggctaagaaccacagcttaaaacaaaaaagcactaaaaaatgtcaaaggacacatttcataatcaaaatataatatgtatagtttttaaattatgaactatcatagcataaatgtttgtaaagcaaaaattacaatttataaaactagaagtaaatgcacaacaactaccgatgttgtgtttcctcctttattttatgagagcttgagaagtgtcttcaccttagtagcatggatagatccaattgtattctcaatgctacaacgcagacacctttttaaaaatgtctattgatcatttacagacactgatcacaaaacccttcaaaatttctaaacagtagctgtattgtcttgctaaaaagggaaaggaagacataattttgtgtaagtttggagctctctactccttgtaatgttttgttgaattcatctgcaaatccatcagagaatgtgtgggaagttttacataattattagctcaattttgtcaatggaaataaatgtattcaaacattctatttcttcttgagccagcactcctgtgattttaatttatttgatatccaacaggaaagagtagccttgtattattctacaaaagtccacacatgcatatcttttagcggaacaataaatgyggccataccggaacagaagttaactcttgaagtatgtttctcaataccgataccaggaggatcttgctatgtaaaaacactgtaataagttctcctgaagaaaggtagtatataacttcacacagtgttttaggtttgcaaccagggtttttgtcaacttcctgtaacagttttcatctgagaaaatctgtccttttatttatgagcaatgctttatctgttatattttcctttactatcagtccataatccttgaaaaatctatcttcctcagtatgtcagtttggacaaagaacaatcaagtaatagatatttattggaagtttattttgtgtttagataatggatatagttctacaaaacaacaccctgggaagctgca

SEQ ID NO: 679999 - DNA, 2365 bp, Homo sapiens
caagttcttgtcctgtgttcaaggagaatgaggttgtgctgacaattgaagggtgaggagggcggagaagaattttatggagtgatgaaacagctctcagcagagggtgggtgcgagggtggtcccccacccaaagtgagctggtctctccgtcagtgtggctaggtctggggcttttatgggctcagaatggggagggggtgctgattgtgagtatgcaaaaaaggctaaaacaaaggcaccactcaaaggcatggcagtgtaaaaaaaaaaaaaaaaaacagggaaggttaggtatatgtaaatagaggaaaacatgccaaacgggaaaaggggttctcaatcctgtctgtggatttacccgagacttgtagctaggctttaaactgtcctcggcttgaacatcaggtttcgttggggcccgcgccagtctgcctaagattgtctgcctcctgccactgtcagatggccccagtaatggtaaatatcccgcagggaccatggtggtgccactcatgtaaatattgtcccctcaaaatgccagcagacccttttgacgaacattgacgtgatttttctaaagaagaaaacaatacgccaacacaaacaaaaaatgaccaagaaagagctctctccataaaaaaaactagaaagcaattgtaagtcatgcctaattgtgtcaaaaacatctcagcaaaatactaacaaaataattttttttgcatgtacgtgaaataagaacaccagggcagaatgcaacatttcagggaagagatggcaaagcagtgggaagaaattaaattttagctgccagagctcaggaaacaagcagaaagcaaaagaatcaaaaataaaaacaataaaggcattattggaagaaaaataagaaagaacagatattactgaatatcctgtgaaagatcaaggggatttacttgaaggaaaaaatccttatttataagaaacaataaacagaaatagatatctgagcacatctgtctatacacaaacacagacacatgctcataacaccccagcgaaacaggctgcttggccattttaaaaaaatctataaagcagaaagcttaaaataattatataatagatgtaataccaacatatacattcaaatgaacagagattaacaaccctgtctgtgaagttgtatgaaccattttaaacagaatagccacaaaggatggaaataacaaatgggcaaacatataccaggcaactaccaattacataaatatatagaaggaggtaggtggatagagagatacaatagataatagaacaacttaatagaggccgtaatcttatcataaaataaggacatctttaggctaagaaccacagcttaaaacaaaaaagcactaaaaaatgtcaaaggacacatttcataatcaaaatataatatgtatagtttttaaattatgaactatcatagcataaatgtttgtaaagcaaaaattacaatttataaaactagaagtaaatgcacaacaactaccgatgttgtgtttcctcctttattttatgagagcttgagaagtgtcttcaccttagtagcatggatagatccaattgtattctcaatgctacaacgcagacacctttttaaaaatgtctattgatcatttacagacactgatcacaaaacccttcaaaatttctaaacagtagctgtattgtcttgctaaaaagggaaaggaagacataattttgtgtaagtttggagctctctactccttgtaatgttttgttgaattcatctgcaaatccatcagagaatgtgtgggaagttttacataattattagctcaattttgtcaatggaaataaatgtattcaaacattctatttcttcttgagccagcactcctgtgattttaatttatttgatatccaacaggaaagagtagccttgtattattctacaaaagtccacacatgcatatcttttagcggaacaataaatgcggccataccggaacagaagttaactcttgaagtatgtttctcaatrccgataccaggaggatcttgctatgtaaaaacactgtaataagttctcctgaagaaaggtagtatataacttcacacagtgttttaggtttgcaaccagggtttttgtcaacttcctgtaacagttttcatctgagaaaatctgtccttttatttatgagcaatgctttatctgttatattttcctttactatcagtccataatccttgaaaaatctatcttcctcagtatgtcagtttggacaaagaacaatcaagtaatagatatttattggaagtttattttgtgtttagataatggatatagttctacaaaacaacaccctgggaagctgca

SEQ ID NO: 680000 - DNA, 619 bp, Homo sapiens
ctgtgctggggacacacaaatgcatcagatgtggagtctgccctcaatgagcttataatctaataagaaagagaaggcaagtccacatgtaactgtagtacgaggcaggatgtaataactgcagaaagggacatgaaagaaaatgccgtgagggattgcacctcactagggggaggttttatttgarctatcttctaatggatgggcagaatttggacagtggaagtggtggggggtggggtggtaaggaaaatcccaagaatgctttggtgtagaaggtccagcaatccctgcctggtttgttgtctgtgtccatgaagttgaagcagaagaggagcacttgagtacctgtctgcaagagcaactgacctggcacccctggtttttccaactgtctctttctgtgttctctggcaagacacctatgggctttaggctatttttttttattttttatttttgagacagagtcttgctctgtcacgccgcctggagtgcagtggcgtgatctcagctcactgcaacctctgcctcccaggttcaagcaattctcctgcctcggcttccctagtagctgggattaaggcacgcaccaccatgcccagctaattttttgtat

SEQ ID NO: 680001 - DNA, 583 bp, Homo sapiens
aatagtattcagcaataaaaaggaaaaaatgattgatacaacaacctagacaaatcttcagggagttatggtaagtgacaaaagccaatctgacaggtgatataatgtatgattccatttatataacattcttggaargacaaaattttagaaatagattagatattgctaggagttaagcagagggtggaagtaggaggaagagagagtggctgtcaaaggtcagtgtgagggatgcttgtggtgatggaaatgttctgtatcttggctgtgtcaatgtcaatatcccggccaagataccatactataattttgtaagatgctatcatttggggaaacagggtcaagggtacagggaatctctctgtattatttcttacaactgcatgtgaacttgcaatcacctcaaaataaaagattcaattaaaaaatcttatgggatgcagtgaaagtagtacattcacagagttaaacatttatgttaaaaagaaaaggcttaaaattggcaatataagaaattaggaaaataatagcacaataggctcaaataaaatggaagaaaatagtaaagagcagaaattaa

SEQ ID NO: 680002 - DNA, 1964 bp, Homo sapiens
tttctcctcatttgcattctgcagtgattgttcagcctccccagccagtggaattgtgagtcaattaaacctctttcctttataaaattayccagtctcaggtatgtctttattagcagtgtgagaacagactagaacacagggcatcttcacagatcaaagtagactaatagagagtctcttttgaactgcagaagtggtccttagttcttgctgaactttaaaataaggtgggaaacttttaaaagccctgatgcttaggccacacccagaccaattaaatcaggatcccttgggcggacacaggcagcaatagttttttaatctcctcaggtgaaacgtgcttcataattttacctttgggatgatgaaagccagctgatttcagtctttatgtcattataattaagactgaaattctgaatttgttggaggagaatctggctgtccaagtttgggcttcgtacctatcactccttagctgggagaggagaggtatcctaaactacagtctaccacactgtatgttaaaagagtaaaaatgagcacctgtagcaaatcaaagggttgtagagcctgagtatataaaaccaaccgatgtttccctacaactacttttgcagttaagtaatatattgaacaagaaagaagaataattggaaaattctttcattgatgatttcatattaatatttttcctaactcttcaattattataatgggaatatatttgtttatatagtatgatcattattgttacagtaaaccttggaatcaatttttagaaataatgcatggattagggtattatatagtttggatgtgtgttcctgctcaagtctcatattgaaatgtaaacctcagtgttggaggtgggacctggtgggaggtgactggatcacgggagtggatttctcatgaattgtttagcgccgtcccctgtggtactgtctttgtgatagtgagttctcgtgagatctggtcctttaaaagtgtgtagcacctcccccctttccctcttgcttctgctctggccattgtaacttacctgttctcccttcactttccaccatgaaagtttcctgagaccgccccccacttcctagaagccaagaagatgtcagcatcacacttcctgtacagtctgcagaactgtgagccaattaaacctcttttctttataaattacctcgtctcaggtatttctttatagcaatgtgagaacggactaatacagggcttaagcctctgaatcttaaccttaccctatcattttttagaaaagcttctctaagatcccaaaagtaatttgtgtactatgcaactgagacaacacaggaacaagccaagtgacaactcaggtctgttgaaaaggaaaacctcacagataatttatgtagtttttcatgtctatattatactagtttcccaaaattcttcccaatttaattcctttattgtagaaacctataaaacataatagtcaaaaatcatagaaagtgagacaaaaaaaaagaggaagcttttgatgctcctcttcaggtttccatttgaagtctttctcatcatcatttgtaaagtttcacaagcatttggagattctaacttgcgggtgcctggcaggactctaacccttctctactgtctcctagttcacaccagttttatattaaaaggctaaattaaataaactacatagcagataggggaaaggaggtcactgatttactgtattcttaaccacaaaataagctgcaaatacaaagccgtctagctgaaagtgagtgtctccagaatccctgctttgagaggaaaaaaagggagaatgtgtgggattctccaacataaaggctttttaagcaggacaaaggaagctcaggaagcgttaggcctcagagaacatgttattcatcatgaagggttctggctaggagaaaaaagaaaaaaggcccaggcaggcttaa

SEQ ID NO: 680003 - DNA, 1964 bp, Homo sapiens
tttctcctcatttgcattctgcagtgattgttcagcctccccagccagtggaattgtgagtcaattaaacctctttcctttataaaattacccagtctcaggtatgtctttattagcagtgtgagaacagactagaacacagggcatcttcacagatcaaagtagactaatagagagtctcttttgaactgcagaagtggtccttagttcttgctgaactttamaataaggtgggaaacttttaaaagccctgatgcttaggccacacccagaccaattaaatcaggatcccttgggcggacacaggcagcaatagttttttaatctcctcaggtgaaacgtgcttcataattttacctttgggatgatgaaagccagctgatttcagtctttatgtcattataattaagactgaaattctgaatttgttggaggagaatctggctgtccaagtttgggcttcgtacctatcactccttagctgggagaggagaggtatcctaaactacagtctaccacactgtatgttaaaagagtaaaaatgagcacctgtagcaaatcaaagggttgtagagcctgagtatataaaaccaaccgatgtttccctacaactacttttgcagttaagtaatatattgaacaagaaagaagaataattggaaaattctttcattgatgatttcatattaatatttttcctaactcttcaattattataatgggaatatatttgtttatatagtatgatcattattgttacagtaaaccttggaatcaatttttagaaataatgcatggattagggtattatatagtttggatgtgtgttcctgctcaagtctcatattgaaatgtaaacctcagtgttggaggtgggacctggtgggaggtgactggatcacgggagtggatttctcatgaattgtttagcgccgtcccctgtggtactgtctttgtgatagtgagttctcgtgagatctggtcctttaaaagtgtgtagcacctcccccctttccctcttgcttctgctctggccattgtaacttacctgttctcccttcactttccaccatgaaagtttcctgagaccgccccccacttcctagaagccaagaagatgtcagcatcacacttcctgtacagtctgcagaactgtgagccaattaaacctcttttctttataaattacctcgtctcaggtatttctttatagcaatgtgagaacggactaatacagggcttaagcctctgaatcttaaccttaccctatcattttttagaaaagcttctctaagatcccaaaagtaatttgtgtactatgcaactgagacaacacaggaacaagccaagtgacaactcaggtctgttgaaaaggaaaacctcacagataatttatgtagtttttcatgtctatattatactagtttcccaaaattcttcccaatttaattcctttattgtagaaacctataaaacataatagtcaaaaatcatagaaagtgagacaaaaaaaaagaggaagcttttgatgctcctcttcaggtttccatttgaagtctttctcatcatcatttgtaaagtttcacaagcatttggagattctaacttgcgggtgcctggcaggactctaacccttctctactgtctcctagttcacaccagttttatattaaaaggctaaattaaataaactacatagcagataggggaaaggaggtcactgatttactgtattcttaaccacaaaataagctgcaaatacaaagccgtctagctgaaagtgagtgtctccagaatccctgctttgagaggaaaaaaagggagaatgtgtgggattctccaacataaaggctttttaagcaggacaaaggaagctcaggaagcgttaggcctcagagaacatgttattcatcatgaagggttctggctaggagaaaaaagaaaaaaggcccaggcaggcttaa

SEQ ID NO: 680004 - DNA, 1183 bp, Homo sapiens
tggagttttcattattcactgtgagtgttatattgactctttagtggaaagcatacctattgaatgaataggtctttgttaacagcatgaagatttctggtgatacactacatgctactagaaaaagtcaaagcatggataagatactaaatattgaaactaatggcatatattaccctaggcaaggaaaaaagcaaatgaaaaattagctttttatttctgacacaaaactatcattgaatttaaatcatgttgtgatggagactatataatgaatatcttaatgacaatgcttataatgctattttgtttgattgtgtttatttgttgaattaataagcctttgagagcactctattagtatctagggttcattagaagtacattttgcaatttctgggttgtaaattctttataataatttgacatgtaaatagaatttatatagagagatttagatccaatttaacacctgttgaataaatggttctgtgatttaaaaattattttagcatatatctacttttagtttcatataattagtttgataaataaacactgaactgaattaactgtataactgaatttcattatatttatctgagctctgctgtgctgtataaatcacatagaaagttaatgtatcagatatgttttctgtttcatagttcttgtttctgtttcttgacagtcaaaacttgtaaaaagtaattgaaacagtagtagccttttactagagataattctaatttgtagctattaactcttacttgagaatttttaaggccaaacagtgtttccaaatataaaatttattcctgtgacaatgttttctttgttaarttatttcctggtacatctaagttttacaacaattagtaaatactttcattatttaagagtattggcttgtttggggaaaatattagtattgtgtttcttaggaaagaatagttctctcaactcaatagagaacagcttcaaaagtgttctatatctcctataccaacactgaaagctaattatgattcttttcctagggcaagtggtatcttacctaattttctactatcttctaagtttatgaaaagttagattctattttaatttgttggtatgtctctttcaaaaatttcatattaagtatctaaaattgggttttgctatgtttaagctatgagaa

SEQ ID NO: 680005 - DNA, 1811 bp, Homo sapiens
tgatgtcttttttccagtgaccttcaaacttagcctcagtgtgtttattcaaattattcattaaaataaattatatgttagcagaagtgcagataacaccatgatggtttgagggtttactgtgtttatgtctgttacgtctttactaatgttattgtgtaagaggaagttctgcttggcacgacatttccgtatttcagccagagtttcttaaatttttcagttctcataaaatgtagtttcagtctttatgtattatgtatgattctttatgatatctaattccctcccccttccaccctagggtgtaactataaatagccataacatttagccctggcgattgaacaagcgtgaggaaaatttagatccaaatgggagtcattacttcacatttcatgattcagtgtgcaatctatgttataaaatggctcttttattattataaatatgttcctttctgcctaattgtgacatcctcaagaacaattattgccaatcgagttcatgccactttaaaataagtaactcctatggtttgaaataagtgaaacagtaattatattgtagatgggatattaaaaaaactttaaagttcagctcagccactatcaatagtcatgtggggctttttatggatatgttactaaagctggttgatataaattcaccttgcaatttaaaatttgaaaagatggaaaccattaatatttgtattataaagaaattggtcaaagaaagttaaaattatcttttggataaaaagccttaaatcttacctccaaacgatagagctccattgatgcttacatactgtcattgctttgagaaattttgaagtggattggaaacactgacatataaaatctttacctcttgtgctggtgaaactagtgaaatacaaacagggataacatgaggattaaatgagaaaacacatgaaaatcatgctgacttcagtaaatattgatggaataaatgattacatgataaataataaggtaaagctttaactgtgctgtgtgagattaattaatagtgggtgatcaaggaagggtctaaatcagtgataactgtaatgacaggcaagacttggctccaacacttcattaaacttctatttttatggggatttcttcatttccactggaatgaacaagtcagtatgcatgacttattctgcaatgaactttgatgaatttttctaagtacattaaaaatgagtggcacccttctcttaatccgagaaaccccttatacctacactgataaaccctctgatgcacatgtaaraaggcaggataatgggcatgaaggacaatcatctatatgtgtatataaaaaatatatttttgcttgccagtaataactctgaactgcctacagcattcatcgtgcttcttaaaagtcaggtattatattgaattcaaaaattctcttatgctgagcagggaaaggaaaaaaaaaaatcaaacactttctgaattgggcccaaatatccaaggttaattttctgagaaagctgcagtggctagataaggccatcccctgcaaattagttttgcctgcctggattacagctaaatttatgcagctttccttatcctttcggaaacgcctctgaagtgttgtaattaactggcacacataaagtgagcacattttctgcttggtggcggccattcctcatttcatctcagttctaacccacatggaaaggtagtttcttatttttactgttaaaaacacacatgaatgcacttgtgtatgtgtgtgcacacacacacaaatacactctccagtactttacc

SEQ ID NO: 680006 - DNA, 1811 bp, Homo sapiens
tgatgtcttttttccagtgaccttcaaacttagcctcagtgtgtttattcaaattattcattaaaataaattatatgttagcagaagtgcagataacaccatgatggtttgagggtttactgtgtttatgtctgttacgtctttactaatgttattgtgtaagaggaagttctgcttggcacgacatttccgtatttcagccagagtttcttaaatttttcagttctcataaaatgtagtttcagtctttatgtattatgtatgattctttatgatatctaattccctcccccttccaccctagggtgtaactataaatagccataacatttagccctggcgattgaacaagcgtgaggaaaatttagatccaaatgggagtcattacttcacatttcatgattcagtgtgcaatctatgttataaaatggctcttttattattataaatatgttcctttctgcctaattgtgacatcctcaagaacaattattgccaatcgagttcatgccactttaaaataagtaactcctatggtttgaaataagtgaaacagtaattatattgtagatgggatattaaaaaaactttaaagttcagctcagccactatcaatagtcatgtggggctttttatggatatgttactaaagctggttgatataaattcaccttgcaatttaaaatttgaaaagatggaaaccattaatatttgtattataaagaaattggtcaaagaaagttaaaattatcttttggataaaaagccttaaatcttacctccaaacgatagagctccattgatgcttacatactgtcattgctttgagaaattttgaagtggattggaaacactgacatataaaatctttacctcttgtgctggtgaaactagtgaaatacaaacagggataacatgaggattaaatgagaaaacacatgaaaatcatgctgacttcagtaaatattgatggaataaatgattacatgataaataataaggtaaagctttaactgtgctgtgtgagattaattaatagtgggtgatcaaggaagggtctaaatcagtgataactgtaatgacaggcaagacttggctccaacacttcattaaacttctatttttatggggatttcttcatttccactggaatgaacaagtcagtatgcatgacttattctgcaatgaactttgatgaatttttctaagtacattaaaaatgagtggcacccttctcttaatccgagaaaccccttatacctacactgataaaccctctgatgcacatgtaagaaggcaggataatgggcatgaaggacaatcatctatatgtgtatataaaaaatatatttttgcttgccagtaataactctgaactgcctacagcattcatcgtgcttcttaaaagtcaggtattatattgaattcaaaaattctcttatgctgagcagggaaaggaaaaaaaaaaatcaaacactttctgaattgggcccaaatatccaaggttaattttctgaraaagctgcagtggctagataaggccatcccctgcaaattagttttgcctgcctggattacagctaaatttatgcagctttccttatcctttcggaaacgcctctgaagtgttgtaattaactggcacacataaagtgagcacattttctgcttggtggcggccattcctcatttcatctcagttctaacccacatggaaaggtagtttcttatttttactgttaaaaacacacatgaatgcacttgtgtatgtgtgtgcacacacacacaaatacactctccagtactttacc

SEQ ID NO: 680007 - DNA, 1811 bp, Homo sapiens
tgatgtcttttttccagtgaccttcaaacttagcctcagtgtgtttattcaaattattcattaaaataaattatatgttagcagaagtgcagataacaccatgatggtttgagggtttactgtgtttatgtctgttacgtctttactaatgttattgtgtaagaggaagttctgcttggcacgacatttccgtatttcagccagagtttcttaaatttttcagttctcataaaatgtagtttcagtctttatgtattatgtatgattctttatgatatctaattccctcccccttccaccctagggtgtaactataaatagccataacatttagccctggcgattgaacaagcgtgaggaaaatttagatccaaatgggagtcattacttcacatttcatgattcagtgtgcaatctatgttataaaatggctcttttattattataaatatgttcctttctgcctaattgtgacatcctcaagaacaattattgccaatcgagttcatgccactttaaaataagtaactcctatggtttgaaataagtgaaacagtaattatattgtagatgggatattaaaaaaactttaaagttcagctcagccactatcaatagtcatgtggggctttttatggatatgttactaaagctggttgatataaattcaccttgcaatttaaaatttgaaaagatggaaaccattaatatttgtattataaagaaattggtcaaagaaagttaaaattatcttttggataaaaagccttaaatcttacctccaaacgatagagctccattgatgcttacatactgtcattgctttgagaaattttgaagtggattggaaacactgacatataaaatctttacctcttgtgctggtgaaactagtgaaatacaaacagggataacatgaggattaaatgagaaaacacatgaaaatcatgctgacttcagtaaatattgatggaataaatgattacatgataaataataaggtaaagctttaactgtgctgtgtgagattaattaatagtgggtgatcaaggaagggtctaaatcagtgataactgtaatgacaggcaagacttggctccaacacttcattaaacttctatttttatggggatttcttcatttccactggaatgaacaagtcagtatgcatgacttattctgcaatgaactttgatgaatttttctaagtacattaaaaatgagtggcacccttctcttaatccgagaaaccccttatacctacactgataaaccctctgatgcacatgtaagaaggcaggataatgggcatgaaggacaatcatctatatgtgtatataaaaaatatatttttgcttgccagtaataactctgaactgcctacagcattcatcgtgcttcttaaaagtcaggtattatattgaattcaaaaattctcttatgctgagcagggaaaggaaaaaaaaaaatcaaacactttctgaattgggcccaaatatccaaggttaattttctgagaaagctgcagtggctarataaggccatcccctgcaaattagttttgcctgcctggattacagctaaatttatgcagctttccttatcctttcggaaacgcctctgaagtgttgtaattaactggcacacataaagtgagcacattttctgcttggtggcggccattcctcatttcatctcagttctaacccacatggaaaggtagtttcttatttttactgttaaaaacacacatgaatgcacttgtgtatgtgtgtgcacacacacacaaatacactctccagtactttacc

SEQ ID NO: 680008 - DNA, 954 bp, Homo sapiens
gatagaaaaaaaatagtatttcactgtcatcttaatttgcatttcttttgttatgagtggaatttagcattatttcatatatggaagagccatttgcagttctttttctataaactttattcgtatctcttgcctattttttaggtattgtttttttcttctctttttttaaagttctttatatatttaatatataaactctctgagatacagttacaaaatttccccttgtttgtttgtttatttatttacttgggttgtggtgttttcttttctttatttcccccctcatttttgcaaaagatttttattttttctcaaagcaggaggcagaaagctgctgctatggtcacttttggcctcccacacagtaggtttttgttgttgttgttgttgttttaagtcaaatttatcagtctttcccctattgcttctggagtttgagtcataggaaagtttttctcatccccaggttatagagaaattcatccatacttttttagtacttgtgtgttttcatgttttacatttaaatctctggtctattctggttggyttaaagaccagatccaattttatctagttccatatgactaacaaaggcctctctttacctcttctaagactatcctgtggcttttcttcaccttttctttggagatttgcatgcttgtttttttctcctggtttcccctccttgtatcattgattgcagctgcatggattcaaagactgttccctcaacatgtcctgtgctgtgctctagtctcttcctcctcctccttctcttggccacaggcatgctttcatggtgatggggagatcaggtttcaaggtgggaacaaggacttggaacactctacattcttgttaccctagaactcccagaaaggacagtggtggatgtggaatttctaacaatcacagccagcaccataactttccccaacatca

SEQ ID NO: 680009 - DNA, 639 bp, Homo sapiens
tttcaaaaatatttgaactsaaactaatttcttaaaaagttaaaaaaggtaagatttaatagtttttgtagatcatctcaaaattaacacatcaaaaagagctttatcaagtccttttctgtcaaaatattgatgctgcagaaatcaaaaccttgaatttacttaagtattttgtgatcaaaataccaagaaatactagctacccatatgaaaaaaaaaaaagaaccctagatctcaacctcattcctaacacacaaaaccaaaaatagatgaattaataatttaaatataaataacaaaactgtaaaacagaagaaaacaaaggatggcaccatcatcaactactatgtgggtacataaatcccaaaactgctatgaagggcaatttgccaataactctcaaaatgttcaagaaggcagaagaaaacacaaacataataagaaatgaaacagaagatataagaagacctaaatggaacctacagagattaaaaacacagtatttgacataataatatacatggtgggattaacaagtgattaaatgctacaaaagaaaaagctataaatgtgaagacacagcaatataaactatccaaaatgaagcagagagagaaagaagattgaaaaacaaaaacc

SEQ ID NO: 680010 - DNA, 977 bp, Homo sapiens
agttaccaccccctttctataaatttctgaatactccacctcttcatttgcatgtaattaaaacagagtataaacatgtacaagaagacagcttccactccctttgattttatccctgaccaatcagcactcctggctcactggcttcccctcacccaccaagttgtccttaaaaactctgctccccaaatgctcagggagactaatttgagtaataataaaactccggtctccggcacagccggctctgcgtgaattactctttctctattgcaattacctgtcttgatgaatcggctctatctagagagggcaaggtgaaccccttgggcggtttcagccccaccctgccatggtgtgcgtgcgcatgtgtgcagatgtatcttcctcccccatccaatcctcaggccgggcttgtgcccctgaaagcccgcagttctgcaggaggaggtccctgtgttccctcccagatcctcccaggttatgccaggaacccagggaggactcacagatgccctggaaactccagcttggctgcagtgggcccctgaggctctccctctcctgttgtaaggcactgcagccccctgagctactaggaccctcaagggttggccacactgcccacctcatggaggacgccaccacagcagacacaggtgaagtccgctccaaagtatgggtgtccaatgtcaacagcatcacaatcttctacgaggcaccatctcatcatcaccaaagctgccagccccgtgatgtggaagcacaagaggaaatggtctcagccggggacggtgactcatgcctgtcatcctagcactttgggagaccaagacrggaggattgcttgagcccaggagttcaagaccagcctgggcaccacagcaagacctccccgctccaaccatctctacaaaatatagaaacatgagtcaggcatggcggagtgcacctgtagtccaagctgctggggaggc

SEQ ID NO: 680011 - DNA, 648 bp, Homo sapiens
atggattattcaataaatgatgccgggacatttggttagctatttggaaggaaataaaattagctctttccttcacaccatacattaatataaattccagaggacctaaagaattaaatgtaagaaagggaaatcattaaaaagcaaacaaatgtttgatcttgggggtacatggaaacattttaaacctraaagcagtagaaaaaataacaaagattaaggtagaatttaatacataaaatttaaatctccttgttttaaaaattatttagttaattttattgggagactacaaaaaagaataaaatggttgcaagaaatatgacaaaagattaatacctctaatatgtaaaaagtaattacaaatcaataaaaatgaacagtccaatagaaaaatagtgaatgagaaatgcccaaaagatgaaataaaaatatgtaataaaatatttttaaatattcagcttcattggtcatcaaagaaatgcccattaaaacatcaatgagattttctcctatagcttatcaaagaacgtttaaatataattatagcattcaatctcattgagtggagtaaaattgagtattcctattcatctcacatgtgaaaatacaagttggtataaaatttctaggaaaaaaattaagttt

SEQ ID NO: 680012 - DNA, 588 bp, Homo sapiens
ccaaggaggctttgcttacagcacaaatcatgttgtcagtgtgaggtccaagaacagatgatgtggaatctgatgatgtgcctgtttcatgagtagctgtattctgagaagtgtcctcctctgagtgatataatttgagccgaatatgccatgctaaactgcatacagctgaaactgtcttgaactgatgaacaacattccttggaataaaataaatgtcattatcatatagctgaatcctggcatagcgaatgccttccctcctcagttgattcagttttgcatcatcaacccattggacacactaaaaaataataaaacaagaaatacaaataactctcttcataataaaaactaaaccaaagacagtaagtgtattaaaaatacctgggacagtggaggttcatgtaaatctaactgcattcgttgaactacttytaagaaatcttcagcatgaaaacaaattacatctttggttatacggggttgatcaggcctaaaaaagaaaacgagataacaagaatctgccataaatgcttcactcttttgagtccttattaaactcaaagcaaaaatactttatggtca

SEQ ID NO: 680013 - DNA, 857 bp, Homo sapiens
tctgccccttcaaaagtgtaagatgagaagtaaaatggtggccaggtgcagtggctcatgcctgtaatcccagcactttgggaggctgaggcgggtggactgcttgaggtcaggagttcgagaccagcctggccaacatggtaaaaccccatctctactacaaayacaaaaattagccaggcgtggtggcgcacgcctgtagttccagctactcggtaggctgaggcaggagaatcgcttgaacccgggaaacagaggttacagtgagcccagactgtgccatcgcactccagactgggtatcacagtgaaactccgtctcaaaaaaaaaaaaaaaaaaagaaaagaaaagaaaaatgttgatgggagaccctccccaaagccacatacaaatgcacaaagcagaccacacacacaaagtaccacagatacacacgtgtatagagtcagagccagagagagtgtgccagactgggagtgagggaatcagaaacagagatgcaggtatacttagagccagagagagacactcacagaggcagaaagaagcgcacacagaaacaaagacagcatgtgttgttaatggctaattatgaaaagaaaaataaaaaaaaacttttaagatcacaaattcattgagttaattctaccactaattttcgtatactttctgtattaataaagtgaaaaacaaaattcagaaaaatttataaaatttatatctatctttctctctcccccatcccattattacatataggaaaaaagtactaattagcttagttattctcaacttttggcctctgggattcgaatctgctttttttgcactgcaatgttgtcactcttccagccatg

SEQ ID NO: 680014 - DNA, 594 bp, Homo sapiens
tgagcttctgttttaaactacattatttaaatatattgttgatttgttaacattgaactcatggccaacagcacaactgatgcctgagcaaagcttatccgtatgcctgtggagaacttcaaaagggttgtgagcattgatttggggkttaccaataaattatagcaagtcagcaagttctcaaacatgtaatacataaatagtaatgattcattataattcaaataaagatattttgggagaagaggaggtaaaaaacaacccaagactgatgggtggaagattcagggcaggattcacaaaaagtagtgtttaacacaagaccctaatggtgtgtgtagacacagatatggggcagtcgaggtgagggaaacagcatatgtggaggcaaagaaggaaaccttcatttattgtttaaatgtaaaggatggagtgagagggtgaataccataagttgaggttggaggttaaggcaggagaattgcctgaatccagtaattcaaggccagcctgggcaacatagcaagacattgtcttaaaaaaaaaaaaaggggggggggcaggaaggtagtaaggagccagctcagaagggtt

SEQ ID NO: 680015 - DNA, 1507 bp, Homo sapiens
gcagtggtaccatcatggctcactgcagcctctaccttccaggcttaaacaatcctctgacctcagccttctgagtagctgggactacaggcatgtgcctccatgcccagctatttttttatttactttttgtagagactgggtctcactatgttgtccaggctggtcttgaactcctgggctcaagccatcctccccttggactcccaaagtgctgggattataggagtgagctggtgagcccagcctgcatatgccttttatacacagaaaatttattttgggactttatctcacagatacgtttgttcctatggggaaggyatatgcacaagtttagtcactgaagcattatatgcaacagtaggcatttggaaataacagaaatgtccatgttcagaggagtggttaaataacttgtggtaatcattatagctaatgctatactggcttaaaaagaaaaaaaagaattttttacactgatattaaatgatttttaaggaacactaagtgaaaaggtaaaatgaaaaaaaaagtttacgatatgctactacaaacgcagggacaaaaagatcctataactatattggcttgcatacatatacaattctctgaagcattaaaagcattttgttgaacatacctggttgtagtaaagactccatatactacaggatttctttcatctcttgtggggagtaaataaatatcttctattaaaggggaaaaataaatatttactcttatttttcagtattacattgcttttttgttaataacacaactgaaactctgaaaatctaaacagtttatacgattaacagaggcactatattatgccttgagaaatcaaatataagattgttttttctcaatgactatgtatggtatggtacaattgataatctccaaggtagtttccaattggaaatctgatttcatagaaaatataaaccaaaaaataagtaatttttaccctctagtgtaaaaaaattctgtcctataattgtgtcaacttagtaattaatttgcctttttttttttttttgatggagtcttgctgtgtcacccaggctggaatgcagtggcacaatctctgcccactgcaacctctccctcctgggttcaagcaattctcctgcctcagcctccctagtatctaggattacaggtgcccaccaccagcccggctaatttttttttttatttttagtagagatagggtttcgccatgttggccaggctggtcttaaactcctgacctcaagtggtccaaacacctcggcctcccaaagtgctgggatttcaggtgtgagccaccacacctgacctcatttacctatttggtaacaataagaaaatagctacccccaaattagtgccgtattgacagtaagttatgtgcaaataatattctttaaaagattaagatgtgaatgtgcttacatacaataggagaggtcatccacgattactcaatgtatactttaagttggaaaatacacaa

SEQ ID NO: 680016 - DNA, 609 bp, Homo sapiens
tgatatcacatagggaaacataaattagaaacaaattaagcttattatgtcatggggtctgtgttcttgccaagacaggttgtggagtaggagtgtggcaattactcatggtcacatttctatcacatccatacttttaaattacattttgttcttatttggccagctttcaatagtggatgctttatataatccatcattgtgagatttatcatttatagttacggagtaaattcatactttgaatgagtccttttaaattttcaaaagctttgctgggatcttttttcctattgacctgtaaaaaagttagtattataaatatcyagtacatttccagaaaagcaatgtcacgatggaataaacttcctggaaaaaagttgagagtatcattctgagcacgattgatactacttttacaattgcttcatagcttccttcaagttattcagaatttctccttcttcaagttacaaagaatgtttaaaattaaacgccatgtcacacatatttggtatttgtttcaatcaagtatataaatttaatgtagaaaacatcggaaggtcttaacttaatacaacatctattattgactccaagtaatagaca

SEQ ID NO: 680017 - DNA, 1144 bp, Homo sapiens
ctatttgggcgtgaaactggacacagacacacacaaagttgaccaaccataattcatataaactttgcttttatatcaaacatttaaaaacaactagcttagcagatttcatttcttagaaaattgtttcatcttttttatatttaaacctttcacattgtctttttctattaccaagtacatatatagttgagaacttgaagctatcctgctgtcttaaattctttttgaagataccttactgtgttttaaaaaaaatcccctctaactaggaataaactagtaagagttatatgaaatgtgttaacatttttctatttttaggaatttatttgttttaacaccaaactgtttaccacttgcagatcaaattgaatattataaatactgggctgaaaagggtacttgaatagctttagcatctttttcctcacaaaaatgagtaattgggcttcgtgttctataattctatttttatgaactgatgccaaaacatttcacagaagtcaatatgcttttctaaaaagaaaaaatatagcaatcaaaaaagacatttcaaaatcttaataaacaatttagaaaatatgtatatatttacctttgtaggttagcttgagtcttggaatattttgcttcaaagtgccagtgactggaagaaacaacatggtcatgcttagcatcatcaaagcaggaaaaaggtgaaaatcttggcttctggctttaagtctttcatctttattagcattcatgatgaaaacaatgttctctttcaaatggtgttaatttaatctaaaaaagagtaaaaaaaaaaaaactattaaggtatcagcaaactgacacaggaagagaaaaccaaataccatatcatctcactcttaagtgggagttgaacaatgagaacacatggacacagggaggggaacatagcataccagggcctgttgggggctgggggctgggggagggagagcattaggagaaatacctaatgtagatgmcaggttgatgggtgcagcaaaccaccatggcacgtgtacacctatgtaagaaacctgcacgttttgcacatgtatcccagaacttaaagtacaaaaaaaaaaaactattaagataacaattggtagactttcctcaacttactaaa

SEQ ID NO: 680018 - DNA, 975 bp, Homo sapiens
attattttaaggcaaatttgataaaatagtcagtggtgaggaagtatatagtgtgtttgtggatttaatatattcatactctttctctaaatgttctagacaactaaaaagctaagaaaaaaacacattttagatattctttatctttaaaaatacatataaatatgtgtactctatgttgttttttattgtgtgaaattttattttactaataatatttttaatatattttaactaattatcataaatyaagagtattgtatccaaagcagccagaatattagatgtggtcataaaataagtttccaaattttgtctgaataactaggattagaaagaagtaactaaaaaatggtttggacattcaaatttggatagaaataaaatttattttcataagtcaatcctaacacttgagcttcatgtaaattttccaaagtcattcatattttgatcattactgtcggacccacaaatatttggaaattttttttaaattaaaaatgttcccacttaattgctttgagctcgctatgagttcctggaatattttgtccaagcaaatctataattacaaacactgttgttacgctattcaattagaagtctgatcatgccacactgttcttctgaattactttttaaatgagtgatttgttctggttcacttttattaaaattattccttagctgttccttatagtgaaacacctacaaatattcatcagtataatatcaaaagggagtactcaatctcatatatcagtttgactactttgagataggtaagcaatgcaaataaaataaaaataacagagagagaatgctctcaacatagagccacagatcttgcattaagttgccctctaatcacagggttttctcacagacttttctttcaagatatgtagaatgcatgagaaacgagcaatgtctgttattttctgaaaagctgccttccatgtgaggaagtga

SEQ ID NO: 680019 - DNA, 826 bp, Homo sapiens
gggttgttactactccctttaagtctagattcctttgcagtttccattatcagaagacaccatgtaactcttaattctgttgtgactttggcatttgacacactgaaatttgttgctgtagctgattttaaatgatgatgatgacacctcttgttttctaactagatggcaaggattgctgccaaggagactttctctaaacaactatttatttcaaaaaaagatcattaagtgtgtaactctgtatgcctgtgtgttcgtgtatgtgtacatgtgtgtgtgttataccacagacataatttatatttggtatatttattctcatatgtgggctaattgatagctwacagggtccttgtgtttttcagtctgttgtttttgctctcagcaaaaatttactcagttgatgaggatattttgacaacttggcctgtgtgtccaggaactgcaatttggtatgaattttctggctgaaatgacctaattttaacatataaaatattccaaatttataaggaaatgatgtaggtagcctgatgcaaggaataacaaatattaagactttatacagttcctaatatataaaatcacagggtggaaacatcatgattatagcttccttatttcatttgcaaatattacaaatgttgtttactaaaactgcattctaacaaaagttacaaagaattatagtttccagcttgaacacacagttcaatttaattcttaggaatgtttcagtcaacatttacaatatatttgtaccttaaaaaattcacatactttctcaaatgtctttgtttcttgatgcttccaaatatactat

SEQ ID NO: 680020 - DNA, 826 bp, Homo sapiens
gggttgttactactccctttaagtctagattcctttgcagtttccattatcagaagacaccatgtaactcttaattctgttgtgactttggcatttgacacactgaaatttgttgctgtagctgattttaaatgatgatgatgacacctcttgttttctaactagatggcaaggattgctgccaaggagactttctctaaacaactatttatttcaaaaaaagatcattaagtgtgtaactctgtatgcctgtgtgttcgtgtatgtgtacatgtgtgtgtgttataccacagacataatttatatttggtatatttattctcatatgtgggctaattgatagctaacagggtccttgtgtttttcagtctgttgtttttgctctcagcaaaaatttactcagytgatgaggatattttgacaacttggcctgtgtgtccaggaactgcaatttggtatgaattttctggctgaaatgacctaattttaacatataaaatattccaaatttataaggaaatgatgtaggtagcctgatgcaaggaataacaaatattaagactttatacagttcctaatatataaaatcacagggtggaaacatcatgattatagcttccttatttcatttgcaaatattacaaatgttgtttactaaaactgcattctaacaaaagttacaaagaattatagtttccagcttgaacacacagttcaatttaattcttaggaatgtttcagtcaacatttacaatatatttgtaccttaaaaaattcacatactttctcaaatgtctttgtttcttgatgcttccaaatatactat

SEQ ID NO: 680021 - DNA, 826 bp, Homo sapiens
gggttgttactactccctttaagtctagattcctttgcagtttccattatcagaagacaccatgtaactcttaattctgttgtgactttggcatttgacacactgaaatttgttgctgtagctgattttaaatgatgatgatgacacctcttgttttctaactagatggcaaggattgctgccaaggagactttctctaaacaactatttatttcaaaaaaagatcattaagtgtgtaactctgtatgcctgtgtgttcgtgtatgtgtacatgtgtgtgtgttataccacagacataatttatatttggtatatttattctcatatgtgggctaattgatagctaacagggtccttgtgtttttcagtctgttgtttttgctctcagcaaaaatttactcagttgatgaggatattttgacaactyggcctgtgtgtccaggaactgcaatttggtatgaattttctggctgaaatgacctaattttaacatataaaatattccaaatttataaggaaatgatgtaggtagcctgatgcaaggaataacaaatattaagactttatacagttcctaatatataaaatcacagggtggaaacatcatgattatagcttccttatttcatttgcaaatattacaaatgttgtttactaaaactgcattctaacaaaagttacaaagaattatagtttccagcttgaacacacagttcaatttaattcttaggaatgtttcagtcaacatttacaatatatttgtaccttaaaaaattcacatactttctcaaatgtctttgtttcttgatgcttccaaatatactat

SEQ ID NO: 680022 - DNA, 826 bp, Homo sapiens
gggttgttactactccctttaagtctagattcctttgcagtttccattatcagaagacaccatgtaactcttaattctgttgtgactttggcatttgacacactgaaatttgttgctgtagctgattttaaatgatgatgatgacacctcttgttttctaactagatggcaaggattgctgccaaggagactttctctaaacaactatttatttcaaaaaaagatcattaagtgtgtaactctgtatgcctgtgtgttcgtgtatgtgtacatgtgtgtgtgttataccacagacataatttatatttggtatatttattctcatatgtgggctaattgatagctaacagggtccttgtgtttttcagtctgttgtttttgctctcagcaaaaatttactcagttgatgaggatattttgacaacttggcctgtgtgtccaggaactgcaatttggtatgaattttctggctgaaatgacctaattttaacatataaaatattccaaatttataaggaaatgatgtaggtagcctgatgcaaggaataacaaatattaagactttatacagttcctaatatataaaatcacagggtggaaacatcatgattatagcttccttatttcatttgcaaatattacaaatgttgtttactaaaactgcattctaacaaaagttacaaagaattatartttccagcttgaacacacagttcaatttaattcttaggaatgtttcagtcaacatttacaatatatttgtaccttaaaaaattcacatactttctcaaatgtctttgtttcttgatgcttccaaatatactat

SEQ ID NO: 680023 - DNA, 673 bp, Homo sapiens
aaaggaatgaactattaatacactcaatgacatggataagttttaaatgcattacattatataaaagaagagtaagaatactgcacagtgtatacttcatttgtatgacattctggaaaagacaaaactatagggacagttaacagattagtcgttgtcaggggttgggggagggggaagatttgactacaaaggagcaagagggattttatggaagtgatagaattgtatgattaaaagggtaaactttaagaactacatccttgtaatatttagcatagctagtctttgaacagagtaggtgctccagaatattctaagtgaaggagagaaagayttcaaatgtttgtaagcatggaagagtaaggcaatgatggagctactagcaaaggcaaagagtagagaaaggaaggcaaagatttagccagacagaacatgaatagtgtggtagacttgacccactgtgttttccttaccccattatatgccacaacctttagattgagtgaaaatcagagcccagtgcatctgatattaggattaccacctacagaggggaaacaagagactatgcaaggctgaaacaagtaggataagcaactaaaatcagcaacatagactacaagtcagaactgggaacaaaatgactaaagaaaaaatcaaaaatgaaatg

SEQ ID NO: 680024 - DNA, 1070 bp, Homo sapiens
aaaaattagctgggtgtggtggcgtgtgcctgtaatcccagctactcaggaggctgaggcaggagaattgcttgaaccccagaggcagaggttgcaatgagccaagatcatgccactgcaatccagcctgggcgacagagmgagattctgtctcaaaaaaaaaaaaaaaaaagaaatttaaaaaggtatatatatatatatatgttgcattgcaaatttaaaaagaattattctacttttaaaaatattctatacttttaaataataccgaacgtttttaaagtgactttttatatttaacattcttaatttttatatgaatgaaaactgtacatttgactatgaaaggtcatctgcaaatttacatcaacgttaagattttatgctgggaaaaataactaatgggtactagccttagtacccgggcgatgaaattgtctgtacaacaaacccccataacacaagtttacctatgtaacaaacctacacatacattccaaaaaagtaaagaatggaaaatactcaagagccataaacaagaaactaatgaaattgtctacttgcaatggtgagtagaaagtagaaatggaatggcatggaagcaagagaagaggacacttctctgaatttaccctttcatatagtatttactattatccaatgttaaggttttaaatattcaaaaactaatatccagaaagatgaaaataaagacagaaatatgcctatggatatatcaaatgtataccattaatacagagcaagaaaatccagatgatttttggttacaattttctgactgtatatactctcattagaatatattttaagactgaaataactgtaaatacattttatgatattgatataaatatttaaattatattgtttactgccttaagtatacaatatatagtatatataatatgtagtgttttatcaacattttaaagaaattctgtaatttcagttttcatttttctttaatagtgtttttaatatccagttggaagaatatttatatatatattaattcagatgttgcaagatttgaaaaatgtttccactca

SEQ ID NO: 680025 - DNA, 1070 bp, Homo sapiens
aaaaattagctgggtgtggtggcgtgtgcctgtaatcccagctactcaggaggctgaggcaggagaattgcttgaaccccagaggcagaggttgcaatgagccaagatcatgccactgcaatccagcctgggcgacagagcgagattctgtctcaaaaaaaaaaaaaaaaaagaaatttaaaaaggtatatatatatatatatgttgcattgcaaatttaaaaagaattattctacttttaaaaatattctatacttttaaataataccgaacgtttttaaagtgactttttatatttaacattcttaatttttatatgaatgaaaactgtacatttgactatgaaaggtcatctgcaaatttacatcaacgttaagattttatgctgggaaaaataactaatgggtactagccttagtacccgggcgatgaaattgtctgtacaacaaacccccataacacaagtttacctatgtaacaaacctacacatacattccaaaaaagtaaagaatggaaaatactcaagagccataaacaagaaactaatgaaattgtctacttgcaatggtgagtagaaagtagaaatggaatggcrtggaagcaagagaagaggacacttctctgaatttaccctttcatatagtatttactattatccaatgttaaggttttaaatattcaaaaactaatatccagaaagatgaaaataaagacagaaatatgcctatggatatatcaaatgtataccattaatacagagcaagaaaatccagatgatttttggttacaattttctgactgtatatactctcattagaatatattttaagactgaaataactgtaaatacattttatgatattgatataaatatttaaattatattgtttactgccttaagtatacaatatatagtatatataatatgtagtgttttatcaacattttaaagaaattctgtaatttcagttttcatttttctttaatagtgtttttaatatccagttggaagaatatttatatatatattaattcagatgttgcaagatttgaaaaatgtttccactca

SEQ ID NO: 680026 - DNA, 1070 bp, Homo sapiens
aaaaattagctgggtgtggtggcgtgtgcctgtaatcccagctactcaggaggctgaggcaggagaattgcttgaaccccagaggcagaggttgcaatgagccaagatcatgccactgcaatccagcctgggcgacagagcgagattctgtctcaaaaaaaaaaaaaaaaaagaaatttaaaaaggtatatatatatatatatgttgcattgcaaatttaaaaagaattattctacttttaaaaatattctatacttttaaataataccgaacgtttttaaagtgactttttatatttaacattcttaatttttatatgaatgaaaactgtacatttgactatgaaaggtcatctgcaaatttacatcaacgttaagattttatgctgggaaaaataactaatgggtactagccttagtacccgggcgatgaaattgtctgtacaacaaacccccataacacaagtttacctatgtaacaaacctacacatacattccaaaaaagtaaagaatggaaaatactcaagagccataaacaagaaactaatgaaattgtctacttgcaatggtgagtagaaagtagaaatggaatggcatggaagcaagagaaraggacacttctctgaatttaccctttcatatagtatttactattatccaatgttaaggttttaaatattcaaaaactaatatccagaaagatgaaaataaagacagaaatatgcctatggatatatcaaatgtataccattaatacagagcaagaaaatccagatgatttttggttacaattttctgactgtatatactctcattagaatatattttaagactgaaataactgtaaatacattttatgatattgatataaatatttaaattatattgtttactgccttaagtatacaatatatagtatatataatatgtagtgttttatcaacattttaaagaaattctgtaatttcagttttcatttttctttaatagtgtttttaatatccagttggaagaatatttatatatatattaattcagatgttgcaagatttgaaaaatgtttccactca

SEQ ID NO: 680027 - DNA, 1070 bp, Homo sapiens
aaaaattagctgggtgtggtggcgtgtgcctgtaatcccagctactcaggaggctgaggcaggagaattgcttgaaccccagaggcagaggttgcaatgagccaagatcatgccactgcaatccagcctgggcgacagagcgagattctgtctcaaaaaaaaaaaaaaaaaagaaatttaaaaaggtatatatatatatatatgttgcattgcaaatttaaaaagaattattctacttttaaaaatattctatacttttaaataataccgaacgtttttaaagtgactttttatatttaacattcttaatttttatatgaatgaaaactgtacatttgactatgaaaggtcatctgcaaatttacatcaacgttaagattttatgctgggaaaaataactaatgggtactagccttagtacccgggcgatgaaattgtctgtacaacaaacccccataacacaagtttacctatgtaacaaacctacacatacattccaaaaaagtaaagaatggaaaatactcaagagccataaacaagaaactaatgaaattgtctacttgcaatggtgagtagaaagtagaaatggaatggcatggaagcaagagaagaggacacttctctgaatttaccctttcatatagtattkactattatccaatgttaaggttttaaatattcaaaaactaatatccagaaagatgaaaataaagacagaaatatgcctatggatatatcaaatgtataccattaatacagagcaagaaaatccagatgatttttggttacaattttctgactgtatatactctcattagaatatattttaagactgaaataactgtaaatacattttatgatattgatataaatatttaaattatattgtttactgccttaagtatacaatatatagtatatataatatgtagtgttttatcaacattttaaagaaattctgtaatttcagttttcatttttctttaatagtgtttttaatatccagttggaagaatatttatatatatattaattcagatgttgcaagatttgaaaaatgtttccactca

SEQ ID NO: 680028 - DNA, 1070 bp, Homo sapiens
aaaaattagctgggtgtggtggcgtgtgcctgtaatcccagctactcaggaggctgaggcaggagaattgcttgaaccccagaggcagaggttgcaatgagccaagatcatgccactgcaatccagcctgggcgacagagcgagattctgtctcaaaaaaaaaaaaaaaaaagaaatttaaaaaggtatatatatatatatatgttgcattgcaaatttaaaaagaattattctacttttaaaaatattctatacttttaaataataccgaacgtttttaaagtgactttttatatttaacattcttaatttttatatgaatgaaaactgtacatttgactatgaaaggtcatctgcaaatttacatcaacgttaagattttatgctgggaaaaataactaatgggtactagccttagtacccgggcgatgaaattgtctgtacaacaaacccccataacacaagtttacctatgtaacaaacctacacatacattccaaaaaagtaaagaatggaaaatactcaagagccataaacaagaaactaatgaaattgtctacttgcaatggtgagtagaaagtagaaatggaatggcatggaagcaagagaagaggacacttctctgaatttaccctttcatatagtatttactattatccaatgttaaggttttaaatattcaaaaactaatatccagaaagatgaaaataaagacagaaatatgcctatggatatatcaaaygtataccattaatacagagcaagaaaatccagatgatttttggttacaattttctgactgtatatactctcattagaatatattttaagactgaaataactgtaaatacattttatgatattgatataaatatttaaattatattgtttactgccttaagtatacaatatatagtatatataatatgtagtgttttatcaacattttaaagaaattctgtaatttcagttttcatttttctttaatagtgtttttaatatccagttggaagaatatttatatatatattaattcagatgttgcaagatttgaaaaatgtttccactca

SEQ ID NO: 680029 - DNA, 1319 bp, Homo sapiens
tgtttgtttcctctactatgtgaaggtaacttcctactgtaaggatatgcctgggtaggggtgagagagtaaaattttctgtctacattgtcaacgtaagattaaataccaactatcatttctagagcatgttattagtcaagggtgattcgaatttctaagtaatttttccaaaaataacattttaaagttacactcttacagaaatgacccatgatagttacaatctgaagcaatacttagacccttaaactcagacacaagtggaaatataccttataaaaatggagacagtaaggtagacataggttatcacaattcattaaaaaatcaatatttggcaggtgcaatgagcaactataagcaatcacgtgataatcaggaaatattaagaggaatgataaaaggtaaatactgataaaggctaaacatattcctaatttgagagcaaattttgaaattttaagaacctctgtgaaatgaaagatctatattaccaaaaccccaagtcaaagaaaygcctacttgctttaaaatatacaggaaaatagttcactgctgatttatccactaaaacttcaatgtcaattcagacatgcattgttagtgctaattctctacttcagctggaggtttccaacaagatttaattgaagaatctttcacttttaaaaatagcaatgatataaatctcatcacttgagctattatgctgaataggtttttttctaaactttcattagcatattttaaagcatttactataaacttgaaaagtcattgaacattcattttttaaaaagtatgtaaaatcattaaataaaaacccaaatgctggctttggattcaataatttaaactatttaatatattttaatttggagacggaaaataaaaccttttcaaattttttaaattatagaatacaaagaattactgtaattaatacaaatataatattttaccaaataaatataactttttcattaggctttattaagatgtaaagaatctaaataataacattattatttttcatctttttaaaaataaatatccataactttaaaatgtgtataactctaacaacttaatagttttatttttcttgtgttttaattcattggaaatatttgtcattattttaaacacaaactagagtatttagctagtatttttctttaactccaaagtaccctctgaaatcagtgcattgtatttattccctttgacattcaactgctagaagtcaccccataaataaaaactacataattctggtggcaatgtatagaataaataatacaggcgaataaaga

SEQ ID NO: 680030 - DNA, 1319 bp, Homo sapiens
tgtttgtttcctctactatgtgaaggtaacttcctactgtaaggatatgcctgggtaggggtgagagagtaaaattttctgtctacattgtcaacgtaagattaaataccaactatcatttctagagcatgttattagtcaagggtgattcgaatttctaagtaatttttccaaaaataacattttaaagttacactcttacagaaatgacccatgatagttacaatctgaagcaatacttagacccttaaactcagacacaagtggaaatataccttataaaaatggagacagtaaggtagacataggttatcacaattcattaaaaaatcaatatttggcaggtgcaatgagcaactataagcaatcacgtgataatcaggaaatattaagaggaatgataaaaggtaaatactgataaaggctaaacatattcctaatttgagagcaaattttgaaattttaagaacctctgtgaaatgaaagatctatattaccaaaaccccaagtcaaagaaacgcctacttgctttaaaatatacaggaaaatagttcactgctgatttatccactaaaacttcaatgtcaattcagacatgcattgttagtgctaattctctacttcagctggaggtttccaacaagatttaattgaagaatctttcacttttaaaaatagcaatgatataaatctcatcacttgagctattatgytgaataggtttttttctaaactttcattagcatattttaaagcatttactataaacttgaaaagtcattgaacattcattttttaaaaagtatgtaaaatcattaaataaaaacccaaatgctggctttggattcaataatttaaactatttaatatattttaatttggagacggaaaataaaaccttttcaaattttttaaattatagaatacaaagaattactgtaattaatacaaatataatattttaccaaataaatataactttttcattaggctttattaagatgtaaagaatctaaataataacattattatttttcatctttttaaaaataaatatccataactttaaaatgtgtataactctaacaacttaatagttttatttttcttgtgttttaattcattggaaatatttgtcattattttaaacacaaactagagtatttagctagtatttttctttaactccaaagtaccctctgaaatcagtgcattgtatttattccctttgacattcaactgctagaagtcaccccataaataaaaactacataattctggtggcaatgtatagaataaataatacaggcgaataaaga

SEQ ID NO: 680031 - DNA, 1319 bp, Homo sapiens
tgtttgtttcctctactatgtgaaggtaacttcctactgtaaggatatgcctgggtaggggtgagagagtaaaattttctgtctacattgtcaacgtaagattaaataccaactatcatttctagagcatgttattagtcaagggtgattcgaatttctaagtaatttttccaaaaataacattttaaagttacactcttacagaaatgacccatgatagttacaatctgaagcaatacttagacccttaaactcagacacaagtggaaatataccttataaaaatggagacagtaaggtagacataggttatcacaattcattaaaaaatcaatatttggcaggtgcaatgagcaactataagcaatcacgtgataatcaggaaatattaagaggaatgataaaaggtaaatactgataaaggctaaacatattcctaatttgagagcaaattttgaaattttaagaacctctgtgaaatgaaagatctatattaccaaaaccccaagtcaaagaaacgcctacttgctttaaaatatacaggaaaatagttcactgctgatttatccactaaaacttcaatgtcaattcagacatgcattgttagtgctaattctctacttcagctggaggtttccaacaagatttaattgaagaatctttcacttttaaaaatagcaatgatataaatctcatcacttgagctattatgctgaataggtttttttctaaactttcattagcatattttaaagcatttactataaacttgaaaagtcattgaacattcattttttaaaaagtatgtaaaatcattaaataaaaacccaaatgytggctttggattcaataatttaaactatttaatatattttaatttggagacggaaaataaaaccttttcaaattttttaaattatagaatacaaagaattactgtaattaatacaaatataatattttaccaaataaatataactttttcattaggctttattaagatgtaaagaatctaaataataacattattatttttcatctttttaaaaataaatatccataactttaaaatgtgtataactctaacaacttaatagttttatttttcttgtgttttaattcattggaaatatttgtcattattttaaacacaaactagagtatttagctagtatttttctttaactccaaagtaccctctgaaatcagtgcattgtatttattccctttgacattcaactgctagaagtcaccccataaataaaaactacataattctggtggcaatgtatagaataaataatacaggcgaataaaga

SEQ ID NO: 680032 - DNA, 1319 bp, Homo sapiens
tgtttgtttcctctactatgtgaaggtaacttcctactgtaaggatatgcctgggtaggggtgagagagtaaaattttctgtctacattgtcaacgtaagattaaataccaactatcatttctagagcatgttattagtcaagggtgattcgaatttctaagtaatttttccaaaaataacattttaaagttacactcttacagaaatgacccatgatagttacaatctgaagcaatacttagacccttaaactcagacacaagtggaaatataccttataaaaatggagacagtaaggtagacataggttatcacaattcattaaaaaatcaatatttggcaggtgcaatgagcaactataagcaatcacgtgataatcaggaaatattaagaggaatgataaaaggtaaatactgataaaggctaaacatattcctaatttgagagcaaattttgaaattttaagaacctctgtgaaatgaaagatctatattaccaaaaccccaagtcaaagaaacgcctacttgctttaaaatatacaggaaaatagttcactgctgatttatccactaaaacttcaatgtcaattcagacatgcattgttagtgctaattctctacttcagctggaggtttccaacaagatttaattgaagaatctttcacttttaaaaatagcaatgatataaatctcatcacttgagctattatgctgaataggtttttttctaaactttcattagcatattttaaagcatttactataaacttgaaaagtcattgaacattcattttttaaaaagtatgtaaaatcattaaataaaaacccaaatgctggctttggattcaataatttaaactatttaatatattttaatttggagacggaaaataaaaccttttcaaattttttaarttatagaatacaaagaattactgtaattaatacaaatataatattttaccaaataaatataactttttcattaggctttattaagatgtaaagaatctaaataataacattattatttttcatctttttaaaaataaatatccataactttaaaatgtgtataactctaacaacttaatagttttatttttcttgtgttttaattcattggaaatatttgtcattattttaaacacaaactagagtatttagctagtatttttctttaactccaaagtaccctctgaaatcagtgcattgtatttattccctttgacattcaactgctagaagtcaccccataaataaaaactacataattctggtggcaatgtatagaataaataatacaggcgaataaaga

SEQ ID NO: 680033 - DNA, 982 bp, Homo sapiens
gaggttttgctgcrgttgtttttatttgttttgggttgtttttgctcttgcttttcttgttttgttttgttttgttttgttttgtttttaaccaagttcaaggccagaaaagtgtatcacccataaagtaaccccagcactccatgccagaggaatttctgacaaaatgaatggtttcaaatacaacagcctgctgactaagttcccagcttgcaacctccctggaatctgcagtcttggattaaccctcagcaaaaaagaccttcattctggtgtctttgccatatctattgtctgctccaatcctatgaaccctctaggaagtgtaagctaatttggacaactagatgtgcagtcatactataaaactattttgttctacttcttctaaatgtattttaaaaagaacgtaaggaaaaagtagcaaagcctctttaaaaatccaaattcagaaccagcagaaggaacacaggaagctttactgagtaattgaagtgattacatgcaaagcactttcccataatcagcgagtttcaaagaagggcagagggtgattgacagtgttggccacccttgaaactacatcctgattggagaaaataattacaagcagggagaaagagactcagtgctctacatctcttttatttttagatttaatctgagagaagaaagattatagaagaaaataaagtttagaaagtttagaaatcttgttcttggagaataagaaagcaaaaagtccctgctataccaaccgcaatagcttattttatgttttattttccttttattcatttactgagcacctactatgctccaggttgtagaaaagatcaaaggatgttttggcataaaaacatgtgaactgtaaacctataaacagatattaagctgtcattgtggatataaacttttcaagaaaaagagggtaaaatgacaagctaagattccatatcaagcttgctgtctgtttgctgga

SEQ ID NO: 680034 - DNA, 643 bp, Homo sapiens
gggaaggcattcacgactagcagacaggagaatggacagtcaatttggcagcttgttgaggggctctgaccagtgggagctgtgctgagtgcaggagagtacgcagactaacatctgaggctgcccgtctgcacctgggctgatgtctgccagctggccggctgccgagcactgtctaactcagctttaaaacgtgacggtccctgtcctgggaggacttattgagcttgtataaggcacatgcagatgccaacagtgcaggcaagaagtgctaaggacctaaaggggttcaacatgtttgtctagacgactctgtggtccttggaccatgtagtccaacctgtgtctttgrcctgtgtgggacaagaaaaaaaaaaggcagggacatccaggggataccctcgatggtggcttaagcatcacgtgtctgtcctttagattggtttcacagtgatgaggagcaaagtgactacaatttgcaaacatagtaaatcctcaacatcatcagtaggttcttggaaactgacttaaagtggcacaacatactgtctaacgaaaccaatttcccatatgctaactgacataaacaagaggtttgttgttttacttaaaattgcagtttccaagaacctatcaatgacat

SEQ ID NO: 680035 - DNA, 756 bp, Homo sapiens
gaaccattaacattagagcctatctcatggggaagaagaaaagtggatcaggatcccccggggctgcggattttcagaaggccctgaagaaagggctggagcaccaagcaatgatgctaactaggggagagggactacagatcagtgactaactgcagttttgctaagctgagatcttgtaaagaggatgaggatgaagacattagaccagtctactccgccccttgggtctgcatatacaagaccctttcttttactgtaaaagaaaaagcgtttaattcaagccacccatttgtaactactttttggcttttgttttccttccaaactgctttctgcaagtaaacgcagcccaaggatgcttttatcttcccgagtgttcacctacagctaatgaaaaaaaagaaaaagctcttgaaaagatatttcgtgagatttgtgtattttattagtcattttatcccctttattcaagtctcctggaatcagttcaattgcaggaagacgggtaggcacgcagaaaaaaaaaattaaagtggattttagaacgacacggcaaattagcaaagtttttaacatcattaaagagctcttaaatattcttcccygaactccatttttatcttgtgaatgcatttcagtaattgctctaaaggaaattgtggaactttggcacaaatataaatgtttgcatgatttaaaattcggtggcagcaaaaatcatgatttttttaattgctaatgcttaaactaacc

SEQ ID NO: 680036 - DNA, 652 bp, Homo sapiens
gattctctgggttgctcatctagctcatctagattggaagccacctaactctggttgctacgctgggctccatagaacttttggtcacctggtcaacatttgtccatgtcttcatctcccttcattaacattttttttgagacagggtctccctctgtcacccaggctagaatgcagtggtatgatcatagcttatgcagccttgacctactggactcaagcaatcctcctgcctcagcctcccragtagctgagactacaggcatgtgccaccatgcccagctaattatttatttatttgtttatttatttatttatgttgtagagatgggttcttgctgtattgcccaggctgggctgaaactcctgtcctcaagtaattctccagcctgggctttccaaaacaccgggattataggcatgagccaccaagcccagtcctcactaacatttcttctcaaccagggacgtaggttcctatattagttctctgtagttcctgtgaaaaattaccaccaactcagtggcttaaaactgcataaatttgttatctgacagttctggaggtcagaaatccaacacagatggcattgggctaggatcaaggtgttgtcagaattacactcctttctggaagttccagggaacaatc

SEQ ID NO: 680037 - DNA, 608 bp, Homo sapiens
attgagttacctacctgtgcatccaagcctgggacatgctggacttcttttcccagtctcccttgttgttaggagtgaacgtataactaagttatagtcaaatgtgagctgtctgggttagaagctttcagatatctctaggcctctttcaagttcttcttttccccttttctgtgtgctagaatctgaaagttgaaacccagccttgagcatgcagatgatgatgacaagacaaaggtatcctggggccctgagataccgcatggaggaaaaccacttgctaaccagaaatacttaycctataccgttaagaaaataataaacttcttgtacattaagctactgaatttgagcaatctgtttgttacagcagcttagccttccctaatgggtatatttatcaatctcttaatgtgtaagtaccaactgtactattatctgctttctttttttttagagatggggtctcactatgttgaccaggctggtctcaaactcttggccttggcctcccaaagtgctgggattacaggcatgagccatcatgcccagccccattttttaattaaaaaagctcactcctcttttcaattagctatatattcaca

SEQ ID NO: 680038 - DNA, 635 bp, Homo sapiens
ttgggatgcatgtcccctctgaggtgtgggaactttggtacaacaggatgggtggacaggctggggtcctctggggaaaatcctgctgggatggaatgatgagggcagggtgctcacctggaggccaagacagtgggggccagaggaagccgctggtaagcctggatgttgaatttaagagggtgagaactgaatcctcttggaagtgacatttcctgctctttcctcttgtccagacagtagaatcttgacggaaaactactgttattttcccttaagaaaaagcaatagataaaaataatagcaaaaatcacacggaacatgatgaggatttgccactgtttcttggggagcctctaggtatgaggtgtggtgggcaaaccatggccatcaactactgtcaaaattattattttactttaaaacrattatttattattttttaaaatagagttgcaggccgggcgcggtggctcatgcctgtaatctcagcactttgggagactgaggcaggaggatcacctgaggtcaggagttcaagatcagcctggccaacacggagaaaccccatctctactaaaaatacaaaaattagctgggtgtggtggtgggcgcctgtaatctcagctactcag

SEQ ID NO: 680039 - DNA, 601 bp, Homo sapiens
acacactctgatcttccttttttcttctttattaaagtaggaggtaaaactgtgtgaaaggtgccctttctgtaccaggaggaagacagtcatcactagaggtggagagttgaggctgagagaaactcatacaaacaaaccttgctaaatgaacccttatcttcctggttacttttccacaattaactaccctggcccaagtaaaccactttttcttgtcacattttcacaatttactacttttttgtcaaacctaatgtataaattttgggcctgtgaaagaaaaatatcttgggcccccaaaatcaccaagctaaagggaaaatttgagctgggaactgcttcggataaagcctgcctccctttctatccaaagttatccttctgctcactgagataaatgcgtatctgattgcctcctttggaaacgttaatcagaaactcaaaagaatgcaactggccgggcgtggtggctcacgcctgtaatcccagcactttgggaggccaaggcgggcggatcacgaggtcaggagattgagaccatyctggctaacacggtggaaccccgtctctactaaaaatacaaaaaattagccgggca

SEQ ID NO: 680040 - DNA, 621 bp, Homo sapiens
gaagatatagatatttcaccttagaatagcccagttcctccataaattaagwgtgaacatcaacaatttaaataacttctctgagtctgcttttataggtttgagaaactgaaatcaattaaaacaaaaagaaaaccattcagagcaatgcctggaagatactaaataaacaactatgattaatattttattattttcaacttgtaatgtaatcctgtaaattaacagatgatggcaaaagcggcctaatcatttcaataaatgtcccccaaaatctttttattaatattccatttttattcttgctaaaatattagggtgttagaaagttctttaactttcacattatctaccatagagatatgtgaaaaaaatacttaatgttaaaatctttaaaatattccacttaaagacaaaaggaagaatgttcactctcaattagtccaataatgctattacagaactcatagttaatgtactaggacaagaaaataaatacaaggtaaaagctttgggaaagaaaagaacaaaaacttttattatgtagcaatatgactgtctacataacaatctaaataaaactgatgaattactaaattaaaccaaggttaagtatgaaat

SEQ ID NO: 680041 - DNA, 642 bp, Homo sapiens
agaaaaaatgattatttttatctaacttaaacttatctgaacttctctgaaaaggacatttaggaaaacgtggtctgtgtgtctatacttgttgtcctgggatgcattcaaagattactgactactcagacaattgtctaaaatttcaaaattaatacatatcttgaaccactcactaactttttaaaaacacaaagttytgttgatatgttttgttttaactatggtaagaactggaaataatttgttttcacctctgtttcttgactctttcactgtaaagagtgccaactcattccttctatgaaatctatgggaattatctcatgtgtactattgtcctctcttcctatatatatccatctttctttctcttacccttcctccaatctttgttataatttatttttaatttttacactattttccattaaaaataagtaacatcttaatattggactatccataggctttaggcaatattttttactccctaagtatgaaaagtaaaataaattagtgccttgccacatcccttcatcatcccataacccaccttctctccactatagcattacttttaaattgtcaagtttattacatttacattctattttcaaactataattgtctcctatcaca

SEQ ID NO: 680042 - DNA, 642 bp, Homo sapiens
agaaaaaatgattatttttatctaacttaaacttatctgaacttctctgaaaaggacatttaggaaaacgtggtctgtgtgtctatacttgttgtcctgggatgcattcaaagattactgactactcagacaattgtctaaaatttcaaaattaatacatatcttgaaccactcactaactttttaaaaacacaaagttctgttgatatgttttgttttaactatggtaagaactggaaataatttgttttcacctctgtttcttgactctttcactgtaaagagtgccaactcattccttctatgaaatctatgggaattatctcatgtgtactattgtcctctcttcctatatatatccatctttctttctcttacccttcctccaatctttgttataatttatttttaatttttacactattttccattaaaaataagtaacatcttaatattggactatccataggctttaggcaatattttttactccctaagtatgaaaagtaaaataaattagtgccttgccacatcccttcatcatcccataacccaccttctctccactayagcattacttttaaattgtcaagtttattacatttacattctattttcaaactataattgtctcctatcaca

SEQ ID NO: 680043 - DNA, 620 bp, Homo sapiens
aaactacctttattcacagatagtagaatacagaaaacctaaataatccagattctaaaaatagaacacatattatagaccatagattcacatgatctgtatacaaaaatcattttgtatacatttacaattkgttagataatgaaatttaagaaagataccattcatgaaagaatcaagtatcaaataacttagaataaatttaatgctaaatacacaagcatctaaacagaaactacaaaatgtcactgacaaattaaagaaggcctaaacaagccaaagtacatattgtcaaaatatttattcttcaaaaattgatggatagaaaaaaactagtcttcaacaaaatcccagaagattatttttcatgtttgtgtgtttagaagttggaaaaatgtttttaaaacttgtatcagaattccgtcgggcacagtggctcacgcctgttatcctagcactttgggaggccgaggcaggcggatcataaggtcaggagattgagaccatcctggctaacatggtgaaaccccatctctactaaaaatacaaaaaattagccaggcgtggtggcaggtgcctgtagtcccagctactcaggaggctgaggctggagaatggtg

SEQ ID NO: 680044 - DNA, 620 bp, Homo sapiens
aaactacctttattcacagatagtagaatacagaaaacctaaataatccagattctaaaaatagaacacatattatagaccatagattcacatgatctgtatacaaaaatcattttgtatacatttacaatttgttagataatgaaatttaagaaagataccattcatgaaagaatcaagtatcaaataacttagaataaatttaatgctaaatacacaagcatctaaacagaaactacaaaatgtcactgacaaattaaagaaggcctaaacaagccaaagtacatattgtmaaaatatttattcttcaaaaattgatggatagaaaaaaactagtcttcaacaaaatcccagaagattatttttcatgtttgtgtgtttagaagttggaaaaatgtttttaaaacttgtatcagaattccgtcgggcacagtggctcacgcctgttatcctagcactttgggaggccgaggcaggcggatcataaggtcaggagattgagaccatcctggctaacatggtgaaaccccatctctactaaaaatacaaaaaattagccaggcgtggtggcaggtgcctgtagtcccagctactcaggaggctgaggctggagaatggtg

SEQ ID NO: 680045 - DNA, 1408 bp, Homo sapiens
gctttcatcagtttatgcctaatcctgctcagtaggtgccacccccatgttgcccacgaggactggcaggctcacagcaagtagccagccaggctgggatgctgcagcgaaagtgaactttcccgagtgagaatggcttgagtttggggcaaggctggagccagctactgagggatgtgaagcctcccacagaggtaccatgaacaccttccccagcaaagggggcacaagttccctgggtaccctccttggggcaccattcccttactcactcctaggaactatggctgaaacctgggggagggaagcagcctatttagggagcgcgataaaggtagggggaggttgagaagcagctccccccagtgacagtgaggcctcatgtctataatcccagtgcttttggaggccaaggagagagatcacgtgaggccaggggttcgaggccagcttggggaacatagcaagacccagttcctaccaaaaatagaataagttgggcacagtggggctcatgcctgtagtcccagcaactcactcaggaagctcaggcaggaggatggctggagaccaggagttccaggttgcagtgagctgtgactatactactgcactccagcctgggcaacacagccagacctttctctcaaaagggacaaatcaaaacaaaaccaaaaccaaagcaggttctcagctctcctgaggcttcctacccccaaagcaaaagtacccacctcagagccacctcaggaccaccggcttatgacattaggctgcctcctggaatggcttggagtgccagtcaccccttgctgcagctttgacaagttcataccaacatgtcccaagaatagcttcaagcccaaggtgacagctaagaccaggcagaagcagtgctctgatcacygccctactgggagggcccagtcatgactggccttctggcctctagcatctggacagagctgcctgcctgcttgccttggagaagtgggcctggaagctctctcctccccactcccatgtctagagtcaaatccatgggggccagagatataagattctttgctagcctagaagtaaggtgggtccagccagactgaccttcatctaagagtttccatgttggttcccatggaggtgatagattatagttgtctaaggacatgaaccctgccctgtttacagtagagacacagtagtgcttgctggactatgctatgtgagtgcacggggcgggtggtatacagtcgtccccacccgacacagtcagtactaattctgaccttccatctgaccaccacaccacgaccagatattgctttcttcttttattcggaagcagacacagggtgggaggcagtgcgacacctcctggtgagaaccaggataacagcagtcagagtca

SEQ ID NO: 680046 - DNA, 1408 bp, Homo sapiens
gctttcatcagtttatgcctaatcctgctcagtaggtgccacccccatgttgcccacgaggactggcaggctcacagcaagtagccagccaggctgggatgctgcagcgaaagtgaactttcccgagtgagaatggcttgagtttggggcaaggctggagccagctactgagggatgtgaagcctcccacagaggtaccatgaacaccttccccagcaaagggggcacaagttccctgggtaccctccttggggcaccattcccttactcactcctaggaactatggctgaaacctgggggagggaagcagcctatttagggagcgcgataaaggtagggggaggttgagaagcagctccccccagtgacagtgaggcctcatgtctataatcccagtgcttttggaggccaaggagagagatcacgtgaggccaggggttcgaggccagcttggggaacatagcaagacccagttcctaccaaaaatagaataagttgggcacagtggggctcatgcctgtagtcccagcaactcactcaggaagctcaggcaggaggatggctggagaccaggagttccaggttgcagtgagctgtgactatactactgcactccagcctgggcaacacagccagacctttctctcaaaagggacaaatcaaaacaaaaccaaaaccaaagcaggttctcagctctcctgaggcttcctacccccaaagcaaaagtacccacctcagagccacctcaggaccaccggcttatgacattaggctgcctcctggaatggcttggagtgccagtcaccccttgctgcagctttgacaagttcataccaacatgtcccaagaatagcttcaagcccaaggtgacagctaagaccaggcagaagcagtgctctgatcactrccctactgggagggcccagtcatgactggccttctggcctctagcatctggacagagctgcctgcctgcttgccttggagaagtgggcctggaagctctctcctccccactcccatgtctagagtcaaatccatgggggccagagatataagattctttgctagcctagaagtaaggtgggtccagccagactgaccttcatctaagagtttccatgttggttcccatggaggtgatagattatagttgtctaaggacatgaaccctgccctgtttacagtagagacacagtagtgcttgctggactatgctatgtgagtgcacggggcgggtggtatacagtcgtccccacccgacacagtcagtactaattctgaccttccatctgaccaccacaccacgaccagatattgctttcttcttttattcggaagcagacacagggtgggaggcagtgcgacacctcctggtgagaaccaggataacagcagtcagagtca

SEQ ID NO: 680047 - DNA, 576 bp, Homo sapiens
attacccagtttctcatagttctttatagcagtgtgaaaacagactaatggcccttctggttgaaggaatgcagccattctgcttgtttgactatgtcctttctattcatctctatttcctgggaggtgtttatccaagtgcaataggaggtattggtgaccgcacagtcccctcagtgttctgctagtaaatagttgaaggttgatcaktgatctcctgcgttttcagtctggcatggaaaagcccccgtgcaactggtaaagatatcaataagcaccaggaggtatctaaatccaccaggagccataggcatcacgttgacgtccatttaccagtcttccctggcaagattcttctgaattgtgctgccttgaccaaaagaggtatgggaggggctgggcgcagtggcttgtgcctgtaatcccaacattttgggaaaccaattcaggtggatcattagaggtcaggggttcaagaccatcctggccaacatggtgacatcccatctctactaaaaatacaataagttagctgggtttggtgttgggtgcctgtaatcccagctactcgagagg

SEQ ID NO: 680048 - DNA, 576 bp, Homo sapiens
attacccagtttctcatagttctttatagcagtgtgaaaacagactaatggcccttctggttgaaggaatgcagccattctgcttgtttgactatgtcctttctattcatctctatttcctgggaggtgtttatccaagtgcaataggaggtattggtgaccgcacagtcccctcagtgttctgctagtaaatagttgaaggttgatcattgatctcctgcgttttcagtctggcatggaaaagcccccrtgcaactggtaaagatatcaataagcaccaggaggtatctaaatccaccaggagccataggcatcacgttgacgtccatttaccagtcttccctggcaagattcttctgaattgtgctgccttgaccaaaagaggtatgggaggggctgggcgcagtggcttgtgcctgtaatcccaacattttgggaaaccaattcaggtggatcattagaggtcaggggttcaagaccatcctggccaacatggtgacatcccatctctactaaaaatacaataagttagctgggtttggtgttgggtgcctgtaatcccagctactcgagagg

SEQ ID NO: 680049 - DNA, 576 bp, Homo sapiens
attacccagtttctcatagttctttatagcagtgtgaaaacagactaatggcccttctggttgaaggaatgcagccattctgcttgtttgactatgtcctttctattcatctctatttcctgggaggtgtttatccaagtgcaataggaggtattggtgaccgcacagtcccctcagtgttctgctagtaaatagttgaaggttgatcattgatctcctgcgttttcagtctggcatggaaaagcccccgtgcaactggtaaagatatcartaagcaccaggaggtatctaaatccaccaggagccataggcatcacgttgacgtccatttaccagtcttccctggcaagattcttctgaattgtgctgccttgaccaaaagaggtatgggaggggctgggcgcagtggcttgtgcctgtaatcccaacattttgggaaaccaattcaggtggatcattagaggtcaggggttcaagaccatcctggccaacatggtgacatcccatctctactaaaaatacaataagttagctgggtttggtgttgggtgcctgtaatcccagctactcgagagg

SEQ ID NO: 680050 - DNA, 576 bp, Homo sapiens
attacccagtttctcatagttctttatagcagtgtgaaaacagactaatggcccttctggttgaaggaatgcagccattctgcttgtttgactatgtcctttctattcatctctatttcctgggaggtgtttatccaagtgcaataggaggtattggtgaccgcacagtcccctcagtgttctgctagtaaatagttgaaggttgatcattgatctcctgcgttttcagtctggcatggaaaagcccccgtgcaactggtaaagatatcaataagcaccaggaggtatctaaatccaccaggagccataggcatcacgttgaygtccatttaccagtcttccctggcaagattcttctgaattgtgctgccttgaccaaaagaggtatgggaggggctgggcgcagtggcttgtgcctgtaatcccaacattttgggaaaccaattcaggtggatcattagaggtcaggggttcaagaccatcctggccaacatggtgacatcccatctctactaaaaatacaataagttagctgggtttggtgttgggtgcctgtaatcccagctactcgagagg

SEQ ID NO: 680051 - DNA, 582 bp, Homo sapiens
tgccaaaaaattattacatgaggcatgtacattgaaattctccccactactactttctcctttttctcacagacttcattttgctattcaaagcaacaatttgctcagggctcattttattagcatttgggttgataatgtacagtatgcaaactagatatgaaagccactgttgcaaaaaaagaaaaaatgcccatctaatttaggaatctgatctctatttgcagttgctcatccatgtcacactgcccaacatgcgtccgtgggccagatgcatgatgccctgcagagtatcgtaatactgagttgttaatttcatagtctactatagcatcaaagaatggcagaggcagctcacaagcaggagaagacagctagctgtgaagcagttaaatgactgtyttcccttgtgaatggtaaaagaaatctttctgaggcaactgcactgactttagaacttgaatatttatgctacagaggaaatcagccataaatttacatttttagcagctaggttattgtagggagggaaaggaagaataataattttaaaaaaggaattggacaatacaattaatcctt

SEQ ID NO: 680052 - DNA, 849 bp, Homo sapiens
ttttatgaatcatggaacttgcttacatgatcatctggcttgattgacaaaaccattttcttacaagttttttcctttgattcagttccctgactcatctcttactatgctgttcctagagcagacaccttattgggccaaaggctttacaactgtatttcaaaaacatctaaggttcttcaaagatgttatggtgattccaaaagcattcagtttgaattacaataatttttatttatgtatttatatgtatttatttatttatttattttgagatggagtctcactctgtcacctaggctggagtgcagtggcatgatctcggctcactgcaacttctgcttcccaggttcaagtgattcccctgactcagcctctcgagtacctgggattacaggcacccaccaccatgccctgccaatttttgcatttttagtagagacagrgtttcgccatgttggccaggctggtttcgaattcctgacctcaggtgatccacctgcctcagcctccaaaagtgctgggattacaggcgtgagccactgcgcccagcctatatttttaaatatctttcaaacgtagtaaaataacacaccgaaatggaatatacaccagattagcacatacggtgctaatttttgctgccagatgatttagtttttggtgcagaccttgattggtagctactcctaccattttatttatctcgagtcccctgagactgcaagctgagctatcagaaatgccgtttttatttccaattcatctatgtgaattaggaatatctctacactgtgcaaccaaaatcttacagaagaataagttagatgtgaaagctgaacataagaa

SEQ ID NO: 680053 - DNA, 673 bp, Homo sapiens
tgcagtaactgggctacataaagcagtggaggcgtatggatgtccatataataaaatgtgtaaaagtataaaatgttagattgttggctggccacagtggctcacgcctgtaatcctagcactttgggaggccaaggtgggcggatcacgaggtcaggagatcaggaccatactggctaacacggtgaaaccccgtctctactaaaaatacaaaaaattagctgggcgtggtggcgggcgcctgtagtcgcagctacttgggagactgaggcaggagaatggcgtgaacccgggaggcggagcttgcagtgagccgagatcacgccactgccctccagcctggacgacagagcaaaactccgtctcaaaaaaaaaaaaaaaaaagttagattgttgtagctcaaacaaaccacaaaatgcactatagtagtttgaggcttattaatggaaaaagttgatgaagccccctggcattctgtaaaaaaggaagtagaaaaaaaaaaggagatagagactcgtaattttacaactggaaaaaccctagatgcacgtattgaatcatactttctcattttacaaattaggaaacaggtttagaaacataaaatgactggcacattggctcctgmtttgttacctttttaactatattgctgtactcttgatttattaa

SEQ ID NO: 680054 - DNA, 665 bp, Homo sapiens
tttttggttgaaaccattaggatatatatccgcactgcagaatgtcctgaatagtacttttgatctaraaaagagttgtttgcaaaaaattaaataagataaaatgaagacaaagaattgctgactaaatgtaaacccttctattttgagacatcagggagaaaaaccagcagagttaatgtttatttaaaaactgaatctaatctatacctgcagagttccataaagagcaataaaatctactgaaaaagttatttagttgagtgaaaaggaactactgatgccatactgactgagaaacttcaacccaatttccattcccttaattgaaattgcaacttttatgaaaaattctataattctgaggggggaaaaaaacaccaagtagtgtttagtcaatcactacccaatacattttttaaagtgagatgttaacaagtatgcacgtgtaatataagttatcaagttttttttaaattttattgttttttaaataacgatgtgacagggcctacacctaggtactccacatcaaagctaaaactgaaaatctaatgctacaaaattcttacaaagtctattttggcaagttacttcctctatccaactacacttggtatgttctcacaggtgcaaataaactttgaactcattttacgtggaat

SEQ ID NO: 680055 - DNA, 1638 bp, Homo sapiens
ggtgtagtggcacatgcctgtaatcccagctactcgagaggctgaggcaggagaatcacttgaacccgggaggcggaggttgcagtgagccaagatcgtgccattgccctccagcctgggccacagaattacactctctctcaaaaaaaaaaaaaaaaaaaaaaatttaaagcaagtaaatgccacaggatatccaacaagaggtttattgtgagaaatggaagaggaaaggcatccctgctggaggctgcagcctggtgtccctgcagcagggacaggtgtcaagagcagcccggggccaggggagtgagaggagcctgcaggacccaggaaggagcagcaacctcggattcccacaggggcacacagcatgctggggaacgggcagcactcagcgtggtcagcactgaccttcctcctcaacctgcccctggccccgcaagtcctgagccccgcccggtgcctccgaggtgccactggcaccagcgcgagtgctcatagctgccagaggcaaggtgtggaaatctgcattaatgtaatctgataacgttttgttggtaaattacgtagacactcttatactaagtttatcttatacccaaagtctgctttaaacaaaattggtgattctataattgtattttaaacagaattgaaagtaattggatacagtgcactgagtgtttttctcttttttgcacaaaagagcttcccagcaggagctgactgacaaaatcttttacgtttccaagtgattcaaatgataaaaatkataatgaatgtttgcttgtctccatgaggcttttattctcctcttggtgtacatgaacaacttctcttcacctgaacaatagttaagaatgcaaatgttatgggaagatcgacttgctaattgtatttaattttaatgtgataggtatgggttcaggttcttaccccggaagttatcgggcacaccaagtccttgggaggctctgggcacctgcgttgactgtgccgtcccgtgagatggaacgtgtcagcagttcttttttgactgcctggtacgggactggaagaaggttgggtctttaattggctgttatcagccctccttctaaaccacagagcagagcactcctgcaaagactgcaggaattctgcttcaaaatgttccacctcttggaacaatgccagaattattctgttaaaaaccatcttatcttcctgctgtaaaactgagaaaaaatcagtcttctcgttaatcacttaatatgcacatcctaattatatatataagcgttttcacttataccctgctatgttctctaacatagtgcaagataatagaaggccttttgctctcaaaaataaaaataaaaacaagcagaaatcctgtcccacctgtctcatgccctggtgtacagaccctcggccttgtgtccccgatcgggaaggtcagattcccagggctgatggccccgtctgtgggtcagaccctgcccacgtgcagagcaccacttagaattattatcaactaattgaaatgcaaattccaagtcctactgaatccaatttactgcatttctaaattagcttatgtattagtgattgagatactggacttgcttatatattaacatttgaaatacttgaata

SEQ ID NO: 680056 - DNA, 1638 bp, Homo sapiens
ggtgtagtggcacatgcctgtaatcccagctactcgagaggctgaggcaggagaatcacttgaacccgggaggcggaggttgcagtgagccaagatcgtgccattgccctccagcctgggccacagaattacactctctctcaaaaaaaaaaaaaaaaaaaaaaatttaaagcaagtaaatgccacaggatatccaacaagaggtttattgtgagaaatggaagaggaaaggcatccctgctggaggctgcagcctggtgtccctgcagcagggacaggtgtcaagagcagcccggggccaggggagtgagaggagcctgcaggacccaggaaggagcagcaacctcggattcccacaggggcacacagcatgctggggaacgggcagcactcagcgtggtcagcactgaccttcctcctcaacctgcccctggccccgcaagtcctgagccccgcccggtgcctccgaggtgccactggcaccagcgcgagtgctcatagctgccagaggcaaggtgtggaaatctgcattaatgtaatctgataacgttttgttggtaaattacgtagacactcttatactaagtttatcttatacccaaagtctgctttaaacaaaattggtgattctataattgtattttaaacagaattgaaagtaattggatacagtgcactgagtgtttttctcttttttgcacaaaagagcttcccagcaggagctgactgacaaaatcttttacgtttccaagtgattcaaatgataaaaatgataatgaatgtttgcttgtctccatgaggcttttattctcctcttggtgtacatgaacaacttctcttcacctgaacaatagttaagaatgcaaatgttatgggaagatcgacttgctaattgtatttaattttaatgtgataggtatgggttcaggttcttaccccggaagttatcgggcacaccaagtccttgggaggctctgggcacctgcgttgactgtgccgtcccgtgagatggaacgtgtcagcagttcttttttgactgcctggtacgggactggaagaaggttgggtctttaattggctgttatcagccctccttctaaaccacagagcagagcactcctgcaaagactgcaggaattctgcttcaaaatgttccacctcttggaacaatgccagaattattctgttaaaaaccatcttatcttcctgctgtaaaactgagaaaaaatcagtcttctcgttaatcacttaatatgcacatcctaattatatatataagcgttttcacttataccctgctatgttctctarcatagtgcaagataatagaaggccttttgctctcaaaaataaaaataaaaacaagcagaaatcctgtcccacctgtctcatgccctggtgtacagaccctcggccttgtgtccccgatcgggaaggtcagattcccagggctgatggccccgtctgtgggtcagaccctgcccacgtgcagagcaccacttagaattattatcaactaattgaaatgcaaattccaagtcctactgaatccaatttactgcatttctaaattagcttatgtattagtgattgagatactggacttgcttatatattaacatttgaaatacttgaata

SEQ ID NO: 680057 - DNA, 1638 bp, Homo sapiens
ggtgtagtggcacatgcctgtaatcccagctactcgagaggctgaggcaggagaatcacttgaacccgggaggcggaggttgcagtgagccaagatcgtgccattgccctccagcctgggccacagaattacactctctctcaaaaaaaaaaaaaaaaaaaaaaatttaaagcaagtaaatgccacaggatatccaacaagaggtttattgtgagaaatggaagaggaaaggcatccctgctggaggctgcagcctggtgtccctgcagcagggacaggtgtcaagagcagcccggggccaggggagtgagaggagcctgcaggacccaggaaggagcagcaacctcggattcccacaggggcacacagcatgctggggaacgggcagcactcagcgtggtcagcactgaccttcctcctcaacctgcccctggccccgcaagtcctgagccccgcccggtgcctccgaggtgccactggcaccagcgcgagtgctcatagctgccagaggcaaggtgtggaaatctgcattaatgtaatctgataacgttttgttggtaaattacgtagacactcttatactaagtttatcttatacccaaagtctgctttaaacaaaattggtgattctataattgtattttaaacagaattgaaagtaattggatacagtgcactgagtgtttttctcttttttgcacaaaagagcttcccagcaggagctgactgacaaaatcttttacgtttccaagtgattcaaatgataaaaatgataatgaatgtttgcttgtctccatgaggcttttattctcctcttggtgtacatgaacaacttctcttcacctgaacaatagttaagaatgcaaatgttatgggaagatcgacttgctaattgtatttaattttaatgtgataggtatgggttcaggttcttaccccggaagttatcgggcacaccaagtccttgggaggctctgggcacctgcgttgactgtgccgtcccgtgagatggaacgtgtcagcagttcttttttgactgcctggtacgggactggaagaaggttgggtctttaattggctgttatcagccctccttctaaaccacagagcagagcactcctgcaaagactgcaggaattctgcttcaaaatgttccacctcttggaacaatgccagaattattctgttaaaaaccatcttatcttcctgctgtaaaactgagaaaaaatcagtcttctcgttaatcacttaatatgcacatcctaattatatatataagcgttttcacttataccctgctatgttctctaacatagtgcaagataatagaaggccttttgctctcaaaaataaaaataaaaacaagcagaaatcctgtcccacctgtctcatgccctggtgtacagaccctcggccttgtgtccccgatcgggaaggtcasattcccagggctgatggccccgtctgtgggtcagaccctgcccacgtgcagagcaccacttagaattattatcaactaattgaaatgcaaattccaagtcctactgaatccaatttactgcatttctaaattagcttatgtattagtgattgagatactggacttgcttatatattaacatttgaaatacttgaata

SEQ ID NO: 680058 - DNA, 1211 bp, Homo sapiens
tccgggtctgcgttcagcccaggcgcgtaagggtgacgccatccgggtctgcgttcagcccaggcgcgtaggggtgacgccatccgggtctccgttcagcccaggcgcgtargggtgacgccatccgggtctgcgttcagcgcaggcgcgtaagggtgacgccatccgggtctgcgttcagcccaggcgcgtaagggtgacgccatccgggtctgcgttcagcccaggcgcgtaagggtgacgccatccgggtctccgttcagcccaggcatgcaggcgcgaagccatgcgggtttgtatcagtgcgctccacaatgctcacacaaccacgaggccaccttacgtttctctgaatgtgccccctcattaagtggcacatgactgtacttattacttgtaatgatggaacgtagaaccccactggtttgtagcgtaagacgatgttttcggtgaagcgctattttaccaaatttctgagcaggttctgacatcgacctaacctcctggaacaccttagttcacgtggatggatggatcagagtacacagaacgctatctgagtggtgaattaattccttttgtgattcctaattgtgtgaggaaaagttatttcccctccatcagctttttttctgtaaatatgcatcagtttatacattaaaaataaatatcaccggccggtggctcatgcctgtaatcccagcactttgggaggcgaaggcaggtggatcatttgaggtcaggagttcgagactagcctgaccaacattgtgaaaccccgtctctactaaaaatacaaaaaaaaaaaaaaaaaaaaaaattagccgggcgtgatgtcatgtgcctgtaatcccagctactcgggaggctgagacaggagaattgcttgaaccctggagatggaggttgcagtgaaccgagattgcaccactgcactccagcctgggcgacaagagcaaaactccatctcaaaaaaataaaatgaataaaataaaaaccaaagtaggaaaagaggcctaagttaaaatttggtatagaggatttctcgagttgtgggctgttttcacttcagaaacacctgctggtccccagaagtcagtactcctgtctcaggaagtgccggaggaagtgctcccatcgtgtgggtgtggttacgaggggcaaccagcgctagccacctggttcttttaaaatgcattttaaatagagtg

SEQ ID NO: 680059 - DNA, 1211 bp, Homo sapiens
tccgggtctgcgttcagcccaggcgcgtaagggtgacgccatccgggtctgcgttcagcccaggcgcgtaggggtgacgccatccgggtctccgttcagcccaggcgcgtaagggtgacgccatccgggtctgcgttcagcgcaggcgcgtaagggtgaygccatccgggtctgcgttcagcccaggcgcgtaagggtgacgccatccgggtctgcgttcagcccaggcgcgtaagggtgacgccatccgggtctccgttcagcccaggcatgcaggcgcgaagccatgcgggtttgtatcagtgcgctccacaatgctcacacaaccacgaggccaccttacgtttctctgaatgtgccccctcattaagtggcacatgactgtacttattacttgtaatgatggaacgtagaaccccactggtttgtagcgtaagacgatgttttcggtgaagcgctattttaccaaatttctgagcaggttctgacatcgacctaacctcctggaacaccttagttcacgtggatggatggatcagagtacacagaacgctatctgagtggtgaattaattccttttgtgattcctaattgtgtgaggaaaagttatttcccctccatcagctttttttctgtaaatatgcatcagtttatacattaaaaataaatatcaccggccggtggctcatgcctgtaatcccagcactttgggaggcgaaggcaggtggatcatttgaggtcaggagttcgagactagcctgaccaacattgtgaaaccccgtctctactaaaaatacaaaaaaaaaaaaaaaaaaaaaaattagccgggcgtgatgtcatgtgcctgtaatcccagctactcgggaggctgagacaggagaattgcttgaaccctggagatggaggttgcagtgaaccgagattgcaccactgcactccagcctgggcgacaagagcaaaactccatctcaaaaaaataaaatgaataaaataaaaaccaaagtaggaaaagaggcctaagttaaaatttggtatagaggatttctcgagttgtgggctgttttcacttcagaaacacctgctggtccccagaagtcagtactcctgtctcaggaagtgccggaggaagtgctcccatcgtgtgggtgtggttacgaggggcaaccagcgctagccacctggttcttttaaaatgcattttaaatagagtg

SEQ ID NO: 680060 - DNA, 1211 bp, Homo sapiens
tccgggtctgcgttcagcccaggcgcgtaagggtgacgccatccgggtctgcgttcagcccaggcgcgtaggggtgacgccatccgggtctccgttcagcccaggcgcgtaagggtgacgccatccgggtctgcgttcagcgcaggcgcgtaagggtgacgccatccgggtctgcgttcagcccaggcgcgtaagggtgacgccatccgggtctgcgttcagcccaggcgcgtaagggtgacgccatccgggtctccgttcagcccaggcatgcaggcgcgaagccatgcgggtttgtatcagtgcgctccacaatgctcacacaaccacgaggccaccttacrtttctctgaatgtgccccctcattaagtggcacatgactgtacttattacttgtaatgatggaacgtagaaccccactggtttgtagcgtaagacgatgttttcggtgaagcgctattttaccaaatttctgagcaggttctgacatcgacctaacctcctggaacaccttagttcacgtggatggatggatcagagtacacagaacgctatctgagtggtgaattaattccttttgtgattcctaattgtgtgaggaaaagttatttcccctccatcagctttttttctgtaaatatgcatcagtttatacattaaaaataaatatcaccggccggtggctcatgcctgtaatcccagcactttgggaggcgaaggcaggtggatcatttgaggtcaggagttcgagactagcctgaccaacattgtgaaaccccgtctctactaaaaatacaaaaaaaaaaaaaaaaaaaaaaattagccgggcgtgatgtcatgtgcctgtaatcccagctactcgggaggctgagacaggagaattgcttgaaccctggagatggaggttgcagtgaaccgagattgcaccactgcactccagcctgggcgacaagagcaaaactccatctcaaaaaaataaaatgaataaaataaaaaccaaagtaggaaaagaggcctaagttaaaatttggtatagaggatttctcgagttgtgggctgttttcacttcagaaacacctgctggtccccagaagtcagtactcctgtctcaggaagtgccggaggaagtgctcccatcgtgtgggtgtggttacgaggggcaaccagcgctagccacctggttcttttaaaatgcattttaaatagagtg

SEQ ID NO: 680061 - DNA, 3731 bp, Homo sapiens
ttgccagcagttcgcagcatggactcggtattggtatttgttacaggtaattggcttctgctcacattaattaatttattggaggctgggtctctctctttcacccaggctgcagtgcagtggtgccatcatagctcactgcagcctcaaactcctgggctcaagtgatcctcctgcctcagcctctcaagtagctggaacaacaggtgcatgccaccaggcatgactgattttttaaacttttttttttttttttagagatggggtcttgctgtgttgcccaagctggtctcaaactcctggcctcaagtgatcctccagccttggcctctcaaaatgctgggattgcaggtgtgagccattgtgcctggccacaaggttattcttataataactttcctatcttgcacttgcatcttgttttatgagaaaacggaatacgcagatacaaatgaagagatgatggacatagggtaggcaggtgaaaggaacaaacaagatataatgaggctccctgaggctacaatagctggaaattgttcccactccaagggctgaagggaaagggttactggaacctcacgaggtctggaagaggtgccactcagcgggaaataggcttgtgaagagacatagctactgccagagtagcagagttttgtcagaaagtatgcaggggaggaggaccctgccctctctcttctgctgcccttgaatttcttgccattgtctgaattggcctaacccaaacagaagctagcagcaagtttgtctaggagatgcaatctacagagatcagtttccaagggcccagggcagagaggtgcagggagggaatggcttgtggagatggcaaatggagaattgcgcacacacattttcttattcctttttgtttgttttaatagtgagagaaagaagtttgcagatttcatgtaacagtacccatgggagtacagtacacaagtgaacgtaatctattacgggttttatggcagaaaagagattggtaattactggtctatggggctgactcccaagggggaaatacaggtaacattttcatcagctagatctcatgtgctaacattaaaacagaactgggttttatgtataaatacatttggtagggaaatttctattaggatgtaaatatctgtctttagaagaggggatgtaagctcggtttgattccttgtctgtcttgtttgctattgtatacccagtatctggcacagttcctggcattgtgaataaatgaatgagaagtaatctttcagataccttatgtattataggtatagactaattggactgacaatgatagtaactttgctgattatgtgaaattcatttaagataaaaagtcttatgagcagtggctcatgcctgtaattccagcactttgggaggccaaggcaaacagatcacctgaggtcaggagttcaagaccagcctgggaaacatggtgaaaccccatctctactaaaaatacaaaaattagccaggtgtggtgtcacaagcctgtgatcccagctactcaggaggctgaggcacgagaatcgcttgaacctgggaggtggaggttgcaatgagctgagattgagccactgcactcyacctgggcaacagagtaagactctgtctcaaaaaacaattaaattagaataaaataaaaagtcttaatatcacgaccaggtaatggtgtaggagtttgcacctgcatggaggtagagagtggaagaatataactattaaaaaagatctaaaattagaactgccattcaatccagcaatcccactaccaggaaagaaatcattatatcaaaaagatacttgcactggtatgtttgttgcagcactattcacaatagcaaagatatggaatcaacctaaatatctatcagtggaggaatggataaagaaaatgtggtacatagacaccatggaatactactcagccataaaaaagaatgcaatcattatcttctgcagcaacacggatggaagtggaagctactatcctcagtgaaatagctcagaaacagaaagtcaaataccacatgttctcacttacaaatgcgagctaaacaatgggtacagatggatgtacggagggaatgatagatactggggactccataaagggagaggctgggacggaagtaagatttgaaaaattccctattgggtacagtgtacactgtccagatgatgggttcatgatgcaatatatacatgtaagaaacctgcatttgtatcctctaaatatgcttttattttatttttttattttattttatttatttatttatttatttatttatttatttatttatttatttatttttgagatggagtctctctctgttgcccaggctggagtgcagtggtgccatcctgactcactgcaaccaccacctcctgggttcaatgattctcctccctcagtctctagagcagctgggattacaggtgcccgccaccacgcccagctaatttttgtatttttagtagagatggggtttcaccatgttgaccagactgatctcaaactcctgacctcaggtgatctgcccgcctcggcctcccaaagtgctgggattacaggcctgagccactgtgcccggcctaaatatgcatttttaaaaaagaatacaactgtgaagagacatcacatttggtttgcccaggaattgaaatagactagaactagaaatagattctagtcctatgagcaccatggagtctgaccactgtcctcttgtgctgatggagttgggactgggtgaccatcgtgtctcacctttgctgaaagtatccaccacacatacccttcccccacttaaaaaaaaaaaaaagctggaaaggtaaaaaagtcaaaaccctggaatatgtagagatgtcctaaactccaagtctcttctatctatatcatgttaaaactcatcaggagaactggtatacccctatgctctatgctctgggaaaggaacatagtcgttttggtagatgttcctgggagaaggggaagcccattttcctttcctcaaaaggacttgcctctcacccatcttaggaaagttttccaaatatataaaaacaaccaagtctggattctccaatcctgtgtttgcgatctccaagaaagaacagaacacacttctggacaacttgtccaaacttcagaactgatcacaatgttgctagccacattatgtgaatattagatttcatgttagcttgtcatttaagaccaggcagaagggaagctcctcctgaaccatgagacctgactcatcactgcctaccatgacaggtgcttcactgctactaagtctggtgaaaaggagaggggcaagccattcagtttgctttctctcctagcctttgatagtgccacagcttccagaacatccttgctttaattgagcagcctatgcctatcttttataactaacaagtgacccaaaatacaggcatgtgaaagcctgatactccaggtttcccgtcataaggaaagccactcggagaagtcaggcagcatgttggaaagtgatctgagggtctgatctgtcagtcaagaaagaactctgggcaatgtctgttgtgaggctgggtgggagactcagtctgttaaggtagcagtgatgggtcaggtctcacagtgcaggaggagctgcctttctgcctgattttgaacaagcagctaacatgaaatctaacagaag

SEQ ID NO: 680062 - DNA, 1621 bp, Homo sapiens
taatttctactactacaaattttcaatggttataaatatggttctaactttttagccactgattttggtgagcaaaagtgcaataattatcaagaatttgaagaagtcataattaaaaatctgtatgagaaattatatttaaccatttcaagcctaaaagctgattaggaagcttttttttaatcagccatcttgagtttctcatttaaatatttagaaaatatttcatgtgaaattttatccaaattcaataattcatatatttcaaaatatttatatttatttttcctgttgtaattagatgatatgaagataatataataggttattttttttctccaaacctcatattgatatctccaaatccccccstgccaggttagtagagagtactatgcaaatataatcattttctatgtggcaagtcataaaaaaaagtttggaaacactggctgagaccatccgccatccatccgtagaggctgggcatgtgacaatcccaaacacattgaggttcctttggcaaagaagatttagaaatggacggcagcccaacagcatctgccacaatgggttataagcgtccactccactgaattcagggcactgattaattgtgtatgcttttctcttcagctctcatttaaaggtatgtgaagactagacctcctgtataaagcaattaaatagagcttctccttgcatagccccttccaccagggatatgtcttggagaatggcccaattacaattaccttcaaaacaatgttacaaaataaatccattttcaaccaaattctttgccaaccataagccaaatgttctggctaaactgggagagctacgctctttcctgtttctttgccattttccagcctctgagaacagagattgtaagagcaaaacatctcatgcaaaaccatgctacctgcatcatggggacagctgagtcagctttgatcaccttaaattctgtattatttatggtcctcactttttgacctttggtgtaaattgccaagcatttatttagcactgactgtgtgctagaactatcaagggtacaaaggtgatttagacctactgctggcctaggatgcagggaaatgatgtactgaaactggacagacaaaaggccatgaatattggggtcttattctgggaaggtgatttgtctagtagggtagggtgtgagaaagagtgaagaaggaaacaagcaagatggtaaaggtccaaagaacttaaaactctgtattgtagacaacagacaacaggaagccaacagagattttaaggctgggaatagtttaacttttttttccaaactgatctgatatagctgattttggggatgtgtttgattttttgtttttttttaaccaaactgatctgggagtagtgtgaaaaagcaacatgtcatgtcacattataatgttttccagtttgcaaagtgctttcacacatccactttcaggtgttctttagttttcagctaattaatttgggcaggtaccaagaaagatacagctagatgaactgtcactctagtcaggcacatgctttcagagcaacaggtaagagtgtgaactctggcttcaaactacctgcatttggagcttgg

SEQ ID NO: 680063 - DNA, 1097 bp, Homo sapiens
gtttttatatggatatctgtagtagatttggggagtttgtgattattaattctcaagtacttctggtcatcaatataaatattgtgataatattcaagagttacattcattttttggcagtattttgcatttcgtctaccacagatttcaagtacctttagaccctgtgaggttctgcataaaataatcaatcattccctcttggctgtttggcagaggcagccaatgacttgttctgtcatgaactgaattaatatatattcatgaagcgtagagaaacacttcattgtttcagactgttttgttattttagaataaatcacaaaggcagcatcccactcatagctggtagagaaatatttgtcctrtgatcctcacctttatggttgtaatgttttaacttgcacacagtttagcctacataactttttttttaaaaaaatagtaaattgcatgcttttaaaaaagtaccgtgtctctgttaccttttatcagcaaaatttgaaaacattaaaaactaaaatgacatgcgtccctaagtcagaatgatttaattttcacagactgagggactcatggcaaaatgatgtacaggtaagtattgttcaagctcccacattccatcaatctcaacctttatggtccctcatttatttgggaagaactctcaagaatcagttgtaattgcaaaatttttatcctgccaggatatctatgtgaacttccatagggcaaccatagcataagcagcatgaaaaagacttgttgggaaagctattttagcacctctgataaacagaaaaaaaaaaggtgattattcctgtttcaagctatctaactttctcactttgtctgccttttctaatcaatgttatcatgtgctggcaaaatcttgtaaaattcagaaaggtaaaatccagggaaatgaaacccagggacagcaactccccgaaatgtaaaagccattgaacattctctatcaccaccaaagtggttctcagaaaaggcagtttattggatcttccctaagaattatgttttcagcaacaatacttaaacatttactgtctcggattgtaacaatggctatttgttta

SEQ ID NO: 680064 - DNA, 625 bp, Homo sapiens
tctgaaagtctgtggctctttatgtgtcttgactggatatgtgggtttcttgctgcatgtatagtggaaggacggtaagaggtgctgattttaattttccatatctttctccactcagcatctttggggcctacagcatggatgtgattactggcacatcatttggagtgaacatcgactctctcaacaatccacaagacccctttgtggagagcactaagaagttcctaaaatttggtttcttagatccattatttctctcaataagtatgtgggctattatttctttctctctttttaaaaataactgctttcttgacatataattcacatatcgtataattcatccacttaaaaggtacaattccattgtttttaagataatcaaaaatatgtatgaccattactattgtaaactaaaatgtttttgtcaatctagagccctcacacactttagctgtcaacaccccaccacaaaccccaytgccctaagcatccaataatcaactttctgcctctatagatttgcctattctggacacttcatagaaataatatcattgatttttctctgttgttttttattctctatttcatgagtttattttagtctgttattttcttt

SEQ ID NO: 680065 - DNA, 1226 bp, Homo sapiens
tttgcttttcagtcctatttagtagaagctcaattaattaaaatttgtttttcctgaaaattattttagaaaatttaatttccaagtatacacgtggaaaaagaagatatatagaaaaaattaacaatgcttctttgataggattatgaatgatttttatttttttctttatactttgtttaaaattttctacaaaattgtatattttttaataattaaggaaagagaaatcttttttwaaaaaaatacatttatttcaaccatattgtaacttctgtttaactccattgcctaattccaatggaaaaaatgtatctatctgtagccttctttggaatattttccagatcttctccccgtcatcatttctatagccactactgcaggaaggttttatcatcgtgtatcccctcttcggtgtgattatgtcaggagcagtcaatgctagagaaatttttgctcctctaatttaataataataactaacatacattaggtacaccaagtaccaggctccttgtaaataccctgcatacaatatctcatatgattatcttttattttagagtgaagactattggaggctttggaaaagttaagcaattgctcaaggtcacaaactgggaagctgggactcaaagcctttgctctgacttaaaggcaaacagaaaatattcaagttagaatttaatgaatttcctctctcagaaacatcccctgattcctctgtaaagccacttcacttgtaaattcaattgtggtcaattccatatgttgtctttttcccctgaagttttgcttccaagcctctcaccaacatctttaccaatgaatatcctgcacttttctttaaaacctctttcaaaaccttttctgtctttttcgtatttcaacttattttatttcaaaacaaatttattaaatctttactttttttattctagtgatatacattaatttcaatattgcattccaggtgatatttatgtaaatatgtgaaaacttaatactgtgggctgatttggcactgtttgtcactcttattgtgtgcttgactctctccctccccttcatcggttctctctctttaaactttttattatgggaaatagacacaaatcaagagaatggtgtggtgagcccttatatacccagtacccaccttcaacagttatcagctcatggccagtcttgtttcccttgcagtcctaccacttatcctcatc

SEQ ID NO: 680066 - DNA, 1226 bp, Homo sapiens
tttgcttttcagtcctatttagtagaagctcaattaattaaaatttgtttttcctgaaaattattttagaaaatttaatttccaagtatacacgtggaaaaagaagatatatagaaaaaattaacaatgcttctttgataggattatgaatgatttttatttttttctttatactttgtttaaaattttctacaaaattgtatattttttaataattaaggaaagagaaatctttttttaaaaaaatacatttatttcaaccatattgtaacttctgtttaactccattgcctaattccaatggaaaaaatgtatctatctgtagccttctttggaatattttccagatcttctccccgtcatcatttctatagccactactgcaggaaggttttatcatcgtgtatcccctcttcggtgtgattatgtcaggagcagtcaatgctagagaaatttttgctcctctaatttaataataataactaacatacattaggtacaccaagtaccaggctccttgtaaataccctgcatacaatatctcatatgattatcttttattttagagtgaagactattggaggctttggaaaagttaagcaattgctcaaggtcacaaactgggaagctgggactcaaagcctttgctctgacttaaaggcaaacagaaaatattcaagttagaatttaatgaatttcctctctcaraaacatcccctgattcctctgtaaagccacttcacttgtaaattcaattgtggtcaattccatatgttgtctttttcccctgaagttttgcttccaagcctctcaccaacatctttaccaatgaatatcctgcacttttctttaaaacctctttcaaaaccttttctgtctttttcgtatttcaacttattttatttcaaaacaaatttattaaatctttactttttttattctagtgatatacattaatttcaatattgcattccaggtgatatttatgtaaatatgtgaaaacttaatactgtgggctgatttggcactgtttgtcactcttattgtgtgcttgactctctccctccccttcatcggttctctctctttaaactttttattatgggaaatagacacaaatcaagagaatggtgtggtgagcccttatatacccagtacccaccttcaacagttatcagctcatggccagtcttgtttcccttgcagtcctaccacttatcctcatc

SEQ ID NO: 680067 - DNA, 625 bp, Homo sapiens
ggagaaagactttcttgcttctggggccctcttgtctccttcagctcaaaaatactcagcataccaagacgccatactttggggtatcatgttctgacccccgaaaactgtatacataaactggtacagcaagtactctaatgacagtaaacacaatgctatgagtcccagatgaggcwgagaaaggcttctgaaaagcggatagctcaacttagtctagaaggatgattcaggactagctggatagagaacgagggcaatgagttctgcccagtgggagtagcttgtgcaaaggcagggatacccaaaagaacttggaactactggggctaggaatacaataccccaaagtacggtactttgaaatggaaggactttggaaggactcagaagcaacatcattctgaccacctcccaccctcctggatcctccctactttctccccgaaagcaagtcatgaaaaccagaatttctcttccccaaagggaggtcatagacactagaactcctttcccccaaagccagccataaaccctagaaaggtcactgtctgcttttgtcagaggtgtttgaaccacaccatctccatcttgaacaggggctgggcaaaatgaggctgagacc

SEQ ID NO: 680068 - DNA, 348 bp, Homo sapiens
gtgccgaatgataaatattcattgagtaaattagtgcatgaacaaatgcatacactgaataactttggtatgtttgraataatcactgcagattactgtgttgcagatatagtttggctgtgtccccacccagatctcatcttgaattcccatgtgttgtgggagggacccagtgggaagtagttgaatcctgggggcaggtctttcccttgctgttctcatgatactgaataaagtctcctgagatctgatgggtttttttttttttttttttttgagatggaatctcgctctgttgcccaggatgcaatgcagtggtgtgatctcggctcactgcaacctccgcct

SEQ ID NO: 680069 - DNA, 1440 bp, Homo sapiens
tgctatggtttaaatgttttcgtccactccaaaactcatgttgaaacttaatctccaaggcaacagtgttgggagatagggcrtgatgggaggtgtttaagtcatgaggctccacccttatgaatggattaatgctgctataaaacaggcctgcaggagtaggttctctctctctcctgcctgtttgtcagttgaggaaaccacgtttcttctctccagagaactcagcattccaggcactatcttggaagcagagagaccagttcttaacttgccagtcccttgatcatgaactgctcagcctccagaactgtgagagaataaatttctgttctttataaattatccagtctgtggtattttattacagcagcacaaaacgaagtaagacactcactaatgcctagtgtgttcaatttttaagaaacaatagccattttgatggatgtaaagtagtgtcttattgtgattttgatttgcatttccctaataaccagtgatgttgaacatctttctatgtgcttattagccattattatattttctttgtctatttttgaatctcaataaaagatttttaaaaattctatatgacattttaatatacaagttgccacattttaaaattacactgatctttagtcacacagggactttggttggaagagaagattattccttgattctcaattctaggattttcagtggagagcaattgacttttaatttcttttttatgatctcataacagagtaaagaggattcaggaccttctgatttgtcaatgcagaggacagagctgacatagaaattcttaccactctaaatacaaggaaatgctaaataaaatattactagttcattcaatcaatgatttttttaattccaaatacgatcagggaaatttttttctttggcttgttagcaatcatctgaaaatataaaatatcattaattatataacactacttttaaatacaattttggcagacaaatgggagggtatattaaaaaacgttaatttttccttttttcaatttccatctgaccttgtatatcatgattaacagtttatttgaaggatgtgacaaaaaaattaaaaaaaaataatttcatgattttccgggattatcttttttctcaaagagtctcaaataatatgtttttaaaaaattgtaaaacgtttcaaccagtgtacattttcatgtaatcagcacttcccccagtttttctccttgatgttcttctagaaactttgtcaggaagactagtgaagaattttgaatgggcacaattctgggtgttctggaacgtctgacactgtctggcttactctccaaggtaaggttatctgattctgttggaacctgtgctttggactgcccttgactgagctattttacaactcaggaagttgtaaaaaattgactgacagtaaaa

SEQ ID NO: 680070 - DNA, 575 bp, Homo sapiens
gaattttgaaaacagcctcaaaaaagcaaatctaagagctattggcattaaagaggaggtagagaaatatacrggtagaaagtttgttcaaagggataatatcagagaatttcccaaaactagaaaaagatattagtatccaaatgcaagaagcttatagaacacaaagcttctataatacaaaagcttctataacacaaaaatttgtgttatagacacaaatttaacccaaggaagatacctcaaggcatttaataatcaaactgccacagatcaagaagaaagaaaggattctaaaagcagcaagagaaaagaaacaaataacttacactggaactccaaaatatctggcagcagacttctcagtgaaagtttacagaccaggagagagtggcatggcatatataaaaaactgatggaaaaagattttttattctagaatatatctccagtgaagatatcctccaaacctgacagagaaataaagacgttaccaggcaaacaaaagctgaggaatttcatcaacatctgaccagtcctacaagaaatgctaaagggagtacttcgataagaaa

SEQ ID NO: 680071 - DNA, 575 bp, Homo sapiens
gaattttgaaaacagcctcaaaaaagcaaatctaagagctattggcattaaagaggaggtagagaaatatacgggtagaaagtttgttcaaagggataatatcagagaatttcccaaaactagaaaaagatattagtatccaaatgcaagaagcttatagaacacaaagcttctataatacaaaagcttctataacacaaaaatttgtgttatagacacaaatttaacccaaggaagatacctcaaggcatttaataatcaaactgccamagatcaagaagaaagaaaggattctaaaagcagcaagagaaaagaaacaaataacttacactggaactccaaaatatctggcagcagacttctcagtgaaagtttacagaccaggagagagtggcatggcatatataaaaaactgatggaaaaagattttttattctagaatatatctccagtgaagatatcctccaaacctgacagagaaataaagacgttaccaggcaaacaaaagctgaggaatttcatcaacatctgaccagtcctacaagaaatgctaaagggagtacttcgataagaaa

SEQ ID NO: 680072 - DNA, 3860 bp, Homo sapiens
ttttgccagctgcacacttccaaaaatttattcacccaaaggtcagaagcggtgagttctggagttctttatggtgtcctgggaatgcctttcaagtctctggctgctcacaatatttttgtgtgtgctgaactgttatctaaaacgaagtatttcctaatttcagcctactctgagaaccttcagcttttaaagagcttgctgtataaaaaacacaacaggcctctgtaattctacttcaggtgcgatctggacaccatgaagcactgcaaattctctaaggggatgcccgttaatgtcaactggatggttatcttgtaggtttgttgttcttaagcccaaacttaactgttaccatggaaataaaacacaaaaggagttgtccatcctggaaaataaaaacctttagaattctcattcaaggagttaatgttaaatatgggagaaactcttctgcataatgtttttgtgaaaaataaatttttttccttgagaatatgcaaaagttatcttactatgtaacacttggaccccccaacatataaacaaaattttaaaactaataatgtacataattttaaaaattagggtcatttgctttttgcaatcctattgactaaaacagccacaatatcagattgctcaaagaactttagaagcttttttcaattagtcaaggatgcaattacattacctgaatgtgctgtagattagattagactatctacactttcctaaatagcatcttcaggactcagttctctatacaacattccccttagaagtttgggtcataactgtaactctcaccatgcagaagctaaaagtccatttccttgttatatatcatagtaggatgacacagtaatgtgcaggaattacgactgagggataagggtcaaattccttgggttagaatcctagctctgcaacttagcagctatgttattttaatcagctaaactccctaagcctcagtttcctcatctataaaatgagtataatagcataaagcagggttggaaaactttgaccgtgggccaaatctggcctgccgccaattttgaaaagaaagttttacatggccatgcctgttcatttacatagtgtctatgagaatttttggagatatcaaatagcctaaaatgcctacatatttgtactatctcgcccttcatagaaacaatttgctagcttctcatataaagggtttttgtgaagattaaatgtgatcattcattaaagtgttccatataggtaagcaactaataaatggcagggattattgttatttattaatagtaataagttataaaaatcattgtgatctcatttcctaaaattcagagagacaactttacatataatacctcgggagcaggctgcccatacagtaataccttgggatcagtaggctcagccccctttttttgatgaattggtcatggaggtggctgaggtggtatgatcacaggatgtgatgtgcagctgtcagtgcagggcagagagcccggtgagtcacagacagcagctgccacgagtcatccattccaagtaattgatactctgccattctgtgatggaggatctcttggtcacaggtgtataacacatgcatattcgtgattggccccactcctaactgtgtagaggagaccaaagagggagtggggagggctggaattatgcttacacgatgaccagagcaggtgcaggtagccacaacacagcctatttccattttccaggcagtaactggtttcccaagatgtattctgttgtccagaacagggaataagatggggtggtctagtacataaaattytaaaatgtgagtttgatgtaagaaaatatagattaaccattcaaagtagtaaaagctggtgattaccagctggtgatttaccacagaactggcatcactggtcccatgctagtacatctgcaaaatgactttggtcaatcaccaaatatgacagtgttatccacaaatctttcaaactgtccttagaacaccgtctttcaaggcaaatatttaaaagatctaaagagctcatactgaaacagtgatattcagatacaaactatcgcctgtactctctgctcctgtctagggccttaaacatgtcaatcaattttcacctcacttccttgtgtgttaaaaagaagctgcgagaatatgcataataaaaatagccataattcaaaattgtttcctgctggatgttggtagattctcattagttgtagttgctcctgtcaggatcataaataaatttatgtctgtagcacggaaagaacatattcaccaggaggaaacctcaaattggcaaatggtccatgtattaaaatgagatcagtgaatgacacaaactcagaattgtaaagttctcagtgttcatcccaagaatcttcctaccaaacaatctcgttgctattatttaaaacaattagaccttttttttttgtatgtcacagttcattaaatgccatacacatgacattaataggtaaggtcatttccctggaggagctcaccatccaagacagacaaggctgccgctggtgggaatgaagaacagacattcacaccaaatggggagacatcataaaggaccagctgaaatggttttagagttcacagtatattcaaattaatattcaagttgaatcaaagctcttgacaattctgtttctccaaatagacagtggtgctgcctgattatagctagctgcaaaattctccacaatgccatttttaccctgccccactgaaggctgaagttgtctaagagatagctcattcaaggctttgctttcctcagcttgagtaaacatcagcaactgtaacatttttcatgttgaaagaaaccttctgactacacagccttggcacctgtagagacttaaacaaaatatgtgcccttaagttaccaggtgatgaaaatttacacttgatggaggcagcaaagttgcagctgattataatcgaaaaaggtaatcaactaattaaactaccaacttcaaacatttgtccaggtaataaaattaataccctcttcaccactcccagcatctctgtgccttaattcaaggaataactttctaaatagccaattattatatatgtattcctttggtacacaaagtatacagatatagatagatagatacatacatacatacatacatacatacatacatacatagatacaggtgtaggtatagattcagatatagatatagatgatgagatagagagagagagagatagggatacaattggccttctgtatccctgggttttgcatctgtagattcaaccaatcactgatggaaaatatccttaaataaataaataaataaaacaatgcaacaatttaaaataatataaattttaaaacaatatagtgtaagaactatttacatagcatttacattgtaatctagagatgattttaagtatatggaaggatgtatgtaggttatacgcaaatactacaccgttttatatcagagacttgaatagcctctgattttgatatcctgggggtaagggggtggtctgagaaccaatcttccttggatactgagggatgactctatagacatagctatatgacacagaggtatgggaaagctgtattctctttttttttggtaagaaataggtttagaaacagatgaactattattgtattctgtattagtttgccggggctgctgtaacaaagtaccacaaaatggaggcttacacaacagaagtttattatttcacagttctggagacaggaagtccaagatccaggtgtccgcagggttggtcccttccaagggctgtgagagagaatctgttccat

SEQ ID NO: 680073 - DNA, 3860 bp, Homo sapiens
ttttgccagctgcacacttccaaaaatttattcacccaaaggtcagaagcggtgagttctggagttctttatggtgtcctgggaatgcctttcaagtctctggctgctcacaatatttttgtgtgtgctgaactgttatctaaaacgaagtatttcctaatttcagcctactctgagaaccttcagcttttaaagagcttgctgtataaaaaacacaacaggcctctgtaattctacttcaggtgcgatctggacaccatgaagcactgcaaattctctaaggggatgcccgttaatgtcaactggatggttatcttgtaggtttgttgttcttaagcccaaacttaactgttaccatggaaataaaacacaaaaggagttgtccatcctggaaaataaaaacctttagaattctcattcaaggagttaatgttaaatatgggagaaactcttctgcataatgtttttgtgaaaaataaatttttttccttgagaatatgcaaaagttatcttactatgtaacacttggaccccccaacatataaacaaaattttaaaactaataatgtacataattttaaaaattagggtcatttgctttttgcaatcctattgactaaaacagccacaatatcagattgctcaaagaactttagaagcttttttcaattagtcaaggatgcaattacattacctgaatgtgctgtagattagattagactatctacactttcctaaatagcatcttcaggactcagttctctatacaacattccccttagaagtttgggtcataactgtaactctcaccatgcagaagctaaaagtccatttccttgttatatatcatagtaggatgacacagtaatgtgcaggaattacgactgagggataagggtcaaattccttgggttagaatcctagctctgcaacttagcagctatgttattttaatcagctaaactccctaagcctcagtttcctcatctataaaatgagtataatagcataaagcagggttggaaaactttgaccgtgggccaaatctggcctgccgccaattttgaaaagaaagttttacatggccatgcctgttcatttacatagtgtctatgagaatttttggagatatcaaatagcctaaaatgcctacatatttgtactatctcgcccttcatagaaacaatttgctagcttctcatataaagggtttttgtgaagattaaatgtgatcattcattaaagtgttccatataggtaagcaactaataaatggcagggattattgttatttattaatagtaataagttataaaaatcattgtgatctcatttcctaaaattcagagagacaactttacatataatacctcgggagcaggctgcccatacagtaataccttgggatcagtaggctcagccccctttttttgatgaattggtcatggaggtggctgaggtggtatgatcacaggatgtgatgtgcagctgtcagtgcagggcagagagcccggtgagtcacagacagcagctgccacgagtcatccattccaagtaattgatactctgccattctgtgatggaggatctcttggtcacaggtgtataacacatgcatattcgtgattggccccactcctaactgtgtagaggagaccaaagagggagtggggagggctggaattatgcttacacgatgaccagagcaggtgcaggtagccacaacacagcctatttccattttccaggcagtaactggtttcccaagatgtattctgttgtccagaacagggaataagatggggtggtctagtacataaaattctaaaatgtgagtttgatgtaagaaaatatagattaaccattcaaagtagtaaaagctggtgattaccagctggtgatttaccacagaactggcatcactggtcccatgytagtacatctgcaaaatgactttggtcaatcaccaaatatgacagtgttatccacaaatctttcaaactgtccttagaacaccgtctttcaaggcaaatatttaaaagatctaaagagctcatactgaaacagtgatattcagatacaaactatcgcctgtactctctgctcctgtctagggccttaaacatgtcaatcaattttcacctcacttccttgtgtgttaaaaagaagctgcgagaatatgcataataaaaatagccataattcaaaattgtttcctgctggatgttggtagattctcattagttgtagttgctcctgtcaggatcataaataaatttatgtctgtagcacggaaagaacatattcaccaggaggaaacctcaaattggcaaatggtccatgtattaaaatgagatcagtgaatgacacaaactcagaattgtaaagttctcagtgttcatcccaagaatcttcctaccaaacaatctcgttgctattatttaaaacaattagaccttttttttttgtatgtcacagttcattaaatgccatacacatgacattaataggtaaggtcatttccctggaggagctcaccatccaagacagacaaggctgccgctggtgggaatgaagaacagacattcacaccaaatggggagacatcataaaggaccagctgaaatggttttagagttcacagtatattcaaattaatattcaagttgaatcaaagctcttgacaattctgtttctccaaatagacagtggtgctgcctgattatagctagctgcaaaattctccacaatgccatttttaccctgccccactgaaggctgaagttgtctaagagatagctcattcaaggctttgctttcctcagcttgagtaaacatcagcaactgtaacatttttcatgttgaaagaaaccttctgactacacagccttggcacctgtagagacttaaacaaaatatgtgcccttaagttaccaggtgatgaaaatttacacttgatggaggcagcaaagttgcagctgattataatcgaaaaaggtaatcaactaattaaactaccaacttcaaacatttgtccaggtaataaaattaataccctcttcaccactcccagcatctctgtgccttaattcaaggaataactttctaaatagccaattattatatatgtattcctttggtacacaaagtatacagatatagatagatagatacatacatacatacatacatacatacatacatacatagatacaggtgtaggtatagattcagatatagatatagatgatgagatagagagagagagagatagggatacaattggccttctgtatccctgggttttgcatctgtagattcaaccaatcactgatggaaaatatccttaaataaataaataaataaaacaatgcaacaatttaaaataatataaattttaaaacaatatagtgtaagaactatttacatagcatttacattgtaatctagagatgattttaagtatatggaaggatgtatgtaggttatacgcaaatactacaccgttttatatcagagacttgaatagcctctgattttgatatcctgggggtaagggggtggtctgagaaccaatcttccttggatactgagggatgactctatagacatagctatatgacacagaggtatgggaaagctgtattctctttttttttggtaagaaataggtttagaaacagatgaactattattgtattctgtattagtttgccggggctgctgtaacaaagtaccacaaaatggaggcttacacaacagaagtttattatttcacagttctggagacaggaagtccaagatccaggtgtccgcagggttggtcccttccaagggctgtgagagagaatctgttccat

SEQ ID NO: 680074 - DNA, 837 bp, Homo sapiens
gtgcttcacttttggtccatttacatcttattatgtttgtatgaaaacctctttgtagactgatgtggcttatcctccagtaatgcttaggtgagaacaagaaatacagttgcttgcttctctgcttcccacaaacacttcttgcattactaaggaggtaaatatatatatctacagtcagattaatagacataacttaaaaatcatttattttctatgacattctctcacttcttgaacgcttcatttaagaaatgccataattcatggtcttacctgaaatggcaagaaaaaaaattagaattcamgttaaaaattgaaattgggtataacagaaaacacaagactatttggactaaactcagcaagctgtctcaaaaaaagcagacaaaatattcctattatagctgatagaaaattcatttttaagctaatagaaaataattcactttcagtatagaggtaaataaaaaaagaaaatgaggaatagaatgtttagggagaagaactaatttagggaagtttcccaatagataagtcttccgttgcacaacacataatttaatatgcaatttagatactatgcttttttttcccttcctcattgttaaattctggactactttatgtgacactagactttaattccttgaagaaaaaggtcaggtcttatacattattcattgcaaacgatttatagaatacttaatctataccagacatggtgctagatgctgaagccacacagttacaggatatgaaagaatttccagactagagctgctgatagccatgtgaaaaagatttcactacctaagtaataagtgctcattaaat

SEQ ID NO: 680075 - DNA, 648 bp, Homo sapiens
tggcgtgatctcagctcactgcaacctccacctcccaggttcaagcaattttcctgcctcagcctcctgagtagctgggattagaggcacctgccaccatgcccaactaattttttgtatttttagtagagatggggtttcaccatgttggccaggctggttttgaactcctgacctcaggygatccacctgccttggcctcccatagtgctgggattacaggcatgagccaccatgcccagcaccattgagttttaatatatatacaatttagtatttacaagccattttatttataagtgtgcactctagttaatgacttttgttaaggcatttgaaaaatacgttgaaaattgttctttggagctaaaaataaggctggaagtttaagttgttcaagtcaatttccagttactctgctctttattttctctagtaatctgagcaatttggcaacaccactttagagctaacatgaaaagacctagctttatagaagcatggcatccatttgagcctagtaataatttttaatatgccccaaggagatgaatgtttaatggcaaccatttctatttaaaaaaaaaaaaaaagaatgatcattccttgagcagaaaaggaatctatgagtttagatattgactgtat

SEQ ID NO: 680076 - DNA, 1060 bp, Homo sapiens
tgacaaaaaagaattttaggtacccaaaattcttatcaactaacttatgaaacagaatattttacattttaaacattaaagacttaaaaattaaactagactctaaagtgctttattcacttgatctgcttttcaaagccatatttgtcttcaaagaaaaaattggaacaaattttgacttcagactagctctaaaacaaattgcacctgctgagcattcagtaattattgttggatggaggtaactgagtagggagttagaattaaacagtttactttagtaaggaggtgcaaaatcttaattcctattaattggttatagttgatggtttaattttttaatacaattaatgatttcacacgaataatatgaagattaaagaactctgattgttgcccacatgtttatttgtagtaatggtaacatttaataactttattgagtattgcagatggcattgtgccaactgctgataactcagcagttaataagacagtttctgcyttattttataattttgattaacttgatgcttatatttgtagtgttttgcttttatttctgatgcgaaattcttccctaaaataatagtattcagttcacttgcttgaagagatttgaatatatgtaattttgaatattttaccttcagttactaaaaatatttttgtcactttcagcatatgaaacactctcagatgctaatagacgaaaagagtatgatacacttggacacagtgcttttactagtggtaaaggacaaagaggtagtggaagttcttttgagcagtcatttaacttcaattttgatgacttatttaaagactttggcttttttggtcaaaaccaaaacactggatccaagaagcgttttgaaaatcatttccagacacgccaggatggtggttccagtagacaaaggcatcatttccaagaattttcttttggaggtggattatttgatgacatgtttgaagatatggagaaaatgttttcttttagtggttttgactctaccaatcagcatacagtacagactgaaaatagatttcatggatc

SEQ ID NO: 680077 - DNA, 609 bp, Homo sapiens
ataaagttaagaaaaataagatgatgattttcctttcttttggtttcaaactagtgaaatcttgcacaaaagacacagcatggataaatttaatcattttgtgactcagagtacattttatgtaagtccattctgttggaggatagatccaatttcatgaactcttttaatccttcttttgaagactagttccaggaccaacttcataaaatgttttattgtaggtaccaacaactatcaacatcattatcttctccccaccttcacccttgaaaacaattgtattctagaggattatgaaggaggggacaggactctttcaaaatctggaggacactagggacttaccccagaaaaaaaataaaaaagctcacccwttcaaaatcttgtacacctttcagaggattcctggtgcccaggttatgaaagctcacttcagaacgggtcagcgaattagtcagaggataggtagatggagggaaagggaaatgaagcaatgtgggtaaattcacaaactgagtggatatgacttaatttactttcaaatagaataaatacatggccccttgagtaagtattctgtgaatgggaaggaataattgtattctt

SEQ ID NO: 680078 - DNA, 654 bp, Homo sapiens
cctaaacatgcctttctcagaagcagtccagatgaagccatttcaggttattcrgggggagctgctgtgcctgctcacctttttgatattcccacaatgctttgctgactttgcagcacccagtagtttttgatggactgaattaggtgtaattctgcctatccaggatgatcagctgttcctaaaggtccccagagacgataacatctctgctctgagtatccatgccagtgtttaatagcctcttgaaattttctccttgaagtgatctgtgacttgttgaggtggggaagaaggtgtcagcaggggataagcatgatcaacttgatcgtagctgaaatgtgaactttagtggccaaactgagataaaaaatgatcctcacaccttctcaagtagttgaagactattgagttaccagaactgggagaggagaaaaagagcacattgtttaccttaattatttcttgggacctaatcatgttgccattacattgtaaattctgtagattttcacacttggaaaattcttcttaaatttagagttaggacttactaaattgtaatccatgaaaggtatttgtttaccctactcttcttttaatctcctactacctttcatttcccaaaatacctagaagacaaaaaacagtgta

SEQ ID NO: 680079 - DNA, 576 bp, Homo sapiens
ccctgaatgacagaccccaatccaagactggygttggcaccagttctgccccagtgttctgccttcccaaaggctgcgcttctcatccagatacaaataccagctgggtgtgcagggctgacaggttacacaaagctgcaggataaatacaatggagtgcaatcttcctagagcagcattcggtttactcaaagatttggaaaacgatacacctgtgtaggaaaaatgtacacagatttattatggactagaataggaaattcacatgaaattttcagagaagatacaagcttccagaatggcattttgggttatactcccagagtctaagaaatacaagttctctcacctctgccagcagggtgcttcaggaagacatttgggaagcccttttctcacaaatagtcccctctcccagaggctggaggcaggatgcagccatggaagtaacaacctactgaatcccttctgctctctgtggttctttcagtgcaacacagttccgctggatccagaagggagaagaaactgagaagcaaagctgggcaattgaccacgtgtacattggagaggctt

SEQ ID NO: 680080 - DNA, 620 bp, Homo sapiens
ttaaccacaagtcatccccagctattaacaagaagctggattgcaggtagggacaccctagcaagggtcttgctagtctgatcatttcccttcagagtctggaatcctctggcagcgcttcacggaggactgaactctctgaccttcctcctgtggcatctgctgctccatcaggagctgaagccattcagtaagaaatcatttttgagtatcaacgatgtctcaggcattgtgctcacactggatatgctctgtctccagggggccttcagacaaggaaattagccaaggcttaaatggcatgagaggaggccagggagggaacaaaaatgttcaagtgctattatccagaaagagatgcattgttttcatttctaagcagatttattgatcaggttcactatggacatcaaggtctttgacctaatatagaagtatagttgttctattttctgagcaggtcgacaacaaagaaatttctgtgactggagaattcatttgtgtaaaagccatctgargatttcaccattaaatacttttagttatattgaataaatgaagagaataaaattagaggaaatagtgaccacttcagaaaatctagatggtgcagagccagt

SEQ ID NO: 680081 - DNA, 620 bp, Homo sapiens
ttaaccacaagtcatccccagctattaacaagaagctggattgcaggtagggacaccctagcaagggtcttgctagtctgatcatttcccttcagagtctggaatcctctggcagcgcttcacggaggactgaactctctgaccttcctcctgtggcatctgctgctccatcaggagctgaagccattcagtaagaaatcatttttgagtatcaacgatgtctcaggcattgtgctcacactggatatgctctgtctccagggggccttcagacaaggaaattagccaaggcttaaatggcatgagaggaggccagggagggaacaaaaatgttcaagtgctattatccagaaagagatgcattgttttcatttctaagcagatttattgatcaggttcactatggacatcaaggtctttgacctaatatagaagtatagttgttctattttctgagcaggtcgacaacaaagaaatttctgtgactggagaattcatttgtgtaaaagccatctgaggatttcaccattaaatacktttagttatattgaataaatgaagagaataaaattagaggaaatagtgaccacttcagaaaatctagatggtgcagagccagt

SEQ ID NO: 680082 - DNA, 1758 bp, Homo sapiens
taaaggtcaagttgtacagtataaatttgaaaatctctctctgacttcctttctacctaaattagagcctaaaagtcatgagaattttgtcttctttttgtttattttagagatagcatagtcgatgttttaaaaagttgccaccttttcactataatgcgctcccattatcagagatgtttattctggttgtatctctctgacaaccttcaatacttaacagaataatttagtttggattcaaagaagtgcctcttctatttctgtgtttgtttctagaaactttgaggtggaggaattattgttccttcttcttggcaatgttcagggtttcacgaatctgacttttaaaagcccagctctcagccccgagcctctcatgagttaaagaaagggttttgcagcttttggtagacgagaaacacattttatggctcttcatgaagttgcccgctccgtccacgtcctgtcctcttcctccttcccagtttctgggctccctggctcttgtcatgaggctttcagttttgtgtcccagaaagcgcttcccccggggacagtgccatgccaaggctgggagaagggaaaaaggaggtgtttatcgccttgaagatgccttccagcctttattattaactcccttccaaagtaaactttcgggtttttttcaagtctgttctggccaaagtacagttgggtttgccgtgttctctaggagtagaggtgaaaacagcattgcccggggtgaggagcaggaggaggaagggtccacgtataggagtggatggaggggatctgtgagacagctgctgggacagatccgacttggagactgtcaggcctctgagcccaagctaagccatcatatcccctgtgacctgcacgtacacatccagatggccggttcctgcctttactgatgacattccaccacaaaagaagtgaaaatggcctgttcctgccttaactgatgacattatcttgtgaaattccttctcctggctcatcctggctcaaaagctcccctactgagcaccttgtgacccccactctgcccgccagagaacaaaccccttttgactgtaattttcctttacctacccaaatcctataaaamggccccacccctttctcccttcgctgactctcttttcagactcagcccacctgcacccaggtgaaataaacagctttattgctcacacaaagcctgtttggtggtcttttcacacggacgtgagtgaaagagactgccattcatgaatggacaaggcctggctccgtccacgctttcccagctctgtgtcctgccatcggacatgctggcacatctgctgtgggtgccctgcacttctccgggcactcctggcccagctggggaggttggcatggtatccaccattttgttctaaagtagtaaatgaaactcttgggagggcagcacccagcagatgtttggagctagagacagggctctggggatgtgtaggaacccggacctggtgtggcaatggtgtggggctgtcacgaggcgtgaggaggctggggtggtgttggggacagcacacgatgctggggctcaggccaagtgaagcttggacttcactctgtctgaggctttgccaagtgtcagagggtgcacacttgggagtcacatggccaggctcacatttccagccgaagttacactctacagcctggcagcagatggacgtttggggacagaggtggagccggaacagctgagacactgtttta

SEQ ID NO: 680083 - DNA, 1758 bp, Homo sapiens
taaaggtcaagttgtacagtataaatttgaaaatctctctctgacttcctttctacctaaattagagcctaaaagtcatgagaattttgtcttctttttgtttattttagagatagcatagtcgatgttttaaaaagttgccaccttttcactataatgcgctcccattatcagagatgtttattctggttgtatctctctgacaaccttcaatacttaacagaataatttagtttggattcaaagaagtgcctcttctatttctgtgtttgtttctagaaactttgaggtggaggaattattgttccttcttcttggcaatgttcagggtttcacgaatctgacttttaaaagcccagctctcagccccgagcctctcatgagttaaagaaagggttttgcagcttttggtagacgagaaacacattttatggctcttcatgaagttgcccgctccgtccacgtcctgtcctcttcctccttcccagtttctgggctccctggctcttgtcatgaggctttcagttttgtgtcccagaaagcgcttcccccggggacagtgccatgccaaggctgggagaagggaaaaaggaggtgtttatcgccttgaagatgccttccagcctttattattaactcccttccaaagtaaactttcgggtttttttcaagtctgttctggccaaagtacagttgggtttgccgtgttctctaggagtagaggtgaaaacagcattgcccggggtgaggagcaggaggaggaagggtccacgtataggagtggatggaggggatctgtgagacagctgctgggacagatccgacttggagactgtcaggcctctgagcccaagctaagccatcatatcccctgtgacctgcacgtacacatccagatggccggttcctgcctttactgatgacattccaccacaaaagaagtgaaaatggcctgttcctgccttaactgatgacattatcttgtgaaattccttctcctggctcatcctggctcaaaagctcccctactgagcaccttgtgacccccactctgcccgccagagaacaaaccccttttgactgtaattttcctttacctacccaaatcctataaaacggccccacccctttctcccttcgctgactctcttttcagactcagcccacctgcacccaggtgaaataaacagctttattgctcacacaaagcctgtttggtggtcttttcacacggacgtgagtgaaagagactgccattcatgaatggacaaggcctggctccgtccacgctttcccagctctgtgtcctgccatcggacatgctggcacatctgctgtgggtgccctgcacttctccgggcactcctggcccagctggggaggttggcatggtatccaccattttgttctaaagtagtaaatgaaactcttgggagggcagcacccagcagatgtttggagctagagacagggctctggggatgtgtaggaacccggacctggtgtggcaatggtgtggrgctgtcacgaggcgtgaggaggctggggtggtgttggggacagcacacgatgctggggctcaggccaagtgaagcttggacttcactctgtctgaggctttgccaagtgtcagagggtgcacacttgggagtcacatggccaggctcacatttccagccgaagttacactctacagcctggcagcagatggacgtttggggacagaggtggagccggaacagctgagacactgtttta

SEQ ID NO: 680084 - DNA, 1614 bp, Homo sapiens
ataggccaattattttattgactgttcctcattatgggaatgcctgatgttaagatatgtatttttggcagaaataccagagaagtgattttgtgtctgtctcagagtacatcatatcaaccaattattttttaatagatatacttcaatttaagatatttattaatcttgcaagaaaacatccctcataaacctttttctttggttacatgtataaacaattttcacattcttcccttgcaatgtgaatatattgtatagaaatcttatgtatagagaaaataaatgtagtaaactaataatgaggggtgctatgatgtttgaactgtgaacagtaagcatttttcatttccttttctaaaaggggaagtcaatttgagagtagccggagcggggcagcttatattggtgggatttgctcgttgctgaaaggaggaggcgtgaatgaagtaggtgtgaacatctgtacaatacaaagtggtatgatggctgaaaatgttttcctcatacttaagagataatttctcagtattcacatactccagatgttagattgctatattacaaatcagtatggtggcctggcacaatggcttatttctgtaattccagcactttgggaggctgaggtggacaaattgcttgagatgaggagtttgagacaagcctgggtaacatggcaaaatcctgtctttatcaaaaatacaaaaataggttgggtgtggtagcgtgtgcctgtagccccagctactggggaggctgaagtgggaggatggcttaagcctgggaggcagaggttgtattgggcccagattgcgccactgcactccagcctgggcaacagagtgagaccctgtctctaaataaataaataaataaataaataaataaataaataaaattaaaaatataaaaaactaatatggttactgtaagtgaccagaggacagactggggaaataatggcagataatatgggataattattatatattcatgttatgcttggaataatttccagattaagctacttacagattaaattgagagaatctttacctttaccttcattgaaaataaggccctatttatcactttgaatgattttccagggaattgaataattccctgaagcatcaggttgtcacctaacaacccaactggatattttttccttagtatttaacagatttggggataagaaaaatagagtaggttttccaaagggtttcttttactcctaaggcactaaacctactagagatgatcaaaaagaaaatacttgcatttttaagrggctgcaaattgaaaaagatatcctcagttcttcttaagtttctattggccgaagatcatcactacctcctgttactcatttcatttgttttctgaagctacattctattccacttgaggggaatttcaggattacaactggatacaaagatgaacaagttctaaaaaaatttacagatttaattttattttgtattatccaaaagacggatttaattatataccaatattgaatttttcaagaatgtcactggtgaaatttggactcagatatacatttccaaaacccaaaagctgtgattatttcctgacttctag

SEQ ID NO: 680085 - DNA, 1355 bp, Homo sapiens
tcaagcctcagcctactccatcagtggctttcaaatgatcttttccatggcccacagtaaaaaataattcttctattgtgactcagtgcatacacacatgtacaactgaaccaaaaatttcaccaaacactttttacttttttttttttttttttgagacagtgcctcgctttgttacccaggctggagtacagtaatgtgatcatagctcaccacagcctcgaccttcctggctcaagcgatctttccatctcagcctcctaagtaaatgagactctaggcgtgcaccatcacgcccagctaatttttgtattttttgcaggagtggggtttccccctgttgcccaggctggtctggaactcctgggctgaagcaatctgcccgcctcagccttccaaagtgctgagatgacaggcatgagccaccacactcagccactttttgctctcatttgcatcacactgcagtgtttttcatttcgttcccttttattacagacaaaaatgatggtcgagacctactaaattgattttattatccactagtggagtaaatgggatatttgtaatgtaatattgttttaccgcccacaaaaaatttgtactcatattaattcactttactcctacaaccacttataaagtaggtgggtgcttttatctccctttttatagatgatgattctgaggctctgggaggtaaagtgtctttcccatagacacagctgagagacatttgagagatgggttgttactgtgtgggttgtagctggacggtgaaagagggccagtcccgtgtaagcagttagttcgttaggaatacctttactgagcaccgtgcaatgtgctagccccaagaagacagtgaatatatgggaaataagtttatcatgagaaaaagccagaagaaaaaatgtaattggtcccagggagcatggagttgcaattgtatccaatctcagaagtaatattctgagatcctctaagagctcagaccctgtgggaggagtcttcattagggataacgttgtagtctcaaaaamagataattgaattttaatgacatggtttttattatattatgtgctggcatctaggcagaagtatctgattaagaggtggagtaattggggccattagggatccaagtctggggagaagtagaataccagggcccttgatgaaaccagcacaggtggagaaatgtgcttctggttggaggtgaaaacggggaatttgctgagctactgagttagcaggtctgttgagagagtacagcaagggaggtggatggagccttaggcaaatactgcagttaagcgctatggaaagaagagacttgctgacagaggcaa

SEQ ID NO: 680086 - DNA, 1355 bp, Homo sapiens
tcaagcctcagcctactccatcagtggctttcaaatgatcttttccatggcccacagtaaaaaataattcttctattgtgactcagtgcatacacacatgtacaactgaaccaaaaatttcaccaaacactttttacttttttttttttttttttgagacagtgcctcgctttgttacccaggctggagtacagtaatgtgatcatagctcaccacagcctcgaccttcctggctcaagcgatctttccatctcagcctcctaagtaaatgagactctaggcgtgcaccatcacgcccagctaatttttgtattttttgcaggagtggggtttccccctgttgcccaggctggtctggaactcctgggctgaagcaatctgcccgcctcagccttccaaagtgctgagatgacaggcatgagccaccacactcagccactttttgctctcatttgcatcacactgcagtgtttttcatttcgttcccttttattacagacaaaaatgatggtcgagacctactaaattgattttattatccactagtggagtaaatgggatatttgtaatgtaatattgttttaccgcccacaaaaaatttgtactcatattaattcactttactcctacaaccacttataaagtaggtgggtgcttttatctccctttttatagatgatgattctgaggctctgggaggtaaagtgtctttcccatagacacagctgagagacatttgagagatgggttgttactgtgtgggttgtagctggacggtgaaagagggccagtcccgtgtaagcagttagttcgttaggaatacctttactgagcaccgtgcaatgtgctagccccaagaagacagtgaatatatgggaaataagtttatcatgagaaaaagccagaagaaaaaatgtaattggtcccagggagcatggagttgcaattgtatccaatctcagaagtaatattctgagatcctctaagagctcagaccctgtgggaggagtcttcattagggataacgttgtagtctcaaaaacagataattgaattttaatgacatggtttttattatattatgtgctggcatctaggcagaagtrtctgattaagaggtggagtaattggggccattagggatccaagtctggggagaagtagaataccagggcccttgatgaaaccagcacaggtggagaaatgtgcttctggttggaggtgaaaacggggaatttgctgagctactgagttagcaggtctgttgagagagtacagcaagggaggtggatggagccttaggcaaatactgcagttaagcgctatggaaagaagagacttgctgacagaggcaa

SEQ ID NO: 680087 - DNA, 608 bp, Homo sapiens
aaactaaggagtttcccaaatagcatggttttgggatggctggtcacactaatgccagacctattgaatctgaatcttaaaaggtagggcagatccctacattttgaacaagtgcctctggtgagtttcaggcataataatatttgggaaccactactcttggtgtccctggacttgacaatctgtgtggtcttcttttcttctgggctttatgctacctttaaattgggaggcattccctgsccaggacggagtgtcccacttgcttgtcatgggaacattgtggaaatcctagcaatagtttctgctgctagtaatgagatcttgaggataaaaagcgaatgaatcacacttctttatggtctcttcccttggttcttagaatgagatgtaccattaatgttgtttcatggtagtagagggaagcaaactccacttccatcctctcagggtcccagctgggcctgagaattaaattgacataagataaattaacaggagaaaagcacacaaatctatttaacacaagttttatgtgacaggggagtcctcataaggaaaagaagacctgaagttatagtcaatcacttacatgacgaagtggacaa

SEQ ID NO: 680088 - DNA, 1964 bp, Homo sapiens
taattcccatgtccagtaggagttgccagactcctatggccatagatctgcactggacgaaaggacagtgttctagaagccagtctaccagctctgacccaacgcagctcctcctgaacaaaagcaaagccattcacagtaagatattgctgacatccgtttgccaaaaaaacaaaaatgatatataatacctttcctttcatgtgcttgctttttttagacaagcaacccaagaataaatggcatatacctcttattcatctttcagattaaagctcaaatatcacttccttagggaaacaagagtcaaattgtcttctactttttcatcaaatcacctaaaatttagtaagtatatatctttacaaaggaacaatatctgcttatcccactagagaataattttcaggagagcaggaactttatataactcactattaattcccaacaattagaacagtccacaatacacagtaagttgtcaaaatatatttgtttgaaaaacgaaggaataaatttagcagccttttatatagagataatgcttttaccttggtaagctacatacctcaagttggtggtgataaactttggttcaattatttatagatttttatctagtccttttgagaacaaaataattccaagattagacaaaattgggaccacagtcagttgtatagagtttgtttgctattcttcaaacaaagattgaaccctaaaatttactccaagaacaataaatttgattgttaatctttttaatataatcattgtaactatttaagcagcccaggtcacataaccataaacccagatgtgttggattccactaaccacgcatgaaaaattatttttgtaatctgtcttaaaacacacaactatattcaaaaaaatgtcataacctggttattacaggcggtatcatcatgcctacttttcagatacatatgagcctcagggggaaaacaaaaagaaaaacttctgaagtgttttgtcatttgcagaaatttcatcaaatttcactctcccttatgagaaaagatcatgaaaaaaaattttttttgagacagggtcatactctatcacccagggtggagtgctgtggtgcaatctcggcttactgcgacctctgcctcctagacttgagagatcctcccacctaagcctcctgagtagctaggagtacaggtgctcaccactggctaatttttgttttttgtagagactgagttttgccatgttgcccagactggtctcaaactcctgagctcaagtgatcctgcctcagctgcccaaactgcggagattacaggtatgagccaagcacctggccaaaatgtttttttaaaataatgtatcatataatgactatctttatatgcagtactgaaggaccaagagatgccgacatttatttgtatttytaaagtagaaaaatattgcctattttgctgtctcttgtgattggcatagttacaaataccctagaatcacaccataaccaacaatatgaactgccatggatgctacattttctggggtgaagaaaaataaagtagtaaacttttctgctgagatatttgatcaaacatcccagcttttcatcaaaagctagaatatatttggtaaagtgtcactatttgacagatactctaaggcaattaagccaattctagacatgttcagttgcaggttagcataagacagcataaagattaacagtcaaatatatggatttctttttttagagaaaatgagaaaacagatggcaataaaacaggcaattagaccaaacagtcaagacttaacttctaattctataggatatctttcatgttaaaggttcaaagtgttaattaactaattaattcctcaacacctctgccaattagtcagcatctcagggctttgaaagcacttttatctcatggattaaatactgtaccatcttaattcatatt

SEQ ID NO: 680089 - DNA, 1492 bp, Homo sapiens
tacaaacattttacctggacagtgacaagtggaaatcctgtaattgacactaaacgtatactatacctacatacatacctacatacatacatttatttatctaaacatctgttaccaactcaaagcacatttactggtgttaacagaaaacagcaaattaaaatgctatcccaatgtgtaataccaccacttgacaattccaaaaccctgctcccacagtcttctctactggcctcccaccaatgacttatcagatgtgatgttgcctcttactttcttggcggaggaggtcaagcagacacaagccctggccccaaaagcaggatgctgtgcagctaagatgaacaacagggcaaagaggccaacaaaagagtcacctgatcttcagactgaagcaacctgattgcctcaaacttactggatgtatttttgcctcctctctaacttttttcactatacagggggaaagtcatattcaggttccaatttacgtgtattctgctctgtaagctccaagagcaacttaaagttatttgtgtttacttttcctgtttaagcataattactgtaagaggtgcttcataagggattctatttttagaatgctctcaatttttaattttaatcaaacttcattttaaacaccaacaactgcactctttctgctttcaatctgcatgaaattaggtagcaaacttaatttcttcttttattcagctaagctagagtaaatcacaaccctaatttttttcaaagaggccccttttaaaagtatgtttacactgattgataatctgtttctagatgaaagatctaaagttaataaagtgtcctccactccaaaagtagataactagggaatcagtcaacaaaatatatatgaattacagaggaaggcacctgttgctagggtatgtttactacttaaaaggattccccccactctggttcctcctcccttcccgcagtctagtccagacacatgatgaaacattatgcagccatttcagatgttttaaagagtcttaacacatggaaatattttgatgaaaagagaaaaataaaaataagtaaaagtaaagagacagtataagatcaacaatacccaataaacaaacagaatggaatacaccaaarcgctaacagaatgggttctgtgtcatagctagattgttgtttttccctcttcccaaacttccacatttttgatgttggatattgtcaggtccagggtcaggatccagcccatgctgaggtccgaaggcaatgggtggatgagtggcagacaggtaaaagaacactcagggggccacaggcaggtacaagatatttttattcagcagttgtcttagactgtctctgtctccactaactgctcccgccgctcccacacacagctgcatggccagctctctcttcagggtcagcaacttaactccttccctctgggcacaagcaaacagagctgtgtcctggctccccacagtctgtc

SEQ ID NO: 680090 - DNA, 1117 bp, Homo sapiens
attatgtatatacacacacagacacacacacatatatatattttaaccccctgcccccacttacaattttggtttcttccaccttcaacattactctaaggctattaatgctttttgtaggaaaaaatttaaatttattctcttctcacatttagatcattacctaagcaatatcagtgttcatatagattgttaatataatcttaatttacatttttcmcacttcataaataaattgggattgtttgtataccccatgttaaagctgtgatttactatgatatttctataaactatgtagctatattttttaaataaaacacatggcttaccatagttcctttattcaaggacaccaataattttaagatataccatcaatttaataatagctttatagggagcaaaacagtaagtacttcttcaaatgatcacagcaaccgtaagatacatctcaattttgaaagtgtcaaaatgaaaaaaaagagactctaatcaaggacatacattaattatcttatttagagagaggatgcagaagaagtgttagactgtataatatggagtcagccttcttgggttcaaatttgactccttctcttattgggtgatcttaggcaactcaacctatgcctcatttttctcttcgggaaaagaagaccatgagaccatctgcgacataagattgttgttaccaggtctaaatgagttactgttcttaaagtacttcaaacaacctgatatgataaatgttatattaggatttgttaaatattaatagttatcatcattttcagcaccaccacctaccagggcttaccgaagcatttgctatatttggaggtgaatgatttccaattcaacaccagtaaaatattttgattcaaaaaaaatttactagcaactgaatgagtacttatatcaagtttttagaggaaaaggagagaaaaggtaaaataattgtaaaaccatgatgctgctttctggaaggcaagttagagaagcactttctaaccaggggtcttgtggcacaggcttcagaacatccacaagccctctgaaatgagatgcaaaattatgtctgaatgtgcatttcttttgctgtgctatcttttga

SEQ ID NO: 680091 - DNA, 591 bp, Homo sapiens
tatrtacatatacacatatacatatatatatatatacataaacacatatacatatatatataacacagtgaaacccccgtctctactaaaaatacaaagaattagctgggcgtggtggcgggcacctgtagtcccagctactcgggaggctgaggcaggagaatggcgtgagcccgggaggcagagcttgcagtgaaccgagatcacgccactgcactgcagcctgggagacacagcaagactccatctcaaaaaaataaaaaaaaagttaaagagcactacagattcaatgatttattattcttttctacaaattgtgtttaaatgatatctctttctctttttgtccttatagctcaagccataaaagccaaaggtccggtgacgatcccgtaccctcttttctagtctcatgttgaagatctttatgtagaaggacttcctgaaggaattccttttagaaggccatctacttacggaattcctcgcctggagaggatattacttgcaaaggaaaggattcgttttgtgattaagaagtaagactcttggattcctgttgaactcttgtctcttttctgagtaatacgt

SEQ ID NO: 680092 - DNA, 591 bp, Homo sapiens
tatgtacatatacacatatacatatatatatatatacataaacacatatacatatatatataacacagtgaaacccccgtctctactaaaaatacaaaraattagctgggcgtggtggcgggcacctgtagtcccagctactcgggaggctgaggcaggagaatggcgtgagcccgggaggcagagcttgcagtgaaccgagatcacgccactgcactgcagcctgggagacacagcaagactccatctcaaaaaaataaaaaaaaagttaaagagcactacagattcaatgatttattattcttttctacaaattgtgtttaaatgatatctctttctctttttgtccttatagctcaagccataaaagccaaaggtccggtgacgatcccgtaccctcttttctagtctcatgttgaagatctttatgtagaaggacttcctgaaggaattccttttagaaggccatctacttacggaattcctcgcctggagaggatattacttgcaaaggaaaggattcgttttgtgattaagaagtaagactcttggattcctgttgaactcttgtctcttttctgagtaatacgt

SEQ ID NO: 680093 - DNA, 591 bp, Homo sapiens
tatgtacatatacacatatacatatatatatatatacataaacacatatacatatatatataacacagtgaaacccccgtctctactaaaaatacaaagaattagctgggcgtggtggcgggcacctgtagtcccagctactcgggaggctgaggcaggagaatggcgtgagcccgggaggcagagcttgcagtgaaccgagatcacrccactgcactgcagcctgggagacacagcaagactccatctcaaaaaaataaaaaaaaagttaaagagcactacagattcaatgatttattattcttttctacaaattgtgtttaaatgatatctctttctctttttgtccttatagctcaagccataaaagccaaaggtccggtgacgatcccgtaccctcttttctagtctcatgttgaagatctttatgtagaaggacttcctgaaggaattccttttagaaggccatctacttacggaattcctcgcctggagaggatattacttgcaaaggaaaggattcgttttgtgattaagaagtaagactcttggattcctgttgaactcttgtctcttttctgagtaatacgt

SEQ ID NO: 680094 - DNA, 591 bp, Homo sapiens
tatgtacatatacacatatacatatatatatatatacataaacacatatacatatatatataacacagtgaaacccccgtctctactaaaaatacaaagaattagctgggcgtggtggcgggcacctgtagtcccagctactcgggaggctgaggcaggagaatggcgtgagcccgggaggcagagcttgcagtgaaccgagatcacgccactgcactgcagcctgggagacacagcaagactccatctcaaaaaaataaaaaaaaagttaaagagcactacagattcaatgatttattattcttttctacaaattgtgtttaaatgatatctctttctctttttgtccttatagctcaagccataaaagccaaaggtccggtgacgatcccgtaccctcttttcyagtctcatgttgaagatctttatgtagaaggacttcctgaaggaattccttttagaaggccatctacttacggaattcctcgcctggagaggatattacttgcaaaggaaaggattcgttttgtgattaagaagtaagactcttggattcctgttgaactcttgtctcttttctgagtaatacgt

SEQ ID NO: 680095 - DNA, 622 bp, Homo sapiens
tctttgtccatttagtgttgctataacagaataccagaggctgartaatttataaaggaaagaggtctatttagctcatggttctgaaggctgaaaagtacaagaagcaaggcactgacacctgcttggcatctggcaagggcttttcatggtgagtcaaacatggcagaaaacgtcaaagaggaagtggacatatgtgaagaggcaaaacctgagtggtgtccgggctgtttaacaatcaactcatgcagaaatattcctgcaagaaataatccagtattcagatattgagtctcccaacaccagcttggtgttgtttctcaagtcatttactgctgaggaacaacaccaagcccttcatgagggacccacctccatgatccaaacacctcccactaggccccacttcccaacaccaaccacactggggatcacatttcaacatgagttttggtgggaacaaattcaaaccacagcaggaaagtatgaacaaaaagtatgcttttatctgcagtactttggacttcattcagtatatttgcactcatgcgtgcacagacacgtacacacacaatgtgttggtaagattggtatgataatggctttctcgatgcattgttaa

SEQ ID NO: 680096 - DNA, 622 bp, Homo sapiens
tctttgtccatttagtgttgctataacagaataccagaggctgagtaatttataaaggaaagaggtctatttagctcatggttctgaaggctgaaaagtacaagaagcaaggcactgacacctgcttggcatctggcragggcttttcatggtgagtcaaacatggcagaaaacgtcaaagaggaagtggacatatgtgaagaggcaaaacctgagtggtgtccgggctgtttaacaatcaactcatgcagaaatattcctgcaagaaataatccagtattcagatattgagtctcccaacaccagcttggtgttgtttctcaagtcatttactgctgaggaacaacaccaagcccttcatgagggacccacctccatgatccaaacacctcccactaggccccacttcccaacaccaaccacactggggatcacatttcaacatgagttttggtgggaacaaattcaaaccacagcaggaaagtatgaacaaaaagtatgcttttatctgcagtactttggacttcattcagtatatttgcactcatgcgtgcacagacacgtacacacacaatgtgttggtaagattggtatgataatggctttctcgatgcattgttaa

SEQ ID NO: 680097 - DNA, 622 bp, Homo sapiens
tctttgtccatttagtgttgctataacagaataccagaggctgagtaatttataaaggaaagaggtctatttagctcatggttctgaaggctgaaaagtacaagaagcaaggcactgacacctgcttggcatctggcaagggcttttcatggtgagtcaaacatggcagaaaacgtcaaagaggaagtggacatatgtgaagaggcaaaacctgagtggtgtccgggctgtttaacaatcaactcatgcagaaatattcctgcaagaaataatccagtattcagakattgagtctcccaacaccagcttggtgttgtttctcaagtcatttactgctgaggaacaacaccaagcccttcatgagggacccacctccatgatccaaacacctcccactaggccccacttcccaacaccaaccacactggggatcacatttcaacatgagttttggtgggaacaaattcaaaccacagcaggaaagtatgaacaaaaagtatgcttttatctgcagtactttggacttcattcagtatatttgcactcatgcgtgcacagacacgtacacacacaatgtgttggtaagattggtatgataatggctttctcgatgcattgttaa

SEQ ID NO: 680098 - DNA, 580 bp, Homo sapiens
aggctggtcattggccatgatccgaaggaaagtagttcagtgtggtaaaaagaccatggcttttccaaatatctgtctcctcttcttgagggtgatccccatragcataacagagaagctgttgaacataagcacaggttgatacaaaaagaaactttggagaaaattagataattttttcactgcaggagtttcttagataagaattagtaaagcatttgtagggcatgttttggaaagaccagggaaaagccttacaagtatcaaccaaatcgaaagggtacttgtggttggtggatacgtgggcttaattagccatggctttctggtcctgctgcttcttctgtctcctgtggctgctaacgctgggtgaaattactcacatttgcagacacttctgtgatcacatattcactcactcaaccaatatggcaagtgctgatttagtgggccagaacagaaattaaagagctaatgtctgctttagtagcgcttctgtagtatttcttttttccttcctgtaatcatttaacacattttatgatagtaaattgcatgctatatctggctctggctttca

SEQ ID NO: 680099 - DNA, 580 bp, Homo sapiens
aggctggtcattggccatgatccgaaggaaagtagttcagtgtggtaaaaagaccatggcttttccaaatatctgtctcctcttcttgagggtgatccccatgagcataacagagaagctgttgarcataagcacaggttgatacaaaaagaaactttggagaaaattagataattttttcactgcaggagtttcttagataagaattagtaaagcatttgtagggcatgttttggaaagaccagggaaaagccttacaagtatcaaccaaatcgaaagggtacttgtggttggtggatacgtgggcttaattagccatggctttctggtcctgctgcttcttctgtctcctgtggctgctaacgctgggtgaaattactcacatttgcagacacttctgtgatcacatattcactcactcaaccaatatggcaagtgctgatttagtgggccagaacagaaattaaagagctaatgtctgctttagtagcgcttctgtagtatttcttttttccttcctgtaatcatttaacacattttatgatagtaaattgcatgctatatctggctctggctttca

SEQ ID NO: 680100 - DNA, 2135 bp, Homo sapiens
acttctttagctctcacatttgagtgagaacatgccatgtttgtctttctgggcctggcttatttcgcttaacataatgatctccagttgcatgcgtgtttctgtaagtgacaggatttcatattttttatggctgggtaatattttattgtgcatatatactatatttgctttatccatttatctgttgatagacacttagtttgattccatatcctggctattgcggatagtgctgcaataaatatgggagtccagatctctcttctatatgctgatttccttcttttttggatatataaccagtagtgggattgctggatcatgttgtagttttatttttagttgtagctttttgataaacctccatactgttttctgtaatgcctatactactttaccttcccaccagcagcgtacaagcattcctccttttttcgcatcctcattagcatttgttattttttgtctttttgataatagccattctaactggggtgagatgacatctctgggatggcatttcaagcatgggaatttccccagctttggctagaaagagggtcatcttatttataataaaccactggctcatgtttctttatgaataatacagaagtttcaccaccccataaatttcatctaattatttctagtagttcctagggatagcccatgcaaattcataaactgttgtctcattttcttctactctgttgctgagctctgtcccctcacaggcacttgaaaatgatactccactgctacaactggtgggactcaacatgtccagagattggttgtctctggatgctggcaaggagatagagctacacttcattagctggagttctcaccacactggagacacatagggatccctaagaacctcttccccactctaggtaatagcttgaataagcagccatgccaccaggtcccacactagtgcctctgtccttcacctgcaccccttctcagtgcagttcagacaggcacccaaagtacttcttgggagacaggagccataaatgaatgagatagcttgctgttatcttcaccctaattccccaatcctccaagcacttttgaccttcctctgagccaaaaccaatcatgaagcccctagtcatcaaatgtgctcaaggcctgaatgaatctcaggagtgccttgtgtgatttttgatagtgctatagtctgtctactctcttgagaatgtgggaggaggagacctaaagtttgattaaatgaaatcagaggtaacctggctctatatacaaatttatatgttctctagaagagatattcacatcaaatatggcaagcaagttatttgatataccagagagatattgccaatcagtaatggaaattacatattaattaaaaaagtatatatcctttggaaaacattttcaaaagctaagaattgtttcaaattgtggttgttagggtacattcaatgcttcagatattaagaacattgaaatagttgacagaagttgttgcagccttaagagcactcagagttgtaaaataaagtgaaaaccagtccactttaattggtcacttcatctgtatcaataaagtatgaagcaaaaatccctctgaccagtttaaatatgaaacttgatctggtcatttgactctattatctgagatggtaaaaaagcccattcagttttactctgaactaccatttctgaaatggcctcacaaggacagaataatatgacatttctaaagccaatctaaatcatttcatgaggcatgaaggagctaccacaaagtctaagaatctctttggaaaagccagcattcacctatggaggaaacraagaagcataaattaaaaagtggtcattcaaagttccatatgcctgtcatggtggactttctaatctgtgtttagcacctttcagtgatgaaagtttatgtttatcttcattttacatgaaataatctttgagtgttttctttggtaagaatacatttaaaaacactttattgaagtatgaatgacatgtgaaagctgtacatatttaatatatacaactcgagaagtatggtcataaatatatagccatgaaaccaccactacatcaaggacataaacacacgcatcacctcccaa

SEQ ID NO: 680101 - DNA, 2135 bp, Homo sapiens
acttctttagctctcacatttgagtgagaacatgccatgtttgtctttctgggcctggcttatttcgcttaacataatgatctccagttgcatgcgtgtttctgtaagtgacaggatttcatattttttatggctgggtaatattttattgtgcatatatactatatttgctttatccatttatctgttgatagacacttagtttgattccatatcctggctattgcggatagtgctgcaataaatatgggagtccagatctctcttctatatgctgatttccttcttttttggatatataaccagtagtgggattgctggatcatgttgtagttttatttttagttgtagctttttgataaacctccatactgttttctgtaatgcctatactactttaccttcccaccagcagcgtacaagcattcctccttttttcgcatcctcattagcatttgttattttttgtctttttgataatagccattctaactggggtgagatgacatctctgggatggcatttcaagcatgggaatttccccagctttggctagaaagagggtcatcttatttataataaaccactggctcatgtttctttatgaataatacagaagtttcaccaccccataaatttcatctaattatttctagtagttcctagggatagcccatgcaaattcataaactgttgtctcattttcttctactctgttgctgagctctgtcccctcacaggcacttgaaaatgatactccactgctacaactggtgggactcaacatgtccagagattggttgtctctggatgctggcaaggagatagagctacacttcattagctggagttctcaccacactggagacacatagggatccctaagaacctcttccccactctaggtaatagcttgaataagcagccatgccaccaggtcccacactagtgcctctgtccttcacctgcaccccttctcagtgcagttcagacaggcacccaaagtacttcttgggagacaggagccataaatgaatgagatagcttgctgttatcttcaccctaattccccaatcctccaagcacttttgaccttcctctgagccaaaaccaatcatgaagcccctagtcatcaaatgtgctcaaggcctgaatgaatctcaggagtgccttgtgtgatttttgatagtgctatagtctgtctactctcttgagaatgtgggaggaggagacctaaagtttgattaaatgaaatcagaggtaacctggctctatatacaaatttatatgttctctagaagagatattcacatcaaatatggcaagcaagttatttgatataccagagagatattgccaatcagtaatggaaattacatattaattaaaaaagtatatatcctttggaaaacattttcaaaagctaagaattgtttcaaattgtggttgttagggtacattcaatgcttcagatattaagaacattgaaatagttgacagaagttgttgcagccttaagagcactcagagttgtaaaataaagtgaaaaccagtccactttaattggtcacttcatctgtatcaataaagtatgaagcaaaaatccctctgaccagtttaaatatgaaacttgatctggtcatttgactctattatctgagatggtaaaaaagcccattcagttttactctgaactaccatttctgaaatggcctcacaaggacagaataatatgacatttctaaagccaatctaaatcatttcatgaggcatgaaggagctaccacaaagtctaagaatctctttggaaaagccagcattcacctatggaggaaacgaagaagcataaattaaaaagtggtcattcaaagttccatatgcctgtcatggtggactttctaatctgtgtttagcacctttcagtgatgaaagtttatgtttatcttcattttacatgaaataatctttgagtgttttctttggtaagaatacatttaaaaacactttattgaagtatgaatgacatgtgaaagctgtacatatttaatatatacaactcgagaagtwtggtcataaatatatagccatgaaaccaccactacatcaaggacataaacacacgcatcacctcccaa

SEQ ID NO: 680102 - DNA, 594 bp, Homo sapiens
gctgtccgcagcccacttcctaatcagatcgagagctgggtgggaasgcggacagatggagggaggcagggctccaggcctggtggccccgggagcgggtgagtggccggccccgcagtgagacccccgctctgccccttctaggatgcggccaagcccctggaggtgctgttgctggagaagaaccgctcgctgcagtccgagaacgccgcgctgcgcatctccaacagcgacctgagcggtaggttggccgggcttcgcgcgtgtgcggtggttggttcgcttccaggggtcggtcgaggacgaggaaggtgaatcgtgagtctggacagatgcatggccagagaagcgccggttgacgagaacctttgactaacgcgtgttgggtgccctcctcctcaccgctcctcccttcccttccccgccctgcttaaagctggatgtcgagacgggccagccgcacaggctctgcggaggtcagttaggggcagtgcggctggaatccccgggagggacagctcggaggacgtcggcctttctgatctgtgtctggttgtgctgcacagaggccaggggcagtgtgaacccagcctc

SEQ ID NO: 680103 - DNA, 951 bp, Homo sapiens
gaaaacaagagcaaagacagtctcagtaaaaattactaacgcctggccgggtgcagtggctcacgcttgtaatcccagcactttgggaggctgaggcaggcggatcatgaggtcaggagattgagaccatcctggctaacacggtgaaaccccgtctctactaaaaatacaaaaacttagccgagcgtggtgacgggcgactgtggtcccagctactcgggaggctgaggcaggagaatggcgtgaacccgggaggcggagtttgcagtgagccgagattgcgccactgcacyccagcctgggagacagaccgagactcggtctcaaaaaaaaaaaaaaaaaatttactaaagacttattttatccaggcaacaaactcttggcaaatctccatgccttctctctctaccttgtctctgtctctctctctacctcgtctctgtctctctcttgtagaattaagattcacaatgataggccattcatttaaattttgaaatgataggcagtaagtctgatttagctgattggtttgacaggagagactggcttctccagtaacgtatttgtacagtggacttactccataaagtgagcgagctaaacctgcagctccaaggatttgataaaaataaaattaggccagccactgtgcctaaagccagtaatcccagcactttgggaggctgaagggggaggatcacttgaggctagaaatccagatcagcctgggcaacatggtgagactgccaccccctcccccaactccatctctacaaaaaaatgaaaaataagctgggcacagtgctgtgtgcctgtagttttactacttgggaggctgaggcaggaggatctcttgagcccaggagtttgaggcttcagtaagcgatgatcaagccgctgcactccagcctgggccacagacagaaagaccttgtcccaaaaaataaa

SEQ ID NO: 680104 - DNA, 951 bp, Homo sapiens
gaaaacaagagcaaagacagtctcagtaaaaattactaacgcctggccgggtgcagtggctcacgcttgtaatcccagcactttgggaggctgaggcaggcggatcatgaggtcaggagattgagaccatcctggctaacacggtgaaaccccgtctctactaaaaatacaaaaacttagccgagcgtggtgacgggcgactgtggtcccagctactcgggaggctgaggcaggagaatggcgtgaacccgggaggcggagtttgcagtgagccgagattgcgccactgcaccccagcctgggagacagaccgagactcggtctcaaaaaaaaaaaaaaaaaatttactaaagacttattttatccaggcaacaaactcttggcaaatctccatgccttctctctctaccttgtctcygtctctctctctacctcgtctctgtctctctcttgtagaattaagattcacaatgataggccattcatttaaattttgaaatgataggcagtaagtctgatttagctgattggtttgacaggagagactggcttctccagtaacgtatttgtacagtggacttactccataaagtgagcgagctaaacctgcagctccaaggatttgataaaaataaaattaggccagccactgtgcctaaagccagtaatcccagcactttgggaggctgaagggggaggatcacttgaggctagaaatccagatcagcctgggcaacatggtgagactgccaccccctcccccaactccatctctacaaaaaaatgaaaaataagctgggcacagtgctgtgtgcctgtagttttactacttgggaggctgaggcaggaggatctcttgagcccaggagtttgaggcttcagtaagcgatgatcaagccgctgcactccagcctgggccacagacagaaagaccttgtcccaaaaaataaa

SEQ ID NO: 680105 - DNA, 1715 bp, Homo sapiens
aacttctagtttaaagaatgtaccattgtcttgctctgctagtacaacaactaatcaccacaatgtagggataagtaaaaagtcaagtactgcatcaaactacaaaatgatcctcaatgtttcttttcaaatgcctttctaaacattctgacttatcgtttggcaggctagaagcagcagccctgccaggggttagtcttgccctcgcccacttgtgtctcagtgaatcttagagaatgtccttttgctcaaaggatatcaaaggaaaggatcaagccctcggtattactgtgaaatgtcatttgcacaccactttatgtgttagtagaatgcaagaatgtgaagttcaacaaatggagccttctatgaggaatgcgatcaatgagattccaggccctcacttacgcacacatgttttcagttgctagtgatttattttgctgatcctttcaatttgtcaaccatgtgagaatagattctcagtcttcaggattctaataccaatcacatggctaaaattagaactcctgagtttgtgctaagtgcctttaatctgtatgactctggaaaataaaagggatctgagagcattagggagaggtacagagacctcctcactgattagattgtctccatctaatcatttatggttcctgcttccagaaattagagtagctgatcacttatttatccttcctctaattctgccacttgggtggagatccaagtcactcttaatttgtcttattttagcaacatataatctagctaatttgctccttaagaattaagttccaagtcaaacgtttccctttaagcctagatcttgttatgtccaaacagccaggaaagtttggggagggaaaggaaatctatcaaataactggatgattcatctcagagagcacaatatctaagcaggtggaaacrctgcatgaatcagaagcactaatctgtgtgctaatggaccatttatttgcatttcattttccttggggaaaaaaaaagtcccatgtcaatctttctaattttgagtgcaatatgcatatctattgatatttaaagaaaagaactgcacacatactggtattcatatcactaagctgcataattggtttctgttttgaaatacaaaggtatcaactaaatgactcacacaaggtatttccaaacactcatttgataaaatgattaacacactgaaaatattcaaggtttttaataaactggtggatttttgctaaacattaaatgacaagaggagtccaaaagttcaaattgtataaaatccagaggtaccttattccaagagaataaccaggcagaactgcccacatagcaaatccttagttgttggggtccagctgtatgaatcaacaccgtactggccccagctgtcatttggtgccacttatactggtgccactaacctagtggtctgatctgacctaaatatcaacaggaaaattctggcttccatggctccctgggacttccaggactcaagcagcagttccaagaatctcctcattggctggttctcaattcacatgtgtgattggggagactgaggaagaaaaatactgtatctacaagtctttccttttttctgccatttcccaaaattgagtttcctgctttatccaccctgatttgagaatgcaagctggacagaaaatgaaagtcaataaccaattacaaaatatcctgattca

SEQ ID NO: 680106 - DNA, 1668 bp, Homo sapiens
tcgctgtccagggtcacttcaagtctctgctccacacattccagcccacttcaagtctctgctccacacattccagcccagcatacctcaggtgcaccagctgcggctcaaatggaaccaggtatagctcaggccaccactctgaagccacagatagtaaaccgtggcagcgtccatttggtgctaactccgcacttgaataaaagatatagttggcactttgtgtttcaaatttcacactctttccactacagtatgttgctgcttcaagatgaagcaccccaaaatatgaattagttcaactaactcttttatgaaaccacaagaagaataccaataagctggcttttgacataggcttttgaccctcgcatctttacttctttggtctctgcggctgctctgacttctattttaatcagcacatgtagcactggctgtgacatggactctgggacctgcctctccctcaactatctgtgagcttgtctaaagccacatgttgaaatgtcatctttataaaatttgttcataagaaaaaaaagtaaaagaccaccaagacctcaatagataaatgtacaaacagcataactttctaaagagaagcttcaactaattaacaaatatatggaaaactgttcagtgtcgctagtaattacgaaattcaaattaaagataccattgcccatccaccaaccatatttcacttccagggatttggtttattcacttcaagtgaagtataatttagaatattaattttagaaagtttttagctaattttcatcaggaaattctactaataattaaactggaatctctcctaagaaaataatcctatatataaaaattaagtgcatgcacacagatgtttgtcatgcaattatttatattatcatgaaactgaaaacaactcaaagttttggtaatagctaataggggaataacttaaaccattggatgttaactggaaatagtttacactcataaaattatatgaattgtgtaaaaattttaaaaatacttataaaactaagtggaaaaaatgctcatagaattcttagttatatctatataaaataaacaataaaaaccatctataggataaatattataattaaacacatcacagagttaattgtagctacctgtactttttgtagtatcataattaatcacacttttwaaaaaaaactaaaataaggtttactttttatttatcctatatagaaaggatttatcctatatagaaaggacatacaggataaatatttgatttagaaaggatataaaggataaaatttgatttgatttatcctatgtagatttttatttatctgttcctttttaatactaatatttatacacaatctttaccagctttatcaatgagttattaaatgttcatcccacatcctgtttttatgtttgcttttcgaattcattcagaaattagaaatctagacagctttaatcttataatgagctactgatgctagtatatttgggattttgtatgttcagactatttttgccttaaaagtaatggcaaaaattgcaattattttacaccaatattgaccccataatgtacatcccaacttatgtataacttgccttgtgggtaatgccatagaagtttgtaacaaacaatataaaggctgggtg

SEQ ID NO: 680107 - DNA, 1668 bp, Homo sapiens
tcgctgtccagggtcacttcaagtctctgctccacacattccagcccacttcaagtctctgctccacacattccagcccagcatacctcaggtgcaccagctgcggctcaaatggaaccaggtatagctcaggccaccactctgaagccacagatagtaaaccgtggcagcgtccatttggtgctaactccgcacttgaataaaagatatagttggcactttgtgtttcaaatttcacactctttccactacagtatgttgctgcttcaagatgaagcaccccaaaatatgaattagttcaactaactcttttatgaaaccacaagaagaataccaataagctggcttttgacataggcttttgaccctcgcatctttacttctttggtctctgcggctgctctgacttctattttaatcagcacatgtagcactggctgtgacatggactctgggacctgcctctccctcaactatctgtgagcttgtctaaagccacatgttgaaatgtcatctttataaaatttgttcataagaaaaaaaagtaaaagaccaccaagacctcaatagataaatgtacaaacagcataactttctaaagagaagcttcaactaattaacaaatatatggaaaactgttcagtgtcgctagtaattacgaaattcaaattaaagataccattgcccatccaccaaccatatttcacttccagggatttggtttattcacttcaagtgaagtataatttagaatattaattttagaaagtttttagctaattttcatcaggaaattctactaataattaaactggaatctctcctaagaaaataatcctatatataaaaattaagtgcatgcacacagatgtttgtcatgcaattatttatattatcatgaaactgaaaacaactcaaagttttggtaatagctaataggggaataacttaaaccattggatgttaactggaaatagtttacactcataaaattatatgaattgtgtaaaaattttaaaaatacttataaaactaagtggaaaaaatgctcatagaattcttagttatatctatataaaataaacaataaaaaccatctataggataaatattataattaaacacatcacagagttaattgtagctacctgtactttttgtagtatcataattaatcacactttttaaaaaaaactaaaataaggtttactttttatttatcctatatagaaaggatttatcctatatagaaaggacatacaggataaatatttgatttagaaaggatataaaggataaaatttgatttgatttatcctatgtagatttttatttatctgttcctttttaatactaatatttatacacaatctttaccagctttatcaatgagttattaaatgttcatcccacatcctgtttttatgtttgcttttcgaattcattcagaaattagaaatctagacagctttartcttataatgagctactgatgctagtatatttgggattttgtatgttcagactatttttgccttaaaagtaatggcaaaaattgcaattattttacaccaatattgaccccataatgtacatcccaacttatgtataacttgccttgtgggtaatgccatagaagtttgtaacaaacaatataaaggctgggtg

SEQ ID NO: 680108 - DNA, 1668 bp, Homo sapiens
tcgctgtccagggtcacttcaagtctctgctccacacattccagcccacttcaagtctctgctccacacattccagcccagcatacctcaggtgcaccagctgcggctcaaatggaaccaggtatagctcaggccaccactctgaagccacagatagtaaaccgtggcagcgtccatttggtgctaactccgcacttgaataaaagatatagttggcactttgtgtttcaaatttcacactctttccactacagtatgttgctgcttcaagatgaagcaccccaaaatatgaattagttcaactaactcttttatgaaaccacaagaagaataccaataagctggcttttgacataggcttttgaccctcgcatctttacttctttggtctctgcggctgctctgacttctattttaatcagcacatgtagcactggctgtgacatggactctgggacctgcctctccctcaactatctgtgagcttgtctaaagccacatgttgaaatgtcatctttataaaatttgttcataagaaaaaaaagtaaaagaccaccaagacctcaatagataaatgtacaaacagcataactttctaaagagaagcttcaactaattaacaaatatatggaaaactgttcagtgtcgctagtaattacgaaattcaaattaaagataccattgcccatccaccaaccatatttcacttccagggatttggtttattcacttcaagtgaagtataatttagaatattaattttagaaagtttttagctaattttcatcaggaaattctactaataattaaactggaatctctcctaagaaaataatcctatatataaaaattaagtgcatgcacacagatgtttgtcatgcaattatttatattatcatgaaactgaaaacaactcaaagttttggtaatagctaataggggaataacttaaaccattggatgttaactggaaatagtttacactcataaaattatatgaattgtgtaaaaattttaaaaatacttataaaactaagtggaaaaaatgctcatagaattcttagttatatctatataaaataaacaataaaaaccatctataggataaatattataattaaacacatcacagagttaattgtagctacctgtactttttgtagtatcataattaatcacactttttaaaaaaaactaaaataaggtttactttttatttatcctatatagaaaggatttatcctatatagaaaggacatacaggataaatatttgatttagaaaggatataaaggataaaatttgatttgatttatcctatgtagatttttatttatctgttcctttttaatactaatatttatacacaatctttaccagctttatcaatgagttattaaatgttcatcccacatcctgtttttatgtttgcttttcgaattcattcagaaattagaaatctagacagctttaatcttataatgagctactgatgctagtatatttgggattttgtatgttcagactatttttgccttaaaagtaatggcaaaaattgcaattattttacaccaatattgaccccataatgtacatcccaacttatgtatracttgccttgtgggtaatgccatagaagtttgtaacaaacaatataaaggctgggtg

SEQ ID NO: 680109 - DNA, 1246 bp, Homo sapiens
gacagtactatcggcaactcattttatagatgaggaaattgaagcacagggttaagtcattccaccaagtcacacagcctaatgaacagcaaagccagaattgaacccggctaaccctgcttcagagtctatgctcttcggcatcacactgcaccaggctttctttccccctgctggtaaaaggcaacaggtccaaaacttcatatgccagcatcactgtcttcctctcttggggagtaggggaggtggggggaagtgcagcggcagcagctggaaggaggcagcagttggaagcaggcagcagccaggttaccagcttcactcaagaaaacaggcaattgcctgcggcctgatttctatgagcctaagaacacccatcaggatgcgccagcctcttcttcacccgaaggctcagaaaagtgggtgaccatgttgtgccacacagcctagtggatgaatgagggggaggcaggaggtccgaggccctcgctccccctcccccggactctgtttgctcacctggagcccgacgctgtctgcctgaccgcctttgatgaggtgggagatgaagagcccacagccaaactccaggccaccacgcacactcaggccgaggccttcggggtgcagacggtccagacgcacctccttcagcttcctgccacacaggagaggtcggtgatggtgcagcttggctgccagcactgccccgcccagggtgatctctccaccccctgcctccagcctggtggcttcctctgcacctggagcgccggggggtcagctgatcatattccacctggtgcttcagtgggatcagcggccgaatggcatcaaacagaggcagacggctgggttcattgatgaccagcttcaggtctcccacgagcacggccacgtccatggtcctgtggagatgccggraatgcctggagcctcacccctggccatgacctcaggcacccagggattccaagaggaagccatttcagccactgggcccaggcttaggaatggagtagaccactcctgaaaagcccagagctcttcacaccgggccagtgcctgagaagactttgttctcttatataaatatccccaggaaaccagtctactagggattgttgactcattttgcagatgagatgaagccaggatttcaaactcagcgctgcctatctcggctgttgggatctttccagaggggaaagctctgtgtgagatgctgacaattcctcacacactc

SEQ ID NO: 680110 - DNA, 1201 bp, Homo sapiens
acaggccagccctcaccccagctgccccactcaccacagccctgaacccaccagtgacagccactgaggagccagtggtgtctccaggccccacccagaccaccctgcagcagccactggagctcactgcatctcaactccccgccggccccacggagtccccagccagcaagggagtgactgccagcctcctggccatcccccatacaccagagtcctcatccctccctgttgcactgcagacacccacacctggcatggtgtcaggtgccatggagacaacaagggtgactgtgatctttgcaggaagccctaacatcacagtctcctcccggtcgccccctgcccctcgcttcccgctcatgaccaaggctgtgacagtccgaggccatggctccttgcctgttaggacgacaccccyacagccctccttgacagcaagtccctcctccagacctgtggcttcccctggagccatctccaggtcccccacctcctcgggatcccacaaggctgtgctgacacctgcagtaactaaggtcataagcaggacaggggtcccccagcccacccaggcccagagtgcttcaagtcccagcacccctctaactgtggctggaacagcagcagaacaggttcctgtcagtccccttgcaaccaggagcttggagatagtgctatccacagagaagggcgaagccgggcacagccagcccatgggctcgcctgcctccccacagccacacccactcccctctgcaccaccccgcccagcccagcataccaccatggccaccaggtctccagctctgcccccagagaccccagctgccgccagcctgtcaacagccactgatgggctggcagccacacccttcatgtcccttgagtcaactcgtccctcccagctcctctctggcctgcctcccgacaccagcctgcccctggccaaggtgggcacatctgccccagtggccacacccggccccaaagcctctgtcatcaccactccactccagccacaggccacgactctgcctgctcagacacttagcccagtactgcctttcactccagcagcaatgacccaggcgcacccacccactcacatagcacccccagcagcaggcacagctccaggcctgctgctgggagccacattgccaacctctggagtcctgcctgtggctgagggcacggc

SEQ ID NO: 680111 - DNA, 606 bp, Homo sapiens
tgggggtctgctggatcagmcacgggtaggtgggcaggagcaattttaagggccccctggggcaggttggggggcagtcagtcccaggcacataattaggatgagtgacttcattttctaggtaagagatgccccatgctcttttattttaaaaaatgcagggcccggggccaggcacagtggctcatgcctgtaatcccagcactttgggaggtggagacgggcagatcacctgaggctgggagttcaagacctgcctgaccaacatagtgaaaccctgtctctaccaaaaatacaaaattagctgggcttggtggcgcatgcctgtagtcccagctactcgggaggctttgaggcaggagaattgcttgaacccaggaggcggaggctgcggggagctgagatcacgccatggcactccagcctgggcaacaagagcaaaactctgtctcaagaaaaaaaaaaaagcagggcccaccccttgcaggcatagaagcctgagtcaggtataacctattgcaaactgggtgctgagttgaagggtggttggataggagctggctggggcccaggcctgctggaccaactcagccctgaccatgctag

SEQ ID NO: 680112 - DNA, 606 bp, Homo sapiens
tgggggtctgctggatcagccacgggtaggtgggcaggagcaattttaagggccccctggggcaggttggggggcagtcagtcccaggcacataattaggatgagtgacttcattttctaggtaagagatgccccatgctcttttattttaaaaaatgcagggcccggggccaggcacagtggctcatgcctgtaatcccagcactttgggaggtggagacgggcagatcacctgaggctgggagttcaagacctgcctgaccaacatagtgaaaccctgtctctaccaaaaatacaaaattagctgggcttggtggygcatgcctgtagtcccagctactcgggaggctttgaggcaggagaattgcttgaacccaggaggcggaggctgcggggagctgagatcacgccatggcactccagcctgggcaacaagagcaaaactctgtctcaagaaaaaaaaaaaagcagggcccaccccttgcaggcatagaagcctgagtcaggtataacctattgcaaactgggtgctgagttgaagggtggttggataggagctggctggggcccaggcctgctggaccaactcagccctgaccatgctag

SEQ ID NO: 680113 - DNA, 606 bp, Homo sapiens
tgggggtctgctggatcagccacgggtaggtgggcaggagcaattttaagggccccctggggcaggttggggggcagtcagtcccaggcacataattaggatgagtgacttcattttctaggtaagagatgccccatgctcttttattttaaaaaatgcagggcccggggccaggcacagtggctcatgcctgtaatcccagcactttgggaggtggagacgggcagatcacctgaggctgggagttcaagacctgcctgaccaacatagtgaaaccctgtctctaccaaaaatacaaaattagctgggcttggtggcgcatgcctgtagtcccagctactcgggaggctttgaggcaggagaattgcttgaacccaggaggcggaggctgcggggagctgagatcacgccatggcactccagcctgggcaacaagagcaaaactctgtctcaagaaaaaaaaaaaagcagggcccaccccttgcaggcatagaagcctgagtcaggtataacctattgcaaactgggtsctgagttgaagggtggttggataggagctggctggggcccaggcctgctggaccaactcagccctgaccatgctag

SEQ ID NO: 680114 - DNA, 650 bp, Homo sapiens
tcccctcggctcatgaaacttacactttggcttgcgaaggggtactgggtgtacctcagcagtgatggttttaggcaagagtagctgttcctttgagccccagtcttcttcccattgcttcttaaacttctcttcctcctctacaatcctaaaatgagacccccatgcctgttactggagtcagaacccccayaggcccatctcctgcatatcggagagccccagccagcctggggagaagcctcatggttctagtcatgatgaatcaagcaaagtccccgagcttgtattctaaattgagtgtgaaccccaccttggcaattatacgagactatgtttcagttactataatatgacaggctttactacaaataaaggaggacccaccaggggatgagagaaccaggtaaactggttctggaggcagcctctggttggccacactcccctgagcacactgatgttcatgcacagacacgcgtggagccgaggtactcactgttccatctccttccggtatctctcattttcctctgctgccttctgggcaatttcttttctccttctgaaacacaaatgcagattggcatgtttggccctatgcaagagaaatgaactcttccttactgtgaattcttgatttggagaaa

SEQ ID NO: 680115 - DNA, 650 bp, Homo sapiens
tcccctcggctcatgaaacttacactttggcttgcgaaggggtactgggtgtacctcagcagtgatggttttaggcaagagtagctgttcctttgagccccagtcttcttcccattgcttcttaaacttctcttcctcctctacaatcctaaaatgagacccccatgcctgttactggagtcagaacccccataggcccatctcctgcatatcggagagccccagccagcctggggagaagcctcatggttctagycatgatgaatcaagcaaagtccccgagcttgtattctaaattgagtgtgaaccccaccttggcaattatacgagactatgtttcagttactataatatgacaggctttactacaaataaaggaggacccaccaggggatgagagaaccaggtaaactggttctggaggcagcctctggttggccacactcccctgagcacactgatgttcatgcacagacacgcgtggagccgaggtactcactgttccatctccttccggtatctctcattttcctctgctgccttctgggcaatttcttttctccttctgaaacacaaatgcagattggcatgtttggccctatgcaagagaaatgaactcttccttactgtgaattcttgatttggagaaa

SEQ ID NO: 680116 - DNA, 1106 bp, Homo sapiens
gattttagttgaagtggatagctacctaaccaaactttcttacacttatccttctatattttcatgaggcgactaatgccaaacctctctggtctgaactatttcttctaacactcaaatatagccctagagaggctgactttggaggcaacgtaaatagcactacagtctaccacaaaatagaatgtttctgctaccagtctggtctttttctgaccaatctgatttgttcagtgggtattccaactgggatctaaaaggtggagaaaggggtgggagatgcttttttccccctaattccagaagacagattcattttctgctcctgtgaaaaagagctgaagaaacaatgaactgccctggacaaatgtaattgtcttatgtaaacttatttttattttycaactgtcatgcattcgctacaataccttgctttagaaatttcctagagatctgttaaaggacaggactgtacagattaaaaaataaataaaagaaagaaaaggaaaggtaggttggggggagtcaatgtatgtttctttatttgtgatatattacaaaatcacttctcaactcggtgccaggacaatgcttggggcaaagggagagtttgttaggacaagactcttctgagtgctggtattcttttgtatggtagagaaagttcctttagttttaatgacgttgacaagaggtgggagaaaggcactcatgatttcccacaaaggtttcattgacaaaagtttataatttttgttcaaaagcacttcctaccaaacagcaagactttgaagtttattctttgttcagtcatgcttgttatggtttctttaagaagacagtgaccaaaaaaccctactacttttatagctagttctctgtacattaaaaaataaaaagaaaagaaaaatttaaaatacttttgcttaaaggaccacaagacaaatatcaaattctccctcaaggttttttgtattacacctttaattgctaaaacatagttaggtagttcatatatttccccactgtatacttagtttattccattttatgtgagtgattgtgtgtgtgggtgtgtgcgtgtgtgtgtgtgcatgagtgctatt

SEQ ID NO: 680117 - DNA, 383 bp, Homo sapiens
tttctttctttctttctttcyttctttctttctttctttctttctttctttctttctttctttctttttctttatttctctttctctctctctctctctttctctctttctttttgggagagtctcactgtcacccaggctggagtacagtggcacaatctcggctcactgcaatctctgcctctcgggttcaagcaattctcatgcctcaacttactgagtagctgaaataagaggtgcacgtcaacacacctggctaatttttgtattttcggtaaagatgttggggggcggtgtttcgggggtggtttacaccatgttggccaggttggtctcgaacccctggcctcaactgatctgcctgtgttgggctaccaaagtgt

SEQ ID NO: 680118 - DNA, 383 bp, Homo sapiens
tttctttctttctttctttctttctttstttctttctttctttctttctttctttctttctttctttttctttatttctctttctctctctctctctctttctctctttctttttgggagagtctcactgtcacccaggctggagtacagtggcacaatctcggctcactgcaatctctgcctctcgggttcaagcaattctcatgcctcaacttactgagtagctgaaataagaggtgcacgtcaacacacctggctaatttttgtattttcggtaaagatgttggggggcggtgtttcgggggtggtttacaccatgttggccaggttggtctcgaacccctggcctcaactgatctgcctgtgttgggctaccaaagtgt

SEQ ID NO: 680119 - DNA, 2585 bp, Homo sapiens
gttttttcagtggtgaaaattgattttctatgaaccatccatacccagatcacaaaagaaattgggcaagttgattttctggagttagaaaaaaaatgaagctttgtaaatgcaaagctgaagatgccatttagaggtcaagccagtaaccttggctgcattagcaccatgctctaaaccaactgagttgacggggatatttcaaagaaataggaaattgaattaatgggtacattccattctttagtaccaataaaagcctgtgtaagttgaaatagaagggattctagcattgtcactaccaatagtgtgatattaggcatacaccccaatatttctggtttttttttttttttttttgagacagagcctcactctgtcgcccaggctggagtgcagtggcacgatctcggctcactgcaagctccgcctcccaggttcacgtcattctcctgcctcagcctcctgagtagctgggactacaggcgtctgccaccatgcccggctaatctttttgtatttttagtagagamggggtttcaccgtgttagccaggatggtctcaaactcctgaccttgtgatccgcctgcctcagcctcccaaagtgctgggattacaggcgtgagccaccacgcccggcctctggctctatttcaatgtcagtaatatattgatattattaattagcctctgctgagatgtagggaggcagagaagagagaaattgcgggggcgggggggaaaggaaattctaaaatataaatcataaatctttagaagaaaatcattatgcaaattccttcgccatcaccattgttttaactgttatcacctgcgattcacccaactggcagactttctgtaacctttttacaaaactgagcattttcccaaattcctgaaactcacaggaataaaaacaaattggttaacaaatttattacttaaaaatattgaaaggaaaattgcacaaaaagatggtttgagtttgttttcttcttcagttgtgttgcaaatagttcccccaatgaaaccatggaatttcctccagtctgttccccattacctctgtgggaaaattgtgaaaaatcaatctgttttctgcataactgtatacatcccattatttgaggaatgtcaaaagcaaaccccaatgactgacaatatcaatcttttccctctattttccaagtttaatttcagcagtagttacaaagcagaaaggaaagtgcaggctgaatatcattataccccaggcaattgcagattttaagaagaatttatataaaacaggagggtgtattctctttatagctgattatatctttgaccttgagagtcacataagcttcctatgactatgagatttttcaaatgtcagcgaagaatggggcatggggcaggcagaacacaatgcctttcctctagttgacagtgaaaatgtagataatgccatgccaaggttaaaatttttgaaagaaaaaaataaaaagattctagagaaatgtaatgattggtaacatttgatgtaatcctataaaagagttagggctcagggatttattatgtcttctgtcttaaacatttattgccgcaaaggagctttggggtgagattttcttttttttttttaagacaagcttgtcatgaaagcctaattttgctaattttatataacttttttcaaaatattttatttataaagattttattagatggttttatatttttgtaagaaaatataaatactgggaacttcatggtgtttgggaagcaagagacgtaaaagaaagaaaaaaattcaatatagtttcactcggaggatatccaccacatgacttttttttttccttgaagttaatgttttcctctaataattttgttttctcactatctctcatctcattcttccagggaaacaagagagaaaacctctggccttagctgcctcttcacaaaatgaaccaaagccttttgaggcgattactatttttcaaaccactctggaatccttacctatgttcttatattctggtcatgaaggaagatggctacaacatttatagtagagtaacaaaattgggcatttcaattttcgagccagagggtctccatttagtcatggtgctgctttctatgatgtatatccaaaccaattactttgagattcttacaggataatgtatattcaattttcctcaaagtgtacatcattccacattattaaactatgagaagcctaaatagctctgaactaggtgtttctatgcctaagtgtgcttccagatcatccataatctccttatgcacttagacaagctattgaacctctctgataccatatttccctatctatataagggagatgatcatcctgctttccaaaacgtatcactgtgagcactaaaagagataatttgttcgtaaaacttagtacttgagcacatggtaagtattcaataaatgctagatgaaaatatacagttagaatataagtttatagttattttcatctgacatttattgaatggtctgggaggatcccttggcttccttctgttgacactctaaattccaatgtctg

SEQ ID NO: 680120 - DNA, 2585 bp, Homo sapiens
gttttttcagtggtgaaaattgattttctatgaaccatccatacccagatcacaaaagaaattgggcaagttgattttctggagttagaaaaaaaatgaagctttgtaaatgcaaagctgaagatgccatttagaggtcaagccagtaaccttggctgcattagcaccatgctctaaaccaactgagttgacggggatatttcaaagaaataggaaattgaattaatgggtacattccattctttagtaccaataaaagcctgtgtaagttgaaatagaagggattctagcattgtcactaccaatagtgtgatattaggcatacaccccaatatttctggtttttttttttttttttttgagacagagcctcactctgtcgcccaggctggagtgcagtggcacgatctcggctcactgcaagctccgcctcccaggttcacgtcattctcctgcctcagcctcctgagtagctgggactacaggcgtctgccaccatgcccggctaatctttttgtatttttagtagagaaggggtttcaccgtgttagccaggatggtctcaaactcctgaccttgtgatycgcctgcctcagcctcccaaagtgctgggattacaggcgtgagccaccacgcccggcctctggctctatttcaatgtcagtaatatattgatattattaattagcctctgctgagatgtagggaggcagagaagagagaaattgcgggggcgggggggaaaggaaattctaaaatataaatcataaatctttagaagaaaatcattatgcaaattccttcgccatcaccattgttttaactgttatcacctgcgattcacccaactggcagactttctgtaacctttttacaaaactgagcattttcccaaattcctgaaactcacaggaataaaaacaaattggttaacaaatttattacttaaaaatattgaaaggaaaattgcacaaaaagatggtttgagtttgttttcttcttcagttgtgttgcaaatagttcccccaatgaaaccatggaatttcctccagtctgttccccattacctctgtgggaaaattgtgaaaaatcaatctgttttctgcataactgtatacatcccattatttgaggaatgtcaaaagcaaaccccaatgactgacaatatcaatcttttccctctattttccaagtttaatttcagcagtagttacaaagcagaaaggaaagtgcaggctgaatatcattataccccaggcaattgcagattttaagaagaatttatataaaacaggagggtgtattctctttatagctgattatatctttgaccttgagagtcacataagcttcctatgactatgagatttttcaaatgtcagcgaagaatggggcatggggcaggcagaacacaatgcctttcctctagttgacagtgaaaatgtagataatgccatgccaaggttaaaatttttgaaagaaaaaaataaaaagattctagagaaatgtaatgattggtaacatttgatgtaatcctataaaagagttagggctcagggatttattatgtcttctgtcttaaacatttattgccgcaaaggagctttggggtgagattttcttttttttttttaagacaagcttgtcatgaaagcctaattttgctaattttatataacttttttcaaaatattttatttataaagattttattagatggttttatatttttgtaagaaaatataaatactgggaacttcatggtgtttgggaagcaagagacgtaaaagaaagaaaaaaattcaatatagtttcactcggaggatatccaccacatgacttttttttttccttgaagttaatgttttcctctaataattttgttttctcactatctctcatctcattcttccagggaaacaagagagaaaacctctggccttagctgcctcttcacaaaatgaaccaaagccttttgaggcgattactatttttcaaaccactctggaatccttacctatgttcttatattctggtcatgaaggaagatggctacaacatttatagtagagtaacaaaattgggcatttcaattttcgagccagagggtctccatttagtcatggtgctgctttctatgatgtatatccaaaccaattactttgagattcttacaggataatgtatattcaattttcctcaaagtgtacatcattccacattattaaactatgagaagcctaaatagctctgaactaggtgtttctatgcctaagtgtgcttccagatcatccataatctccttatgcacttagacaagctattgaacctctctgataccatatttccctatctatataagggagatgatcatcctgctttccaaaacgtatcactgtgagcactaaaagagataatttgttcgtaaaacttagtacttgagcacatggtaagtattcaataaatgctagatgaaaatatacagttagaatataagtttatagttattttcatctgacatttattgaatggtctgggaggatcccttggcttccttctgttgacactctaaattccaatgtctg

SEQ ID NO: 680121 - DNA, 1475 bp, Homo sapiens
cagtatttggtttatggtgactcagatatttttaaccaaggaaattaaagaagcaaataaatctcctggggggatagcttagtggtctaagtctcaggttggaaatggggagactccctagaactgtaaagttcaaattacagccacgttgactcaccctttcgtcttttttgagataaattgagttgcacttagtttatggtgggagagttgtttggataagtaccctaaactcccaaggtttgtttgctctgattgggacattatagaactcctgaggcatttttttcttctattagaaaatggtttgctgcaattcatttggccgcaaattctgatactcagttgaaatgttggaaaaacagagaattggcttctcctatagtatattagacacttaataaaatacagatgattaagagacctctttctgcttcccagatgagtgctagagactggtggggaatagaagtaaaggaatggggtgacaaattttaggatgattctttaaaagtaggatttagcagtatggctagaaaagtagctcttgggattttttaacctatgaacactgacactggaagccattagattatttccagtgaactttcagaaaaaaagcaatagtgctaaagctgttgtatctaggcaatggaaccaaacaatggatacagaagtgatttttcrattattggaaatataaaataatctccacttttaaaagagaagctcaaaactataaataatgagactattaaaaacatccaagtaagattcatatgaaaacacactaaaagaggagggctcatatataaatgtacactgacaaaatgtttgtatttcaaagattcttaaagattctcttaatgttcaagcagaaaacttagattatgtacaaaggaacaaaagcaagccctttctccttagtaatactttacactacgagataatcctggaattcttggagactttggggtggtaatagacaatattcaagtatttcataacatgccatatagccactcacgagcaaaagcaacagaaagattttctgaaatatggaaatatagaggatatgaactctttgataaaactgcttagattcagtctagcaatattagaggtaagtgaagttgatagagaaacatagtatcaaggctggacataggaattagaaccaggtacttctttcatgtaatacagatgagggtagaaactcagtaaattccttatatatgcatgtatgtatgtatgtgtgaaaagatgcaacagccaaactgaattattttattttattagatacaggatcttgtcctgttgcccaggccagagtgcagtggtgtcttcataactcactgcagccttgaattcctgggcttcagtgatcctcctgcctccgcctcttgcaggtgcatactaccatgcccagctcatttttctattttttgtagagatggggtctcaccatattgccc

SEQ ID NO: 680122 - DNA, 1475 bp, Homo sapiens
cagtatttggtttatggtgactcagatatttttaaccaaggaaattaaagaagcaaataaatctcctggggggatagcttagtggtctaagtctcaggttggaaatggggagactccctagaactgtaaagttcaaattacagccacgttgactcaccctttcgtcttttttgagataaattgagttgcacttagtttatggtgggagagttgtttggataagtaccctaaactcccaaggtttgtttgctctgattgggacattatagaactcctgaggcatttttttcttctattagaaaatggtttgctgcaattcatttggccgcaaattctgatactcagttgaaatgttggaaaaacagagaattggcttctcctatagtatattagacacttaataaaatacagatgattaagagacctctttctgcttcccagatgagtgctagagactggtggggaatagaagtaaaggaatggggtgacaaattttaggatgattctttaaaagtaggatttagcagtatggctagaaaagtagctcttgggattttttaacctatgaacactgacactggaagccattagattatttccagtgaactttcagaaaaaaagcaatagtgctaaagctgttgtatctaggcaatggaaccaaacaatggatacagaagtgatttttcgattattggaaatataaaataatctccacttttaaaagagaagctcaaaactataaataatgagactattaaaaacatccaagtaagattcatatgaaaacacactaaaagaggagggctcatatataaatgtacactgacaaaatgtttgtatttcaaagattcttaaagattctcttaatgttcaagcagaaaacttagattatgtacaaaggaacaaaagcaagccctttctccttagtaatactttacactaygagataatcctggaattcttggagactttggggtggtaatagacaatattcaagtatttcataacatgccatatagccactcacgagcaaaagcaacagaaagattttctgaaatatggaaatatagaggatatgaactctttgataaaactgcttagattcagtctagcaatattagaggtaagtgaagttgatagagaaacatagtatcaaggctggacataggaattagaaccaggtacttctttcatgtaatacagatgagggtagaaactcagtaaattccttatatatgcatgtatgtatgtatgtgtgaaaagatgcaacagccaaactgaattattttattttattagatacaggatcttgtcctgttgcccaggccagagtgcagtggtgtcttcataactcactgcagccttgaattcctgggcttcagtgatcctcctgcctccgcctcttgcaggtgcatactaccatgcccagctcatttttctattttttgtagagatggggtctcaccatattgccc

SEQ ID NO: 680123 - DNA, 977 bp, Homo sapiens
tataccaggaagaggggttgtgactacaagcttaccaagtgaggtttctaggtaacagtttgtatcttgatatgagtgttggttgcacaaatatgttcacttgatgaaaattcactgaggcatacacttatgatctgtgcacttctctaaatatatataatataaacaaatatattttcaataaaacttttaaagttggcagtgcaagagttgtttattcattggttctgttgtttcttgttcatgctgcatatgaaaaaacatgaggaatttccggctgtgaataatgaccgataaatatggaagcagttttggcttacatttaggtaccagaaaacgcatcagcaagaatattaaagtgagtttattcatgcaactgaaaataccattggctcaataagccaacaattatacatgaattgccaagtctatatggcccaaattaggtgcctcctattgctctatggcacaaataaccacgttaggaagaaattaactgctgtcatttgggcagggacctttgaaaatattccttcaaagagtggtctgccatctggataggaggtttacagcctcagcgctgtgtgaatgtctattaaaaggacacataaacaggagacaatgaggaagaataaatatgagcattctttacttacctagccagagtgtgaacctctccagcaagtctggacaccggaacctacctcagcccctcaggtaaaagtcctaatgaaggtaagtcctgaacataatgcacacagctaggagargagtaatgtttgctgcccaaaggatattcagttctatataaactaggataataatcagcccatttttagataactcattagaagatttttctctatatggattttaaaataaaacactctaaacagtgcctcttgatttaagaattgaattggaattgtgtaattcactgaaaggcagatttgtgcctataactctgaggaggaaaa

SEQ ID NO: 680124 - DNA, 625 bp, Homo sapiens
gggaggacaaggataataccaacccattgggcggtagtggagaatacatcaggcaaattctgcaactggctcagcaggggcctgggtcactatgattgccccttcaatggtagaagtcagtgtcttaggagtggcagcaatagtagagwtggcagtcatattaatagcatctttgtacccctggtgctttgctcactgaagcaaccctggctcggaaaactggcaggtacaagagaggcaggctgataggctgcagccaagatcttgtcagaagcccaacatggcaacctggttttaggtcattccatcaatccagaacctgctggacacttgtgcaaggtggggagctttggttggaagtaacagaaaccacatgagtgttgatgctgcaaacaatagacctcaccaccttgccactagtcttgtctctgcatggctttctctgagttcaggtccagaggaggaaatccatgcaccaaggctaggtttcctctgtgtgcctgagttagaggaaggctggactagaaagtctaatcctcttagtagtgaagccatgaaaagtcacacaatggccttaccactagtcaaggtacctgactattggacaactcttgcccccacactg

SEQ ID NO: 680125 - DNA, 668 bp, Homo sapiens
aggggtgacggcctgtccagtgaacccaaaccgatatgtgtatgaaaataaataaatatatgtttaaatatataaatatttatattcatatgtattcaatatataaagatttattttaaggaacttgcaagtttgaaatctgcagagcaggcaggctggaaactcaagcaggagtttgctacagtcttaagctaaattcttgtttctctaggaaatctcagtgtttgctctcaaggccttctgtggattgggtaatgcctctgttaagggtcatttcctttaagccaagtaactgtagacattaaccacacctacagaataccttcatggcaatagccagactggtgtttgactaagtgactgggaattagagcctggactgttgacgtgtaacaccagctaccccgaggacaggctgactgtgagccggagaaggctgaggccttggggctgctgatcatggcagaggtgaagggtggatgcgggcacagttctcactsagtaggttggggacgtctgagccaggtcatggacctgctcccttcattgtgccagtacttccactgctattgactgcttcctttcagccccagcaaagtgttctggggcgttctttggtgatttgagggattctagagaaactcttgcagaaaacatggttggtagta

SEQ ID NO: 680126 - DNA, 2642 bp, Homo sapiens
aggggctgacaggtgagaccacagcagcccaggctgacatctcctcaaatgaacaccatgccagctggaggtgcaaaggctcactggaggcaggaggaccccttcagctagggagggttggggttttgtttttgaactggggttttaggggcaactaagatagaagaaatgtaggcatgccaggtagcttgaagggtatcccaggtggtgggaacccatggggaagcacggagacaggaaatcgtgagcggtgtgaaggtctaagtcacgattatctttttccccaaagggagacaagctggatctgtagctgcgctgcatcccgacggcctgcccaggtttcccgattccacgggaacattcttcctggaggagtccacaagtcttctagcctagagccatctccaaaatccctacaaagcaacaaacggtgtgacccagagtctcattctgaaatagactgaagctctagggccgcacagaggaccattgactgaaatctcacagtgggccctgggagggtcaggggaccctgcagagagcctgggcagggtcagcccaggcccagaaggcttctcagaggaggtgatgctggcggaggcctgcctgtgtccgtatcaggagaaagcaatgtcaagaacagcaaggtcgctcactcacttcctattgtagatcagagctgggagttttcctcagattacttctcactaagaagacagccctcttctcaggcgccgctgctgacatgttttgttttccccagatggggataatcagcctgtttgggagtcgggctgacagctcaggcagcaggcgggggctgggggcgggaggctgcaggcagctccgagctctcagggagcagactctgccctgcctgcgtgacaagctccagcaggtgggggggatttccgtttgcgccaaagaggagcgggctgtagagtgatttagcttagttatgtgaaccttgagaggctgcccgactcctctccccgtttaatttatgcttgagtgccagagctgaagaccttcaagccgtcccctgctataccggaagggacccatcaggatcctggcttggagctttgctgggtatttccagacgttccacagaaggtggggacagggctggctgtgctctctccctccccttctctgggaagacttccacatcttccccatcccttcctgatggccccaccccaccgtctcccagcccyaagagtctcagcctcaccttcccacccttgcgcaggcccaggtctgggctcttcactgactcatgttttggaagaaggggtagagtcacccaccagcctcggggctgtctgaggcaggtcacagttgttctgagggccggaccccagggccttgggctgctcagcatttctaggcactgggctggaaggtttgcatcccagacatagcagggctgaggaacggctatgttagaatcaccttgagtggaataaccatgcccacctgaggatcatgggtcccctcctgtgggtgggtctctggaggtctgaggaggcctgacaccttcaggcaggctgcagtgggcccttttctgttctttctcccccagtcccgcttcaaggagggacgaccaggccagagacagccttcctgagagacttgcaccctgccctcacccaatacacaactgatttccttctgtgtggaatgaagcccgtggacttcccatctccaaggcccagccagctctcggttctctggttatgggtcccgcctcccagtctcagcacttcttttctgactccccactgggcctaacacagagcctagcctctgcctgtcagtgcttgcccacttacatcctatgcacccagagctgggagccttcctcagactctgggcctacacaaggcagctgctcccaaggacaagggttaatagaggtctttgatagagtctgaggtctttccagagggaaatttagctcccagaggggcctgggtgggggcctgagagacctggccacagacacctatgagcccctctgaccatgttcttggctgcagcctcatgaggccatcagggctcggcgcgggaggcagggcccgggctctgtccccagctcctggccacacaccttcagtggccatgaatctgcccttcaccccctgcacctcagtttcctcgtctgccccgcagcatccatgggactgcagtagtgtgtatatgcggctgtggcccctgggagaggcacctctgggaccactggccatctggccctcggtagccgtgtggcgcagatttcctcctccgtggtctcccgggcaacgcggagctgcctgccaagcctgctgccgggcctggctcctgcacagatctttagtgccacacagagatggctgatggcaggagccagggtgaggcccagcctccccagctgtcacagggagcaaatcagacaaaggctgagttgggaggggtggggcgccggagccaggggggcctgggaaagtagctcggaggccccagctgccccctcccacctcatcctcccaatactgccctctcagtgacccctgcttcccagaacactcagccgtggacctcagtttccccatctatcaaatgggaggggccaggtctctgaccctccagactaatgg

SEQ ID NO: 680127 - DNA, 2642 bp, Homo sapiens
aggggctgacaggtgagaccacagcagcccaggctgacatctcctcaaatgaacaccatgccagctggaggtgcaaaggctcactggaggcaggaggaccccttcagctagggagggttggggttttgtttttgaactggggttttaggggcaactaagatagaagaaatgtaggcatgccaggtagcttgaagggtatcccaggtggtgggaacccatggggaagcacggagacaggaaatcgtgagcggtgtgaaggtctaagtcacgattatctttttccccaaagggagacaagctggatctgtagctgcgctgcatcccgacggcctgcccaggtttcccgattccacgggaacattcttcctggaggagtccacaagtcttctagcctagagccatctccaaaatccctacaaagcaacaaacggtgtgacccagagtctcattctgaaatagactgaagctctagggccgcacagaggaccattgactgaaatctcacagtgggccctgggagggtcaggggaccctgcagagagcctgggcagggtcagcccaggcccagaaggcttctcagaggaggtgatgctggcggaggcctgcctgtgtccgtatcaggagaaagcaatgtcaagaacagcaaggtcgctcactcacttcctattgtagatcagagctgggagttttcctcagattacttctcactaagaagacagccctcttctcaggcgccgctgctgacatgttttgttttccccagatggggataatcagcctgtttgggagtcgggctgacagctcaggcagcaggcgggggctgggggcgggaggctgcaggcagctccgagctctcagggagcagactctgccctgcctgcgtgacaagctccagcaggtgggggggatttccgtttgcgccaaagaggagcgggctgtagagtgatttagcttagttatgtgaaccttgagaggctgcccgactcctctccccgtttaatttatgcttgagtgccagagctgaagaccttcaagccgtcccctgctataccggaagggacccatcaggatcctggcttggagctttgctgggtatttccagacgttccacagaaggtggggacagggctggctgtgctctctccctccccttctctgggaagacttccacatcttccccatcccttcctgatggccccaccccaccgtctcccagccctaagagtctcagcctcaccttcccacccttgcgcaggcccaggtctgggctcttcactgactcatgttttggaagaaggggtagagtcacccaccagcctcggggctgtctgaggcaggtcayagttgttctgagggccggaccccagggccttgggctgctcagcatttctaggcactgggctggaaggtttgcatcccagacatagcagggctgaggaacggctatgttagaatcaccttgagtggaataaccatgcccacctgaggatcatgggtcccctcctgtgggtgggtctctggaggtctgaggaggcctgacaccttcaggcaggctgcagtgggcccttttctgttctttctcccccagtcccgcttcaaggagggacgaccaggccagagacagccttcctgagagacttgcaccctgccctcacccaatacacaactgatttccttctgtgtggaatgaagcccgtggacttcccatctccaaggcccagccagctctcggttctctggttatgggtcccgcctcccagtctcagcacttcttttctgactccccactgggcctaacacagagcctagcctctgcctgtcagtgcttgcccacttacatcctatgcacccagagctgggagccttcctcagactctgggcctacacaaggcagctgctcccaaggacaagggttaatagaggtctttgatagagtctgaggtctttccagagggaaatttagctcccagaggggcctgggtgggggcctgagagacctggccacagacacctatgagcccctctgaccatgttcttggctgcagcctcatgaggccatcagggctcggcgcgggaggcagggcccgggctctgtccccagctcctggccacacaccttcagtggccatgaatctgcccttcaccccctgcacctcagtttcctcgtctgccccgcagcatccatgggactgcagtagtgtgtatatgcggctgtggcccctgggagaggcacctctgggaccactggccatctggccctcggtagccgtgtggcgcagatttcctcctccgtggtctcccgggcaacgcggagctgcctgccaagcctgctgccgggcctggctcctgcacagatctttagtgccacacagagatggctgatggcaggagccagggtgaggcccagcctccccagctgtcacagggagcaaatcagacaaaggctgagttgggaggggtggggcgccggagccaggggggcctgggaaagtagctcggaggccccagctgccccctcccacctcatcctcccaatactgccctctcagtgacccctgcttcccagaacactcagccgtggacctcagtttccccatctatcaaatgggaggggccaggtctctgaccctccagactaatgg

SEQ ID NO: 680128 - DNA, 1056 bp, Homo sapiens
tgactagtttattatatggtagagagattttagaataaagcactctttatatttttttctatcagattaaatattccttgggatatgaaatgaaaaacataatttctggatttttatattgaaggtttaaaaatgatatgaagctgcaatcaaggagctttgagatgaagtttttaaacctttgatcatgcaatacatatatatacatacatgtatatgcatgtgtgtatctatatcagtattatgattctcttcttacatagagtgcaaaaacgaagtacacccttcactgtatcgctgacaaagaacatttttggatgtatttggatggtgaatcagtaatgtccttggtgtctgctcatctgcactatccaaaattatcgaataacctctccctggagaatgcttgccatgacttataatcatggagcttaagatcatgctttccatgatctttataagcaccaaagttcactcactcatcccacaaatgatctcactcaggtcatttgtgaataaaggagtcccacagtgaaggagcttttgtggggtttataatcaaatgttttagcaaaagtaggaataaaactccagattagcagattagttgggtctttctgttgaatttcttcaatctgtagcatacatatgagtttgcaatacaacctgactagaaagtagtattttctcaaaattaacttaagtgtatatgaaacatttttaagaagtgagattagagaaggaaaatttttttgataacgggaggctgttcaaccatgtacagctgcattcagtgtcaagaccactttcaccagatattagcattacaagaatttacattcagaaaacaacttttcactcctaagtgagactttggtataaaacactgcagtggaaactatatttatttatttatttatttgtttatttatktattattttttgagacagagtctcactgtgtcacccaggctggagtgcagtggtgtgatctcagttcactgcaacctctgcctcctgggttcaagcaattctcctgcctcagcctccccagta

SEQ ID NO: 680129 - DNA, 2256 bp, Homo sapiens
tatttttgctcagaaatatttatttgctaaacctcaccccttacagctcttaatttttcactttctaagacagagattatattctaatggttatctcttgtgtttggccttctcccaaacatatctatcccctaactcagtgcatttactccctgggccaaccttcccaatcccaacatttcgaacccacaggtgaaccaacaggcattccttctccctcttcatcccagcaatacctgtgaattcacctatgagtttgtcctgatctgagcagggaagataatttcccttacatattggtgggaaaatttcaaactcaaaatcatagaagatgtggggtgggtgagcatgttatctcaaggctgggtagcagatagactaatacatggcttatagaagaagatgtgaaaattatagttcccagtcatgaccctggagtcccgggtcactcagactctgatgactcccaaatccatacatatctcttacataaaatgttctccaggactttggctcctcacttccaagtttctcctaaacagtgctacccaaataacccttcaaaacctcaagcttagcataatcaagactgatcttgtgtcttctctcccaaacccataacttcctcaagtccttatcttgggtataggaacctcctttacccaaaacaggttagatgaatataggttatttttattcaatgtatttatttaaatttattaacatttttattagatatttattattaataaagatgtaaccaatgaagttagatcacacatatgaaagccagaaagacaaagaagagaaacatttgatgagaaaaggttttgctttcagcacataagatcgaaacaggtgctttcagtccaggctctgtatggatccttcaggaattcaccaaacaaatttaatttgtgagatggaaagtcaagaaatgcctaccatctcttgtgtcactgttccaactggtagacatcgacaccttaggaaggttgtaaacaaacacaccacaaagccagctttaaagggactcgtggacgaaatcacatctcttcaactctgatctttgtgtatcacttggtacaatggttcccttctatgtcacctgtgaattctggaaaactgkatatcaattttctgctctgcttatagctatacctcccctgttatctctatcctcagtacccataaattatttttccaaattcacattccccaggtctacaatttttcctttatctcagttttgacttttttggcaagtacattctttttctagaatgttctctttatgctctaaaactttccatttagagtttcttgtccaggctcatttgatccactacaaaggtacacatccgcatattgctatgtgtttgttgatttatttggtgtaggtcattaacagttgcttctcttttcgcctttgggatgatctggatatgttggcaaaattttcaactcaatgtggtaacttgacagtgtagagacgggccttgcagcaagatactactttttatcaacattattctctgactttcactgtgttgctgagaaagtggtgacaagcagcttcccagagcttctgagagtgacagagtcttggatgcactgggacatgctcatgcattcctcatcaatatcatctttggaaagaagctttcaccagcagactgtcatcatcgtgccattggtctccatcttcttgccttcttccattgaaatcacttgctgtttatttagcaaagtcacatgtaggtatggacagtacgttatgtagcagtgcaagaaataaagacactgctgattaaccagccttataatgtccattattctttcatctttactttcaatttttattaaagaactggggtcccaatagagaagagaaaaagttattcccccagctgttgctgttgaaatggaagctccaatgttggagtatctgctggtatctgctggtttgtgatgggaaactggctatttctcaaatggctagaaagtctgatggaggctgctgagctggtggaaaggctgaagtgtgggctgattactgtcccatgtagatacagcttctcttgccacagtaacagggtggccatgtattaatgcgtttcaactttaagtttggtacccatgggtctcagtgacctgggttttttctctatgtaattctctactctagtgccagcaactagaggtaagcatgagatttgtcttctgtcctggggcttgactggtcttaggaaccac

SEQ ID NO: 680130 - DNA, 1707 bp, Homo sapiens
gttgtcattttttatctgttgttaatgtctgacactggtgagggttggtgaaaaggggactgcagtttgctgtttagtggaggtgtaaattgttacaatctttttgtggagcaattttctaattagtaatcagaaaaatgttcacagtttggggcctgatcattctcttttcaagagtgtatccttaggaaataagctgagatgcatttgaggctctgagcacaaaaacattcatcacccgctgcccctacccgcgtccccgtcctgtggcacggctgggttagggttaggtttcggrttaggtagttgggctgtgggtaagccccattgcaatagcttcccccaggagcagctcacacttttcaaacaggatgaaggattccagatgttctcctgacctcctgatggtctaacctcatgtccagcccttgctcctttaacctaagggctattaacagggttccatctgtgtctctacactcgctttgtctgcacactgcccctcttccacttagggtgagtcatgagtccgccttttctttcgattcattctcatctaacagaaattgttggagattcggtgtgcaagtttaggctttccaagtgtcagcactggagcagttttttctcttatttttatacctattggtcattttaatggggatctggaaggagaggaattagacacttgtgctgacatcacattcttacccagaagtcctaggttgcttttttaaaacaaaagaaaatcagaggcagagaaaggcaaggagtaaggcgggagagagagggcccaggggaggcaaagatccgtttgtgaagcgcccctccgtaattgtagataactccctgcaagtttgtcttctagtgtgaattattttaaacactttgccatttgcctgagtcttaatgaatgaggattttgtgggaatggaattgggggtaggaaggaaaattactgtaaaatagcagatttctgggggaagaagaaatttaagtgtgatactatagtacaggaatgggcctggcctgcctaaggacttctagaatctgcagtcaagataactggcatcctgagaagccaaaagggagtgaaatgcacccaaaagtagaataggaggaaaagtctaattgattttgtactctgtgcaattttgcctacaaatttggtgacagcaactgccttatttgcaatccctgaatcaaatgtttaccttgatgaattgcactgagatgtttggctacacaaaaaccatttcctcatggagagtttaatttagttggctatttcaaaagtgaatattgaatagtcacatgctttcaaagtcatgtgtggatttgacagaatacaaccacagttttttagtgccagagttggtatcacaaagccctttggaatatactgaaccatgcagttgtagtagctgtattaatattcatctgagagtgacagctctctcctcttctctgtcttcaatgtggcatatatttgatattctcctggtgctctttgattctatacagcacgtcatagtgaagacatccatgccgacatggaaaattcagggtttttctgctattatttttgaatcactgataatcctcacaaaattgtcattcagttcaacaaaatttcttgttataacattcataagatgagtgtgtgtgtctggtgtgtctgcatgtgtgtatgtgtgcatgtgtgca

SEQ ID NO: 680131 - DNA, 1707 bp, Homo sapiens
gttgtcattttttatctgttgttaatgtctgacactggtgagggttggtgaaaaggggactgcagtttgctgtttagtggaggtgtaaattgttacaatctttttgtggagcaattttctaattagtaatcagaaaaatgttcacagtttggggcctgatcattctcttttcaagagtgtatccttaggaaataagctgagatgcatttgaggctctgagcacaaaaacattcatcacccgctgcccctacccgcgtccccgtcctgtggcacggctgggttagggttaggtttcggattaggtagttgggctgtgggtaagccccattgcaatagcttcccccaggagcagctcacacttttcaaacaggatgaaggattccagatgttctcctgacctcctgatggtctaacctcatgtccagcccttgctcctttaacctaagggctattaacagggttccatctgtgtctctacactcgctttgtctgcacactgcccctcttccacttagggtgagtcatgagtccgccttttctttcgattcattctcatctaacagaaattgttggagattcggtgtgcaagtttaggctttccaagtgtcagcactggagcagttttttctcttatttttatacctattggtcattttaatggggatctggaaggagaggaattagacacttgtgctgacatcacattcttacccagaagtcctaggttgcttttttaaaacaaaagaaaatcagaggcagagaaaggcaaggagtaaggcgggagagagagggcccaggggaggcaaagatccgtttgtgaagcgcccctccgtaattgtagataactccctgcaagtttgtcttctagtgtgaattattttaaacactttgccatttgcctgagtcttaatgaatgaggattttgtgggaatggaattgggggtaggaaggaaaattactgtaaaatagcagatttctgggggaagaagaaatttaagtgtgatactatagtacaggaatgggcctggcctgcctaaggacttctagaatctgcagtcaagataactggcatcctgagaagccaaaagggagtgaaatgcacccaaaagtagaataggaggaaaagtctaattgattttgtactctgtgcaattttgcctacaaatttggtgacagcaactgccttatttgcaatccctgaatcaaatgtttaccttgatgaattgcactgagatgtttggctacacaaaaaccatttcctcatggagagtttaatttagttggctatttcaaaagtgaatattgaatagtcacatgctttcaaagtcatgtgtggatttgacagaatacaaccacagttttttagtgccagagttggtatcacaaagccctttggaatatactgaaccatgcagttgtagtagctgtattaatattcatctgagagtgacagctctctcctcttctctgtcttcaatgtggcatatatttgatattctcctggtgctctttgattctatacagcacgtcatagtgaagacatccatgcmgacatggaaaattcagggtttttctgctattatttttgaatcactgataatcctcacaaaattgtcattcagttcaacaaaatttcttgttataacattcataagatgagtgtgtgtgtctggtgtgtctgcatgtgtgtatgtgtgcatgtgtgca

SEQ ID NO: 680132 - DNA, 1290 bp, Homo sapiens
atagaaacgtttccagatatgtctgctttagtttattatttggtaaaattcacatacagtaagattcactctttgtggtgtgccgttctatgagttttgaaaatccgtaagttcacatagctgccaccaccatcgagacacagaacggttccagcacctccccaaaattttgaccaccacttgtgctttaaactcagctcagtaacgcatatggtgtgagtccccagtaatgatagaaagcataggaacttcagtagctgcttgatgctgtgttcatttcacattaaaaacaaacaaacaaacaaaaaacctgtttcttctgggtcctgttagcaaaacttagtgttagtttctttcttctatttaaatatcttatgtcgaatttgtagtagaacgaaaatctttttgaaaactgttcagaaatctacaacctaaagcatctgctattttgaatctttttttttttttttttttagcatccagtgaatgtacattttaggccaatttaaaattccgttttatgtttaaaactacaagacagccatattaaagggcttttagttattgtttttgttactttaaattaattacatgagaaaattagaatctgaacacttaatgcagctataacctaaagggaaaatagcaaatgctttgctattttttttttgtcttttttttctttttttgaagcatctttcccctttcttctttacttatatagattggactttgtctcaggtagacagaatttttgtattaaagttattcctagtgcaatttaggctgttatttttttttttcttgcttgctcttttttccctttcttcgactctttcctcttcctggtctctttcttcctgtctcttttttttttctttagttgtagaaagttgagttccatcccaattattaaatcttaggagaccattcccacatggttccgtaaatggtagcttcatcccgcattctttcatctctttccctgctctctggcttgacagttgaaaaggtctgactgtgccacacaatggtttgattggtttctctgggggagacttttccctgcctcatcattcgccaggcaggtggaccagaaagtctcttgattcttttgttscctctcaaagtccgaggtctttgactgaataaatctgccgtcatgggataatttgctaaaacgagactgaaagatgtgagagaaaagcctcactacttgggtgctgcattaatgaaataacggggccttggagtttgcaattgaaaaatcaccaggaatgcaatgggtgg

SEQ ID NO: 680133 - DNA, 243 bp, Homo sapiens
ggaattgatgatagctcctaccatccccaacgcyccccatgcacatacatacaaaatgagatattcttctaaaaagaatgccaatcaaattttagtgtacacaggagagagaaaagaaaacatgtttcaattagacaaggacacagatgttaggaatcatttcttaaaaaacaagctaagtggccgggcgcggtggctcacgcctgtaatcccagcactttgggaggccgaggcgggcggatc

SEQ ID NO: 680134 - DNA, 3716 bp, Homo sapiens
ctgaatttggctgattgcttcctcatggtattgtttgatttattcttttatgacccatagctcctggaaactgatgtgattagatttcctggaaaccagaggaaagatttttgggtttatttagttatttatttattcaggcaagagtacttcataagttatgctctatactccctgctgcaaatgctctgaaggcacaacatagctgactaacccacttctactaaaataggtgtgatcattgggctctgttgatgtcagcctgatccttgtattgtgaagctctccatcaatctttcatcttatgatttcagcacccattcatggttcctgcctaaatccatggcttcattagggactgcaaaatgaagatttttgtttgtaattctactatctatatttatttactgggtaaaagtaataaaaagttatgatcaaaatgccatgttgaatcatagctactatatttattttatattttgagaactgagtaaaatttcattggaaaaaagactttttatttaaaacagtttaaaaaatcactgggccagagaatctcttcgttgccttccaactctaatggtttatgattcagtgacctatgctgaaccaatgtttcatgacaggaaaaaggagtacagctgatagacagaagttctgttgtaagtgtgcaaaggtagccagttagattttccatctggcctagaagagattggatattgatggaaccagggaggatcctctgggcaacagcttattgtgaggtagagagagaatgaccctcaagcatttggtccttgaaagctatgcagaatgattatgaggccaagttgtacaagcatatgtgtctcacaccaatgtagaatataaaactgggattagaaaacataacagaacataacttctaccttatcccttcaccatctcatcctccactatgagattttcagtttcttgtaaagtagcttgccactgtcctcatgttttcgtgggtaacatgttctcccatgttctcagaaacctagaggcacccatcattaactacttctcatgacccatcagccaaagccttggctagtttgaaaccataacctgtcgctgctatatagaacacaactcttctatgtttcctacattccccggtgtgctaaagctgctcccattccctttaaagtgggaagaattcctcttcttcatatttgtgttccattcattacatgaatagaaaagcaattcttctggggactcaatgatgtacagagattttagtgaaacctctctgtcaagttgagccccctgccttctcccttaagactcaggtacatgtttatggaacttgggaggatgggtcatctgagcaacagccactttattgcatatcaaatgctccttttattgttttggctgggagatgggggtggccccatatcctgatataaaagaggacattgttaagccctttcttaacatgatagttgcatgccaagtaaagcagcaggctgggaaataaccccaatctcttttccagatctcaggcacagtggcatccttcaccatgtggaagttgacactggcttctaccacacagtgtggttctggagagagtcaagatgaagtcctgttgatagaagaactgtgtttattctgaagctctcgctcccaccccagggaaagccgaaggaggagcttgacaagctaaagggtaagccctggaaaaaggcataatctaaagtaacattaaggactagggtagtaaaaatgcacatgtgaaaaccatcacgaagagggtcatttggtttgctaaggaaatcaacattggctctaatattggtctaagtctctgagaaaggtcccttttctcacacctttgtttgcttctagtttccttttagacaaagtattggaagttatgaaatgtccttgttatagatgagagcmactgaccagatctgccacacacaggaatgcctcccattgctctccaggcatcagaagatgatccactgggctgcaaattatggaggaaaaatccattaatttatgaaggttttgaaatatccaacactaaagttgaagttcttgaagcctggccagtataaacaattttacataaagctctgtttacttctattcagaagcagtcaaaatgacccagttgttctgtggagcatggagctctggtgtctatcatccactggttggatttctttatggtcaggttataaagaggatcatcttagctacttcctgctataaaattttatcctcttttctcctatggaaggcaatactcaatggtccctgtagaatgtatcttattggtagcacacatcaaggctgtgtgtgtctgtgtgtgttctcaagatccccactgtcattaacagaagaggactatagatatgcttcctgttagaacacacaataaagctctttgattaaggctcacactaattgcatgtgaagtctgctacccattgaattcaggttaaaggtaaaactaataaagatgttacaggtgaacattggccttcctgaaattgcataaatgtaattgatgagaaaaaacaatgaaacaaagtaatgaatatgttattaatttcctggttcaagtttgaagtcaagaagagataaaaagttcatcagaattggtgttttatcaggtaaaactggattcatattttttttattctaggagcaacaattcatccttggttatttctcagaattattccatattgtttggaagctcaaaaacttgagcccatctccatctgttccttcgtttagctttgaaaacctttctatgcttctagtatatgtggatcagcctgctttctcctccttcttcctaggactcttttgctgccttagtccttggctctgacaacactttggtttagttgtcctgcctaactgaaagcatgagattaaaccaaggcaatgagaacttggtgttcccaacttaagtttgtgtggtcagttcatcagaactcaccatgctttcttcttaacagtacaggcttcttaattaggtatctgtccagctcatgaactgcaagaggtgaagacctttcccttgcatatttggaataaaaaacagcttgcctctggtgatttgggaccttggccccagtaactcagctgttctttattcctacagtctaccttcatgtgcgaccttgagaatctcaagggttagagaatggagaacaacaattaaattgggactcttcgagtttcttttatttgatccttagtttgcattacatagaaattaacagcatgggccttggagtttaacaccctaaggtcagatctttactctgacccatattctgtatgaacttagaaaagtttctgatcctctctgtgtcagttttacctataggcataatatagctatttatctcacagaattgtcaggatgactgagtgacacaatacatgcaaaatgcttactacagaataaggccttgttaaatgttggctgctataattgttgtaaatagtgttaaattggccttctagaagttaagggtgggactttccaggatgtactttacctgttttaatgtatgaattttgtaacgtaaacatgcttaacttcccatgtgttttactataagtataagcagtggattgatttatccctatctcagtcccaaaacatcagtcaatcctggtctacctacttcagggcatatcccactgaactg

SEQ ID NO: 680135 - DNA, 1047 bp, Homo sapiens
tgaactcttgcactgatcactttggcaggctgcatgtcccaataatattcccttcagtgttatgaactgaatgcttgtctccccctcaaattcagatgtggaaatcctaacctccaatgtgattatatgaggagctggggactttgggaggtgattaggtcatgagagtagattagaattcacgctcttataagaagagacatgaaaaactatctttctctctgtcatccaagggtacagcaagaaggtagctatctgcaaactaggaagaaggccctcaataagacagaatcagccttgatcttggactcctcagcctttggatctgtaaggaatacatttctgtttttaagctacccagtccttatggtatttttgttatggcagcctgaactaagacatcacaaagtacacagtacattaaccagccaaccagcacaatctactgccggaggtttcctgttgagctgtctttcctgcccccatgattacaaacttctagaaagttgtgcctcctactggatctaaaatcccaataacctggtgcacggccgtgtccctattactgcaaaataaacctacagtgactgactgagtagctaattaacaaatttccagatcaagagtgcaatatctcaggtcacagaaagttacagagggctcagcaggaatcttctttgatgtaattcataatggccaaacatgtttagaacaaacaaacatctggtcatggttttcaatgggatttatccagaagatactatctttattagaatatgagtgagaacagtttttaattattgaaatttaaaaacattcctattcaaatatctgtaagggaatgagtgacatatcggtgcagggttgaggtttggactacatcaagatagtgagaaaaaactatagcaggtgaatgtcatgcagaaaaacattagatcagtggttctcaaatttgaaccaaataacccagagagcttctaaaagcacagttttttaggtcacatccatcagcgattctgattcagyaggtctgggtgagaaccttga

SEQ ID NO: 680136 - DNA, 1804 bp, Homo sapiens
cttgtatcagtaagtgccagatcaaggcaatccttgtatatatcccaaaactgtatctataattcaatgccatccttttctccttcatctcctaccaaattagggggtagagtcaacttttttttttttgagatggagtctcactctgtcacccagtctggaatacagtggcacaatcttggctcactgcaacctgcacttcccaggttcaagcaattctcagcctctggagggagtagctgggactacaggcgcatgccgccatgcccagctaattttttgtatttttagtagacaaggtttcaccatgttggccaggatggtcttgatcttctgacctcgtgatcagcctgcctcggcctcccaaagtgctgggatcctgtggcatgagccacaggagagtcaacttttgaatattattaaagttatttacaaggtaagtaattaaaaatagcagataaattatattccacttggtagcctggttaagtccttccttcatggcttccagttacccctatacataatctaattactcagcaccaaaatactagcatggtccaccagtgaccctcaagtgtcaatatttctgatgatttccagaattcaagcatagaaatgtatttttcctttctgtatgaaatttaggtttttcaaggcaaggtcatgttatcctgataatcttttaaaatttacaatacaactagaatatccaaatgtataatgctaagtttgatattccccaaattgcacttcactggtggttttcagtgacaaagcaaattattattcattgtaattctcaggaaacaattacgaacatatatataatgtaaaacaagaccagtcacaagtttattctgtaatttttctttaacaggtattcaattctgtagaaaattgcaaatatttatttttaatatttacatttgggtctgtaaacaaagctggtaaaaaaatcctaagaatttccatacatatttataaaaatttcaagaatatgatccttatcacttctgaaaagtatgcattttttaaattctaaaagccagtaaatgtagaagttgaaggggacgagaaaaacgctgttaacagattatctgaattttcctcttcccaaatatctaaaacattgcatataccactcttttctgtgtagcttgtgaaacccaaaaattctgatttctcttcactagtctgaaacaagtctagtaaagactgtaccggtgaactacaaattctgttttcttcttgtgtaataaattcagttcttttatcaaattcagcatttggttccagattttcttttctatttcgtcctaatattattttcacttttcgaygtattttaccagaaggtaaactatccatattcttgaagtcacattcattgggttcctcaggaggagtatggaatggagcctttgcctgaacagttaggtgctcttgtgaactgtttattgttatcagaccagaatcatgagtaaatattgaatgaaggtccttttccttgagatcctttgctggaaaaagcacagtatctgacttctgttttggttgagatccactattatctgtactgaaatcagaaacatgtacagatgcctgtatgttacatttatagtgatctacccttagttcttctaagtcattttcacttaatgtgtgttcggaaatgtcaagaatgcattcctgtttgtttttatgtagaggtagctgtgtaaaattctgtcttatgtcatcttcagctgtacttaacatggaacatttattactcattttctcattaagccctctcaattca

SEQ ID NO: 680137 - DNA, 606 bp, Homo sapiens
ggaaagccacaggctctttcctaggaaggacctgccacagaccacgctgagggctgcaaatgacactgacccagcctcctgggatcctcggccaccatgatggcacccaaggcctgagagggagggcaggggaaggaccgggtctatcgacagggatgcgtggcccatgagagccaggcactgttacagcagccgctggggcgtggattttggcggggagggggcagggctgctgtggttggcttttagaccggggggggggggggtctcatctagggcaattctgcccccaggggactctgggcaacgtctggggacatctgcggttgtcaggactaggggtgctcctgaccctgggtggaggccagggacgttgctcagcacccagcagtgtccaggacggccccaccctagggaacggcccagcccgcatgtccgcagtgctcagggtagacgctttagagcatccccggtgaccatgtgtgtgcaaccacacggaggggggggaaacgtgattttaaaagcccatcaggttggaggggcacgaactgacgcacgggacaggkagcgccctgaagctgggctgcacggccttcaggccaggtg

SEQ ID NO: 680138 - DNA, 652 bp, Homo sapiens
aggggcagacattcaaaaaaccttgagtccaaaacagcactgggtgcagccagcaagggacacctcactgactactgaccagctgtgacctcaggccaacatcagggcctgtgcccctgcagagcccaggggatcagcaatggaagaagtctggctatcagtgtgagagagtccatcagtgattcttgggaaggcccttgaatggcaggaagggaggagaggtgggtgaacagaggccgagcacagtggaagagggaggctacaataacaagagacaggcaccggcaaatgtggtagggaggggtaaaggattggagcctattaggaggttaatatggggtgagtttccaaaggaaaagcagagataagattatgccattacmctgaaaattcattaagcagcagcagccatttaggaaggaagagacagctgaattccagctgaaattaaaattgtaatcaagtcaagagagccacactgagacagcagccatggcaggatggagcaagagctgtgcaggaaagtttccccacccagatgatgggcgctcccttcaatctctccggcatattttcaaacacctaccagatatgtacccacactgaggaggggacccataaggaggagtgactttgccagataggtgccagg

SEQ ID NO: 680139 - DNA, 695 bp, Homo sapiens
ttccagggaggcagtggtatgagtttgaaaagtagacagggaggggccgggcgtggtggctcacgcctgtaatcccagcactttgggaggctgaggtgggcagatcacaaggtcaggagatcgagaccatcctggctaacacagtgaaaccccgtctctactaaaaatacaaaaaattagccggccatggtggcggacgcctgtagtcccagctactcgggaggctgaggcaggagaatggygtgaacctgggaggcggagcttgcagtgagccgagatcgcgccactgcactccagcctgggcgacagcgagactctgtctcaaaaaaaaaaaagaaaagtagacagggagaacatatgtattaatttaacctagaaaggctgatgagttttgttatagaatttaaaagatgtggaggtgagagtccactttatcagggctggaattctagggcattgggcgaggccccctcctcagcctttaccttccccattgtagtcaaagtggaagttttctctgttgcaggaagtttcgtcctttccatcatcagtttaaatcctttcctgaaatttcttttcttggacccaaagatgcaagtccctttgaggccccgacgaccctgggcagcatgcaccataccaggtgggtctttctggttcctgagtaccaagggctggttacaggccaaagtcct

SEQ ID NO: 680140 - DNA, 1777 bp, Homo sapiens
caagagacagggtttcaccatattggtcagactggtctgaaactgctgacctcaggtgatcckcccacctcggcctcccaaagtgctgggattacaggtgcgagccaccatgcctggccctaacttagcaatttttgaagaaatctcagcagccttaattcaaaatctatgtaaattgtgtgtgtgtgtgtgtgtgaaaaagctaccaaatgattcttttggagatgaggaattgacagcgagcttaggaaaaagtcagtttttgttgttgttgttgtttttaatcaggagtcttcctaagttgagatgctgacattcatggccacttattgtctggttgtaattcaaatccaatgtccagattctacccattaaagaaggtaataactggaaataacttcattaatatcatgttccagtatctgcgggctctggttgtatgggagaaggctgtctaccattttgctatgaattctaataacctatgccagatatatagtcatggggtaacccccattataaagcttctagtctacaaaaccaagagaaagcttgtcaaaataaatcttaacttctgaccacggtagaagacctactacggggtattaacagtcagaactgccaatcactgcctggtctaaatgtttgtattaaaaattccaactctggtggcatgaactttggataaaatcatcataagctgtgtgagtccaaaaaatataaacccagaatgaaatatatttggggctaaaatgacgttactaatgtctgagatgggtctccctctccccctttgaaacgtgatgcttttattagattatttctactgccaaaagacacagctactgtctggctacattttctggttttctcttgaattaaaacaaataaataaaagaaaaatgtctacatcttttaaacaaagcaaatgggaatatttttattatttttttttcctgccaactgaacaagttctatacatttagataggtctctggttcacataatatgatatgtacttgtatgtgcacacagaatgtataagataaaatgggctccttaaaataagcaagtattgcctaaggatatatagacaaatggaaaacagcacttcgctatgttacaagggttggcatggtgctggaattgactgggagctgcataattttcaactttgctatctacaggctcctgttccacctctatgatttttttgcttcatcatttacctttctgatccttgataacagtcattgtttctcagagcacaatgagaatttggatcacattgctcattctcctcattttacagataaggaaagtgaagcttccagaaattaaatcatcatcatgtacataaagtcaacatacataattacaactaattagtggccaaccacatgctaggaacctccatatttacatattcagcagtatgtgccagaggcatcctcagcactttactgacctaactgcagggtccttggcggtcatctttgttttccatttaaataaaactagggggaaagacattttccatgcaggggcaaatcgcctctcaataattctgcagattcttagggaaagcagaggagtggggagtgggtggtccttacatttttgcctattgcctctgagtttgcctttgctaatttcctgaaatttattgaaatttgccttttatattagtcccattctctttactctgcatcagttcctacatactgtttatgtaggatcgttattttcgatgttgtatcatttttttagatttgta

SEQ ID NO: 680141 - DNA, 1777 bp, Homo sapiens
caagagacagggtttcaccatattggtcagactggtctgaaactgctgacctcaggtgatccgcccacctcggcctcccaaagtgctgggattacaggtgcgagccaccatgcctggccctaacttagcaatttttgaagaaatctcagcagccttaattcaaaatctatgtaaattgtgtgtgtgtgtgtgtgtgaaaaagctaccaaatgattcttttggagatgaggaattgacagcgagcttaggaaaaagtcagtttttgttgttgttgttgtttttaatcaggagtcttcctaagttgagatgctgacattcatggccacttattgtctggttgtaattcaaatccaatgtccagattctacccattaaagaaggtaataactggaaataacttcattaatatcatgttccagtatctgcgggctctggttgtatgggagaaggctgtctaccattttgctatgaattctaataacctatgccagatatatagtcatggggtaacccccattataaagcttctagtctacaaaaccaagagaaagcttgtcaaaataaatcttaacttctgaccacggtagaagacctactacggggtattaacagtcagaactgccaatcactgcctggtctaaatgtttgtattaaaaattccaactctggtggcatgaactttggataaaatcatcrtaagctgtgtgagtccaaaaaatataaacccagaatgaaatatatttggggctaaaatgacgttactaatgtctgagatgggtctccctctccccctttgaaacgtgatgcttttattagattatttctactgccaaaagacacagctactgtctggctacattttctggttttctcttgaattaaaacaaataaataaaagaaaaatgtctacatcttttaaacaaagcaaatgggaatatttttattatttttttttcctgccaactgaacaagttctatacatttagataggtctctggttcacataatatgatatgtacttgtatgtgcacacagaatgtataagataaaatgggctccttaaaataagcaagtattgcctaaggatatatagacaaatggaaaacagcacttcgctatgttacaagggttggcatggtgctggaattgactgggagctgcataattttcaactttgctatctacaggctcctgttccacctctatgatttttttgcttcatcatttacctttctgatccttgataacagtcattgtttctcagagcacaatgagaatttggatcacattgctcattctcctcattttacagataaggaaagtgaagcttccagaaattaaatcatcatcatgtacataaagtcaacatacataattacaactaattagtggccaaccacatgctaggaacctccatatttacatattcagcagtatgtgccagaggcatcctcagcactttactgacctaactgcagggtccttggcggtcatctttgttttccatttaaataaaactagggggaaagacattttccatgcaggggcaaatcgcctctcaataattctgcagattcttagggaaagcagaggagtggggagtgggtggtccttacatttttgcctattgcctctgagtttgcctttgctaatttcctgaaatttattgaaatttgccttttatattagtcccattctctttactctgcatcagttcctacatactgtttatgtaggatcgttattttcgatgttgtatcatttttttagatttgta

SEQ ID NO: 680142 - DNA, 1460 bp, Homo sapiens
tgctaacattttccaaaaactggacatcaattaatgctaatttatgaggaaacttctttggaagagcatagtccagactcataactactgaaaagactcattaatataaacgttaagggagttttttcaaagggaggaattaaggtaaatgcatatcattacagtgaaagctcataatttattgaaaattcagtggaaaggaaactttatgctgtgtgtttccaaagtaatgttttggcacattaatcaaggaaataaaataaggatgaggatgtgatctcaagagagatggtcagtaaaaattcagcttagtgatagctaacatttattaaataagtattatgtgccaggcattagaaacactatcttgtttatttttgcctaacaatgctataaagtagattttcttattatttccatgttgcagtggagaaaagagaaaatcaagcagcctatgttatttgctgtagatcacaaaactaaaaagtggtgaaattcggattcagaatcacctttcttaaccacatgtgctacgacattatactgcctttaacaactgtcagataggtatatgcacaactctaggtgggttcatgcaatgccttattcttcagactgtctaataataaaaacaaatcattttaatccataagttctactatacatttaaatacacaaattaattatttggccaattttaagtttgaggaaattcattattcctacttttaggtcttaaacatggtaaaaaaaaaaaagtaattagtagatccttaccttttgtgaatctctctaacattttgtgaggcccagataatattcacacattggctggaaaatgaaatttctgtttcttgagatacttgatcatcttatgtaaaatctttacttaaatgaaagtggggaatgggcaagttatctttttttttaggggtaggtaagtgtgtgtgtgtttgtgcgtgtgtgtgtgcatgcatgcgcttatgggagtgtgttttggcagaggaaatacgggatgcagacaagggaaagggaaagcaagaagaatatttctcccagaatctgagactggttaacttttgtctattctatctctagtagatctatttgactttaatgtaaatgttttccctccaacctgtcatagacctgtaattggacagaggattctagcaggatgttgacactcatcatctcagtgcttgrtgaaatggatccatccttctagagcagtgcttttcaaacttgaacatgcttctggatcatctggagggcctggtaaagcaaagactaccaagcctcatccccagtttccatttcagtagatctccaggggagcctgtcagtttgcatttctaggaagttcccaagtgatgatattgatggtggtctggggaccgcacctggagaaccaccgaagtggagaggcccactatcaatgaaatgtacatataggctca

SEQ ID NO: 680143 - DNA, 1467 bp, Homo sapiens
catgttgtccaggctggtttcaaactcctgacctcaggtgatctgcccatctcagcctcccaaagtgctgggattacaggcgtgagccaacatacccggccaagcctttttttcatatgcttgttggccacatgtatgtcttcttttgaaaaggatctgttcatgtccttggcctgctttttaatggggttgtttgtttgtttcttgtaaatttgtttaagttccttataaattctggatattagacctctgtcagatgcatagtttgcaaaaattttttcccattctctaggttgtctgtttgctctgttgatattttcttttgctgtactgaagctctttagtttaattagatctcatttgtcatttttgcttgaaaaataaaatttaattggcatacacaaatgtgcgtacatcagggtagttgcagtgatgtgcagagtaaagagaataggaaatgcaatgggtaggaaggtatctgctgtcaatagaagctttgagagcagagacctaaaggatatgagagaactatccatgcaggcagtacagagaagagcattccaagcagagagaagaataagaaataaatgttcttgatgtgtccaaggatatgcaaggaggtcagtgtggctggagttgagcctgctgggaagagatggatactcaatacaaaggagagtgaagtaaggtcatgtacaaacttgtaggccattgcatggtggtggtggtgatagggatagagaattttgagcagaggagagacatatctgatttaccttataaaagtgaatgactctgagtattgtgtgaccaacagattctgtggggactgcagagagacagcaggctatggcattaatacatgtgaggtgatggtgacttggactaaagtgacagtagtgatggtaaaggacattgctcagatttcagacatatagacacatggctcaagatgattcctacaaaggatccacagatagactgtcctgcaaaagttgatggtgcattctcaagtctgaagacagtagggaggcagaattccttctttatgggggtgctcagtcttttttcttgaggctttcaactgatcggatgaagcccacycacactggggacagcagtctactttactcaaagtctactaattcaaatatcacatctttacaaaggtactatcacagcaacacctaccctgatgtttgagcaaacatctggatgccgtaatctagccacactgacacataacacacataagatgttctgaaggtacagtcagaaagattgatgaatggataggatatggtttatgaaactaaagagaagtcaaggatctctctgtggctcttagactgaacaaagggaagattaaagttgctaattaccgatagggcaacaaatgaggaagaagtcatggagatcagaaatatggaattttgtctggagctgttaacaatgtgatgcctgaca

SEQ ID NO: 680144 - DNA, 596 bp, Homo sapiens
tgatgacatcacattgttgctataaatccatgaacaaataagctatccttccattagggaacataaaatggtccattttcagactcagtctgcatactgtttatgggttgcttgctgctttcagggtttttacaagagaacatccactgtttctttctggccctactccagagagctatgttaatattgcccactttccaagatatttggtgagaacacggcataacggagccacattttccatcagggacctgcaccacattttcgtctctatttcccagacaaattaaacccgctgttttatgagcttcttcaaargcactgcacagtagctcactttattgaatatggatactacttccactcggaaaaggaatcctaagataacaggacctagagcttagaaattctagagcacagtaattattaacttcagatattaagtttaggatctgatcctgaattatttaacttccttagaggaagtgaggcaatgggctaatctatgtcattggaattgaagataccatgatctcaaatatattatctgcttacacaggggatgaaaatggaatctacaagcatcaagcatcaag

SEQ ID NO: 680145 - DNA, 1241 bp, Homo sapiens
gtagaaatttcatctgctactaaaatgacaattaaattatttaggtttcaaaagcataataccacaatcctgtaaaaatatcaccttggacaaattagggagttaggaataattaggtaaaggtttttggttaactgccaccttgattactggtcttaggatatttcaggtatttttgaattgcaactatttgagaagccattggtttttgttatagagtaattaacttagtgggcagctccaaaagtggggtagggagttagcttctgactgacagagggaacttatgcacactaattgcaatgaaagatggtcatcctaacttctcaaaactgatagagaagctaaggacatgtgccaaattagaacagtagctgtgaaagctgagtttatcccaagactgaaagaaacgaaacaagtgattaatgaatgtgctattaaggcaaccaaaaatgtcaggcacaaaaagatcaagaataactgtcaggttctagaggcccagagtttccaagtctccaagagggataaaggcaatgattaaatattatttcaatactataatgtaaaaagctcaaaaggaataaagaaaacatatccagcttaaatggtttccttcacatttgtaaagctagatccaatatcaaataacctccaaggatatagcaaatgacttgaaatttcattacgcgggatcagaggagcatttggagtctatatacatagagaaggataagaagcagttactttaagaatgaagagtcttcctacttctagagagagtggaactctaatgctttaggataaaagtttgagtatctctgtgcaccatctagatctttaagatttatacatatatgcatacaccrtaaatcacgtagataatctgataaaagctattgatcatctccccagaaaaagtatccacctactcaaatatttgtcataattctgttccacggatttgagatgttcaagaaatcccttgcatgaagaacccttacaataaagcaatttagaatctgcatttgtctacttcctttcttgcaaattatgctagtgtaccttaaatcattttgtccttttgttgaattaatctatttatggtagtaaaactgccttttacatctacaaggccattgtggactacgagaagtaaaatctgggcaatacatagtacaactaaaagtgtagtcttcgctgtcagttacacgtttaaatagatctacctccatattctaact

SEQ ID NO: 680146 - DNA, 527 bp, Homo sapiens
atcaataaaatcattttaagtctttgaactggttccaggtcaatttttcttggcagttttttggcttcctgaattatactgacccaaaccatgaataatgatctaaaattgcacaatatacaaaaaccatctgtttgataggaacaagagggtgatgtcatggggccacttcttatctcaattttatgtcctgccagtgctgatgtcactggcttggcaacacattggcagagtccaacttgttaaagatgagtaygttcaagaaggaaattgtatcactgcgtggagagggacttcttatgttttctggattggagatggactaacaagaaatggcaagagctgacaataaaatggctagtatatatttcactgcagtgattaacgtattatagttgacaaatatagtgtctcttcctcatttgcattttccaaggaacaaagtccttcatcttctaaaaaggaaaatgttgcagaacttttcacaggagtaaaatatagttgcaccacaagaagatggtagggag

SEQ ID NO: 680147 - DNA, 527 bp, Homo sapiens
atcaataaaatcattttaagtctttgaactggttccaggtcaatttttcttggcagttttttggcttcctgaattatactgacccaaaccatgaataatgatctaaaattgcacaatatacaaaaaccatctgtttgataggaacaagagggtgatgtcatggggccacttcttatctcaattttatgtcctgccagtgctgatgtcactggcttggcaacacattggcagagtccaacttgttaaagatgagtacgttcaagaaggaaattgtatcactgcgtggagagggacttcttatgttttctggattggagatggactaacaagaaatggcaagagctgacaataaaatggctagtatatatttcactgcagtgattaacgtattatagttgacaaatatagtgtctcttcctcatttgcattttccaaggaacaaagtccttcatcttctaaaaaggaaaatgttgcagaacttttcacaggagtaaaatatagttgcaccacaagaagrtggtagggag

SEQ ID NO: 680148 - DNA, 1725 bp, Homo sapiens
ataaatgaagtctccaccaaccagaattgataaaaaacatttagtatagctgttttttttctttttttacataaaaataagtaaaatgctacagatgaagtctgaaatattctgtggcctttgtggtcagtcctgcatccttcctcccatccttagaggggagcrctactggaaattatttacaccctttctgtaattttttatatgtcatatacatacatatatacatctgtgaacaatatatagcatcattttgcacaataatcatttttaatatcccttccccctactggcaggcattcaggttcttttagactttgctcctcaaataatgccgcaggaaatttcttgtgccgatatctttgtgcacatgcgtgagtgtatctgtaggataattttgtagaggcgggcttactggatcaaaagatatgtgcatttgatagtttcaaagaaagggcaccaatttttacttccaccaataatgcatggaacacctatttcttcacatcttctttcacatacaaatttatcaaaatttttaatttttattcatctaatacataaaaaatacctcttatactttgaatttatgtattggaaaccatgtattggtaatgtattagaaatataatagaattatttcttttattataagtgagggtaagcaccttctcatgtgtttgaaagccaggcaggccgggggtggtggctcatgcctgtaatcccagcactttgggaggccgaggtgggtggatcatctgaggtcgggagttcgagaccagcctgaccaacatggagaaaccccgtctctactaaaaatacaagattagccaggcgtcgtggcacatgtctgtaatcccagctacttgggaggctgaggcaggagaatcacttgaacctgggaggcggaggttgcagtgagctgagatcatgccattgcactccagcctgggcaacaagagcaaaaactctgtctcgaaaaaaaaaaaagaaagccagatatatttcttcttctgcggttttttaaggtcttttgcccatttttctttggggctgattatcttattcactcttaagtgtactttgcatgtgaagaaaattaactgtcatatgtgttgcaaatattttcccagttaattacttatgactcagctatttttgccacatggaaatttttaatttttatgaagtcaattttatcaatactaatgtttttaagtggtgatacatttactgttttcttctaattttcttcatttctcccctacttcccatttctaactcaaatcatacctcagattcctgggtctagggtgagatcaacagctggaagccaccacagagttaatccaggtgaaccctggaggttcaacataaccccgaaggctccaggggcccttgacttaactttgccctactgtatatttatagggtatcctaaatctgccctaaccactgacacttcctggagttctttcagtctgaagaaacttctggttccaatttggtctccttaaagacctctgccccaggcaggtctgcatccttggaggcaccatggcagggctggcacagggaagctgggaccttagtgacctactgctgctttttcattcttttcactccctgtggagccgggtttcttactggcagagaagggaaagggagaaaacaagaatgcactcatgctgtcggcctggacttggagattatcagtgtggactc

SEQ ID NO: 680149 - DNA, 1110 bp, Homo sapiens
cgttgagttctaacttcttagaagccaagaacagatttggttacgtacttattctataagaaaagtgaatataagagttagtctgcgtagaaaaatagttctttacattcagtaggagggggaatttatcacattcttaaggcgtaaatgccttaactatcaaaattcttgttattgactaaaggaaatccatacgatttagggaaagtctgtgcccacggcttactgtccttacctttggaccacagcaagagataacaaagggtgcagggaaaagctgacaggtcttgagggagctggagtcggatatatgacgaaaaaaacaaaaatacagaagtcttcattatggaaatgtaagttttaaaaagtaaagctactaaaatcacaaagaacatgattaagatggcaataatacagaactaaggcccactcatttaagcttgaaagagataaaactagtagaaattaaaattaggaaataaatgttaaaggaactaatttcctccaaggagtggtttacattgaaaatataatttttttaagtttacataatttgtgaaagacataataataatgacttctatgttcccaggtaaagatgtaaagcttttgaggttgaaatcaaggaagacaattgtacacctcctcagcacatcagaaacaatacaggcatttctggattgtgaatttgacccgttataccaactcacatagaacagagataagaagtataagattcttaggcttaataaagagtctactaaaggtgacagaactagagcgaaaaagataattttcttaaaaagagattcttcaaagatctccaatctttcctgcatccctttctcttaaagactggtttccaggccaagcgtggtggctcacacctgtaatccyagcactttgggaggccgagatgggcagatcacttgaggtcaggagttcaaaaccagcctggccaacatggcgaaaccccgtctctacaaaaatacaaaaaattagccaagcatggtcgcgcgtgcctgtaatcccaggtactctggaggctgaggcaggagaatcacttgaacctgagaggcagaggttgcagtgagctgagaccgtgccact

SEQ ID NO: 680150 - DNA, 2159 bp, Homo sapiens
tgacatttaaaaagagtagatgattctgagttgcaaacacttctattttattcaataaagaccttctatatgcattattaggagttcactgagtgccaattctttcattgatatgtctctaagtttttaatttttcaagtggtcattttcctctaggtcatcaacacctagaaaaaaatgtgtttcaattgactcataaaccttaagttaatgtaattgctgtctaacagtttctagaattattgcttttgaatggttatgttgcatgaaaaattattattcaaaaactaacacgaaagaggaggcattgaaagttctttataaagttttccatttttatgtgttgatgatctattctcagacttcatgtaatttgaagtaattgctgctatatggctcatgactctcaaattcagcctgcatcaagatcacctggggtgcccatggatgcatttttctggctgcaacttcaaacctactcaatcctaatcttggtggagtgtgggagaggggaggaccaaacccacactttaagagataccgatccatgtgcttagtccattgaatggaatagacatgtttgacaatatgaatctattcaaaatgggatagttgaagatcactgaatttttaacttacaatctatttgacagggaaagtcagtacatttttaattattgttcaatataaattacatatatatactggtgaatttagaaactttttttttttgcctaataacattcttgaaatataattcacatgctgtacaatttacttgtttaaatagttcattggtttttcatgtatttatagtcytgcaattatcagcagaattatagaatatttttatcactacccccaaaaaaatcccatagccattggcagtcgcttccctttccctccaattccttcagtcctacatatccactaatctattttctttccctacatagattgactcattctagacatttcatataaatgatggaatcatacagcatgtaatctttttatctggctttttattttacttagcataatattataaaggcccattgatgctgtagcatgctttagtattccatttcttttcattgctaaacaatatttccatgtattcttttttcattttatttattcattcattcgtcagtaattatatatgaaatttgcttccactttttggctattatgaataatgctgtaaggagcatttgtgtacaagtcttaatggtatggatagaattataaatatgttgtatttattttattctgagattttatacataaaactttactaatttactctagaattacattacaatattaaaataaactctgtgtctcttcctttgcccctattgcaaacccctgacctaataaaataaaatcccagacaacagggggaaaaaaacccggcagaatggatgcctatctagaactctaagcattaatcttaaatcagttttcggggaattttgatgaatactttttagaaaagatgagcagactacctaaacaccacacaattttaaatcattaccttggaatgactttactttcatgtgccaaactgactatggtgtgtatttaatatttgacataatattcccatgcgctttaagaaatccatgaagacttccaataagatagcctttgtatttgtgtgtgtatgcacaccagtgtaatttgcatttccatctcctgatgtgcaggtcttgaatttttgtgtgtgtgatagtgtaatggagcaatggtgacaattgctaaagaagctgattctccagtggatactatttttctttttaaaatattgatggaataatatcatccactttgctgaagaaaaaagggatcacagaaataaataatggtttaatgagaagatgaatgtgaggaatgctggtttatatcatgtgatacctccttttccctctttctgcacatctgattattccctcctttaccaagggtgagctagatagttggcaatttatgctttagtttctttgtgctgtgtgtatgtgcatgcatgtgtgtgtctgtctgcatctgatgatttttacaatgattcttcagattcatgaagtatgttattttttattgctttcgaatcccctgtgatattccttactcttccggatactccatacatc

SEQ ID NO: 680151 - DNA, 2159 bp, Homo sapiens
tgacatttaaaaagagtagatgattctgagttgcaaacacttctattttattcaataaagaccttctatatgcattattaggagttcactgagtgccaattctttcattgatatgtctctaagtttttaatttttcaagtggtcattttcctctaggtcatcaacacctagaaaaaaatgtgtttcaattgactcataaaccttaagttaatgtaattgctgtctaacagtttctagaattattgcttttgaatggttatgttgcatgaaaaattattattcaaaaactaacacgaaagaggaggcattgaaagttctttataaagttttccatttttatgtgttgatgatctattctcagacttcatgtaatttgaagtaattgctgctatatggctcatgactctcaaattcagcctgcatcaagatcacctggggtgcccatggatgcatttttctggctgcaacttcaaacctactcaatcctaatcttggtggagtgtgggagaggggaggaccaaacccacactttaagagataccgatccatgtgcttagtccattgaatggaatagacatgtttgacaatatgaatctattcaaaatgggatagttgaagatcactgaatttttaacttacaatctatttgacagggaaagtcagtacatttttaattattgttcaatataaattacatatatatactggtgaatttagaaactttttttttttgcctaataacattcttgaaatataattcacatgctgtacaatttacttgtttaaatagttcattggtttttcatgtatttatagtcttgcaattatcagcagaattatagaatatttttatcactacccccaaaaaaatcccatagccattggcagtcgcttccctttccctccaattccttcagtcctacatatccactaatctattttctttccctacatagattgactcattctagacatttcatataaatgatggaatcatacagcatgtaatctttttatctggctttttattttacttagcataatattataaaggcccattgatgctgtagcatgctttagtattccatttcttttcattgctaaacaatatttccatgtattcttttttcattttatttattcattcattcgtcagtaattatatatgaaatttgcttccactttttggctattatgaataatgctgtaaggagcatttgtgtacaagtcttaatggtatggatagaattataaatatgttgtatttattttattctgagattttatacataaaactttactaatttactctagaattacattacaatattaaaataaactctgtgtctcttcctttgcccctattgcaaacccctgacctaataaaataaaatcccagacaacagggggaaaaaaacccggcagaatggatgcctatctagaactctaagcattaatcttaaatcagttttcggggaattttgatgaatactttttagaaaagatgagcagactacctaaacaccacacaattttaaatcattaccttggaatgactttactttcatgtgccaaactgactatggtgtgtatttaatatttgacataatattcccatgcgctttaagaaatccatgaagacttccaataagatagcctttgtatttgtgtgtgtatgcacaccagtgtaatttgcatttccatctcctgatgtgcaggtcttgaatttttgtgtgtgtgatagtgtaatggagcaatggtgacaattgctaaagaagctgattctccagtggatactatttttctttttaaaatattgatggaataatatcatccactttgctgaagaaaaaagggatcacagaaataaataatggtttaatgagaagatgaatgtgaggaatgctgktttatatcatgtgatacctccttttccctctttctgcacatctgattattccctcctttaccaagggtgagctagatagttggcaatttatgctttagtttctttgtgctgtgtgtatgtgcatgcatgtgtgtgtctgtctgcatctgatgatttttacaatgattcttcagattcatgaagtatgttattttttattgctttcgaatcccctgtgatattccttactcttccggatactccatacatc

SEQ ID NO: 680152 - DNA, 692 bp, Homo sapiens
tactaaatatttggtcatataacaaagtaataagcagaaagaatctcctgtttttttccaaaggcaaaaaattaacatattttctatagactaatccccttaagatgaggtgaaactatttaaacctatcaaaattttatcatgtgtatagaactttcaaatgtacaaattgtgtttataaaagctaactaatttgactacttattacttagttaaatataacggagtcatcacttttctggacaagtatgaaagcaaaaatattttttaataagattcaattaaattataaaaataaaaataaatgttgacattatataccaatttttcattaaatttctttatatttatataaattatatttctgaacacactagctgataactaactgaagacaaatattgccaacatgtctttggtttcatttctatttatcacaacttgttctaaaattaattcaatcctacatcytctatttcagctgtttggcctactttaagcctcaaaggatcactatcatgattatcccataattttcagtctccaaaggcatcattatcgataacctcacctacctgtaatcacaacattaacattacagtaggacagagccccaactctatatagaactgcatccttcatagagaagctttaagaaaaggcagccaaagtaaacttattctgatccttct

SEQ ID NO: 680153 - DNA, 628 bp, Homo sapiens
ctgggtggggagcctgctgtgtaaccatcactgtttcccctggccaacctccaacacrgtgtgattttgcttccctcttggaaaggttttcccagaaattaggcttgcaagccagaaggcccctgagcaaatgcagaaggttcagaagttttgattgttgctgagatttgtttccatgtcttgttcaaagaaattgggggtggcaaattgatttcatttgtgtgtcaattcagatcaattagtatgcacaggagaactgtgtggagagactctcaggtcatgtcttatctctggtgttgagtaaaaagagagcctgattgttaagagatatctctccagagtgggagccaccccacagaggtaccaggtttgagtgcctcagagttgtcaacaaagggcatgcaacaaatatggagcattctatacatacctaatactgttccaagtgcatggaggagctctgacatagtagaaaatgtagttattgctctcaaaaagagtgtacatggaatagggtggtatgtagtattattgggcatggctctgtgttgaaatttatcatcgtcccttcttaacacatgaatgcatactcacatacttaaaaacataaatgaaggggcatccacca

SEQ ID NO: 680154 - DNA, 628 bp, Homo sapiens
ctgggtggggagcctgctgtgtaaccatcactgtttcccctggccaacctccaacacggtgtgattttgcttccctcttggaaaggttttcccagaaattaggcttgcaagccagaaggcccctgagcaaatgcagaaggttcagaagttttgattgttgctgagatttgtttccatgtcttgttcaaagaaattgggggtggcaaattgatttcatttgtgtgtcaattcagatcaattagtatgcacaggagaactgtgtggagagactctcaggtcatgtcttatctctggtgttgagtaaaaagagagcctgattgttaagagatatctctccagagtgggagccaccccacagaggtaccaggtttgagtgcctcagagttgtcaacaaagggcatgcaacaaatatggagcattctatacatacctaatactgttccaagtgcatggaggagctctgacatagtagaaaatgtagttattgctctcaaaaagagtgtacatggaatagggtggtatgyagtattattgggcatggctctgtgttgaaatttatcatcgtcccttcttaacacatgaatgcatactcacatacttaaaaacataaatgaaggggcatccacca

SEQ ID NO: 680155 - DNA, 1732 bp, Homo sapiens
tttttccccacatcttctttaggtgtatactttttttttttttttatgaatttggtttctcccaactctatattgctcttcattctgtagatgagttttaaaggaaatttttgcaacaacagaaagtaaacagtgtgttgtcaaatacacacaggcaccatatttatcgcattgactttactagagtccagatagacatcacatgaggatttttatcctcaatcttatttctgttcatgtacttattattaactgcctccaattcttttgaaaatggtgagatttaaatcctaaataaacatttcaggtgttccatcttaacataagtcaccaacttctaaacctggcactgggcatttgaagaataggattcgtccctactctaaggagttttcagtctatcrggaaatcaaagatgtaagcaaatagatgcaataaaatactacagatgttctgatagaagaatgtaaagaatccagcaaaggcaaaaggaaagacaggttggttctctcttcctaggggaagtgatgtttgagctgagtcttgaggcaggattaggaagggatatagaaaagaaaagtagcacaaagcaagactcattgaatgctgaacaaaaggcccgattccagctctgctgccaggcaaatgtgtgatcctgggcatttacctcgccgagcttccatttcctcatttgcggaaaggatgggaactaaagcacatctaacaccctttctagatccaaacatcctctatcacgattagacttgataaccatgaaaggaaaagcttttatagtaattgaaatttgtctttctagaggcttcttttcacataattaaatggccacaagttctctgttgtgctagagatacatctccacataaaccttttaaactcttcaggattttcagtgttgcttgcagttgtgctgtcgttagagaatattactttcaatatttaataaacctcaagctattacataagtgacctcagtctaagggaaacccaggtggaagagatctcagaggtcctgaagtctagcagcattcctctctatagcagctaagtttgctaagattgttgtcttggggactcacagtcagcatcttatggctaaaggaattgtgtgaagagaaggacttacatgccatatggagggaggctataaaaattgcaattttctattaaagcctcctgcaattagaatggttcatggtaatattctcttttttcagaatgttttgtggccactgctgactagcttaattttgtctacctagtcttcttgcacaaaggatttgaggcatctcaccagaatgtgaacaatgtaataaaagaaaaattttaaaattagttacaaaataaaaacagatccagggaaaatataggcagaactgagacatctgaggaggagaaaagagtgtttgcagataagcagggtatacatggatgtacaattcttaaaattgggccacacatttgactgtgagcttcctggcaagcaaagcaaaaagaacgattacaaagtggtccacagaaggaaatatttttttctggataagccaagttctctagagccttagttgaaaatactatttgtgggtggttcttcataggcctgtctggcttcctggtggctgtggttcttgtgaagttgagttcacaagcccaacctcttgtttttaacatcagtgttttcttccagggacaatgactcattcttcccaggaca

SEQ ID NO: 680156 - DNA, 1732 bp, Homo sapiens
tttttccccacatcttctttaggtgtatactttttttttttttttatgaatttggtttctcccaactctatattgctcttcattctgtagatgagttttaaaggaaatttttgcaacaacagaaagtaaacagtgtgttgtcaaatacacacaggcaccatatttatcgcattgactttactagagtccagatagacatcacatgaggatttttatcctcaatcttatttctgttcatgtacttattattaactgcctccaattcttttgaaaatggtgagatttaaatcctaaataaacatttcaggtgttccatcttaacataagtcaccaacttctaaacctggcactgggcatttgaagaataggattcgtccctactctaaggagttttcagtctatcgggaaatcaaagatgtaagcaaatagatgcaataaaatactayagatgttctgatagaagaatgtaaagaatccagcaaaggcaaaaggaaagacaggttggttctctcttcctaggggaagtgatgtttgagctgagtcttgaggcaggattaggaagggatatagaaaagaaaagtagcacaaagcaagactcattgaatgctgaacaaaaggcccgattccagctctgctgccaggcaaatgtgtgatcctgggcatttacctcgccgagcttccatttcctcatttgcggaaaggatgggaactaaagcacatctaacaccctttctagatccaaacatcctctatcacgattagacttgataaccatgaaaggaaaagcttttatagtaattgaaatttgtctttctagaggcttcttttcacataattaaatggccacaagttctctgttgtgctagagatacatctccacataaaccttttaaactcttcaggattttcagtgttgcttgcagttgtgctgtcgttagagaatattactttcaatatttaataaacctcaagctattacataagtgacctcagtctaagggaaacccaggtggaagagatctcagaggtcctgaagtctagcagcattcctctctatagcagctaagtttgctaagattgttgtcttggggactcacagtcagcatcttatggctaaaggaattgtgtgaagagaaggacttacatgccatatggagggaggctataaaaattgcaattttctattaaagcctcctgcaattagaatggttcatggtaatattctcttttttcagaatgttttgtggccactgctgactagcttaattttgtctacctagtcttcttgcacaaaggatttgaggcatctcaccagaatgtgaacaatgtaataaaagaaaaattttaaaattagttacaaaataaaaacagatccagggaaaatataggcagaactgagacatctgaggaggagaaaagagtgtttgcagataagcagggtatacatggatgtacaattcttaaaattgggccacacatttgactgtgagcttcctggcaagcaaagcaaaaagaacgattacaaagtggtccacagaaggaaatatttttttctggataagccaagttctctagagccttagttgaaaatactatttgtgggtggttcttcataggcctgtctggcttcctggtggctgtggttcttgtgaagttgagttcacaagcccaacctcttgtttttaacatcagtgttttcttccagggacaatgactcattcttcccaggaca

SEQ ID NO: 680157 - DNA, 690 bp, Homo sapiens
ttatgggctttcttggatcctacacgagatttgaactcttgacttcaaatattctgagatcctgtggcgtttctgtccctggaaaggggtggagcctgcagagctggactcctggaggctggctcatccctctcctagtgaccatggctaggttaccgatggggaccacttcccacaggagtgttgttttatagcagattgctgagagaatgctcaatccagagcattttctacttacaagttacaaattgtgcaattaagggttggagaaagggggtggggggagcaaaataaaatctgctaaatactaagtgtgtatcttgcctcctaaatattataaatgagctttatcagatcackctgagtgccatcttttctagcttaaatgctgacattcaaacaccagtgttaattgctcacttgccatttgtttcatatgcactctaaacttactgttccaattttatatctattatttcctgtctaaatcctttccaagttcctcctttttttcttcattttaataagttcaaattttcatctgtttttattgctgtcagtctcaatagcagtagaagtttaggtgtcagccctatgctgttgctttgattaggaagcaaaagtggctgaagcgtatggcataggatgtacttataaggcatgggacataagccacccatctgtccataa

SEQ ID NO: 680158 - DNA, 634 bp, Homo sapiens
taagaaaaatactttaaatcttaatgctgtctctcaatttaaattttattattaagattaggtgcggtggctgatgcctgtaatcccaacactttgggaggcaaggaaggagaatcacttgaggccaggagttcaagaccagcctgggcaatatagcaaaaccctgtctctacaaaaaatttaaaaacattagccaggtatagaggcacacttctgtagtcctagctacccrggagactgaggtgggaggattgcctgagcccaggactttgaggttgcagtgaactataattgcaccactgcactccagcctgggtggcagaacaagaccatgtcttaaaaaaattgtttttaaattactaactggtagtatagttccattcttctgtttttataatgccaaatattgattggatgatactgccttttttttgggggggggggtggtatgcagccaatggagtatagtatagtataagagtagtgtcttattgtggttttaattcgcatttaatactaatttgatgctgagaatcttttcaagtgcttacttgccatgtgtatgtctactttggtgaagtgtctatacatatctttgtttatttttagctggctctttgtctacttattactg

SEQ ID NO: 680159 - DNA, 666 bp, Homo sapiens
aggtactcaataaatgataattttatgacatatcaagtgattttaacaaaatctcagtagataatgctagtacattagtgaccatctaatgtagagaggtcatgttaagttaacaggtgcatagcctttagttcagatgtcaacaacctatggccaggagagagaggatcttatgattcaaagcatatagatttatgtataggaactcccctggggctttgttggtcaggagctataaatcaatacaggctctcagagcatgtttatttcacatgtttaacactgaattgccatattaaaaacagagtttcctgataatcactgtcctaaaggtgaacaaagtttggcaggttacttataatatcccttctgactgagaagccctgacatcatttaactcttggatgaccttccytgtagcttcaatgaacagattgatgcccaatgtgataggcctcccattaattaaaagactgatgttcaaggagataaggacaagggttgtgcacatgttattccttgggaaaatggtgagaagagagggaaatggggagaattgagggcagaaattacagaagtaaagtaaataatacttgtgaagaatattggttatctcttggtttcaaaactttttagcttgctatgtgtgtttctgtaacatttcct

SEQ ID NO: 680160 - DNA, 627 bp, Homo sapiens
acagctctaaacctgctgctgtatatcttctaatagaatatccagaaagtagaaagtatcacatctctattgtgaaaaaaatacatatatttaataatttatatagcgccatgagaatatctatataaaacttcagagcttacctcaaattccctcaaagagactcttttttcttggatctgcacacgaatttcacagcactggggctttgaacaaaaatgttcaaaattccaaaacttcatgaatagctttgaagtaaaatatttttgaagcccactgagctgaacatattaaaagatttcatttagcatttccatttagggttgatcctaatttacaagaaatagtggcattatgccagtctctcaaaattaaaataaattttccactaattgttttcttagcctacaagatctccagtaccagctcttcccattgtagtgcataycttcccatctacaactctttataaggactgaaaatatggaaagcaagatgtattttaagtggaaaattcaaatgtgaactaagggctagaagaagacatgtattgggtaagggatgagggatcagatcagttacgggaggaactgagttgactggcatcattacagtgaaggatgataa

SEQ ID NO: 680161 - DNA, 1346 bp, Homo sapiens
ttgccgtccccttcaaaggagtcatctcaggaaattctaggctcattccattaatgctaccatttctcaaagatagttttctaacttctttttcagagcctgtattgctttaaccaactttaggactgtatctaaatcaagagttgtcccactttttctgcaaagggccacttagtaaatatcaccatcttcccatcttcacatggctgtcttccctttgtgagtcctgtctctctgcttcttataagagcaccagttatattggttagggcccatactagtaactccatcttaacttgattacatctacaaagaccctatttccaaataagatcacattcacaagtccaggagattagttcttcagtatatattttactytggagggacacagttcactccataacaattatgagggccacttagactttgtaggccagactctgtagcaactactcaactctgccaaagccagtcacagtataagtgaatggacacggctgagttccaataaaactttattgacaaaaacagatggtgggccagattgggcctgcaagctgtagtttgccaatctctgatccaaataataaagttgtaatttgatttttatttaattttatttgtcattctgggcccaatctggtgaatgagaagggaaataatatactggggaagaaataagggggtactccattcacaacagaaacccaaattacaaagttacaaaatgcctaagaatgattaaataaatgcagagaagtggaaaccatccattttcctgggctacataagatacaaatgaatagacacactttaaagtagcaccgtccaaaagaaatataatgcaaaccacttaagtaattttaaattttctatagctgcattaaaaaatgttttaaaaatggataaaattgactgggcacggtggctcacgtctgtaattccagcactttgggaggccaaggtgggcggatcacctgaggtcaggagttcaagaccagcctggccaacatggtgaaaccccgtctcaactaaaagtacaaaattagccgggtgtggtggcacacacctgtaatcccagctccttgggaggctgaggctggagaatgggttgaacctgggaggtggaggttgaagacagctgagatcactttgcgctccagcctggatggcaagagtaaaactccgtttcaaaaaaatggataaaattaattttagcaagatattttctttaagccaatacagccaaaatattatctcaatatgcagttgttataaaattattactaagatattgtgtacttttatactaagcctttgaaatctggtgaatattttttaaa

SEQ ID NO: 680162 - DNA, 1102 bp, Homo sapiens
accacacctgaccaagaatattttcttttttttgagatggagtctcattctgtcgcccaggctggaatgcagtggcgcaatcttgtcctgtctaactacactttagaacgctttcaccgtctccccaaacccctgcctcccagcccctggtatcctccattctactctctgcttccatgagttcaattgttttacattccacataagtcagatcacgtggtagttgtctttttgtgcctggctcacttcacttaacatcatgtgctccattaagctcctgtgaatcccagtttctaacctgcaattgctctaagtgttttcattgccttttcatggtttctactaagaattccagagcccagctgcaatgttttcactgctttggatgttattcattgtttttctttacatcttgtccatggacacacaaataaattgtccggtgcaagtgcagcggccgtatgcgcttcctgtgaaagaaggccggtttgacatctattaaacaaatccatctcagcattcttaacagcctttatattgtttgatatcaagctcagtcatttaaaaaatatgcctctgtctttgtaagattacctatgggttggagaagacttatgtaatattcaactcagcagataatgtatataaaaattattgcatatgatttaatgatctggaatcaattttaactgtttatatgtcacacttgggaaaaagcaggacaattataaaatttaataatggcatctccataaaaagcaataattcatattctactttaaaaatcctttctcttatgtagaggagtaagtggcatcctggtggcaccagaaggatgtactggtgagcttgtgtagtggtcactaagttaacgcgtgttgctttatttgactgatactgatgttgccatcttagcttccggcagttaggtgggcagaaaacccaaagttagtaactttggacagttgcaacaatgttagtaactcaagggccaaartgatggattaaacggccagtccaggcaatctctggttcaccctcatgatgacagagtgcttttaggtagtgaggcagtgcttagtctcaaggcagcctcccttcc

SEQ ID NO: 680163 - DNA, 648 bp, Homo sapiens
tcagtgcactggtggtccataaactgttggtaactgatccacaatgaaatagcacaaaaactgacaggagtttagaaacgtttatagtaggccgggtgcggtggctcacatctgtaatcccagcacttggggaggccaaggcaggcggatcacgaggtcaggagttggagaccagcctgaccaacatggtgaaactccatctctactaaaaatacaaaaattagcagagtgtggtggcacgcgcctataatccctgctacttgggaggctgaggcaggagaatcgcttgaacccaggaggcagaggttgcagtgaaccaagatctcaccactgctctctagcctgggtgacagagggagactccatctcaaaaaaaaaaaaaaaaaagaaacgtttatagtaatttgatattgcctcaatatcaacagactttatcagtcaatgacrtatttcccccccgccaaaattggttcttcatcaaagatcattcgagaagcactgacttagactacccaaaaacccatctaaatgagtgtctgtgctgcttctcagagtgttcggcacacacatataaaacatagtcccggccgggcacggtggctcacacctgtaatgccagcactttgggaggccaaggcaggtggatca

SEQ ID NO: 680164 - DNA, 1484 bp, Homo sapiens
cttgaaccacaccaactgaaatgggtacagtgggggatgcccagtggcatgctggtaaatgtttaacaaccagcttcagggttgggggtgaggtcctcatctgtaatgtatgttaatttttttggtgtaaatactgtcaccatggcagatttcacaccaccaatgtggtccctgagcatgggattgggaagaggtgtgcaggagtagccattagataacatttctaccatatagccaaatggatggcctcaagattatccaaaataataaaacgtagcaaaataatcaggaagtgatgacttttgagtatgtattacctttgcttttaatatcttaatttattaaatcacaggtttatgagccaggcacgatagctaacgcctgtaatcccaacgctttgagaggtctaggcaggacgatcacttgaggccaggagttggagaccagccagggcaacaaaacaagaccccatctctataaaaacatttaaaaactagctgggagtggtggtgcccagcggtggtcctagctactcaggaggctggggcaggaggattgcttgagcccgtgaagcggaagctgcagcaagctatgattacaccaccacactccagtctgaacaacagagtgagaccttgtctcaaaataaaaaggagaaatttttagaatttaatgttaaataacgactatgtatggccaaattcctgaaatcttaacaattagcttttatgagctggtgtgagcagatctatcatactactggcaaatgctccaaaaggagaaggtttctgttgttagaaaaagggaaaatcaatgctgagtaggcaaagataatggatgtttcttataagtgagaggtatgattcgtgaaagttgaaaattaatactattgtagtgtgaggatatgcaaagaaaattttgtcttgcccaaaatgtatttcaagagaaaatcttcgagaattagggagacacgaagaccttgtgtgtgtttacccctcacagtatcaagagggaacagctctcgagtaagtacttccgcaacctcagccctaagkgttggtggtttggtacaggacagccccagcaaccatacctgagaccctgaacagttacagagatgggggtgagcatggaggacagctggaaaaaagagcttctcagtatactgctctcacagcctccaaaaaagtcaatattaatcatttaaattaaatgcagaaagttcttggtaaactgatggaagtctagactgtcattttttggaaataaccgaagttgcctttctatccataggacaaacattctctgtcaaatctgtcttcagtaacccagaattccttgatcactacacctctgaatttctgtaattttttttttttttcagacaaaatcttggtctgtcacccaggctggagtgcagtggtgtgatctcagctcactgcaacctctgcctcctgggttcaagtgattcttctgcttcagcc

SEQ ID NO: 680165 - DNA, 607 bp, Homo sapiens
tagatataatatagatctatattatatagatatacatattatatatattatatataatatacatctatrttatatagatataatatatatatatatctatatctcaagcaggccactgtgcctggcctgcttgcttcttttaacctatgctattcctatttttaccttgaccttaaagctgattggacttcattttatgagaggatgctgtggcttacccaggtcataaccattaaatttatcacattaaccaatgtttaaccatgatcacagattactgagaatactggcaagaaaatgagtaactacaaaattgcaacaggttgtgtgcaattaaatttttttttcaaatatattttaggttaacattaaacattccagttataatctctattctgcagttgatgcagagttcgtgttttaaaaaaagaactgccttcacagaaatgtggacttatatacttttatataataaactttatatttttagagccattttaggttcacagtaaaactgagcagaaaatagagatttctggtacctcttgccctcacacatgcacaacctccctccctatcaacttcccccaccagaatggtggatttt

SEQ ID NO: 680166 - DNA, 607 bp, Homo sapiens
tagatataatatagatctatattatatagatatacatattatatatattatatataatatacatctatgttatatagatataatatatatatatatctatatctcaagcaggccactgtgcctggcctgcttgcttcttttaacctatgctattcctatttttaccttgaccttaaagctgattggacttcattttatgagaggatgctgtggcttacccaggtcataaccattaaatttatcacattaaccaatgtttaaccatgatcacagattactgagaatactggcaagaaaatgagtaactacaaaattgcaacaggttgtgtgcaattaaatttttttttcaaatatattttaggttaacattaaacattccagttataatctctattctgcagttgatgcagagttcgtgttttaaaaaaagaactgccttcacagaaatgtggacttatatacttttatataataaactttatatttttagagccattttaggttcacagtaaaactgagcagaaaatagagatttctggtacctcttgccctcacacatgcacaacctccctccctatcaacttcccccaccagartggtggatttt

SEQ ID NO: 680167 - DNA, 1861 bp, Homo sapiens
tacaactatttccttggcacaggtgcactgtaaggcgcagtactgttctattttctaacccttcactaccctataaggtaggcatcacgacagtctacattttgctaatgagaaaaggatgctcagagaggttggataacttgcccacggttacacagcttgtgagttgctgaattgggattcaaatccagttccatcaagtatcaagtccaggctttcacccttcygctttggggaatcagcttctgcctcctggcccttcctttaagcctagactcactccatgcagagcccaggatccctatggacaaaggctgcgcacttggctttgttgtgtttcttgtctttctcccactttgggggtccatcccggatattttcctggctttggatcttgtctgtttcagcttaaaatgagacatctgggggaaaggcgtatcttaccatcagccccctgcactgcttagccttgagttctggacggtctcaccacccttcgcccccctccatcctgttccctcggaactgtcgaccttggggctctcctgggccctcactgcagcttccgtccggtgatcccaaacagcagcatttttctaaacatttttctaagcaatgagcatgagatttcacatctgggccagttgttactgacgccctgagtcacccagctctcctgcaagtgaacgagcctttcagtttaactgctggcttgtaaaaggcccatgcatgcctctgtttttccaaatatgtaaaaatccattagagagggggagaatgtggttcaaagaaaaagttaagttttctccatgggaacaaaagttttccagggaggaaaatgtgtaaatcctacaatataactgagtggctttcaaaaagagtttttccagagatgaaccctgttgcagagggtccttaagttgaaggtcaatgtacaaaatggtcaaagtggagcttacgggatggaaggaggaggggtagaggttgcccagtgatgtagcttccctcttgttccctcactaaccacttctctaggaaacctgccattgggtgtggaacacagtttgagaacccctgaaaaagccctggcccaggagttcaaaccctggccctgagtcttagaaccatcttttgctgctgtgtaactccaggaaaattagtagccttctctgggcctcacttgtcccatctgggaaatgtcatggttggattagacattttctaaacttctttcaagcctaagattcaatcttactgaggaaaattccatctgaagttggcaactgtttgaaaagtagactttttgaaaaaagaaacaagagttctcttgtttgaggcaatctagtaacaaaccaactgctaagaaagtgttttccaaatagaggtgctgtgtgtctccttgcacgaatggatagaaaatgaccaacttcattattagaaagtaggttaaagatattccctgctctctcatctgtgtgattaattggtcagtaatccttccttcatgaaaagtaccaagtaatgaaaaatcaaactgaacattaatagagacatttactgatcagtaatgtagacagttttgtttaaaatatcaggcctggtgtggtggctcaacgcatagcattccagcactttcggagggtgaggcaggaggatcgcttgaggccaggggtttgagaccagcctgggcaacatagcgagacctcatctctctctaaaaaaactagctgggcatggtacctatagtcccagctacttgggaggctgaagtggaaggattgcttgagcccaggagtttgaggctacagtaagctatgactgaggcactgtactccagcctgggccacagagcaagatccca

SEQ ID NO: 680168 - DNA, 2970 bp, Homo sapiens
attgaggaagtagccacccaaaagtgcaatctgtggcaaataagttgtcatcctgagccggatcacctctgggtgatctgataaagttagttttctagccctacaagggagaaagccagaatgacagtgacccaacaacaggccagcgcacttcctgcctgtgtgtatcatgctccagtgcccaagaatgggagggagagcattgctacggctcaccattaagattttaacaccatgagagggttcctggtgtcactgcatgtcagtatcaccgtgaggaaattcttgcagcctttagaccccagtgaaggcaaaaggaggctttactttttccagccctcgttaacctgacaaatcaaccagctgtcttagacaaatcttggcaagcgtttgtcttgccttgtttataacaaaacatttcccacccaagcctgtggtcaggttttgttttttaatgaatgggaatgaggatattgcactgccttctcaggaacttcacagagagtcactactgtttcctgacctctccttgggacttcaggaagcgatactgaccttagaccccaataaaaggggcttgggtcctgtgcctcagagggccctgcctgaccctttctttggccacgcctttcatgagggtggagtgagcggggccaaggagacacgctcacctggtgctacactgtgccctggtgatctaggaccccaaattccctgcccaaacagctgcagcctacttctagggtccacacaggttcttcccagagttcattttcccagggactcacagggtgtccagaaagcagccatttgcctgggggtatgggtgaagcctgggcatgcactctgggtgtccacatgtgtgctcacaaggccacctgtgtcacgggatggacacagcattgggaacaggaggataatggtcctctcctcacactgccattttcctctggggagctccagcaagtctgaactctacatttgaacctagctttctagctcatgacgaatttgtaaaactaggaagatagaatatatttaacttaaaatgtttagcttgatgtaaaactcttcgatgtctagagtattgagcctccaatgatatgcaaaccctgcaccgccaaaggttcagagcagttgtgttggccagaaatgatctttgttgtatgctgagattgtacaaagcaaagacccacctctagagaagcactcctgttcctaactctgaagtcaggatattttgaacaggtaaaacaatgtaaactgagataatcaattttaagtttattttagaatgatgccaatgatgtgagtgtggctgtgtgtgtgtgcatgcatatttggatgtgtgcggttgtgtgtctatgtgtgtgtgtgtgcgtgcacatgtgtttgtgtgtatgcatgcattaattttaaaaatggtagaaaccaatgtctagaggtctgaatcagtggaaaatgttatggtgtccccactgaaaaattcaaaattaaaataatcttaaatcatcaaaaattattcccctagattctgatttttttccatattgattatttccctgttttgcagatgagaagactgtggcttggagacgttaagtgacttacccaagggcacagagctcatgaacctgaatcagggttcacgccaaacagtgtggctctggggccccgggctcctgtacactattctgcatgatctcttggcctggagaacagacccaggtggactggggccatcactctggatgyccaaaagatgaggacttcttaggaagttgagcagcgagcactagatattattaatagatgtcaatagctgctcagacatagtaatcaaatgaattctaaggtcttgaatgtaaggagactcaccacttatccttcatccctttgctggtgacaagaagagaccaaggtttgtgatggtactgctgggggctgcctgtcagaaaaaggaaggcatcctgcttggaccggtttctgcagaggaaggaaagaaaggaaacgtcgtcccctggtgggcatcgttggtagcggcagtaggcagccgaccagcattaggtatgaggaggatgttaaggcaaggaggtttctcgagtcctggtgaattatcatgttgtaactatcccatggccatttaaaaggaatgtgcattctgcttaaaggatatatatgcgtctattaaatcaagatgcttttattgttacattcttcaaatcctctatattcatatataaatccatgcatatgaaaatatatgaatatatagtctaaattcatatatatagtctatattcatatatgtatatatttcttgtgtcaattacgaggggcagagagacatgttaaaatctcctggctataatttttatttgtctattttccttcatacactgctatggtttgaatatcccttccaaaactcatgttgaaatttaattgccattgtaacagtactaagaggtggaatctttaagagataattaggccatgaggactccactgtctcgaatggattagtgttgctatcatgggaatagtttcgctataaaagagtgaagaaagacccccttttctctctcaccctctcttgcccttctgtcttctgccatgggatgacacagaaagaaggcttcaccaaatgctggtgccttgatcttggacttcccagcttccagatgtgagagaaataaatctgtgttcattataaatgacccagtctcaggtaatctgtttagcagaaaaaacagactaagattcccccagctgtttttgcttcagatatttaaatacattcaaatacggtgttgctatttgcagtgtacagtatgttactcaacacaaaaaaaagttttctactgtgatgtcttcactgtggattgggctttttgtgtaaactaggcccctaaacctttgaccctgtcctgttcttccttccgttacatttgcttaattgtttctttg

SEQ ID NO: 680169 - DNA, 2970 bp, Homo sapiens
attgaggaagtagccacccaaaagtgcaatctgtggcaaataagttgtcatcctgagccggatcacctctgggtgatctgataaagttagttttctagccctacaagggagaaagccagaatgacagtgacccaacaacaggccagcgcacttcctgcctgtgtgtatcatgctccagtgcccaagaatgggagggagagcattgctacggctcaccattaagattttaacaccatgagagggttcctggtgtcactgcatgtcagtatcaccgtgaggaaattcttgcagcctttagaccccagtgaaggcaaaaggaggctttactttttccagccctcgttaacctgacaaatcaaccagctgtcttagacaaatcttggcaagcgtttgtcttgccttgtttataacaaaacatttcccacccaagcctgtggtcaggttttgttttttaatgaatgggaatgaggatattgcactgccttctcaggaacttcacagagagtcactactgtttcctgacctctccttgggacttcaggaagcgatactgaccttagaccccaataaaaggggcttgggtcctgtgcctcagagggccctgcctgaccctttctttggccacgcctttcatgagggtggagtgagcggggccaaggagacacgctcacctggtgctacactgtgccctggtgatctaggaccccaaattccctgcccaaacagctgcagcctacttctagggtccacacaggttcttcccagagttcattttcccagggactcacagggtgtccagaaagcagccatttgcctgggggtatgggtgaagcctgggcatgcactctgggtgtccacatgtgtgctcacaaggccacctgtgtcacgggatggacacagcattgggaacaggaggataatggtcctctcctcacactgccattttcctctggggagctccagcaagtctgaactctacatttgaacctagctttctagctcatgacgaatttgtaaaactaggaagatagaatatatttaacttaaaatgtttagcttgatgtaaaactcttcgatgtctagagtattgagcctccaatgatatgcaaaccctgcaccgccaaaggttcagagcagttgtgttggccagaaatgatctttgttgtatgctgagattgtacaaagcaaagacccacctctagagaagcactcctgttcctaactctgaagtcaggatattttgaacaggtaaaacaatgtaaactgagataatcaattttaagtttattttagaatgatgccaatgatgtgagtgtggctgtgtgtgtgtgcatgcatatttggatgtgtgcggttgtgtgtctatgtgtgtgtgtgtgcgtgcacatgtgtttgtgtgtatgcatgcattaattttaaaaatggtagaaaccaatgtctagaggtctgaatcagtggaaaatgttatggtgtccccactgaaaaattcaaaattaaaataatcttaaatcatcaaaaattattcccctagattctgatttttttccatattgattatttccctgttttgcagatgagaagactgtggcttggagacgttaagtgacttacccaagggcacagagctcatgaacctgaatcagggttcacgccaaacagtgtggctctggggccccgggctcctgtacactattctgcatgatctcttggcctggagaacagacccaggtggactggggccatcactctggatgcccaaaagatgaggacttcttaggaagttgagcagcgagcamtagatattattaatagatgtcaatagctgctcagacatagtaatcaaatgaattctaaggtcttgaatgtaaggagactcaccacttatccttcatccctttgctggtgacaagaagagaccaaggtttgtgatggtactgctgggggctgcctgtcagaaaaaggaaggcatcctgcttggaccggtttctgcagaggaaggaaagaaaggaaacgtcgtcccctggtgggcatcgttggtagcggcagtaggcagccgaccagcattaggtatgaggaggatgttaaggcaaggaggtttctcgagtcctggtgaattatcatgttgtaactatcccatggccatttaaaaggaatgtgcattctgcttaaaggatatatatgcgtctattaaatcaagatgcttttattgttacattcttcaaatcctctatattcatatataaatccatgcatatgaaaatatatgaatatatagtctaaattcatatatatagtctatattcatatatgtatatatttcttgtgtcaattacgaggggcagagagacatgttaaaatctcctggctataatttttatttgtctattttccttcatacactgctatggtttgaatatcccttccaaaactcatgttgaaatttaattgccattgtaacagtactaagaggtggaatctttaagagataattaggccatgaggactccactgtctcgaatggattagtgttgctatcatgggaatagtttcgctataaaagagtgaagaaagacccccttttctctctcaccctctcttgcccttctgtcttctgccatgggatgacacagaaagaaggcttcaccaaatgctggtgccttgatcttggacttcccagcttccagatgtgagagaaataaatctgtgttcattataaatgacccagtctcaggtaatctgtttagcagaaaaaacagactaagattcccccagctgtttttgcttcagatatttaaatacattcaaatacggtgttgctatttgcagtgtacagtatgttactcaacacaaaaaaaagttttctactgtgatgtcttcactgtggattgggctttttgtgtaaactaggcccctaaacctttgaccctgtcctgttcttccttccgttacatttgcttaattgtttctttg

SEQ ID NO: 680170 - DNA, 2970 bp, Homo sapiens
attgaggaagtagccacccaaaagtgcaatctgtggcaaataagttgtcatcctgagccggatcacctctgggtgatctgataaagttagttttctagccctacaagggagaaagccagaatgacagtgacccaacaacaggccagcgcacttcctgcctgtgtgtatcatgctccagtgcccaagaatgggagggagagcattgctacggctcaccattaagattttaacaccatgagagggttcctggtgtcactgcatgtcagtatcaccgtgaggaaattcttgcagcctttagaccccagtgaaggcaaaaggaggctttactttttccagccctcgttaacctgacaaatcaaccagctgtcttagacaaatcttggcaagcgtttgtcttgccttgtttataacaaaacatttcccacccaagcctgtggtcaggttttgttttttaatgaatgggaatgaggatattgcactgccttctcaggaacttcacagagagtcactactgtttcctgacctctccttgggacttcaggaagcgatactgaccttagaccccaataaaaggggcttgggtcctgtgcctcagagggccctgcctgaccctttctttggccacgcctttcatgagggtggagtgagcggggccaaggagacacgctcacctggtgctacactgtgccctggtgatctaggaccccaaattccctgcccaaacagctgcagcctacttctagggtccacacaggttcttcccagagttcattttcccagggactcacagggtgtccagaaagcagccatttgcctgggggtatgggtgaagcctgggcatgcactctgggtgtccacatgtgtgctcacaaggccacctgtgtcacgggatggacacagcattgggaacaggaggataatggtcctctcctcacactgccattttcctctggggagctccagcaagtctgaactctacatttgaacctagctttctagctcatgacgaatttgtaaaactaggaagatagaatatatttaacttaaaatgtttagcttgatgtaaaactcttcgatgtctagagtattgagcctccaatgatatgcaaaccctgcaccgccaaaggttcagagcagttgtgttggccagaaatgatctttgttgtatgctgagattgtacaaagcaaagacccacctctagagaagcactcctgttcctaactctgaagtcaggatattttgaacaggtaaaacaatgtaaactgagataatcaattttaagtttattttagaatgatgccaatgatgtgagtgtggctgtgtgtgtgtgcatgcatatttggatgtgtgcggttgtgtgtctatgtgtgtgtgtgtgcgtgcacatgtgtttgtgtgtatgcatgcattaattttaaaaatggtagaaaccaatgtctagaggtctgaatcagtggaaaatgttatggtgtccccactgaaaaattcaaaattaaaataatcttaaatcatcaaaaattattcccctagattctgatttttttccatattgattatttccctgttttgcagatgagaagactgtggcttggagacgttaagtgacttacccaagggcacagagctcatgaacctgaatcagggttcacgccaaacagtgtggctctggggccccgggctcctgtacactattctgcatgatctcttggcctggagaacagacccaggtggactggggccatcactctggatgcccaaaagatgaggacttcttaggaagttgagcagcgagcactagatattattaatagatgtcaatagctgctcagacatagtaatcaaatgaattctaaggtcttgaatgtaaggagactcaccacttatccttcatccctttgctggtgacaagaagagaccaaggtttgtgatggtactgctgggggctgcctgtcagaaaaaggaaggcatcctgcttggaccggtttctgcagaggaaggaaagaaaggaaacgtcgtcccctggtgggcatcgttggtagcggcagtaggcagccgaccagcattaggtatgaggaggatgttaaggcaaggaggtttctcgagtcctggtgaattatcatgttgtaactatcccatggccatttaaaaggaatgtgcattctgcttaaaggatatatatgcgtctattaaatcaagatgcttttattgttacattcttcaaatcctctatattcatatataaatccatgcatatgaaaatatatgaatatatagtctaaattcatatatatagtctatattcatatatgtatatatttcttgtgtcaattacgaggggcagagagacatgttaaaatctcctggctataatttttatttgtctattttccttcatacactgctatggtttgaatatcccttccaaaactcatgttgaaatttaattgccattgtaacagtactaagaggtggaatctttaagagataattaggccatgaggactccactgtctcgaatggattagtgttgctatcatgggaatagtttcgctataaaagagtgaagaaagacccccttttctctctcaccctctcttgcccttctgtcttctgccatgggatgacacagaaagaaggcttcaccaaatgctggtgccttgatcttggacttcccagcttccagatgtgagagaaataaatctgtgttcattataaatgacccagtctcaggtaatctgtttagcagaaaaaacagactaagattcccccagctgtttttgcttcagatatttaaatacaytcaaatacggtgttgctatttgcagtgtacagtatgttactcaacacaaaaaaaagttttctactgtgatgtcttcactgtggattgggctttttgtgtaaactaggcccctaaacctttgaccctgtcctgttcttccttccgttacatttgcttaattgtttctttg

SEQ ID NO: 680171 - DNA, 664 bp, Homo sapiens
tagaaaaacacagcacacaaattatagagagatacttacatcttcasgccaatatccacagtgcattgtttgccttctgaaaagcaggtatttattcacatcatattatgcagtgaaacaaaagataatctggaatttgtaagctaattggctggaaataattatagccaatgaattaatgatgcctatttgttcacgtttttctgtacgtaatctgacctatatgttttaaaaatataaacttattttagcgtttattttaagttatgccattattcatgttcctgtcaactgatttttggtgtactgcacttttatttttgataagattattgacaaacccattcttacatgactacaaaaggcacagaatatatatatatacatatatatgtgtgtgtgtatatacatgtgctcatctctgacattaacataactaatcttttttaaaagtatcattagtctacatttgctgccataacacattattaatctttcatgatcaaatgtacaccaaatatacatttcttacctgataagagaataagtagatccaatcatgcccattttggtaaatccagtcatgcccttatcataatatggccaaagcaacaaaggcagacagaagattcttaggcaaacactgtttccaagaatgccaatg

SEQ ID NO: 680172 - DNA, 1443 bp, Homo sapiens
cccccaccccacaggtacaaggaaaacttatgaacaaagtagttcactaaaattctcaaaacaatatgtcaatggcaaacctcctaacttatttttcaagaaatattcattttctgcaactgcctaaaaactaagtaaaatgtcccattttctttaagtataaaatattagaaatatcatcaactcttcagtagcttacatcttcagattaactctacaaccaaaacttcttcctgtaagtagcccccaaaatagtctgtttttttctttattccccagtcaaagtatcagtccaggctctgaatactcctttactttgaaatctgacttttctaaacaacagatactgagagttttattactcttctacgatgcaaaaatatacattactttcttctagaaattctattgccttatgtaaaaggatgactttcctttcaatgttcacaaggtttgtcttcaagtggacctaaattctaacatttcttcaatctttcttatctgactgttctattctgttctagtcctctctattgtactctcttttgttcaaagaatcctttatctcctgttttcaactcaccaacattaatctgattttaccacctacattttcagtgccacgcttgttcacattcatttgacaggtatttattgtgtgtctactattgtgtatcctagcattgcagatacagcagagaataaaaatagacaacatttctactctcacatagcttatgttttagctgggaaaggcacacaacaaataaataaatatataatgtctaggtggtaatgggttttaaagaaaacttaagcagactaagaggacacccactagaggcagaactatctagacagcttggttagagagggcccttctgatatgatgatatttgaatagatgtctgaataaggtgagggggtaaaagatgtaaaaatctgatgtatcatcttaggtagaagcccaggtatcagcatctttaacataaggaaaattacttaacttccataagcctcagttttcttctctgtaaaatagcaatgatgataacaccactgttttggggttattgtaaaaattagagctaatgcctgtaaaagattagaaaaggacccagtgcaataaataatcatcattatctcacacggctatgtaagaaagtttaaaaatttaggatacaccaacaatactttctgaaaatttaggatacacccataatgctttctgaaaactacctaaaaatcatttcagagtttatagcaaattaagtagcttcttaaacacaagtctgaaaaaccaacaaatctctgagtcccagtattctaattttctagatgtaagatcttgggaagcttatacaatttctccaaatttgaatttctttgtctgtataatgggttgtattaaggccragcacagtggctcatgcctgtaatccc

SEQ ID NO: 680173 - DNA, 1191 bp, Homo sapiens
aaaagataccattcacaaaagaaagaacactgcaagtcgctgaaaatctggtcgcccaacacaacrcctgctgctacgtgggtgtcggcacgcagctgaaggagcgatgggcaacccagcgggtgccaaccacaggatgggcctgttcaggtgtcaggaagagatgctgagtgagatcacgcaccaaggaacgatgagtgccaagaaggaaaaaaagatggggcaggaagtgccgcgggggtgcagcccctgcgaggtgcatgggatagggagtgagtcccgggaaggcagcttctgagcgcctcggggaaggccctccaggcagagggcagcgggagcacaggactgtggcagagcgcacctgagctgtgaggaggtgtgagggaggcggggggctgggcaggcaacgtaagtgggcatcgggagggcatcggggccagggcgggagcaggaagaatcatcggagcctgggcaacatccaggcctctcaccgtcatcaggagagaagggggcaacttgggtgccagcctgtgagaggtgaaaggagacaaattctgaagaccctttgacgggagggtcactatggcccaaaaggccagaagtgagactgagggaaagcaagaagacgaggggaagcaggctgtggtcctgaggagcaaaagaagggcctgctgagatgtggcagagctccagaagcctccgggagggcgggagccctgacactctaggtgaagaggcctgcggcctgtccagctgcagggccaaggagacaagagggcaggctcctccaggggggcccatgcacacctaaaatgagtgtcaggaggagggagaaggaaagaattaacggaaccaaagaacggaagctttaaatattcagatcaaagtcttaccaagtatcaagcaagaataaagaaaacacacacaaacataaacccctaaagacatcctggtgaaaactttgaaagacaaagattttacatctagaaagaaaaataaatcacgttttgctgtcagcaaaattcacttcaaaataatgctagattacaacagatacaggtctaaaaagttctgagaggagaaaggcatatcatcactaaaatatgagagaaaaataaacacactttaatacatacaaggactgaatgtatagtacccatgaatccttcctggaaaaactggcaacgaata

SEQ ID NO: 680174 - DNA, 1191 bp, Homo sapiens
aaaagataccattcacaaaagaaagaacactgcaagtcgctgaaaatctggtcgcccaacacaacgcctgctgctacgtgggtgtcggcacgcagctgaaggagcgaygggcaacccagcgggtgccaaccacaggatgggcctgttcaggtgtcaggaagagatgctgagtgagatcacgcaccaaggaacgatgagtgccaagaaggaaaaaaagatggggcaggaagtgccgcgggggtgcagcccctgcgaggtgcatgggatagggagtgagtcccgggaaggcagcttctgagcgcctcggggaaggccctccaggcagagggcagcgggagcacaggactgtggcagagcgcacctgagctgtgaggaggtgtgagggaggcggggggctgggcaggcaacgtaagtgggcatcgggagggcatcggggccagggcgggagcaggaagaatcatcggagcctgggcaacatccaggcctctcaccgtcatcaggagagaagggggcaacttgggtgccagcctgtgagaggtgaaaggagacaaattctgaagaccctttgacgggagggtcactatggcccaaaaggccagaagtgagactgagggaaagcaagaagacgaggggaagcaggctgtggtcctgaggagcaaaagaagggcctgctgagatgtggcagagctccagaagcctccgggagggcgggagccctgacactctaggtgaagaggcctgcggcctgtccagctgcagggccaaggagacaagagggcaggctcctccaggggggcccatgcacacctaaaatgagtgtcaggaggagggagaaggaaagaattaacggaaccaaagaacggaagctttaaatattcagatcaaagtcttaccaagtatcaagcaagaataaagaaaacacacacaaacataaacccctaaagacatcctggtgaaaactttgaaagacaaagattttacatctagaaagaaaaataaatcacgttttgctgtcagcaaaattcacttcaaaataatgctagattacaacagatacaggtctaaaaagttctgagaggagaaaggcatatcatcactaaaatatgagagaaaaataaacacactttaatacatacaaggactgaatgtatagtacccatgaatccttcctggaaaaactggcaacgaata

SEQ ID NO: 680175 - DNA, 1191 bp, Homo sapiens
aaaagataccattcacaaaagaaagaacactgcaagtcgctgaaaatctggtcgcccaacacaacgcctgctgctacgtgggtgtcggcacgcagctgaaggagcgatgggcaacccagcrggtgccaaccacaggatgggcctgttcaggtgtcaggaagagatgctgagtgagatcacgcaccaaggaacgatgagtgccaagaaggaaaaaaagatggggcaggaagtgccgcgggggtgcagcccctgcgaggtgcatgggatagggagtgagtcccgggaaggcagcttctgagcgcctcggggaaggccctccaggcagagggcagcgggagcacaggactgtggcagagcgcacctgagctgtgaggaggtgtgagggaggcggggggctgggcaggcaacgtaagtgggcatcgggagggcatcggggccagggcgggagcaggaagaatcatcggagcctgggcaacatccaggcctctcaccgtcatcaggagagaagggggcaacttgggtgccagcctgtgagaggtgaaaggagacaaattctgaagaccctttgacgggagggtcactatggcccaaaaggccagaagtgagactgagggaaagcaagaagacgaggggaagcaggctgtggtcctgaggagcaaaagaagggcctgctgagatgtggcagagctccagaagcctccgggagggcgggagccctgacactctaggtgaagaggcctgcggcctgtccagctgcagggccaaggagacaagagggcaggctcctccaggggggcccatgcacacctaaaatgagtgtcaggaggagggagaaggaaagaattaacggaaccaaagaacggaagctttaaatattcagatcaaagtcttaccaagtatcaagcaagaataaagaaaacacacacaaacataaacccctaaagacatcctggtgaaaactttgaaagacaaagattttacatctagaaagaaaaataaatcacgttttgctgtcagcaaaattcacttcaaaataatgctagattacaacagatacaggtctaaaaagttctgagaggagaaaggcatatcatcactaaaatatgagagaaaaataaacacactttaatacatacaaggactgaatgtatagtacccatgaatccttcctggaaaaactggcaacgaata

SEQ ID NO: 680176 - DNA, 1191 bp, Homo sapiens
aaaagataccattcacaaaagaaagaacactgcaagtcgctgaaaatctggtcgcccaacacaacgcctgctgctacgtgggtgtcggcacgcagctgaaggagcgatgggcaacccagcgggtgccaaccacaggatgggcctgttcaggtgtcaggaaragatgctgagtgagatcacgcaccaaggaacgatgagtgccaagaaggaaaaaaagatggggcaggaagtgccgcgggggtgcagcccctgcgaggtgcatgggatagggagtgagtcccgggaaggcagcttctgagcgcctcggggaaggccctccaggcagagggcagcgggagcacaggactgtggcagagcgcacctgagctgtgaggaggtgtgagggaggcggggggctgggcaggcaacgtaagtgggcatcgggagggcatcggggccagggcgggagcaggaagaatcatcggagcctgggcaacatccaggcctctcaccgtcatcaggagagaagggggcaacttgggtgccagcctgtgagaggtgaaaggagacaaattctgaagaccctttgacgggagggtcactatggcccaaaaggccagaagtgagactgagggaaagcaagaagacgaggggaagcaggctgtggtcctgaggagcaaaagaagggcctgctgagatgtggcagagctccagaagcctccgggagggcgggagccctgacactctaggtgaagaggcctgcggcctgtccagctgcagggccaaggagacaagagggcaggctcctccaggggggcccatgcacacctaaaatgagtgtcaggaggagggagaaggaaagaattaacggaaccaaagaacggaagctttaaatattcagatcaaagtcttaccaagtatcaagcaagaataaagaaaacacacacaaacataaacccctaaagacatcctggtgaaaactttgaaagacaaagattttacatctagaaagaaaaataaatcacgttttgctgtcagcaaaattcacttcaaaataatgctagattacaacagatacaggtctaaaaagttctgagaggagaaaggcatatcatcactaaaatatgagagaaaaataaacacactttaatacatacaaggactgaatgtatagtacccatgaatccttcctggaaaaactggcaacgaata

SEQ ID NO: 680177 - DNA, 1191 bp, Homo sapiens
aaaagataccattcacaaaagaaagaacactgcaagtcgctgaaaatctggtcgcccaacacaacgcctgctgctacgtgggtgtcggcacgcagctgaaggagcgatgggcaacccagcgggtgccaaccacaggatgggcctgttcaggtgtcaggaagagatgctgagtgagatcacgcaccaaggaacgatgagtgccaagaaggaaaaaaagatggggcaggaagtgccgcgggggtgcagcccctgcgaggtgcatgggatagggagtgagtcccgggaaggcagcttctgagcgcctcggggaaggccctccaggcagagggcagcgggagcacaggactgtggcagagcgcacctgagctgtgaggaggtgtgagggaggcggggggctgggcaggcaacgtaagtgggcatcgggagggcatcggggccagggcgggagcaggaagaatcatcggagcctgggcaacatccaggcctctcaccgtcatcaggagagaagggggcaacttgggtgccagcctgtgagaggtgaaaggagacaaattctgaagaccctttgacgggagggtcactatggcccaaaaggccagaagtgagactgagggaaagcaagaagacgaggggaagcaggctgtggtcctgaggagcaaaagaagggcctgctgagatgtggcagagctccagaagcctccgggagggcgggagccctgacactctaggtgaagaggcctgcggcctgtccagctgcagggccaaggagacaagagggcaggctcctccaggggggcccatgcacacctaaaatgagtgtcaggaggagggagaaggaaagaattaacggaaccaaagaacggaagctttaaatattcagatcaaagtcttaccaagtatcaagcaagaataaagaaaacacacacaaacataaacccctaaagacatcctggtgaaaactttgaaagacaaagattttacatctagaaagaaaaataaatcacgttttgctgtcagcaaaattcacttcaaaataatgctagattacamcagatacaggtctaaaaagttctgagaggagaaaggcatatcatcactaaaatatgagagaaaaataaacacactttaatacatacaaggactgaatgtatagtacccatgaatccttcctggaaaaactggcaacgaata

SEQ ID NO: 680178 - DNA, 609 bp, Homo sapiens
tgagatttgggtggggacacagccaaaccatataaaaaaccttcatggtgtgtttggaccaagttattccacttccaggaatttatcttaaggaaatgatcaaacatctgcacaaagatatgtgcagaagaagattcattacagcatcatttgcaatgactaaaaaatgaaaacagtatcagtgtccaataatatcaatayaatggaatactaggcaaccattcaaaaacaatacacacttatttcctgacatggaaagatatttccagcatttttctatgttctaagggaaaaggaagttatggagtaatatatatgatgcttgcatatagtatttgtatatgtaaaggaataaaacaactctagaaggagatgagagagatcataaggcagctctgaagtctccatggagttaccagacaggctggctggctcaggatgtggtgttttcttcatgaattctagagttaagcattgctttggaattgctggaaggaacaggaagtgctataatacatatacatatctatctctctctctctctctatagatatatttaaacaatttctgccataactgtggactaacaacataacggaatgaatagtt

SEQ ID NO: 680179 - DNA, 609 bp, Homo sapiens
tgagatttgggtggggacacagccaaaccatataaaaaaccttcatggtgtgtttggaccaagttattccacttccaggaatttatcttaaggaaatgatcaaacatctgcacaaagatatgtgcagaagaagattcattacagcatcatttgcaatgactaaaaaatgaaaacagtatcagtgtccaataatatcaatacaatggaatactaggcaaccattcaaaaacaatacacacttatttcctgacatggaaagatatttccagcatttttctatgttctaagggaaaaggaagttatggagtaatatatatgatgcttgcatatagtatttgtatatgtaaaggaataaaacaactctagaaggagatgagagagatcataaggcagctctgaagtctccatggagttaccagacaggctggctggctcaggatgtggtgttttcttcatgaattctagagttaagcattgctttggaattgctggaaggaacaggaagtgctataatacatatacatatctatctctctctctctctctmtagatatatttaaacaatttctgccataactgtggactaacaacataacggaatgaatagtt

SEQ ID NO: 680180 - DNA, 1154 bp, Homo sapiens
caacagtgtaaaagtgttcctatttctctgcatcctctccagcacccgttgtttcctgactttttaatgattgccatcctaactggtgtgagatggtatctcactgtggttttgatttgcatttctctgatggccagtgatgatgagcattttttcatgtgtcttttggctgcataaatgtcttcttttgaaaagtgtctgttcatatcctttgcccactttttgatggggttgtttgtttttttcttgtaaatttgtttgagttcattgtagattctggatattagccccttgtcagatctccttttttcttaaataatcttaaaaaatttttttcaatcatgggtttttttaaaaacttgatcagtttaactttaaatttttcttgagatatattttgcagattttcataactttttagtcagtttattctttttgttgctgttgtaagtgaaataatttttctattgtattttctaacttcctgtggtttttatataaaaggctattatttacatttttactatttataatagttttaaggctaattcttctgagttttataggcrtacaattatataatttgtaaataatgagattacttccttctttctatgttttataacctttttattcctttgtcatatgtaattgattcagttagtatctctatgttaaattaaataatgacagtattagcagacatccttattttgttcctttttttaatggtagagttattagtgtgtttccattaagtgtactattggcctatggatagatatatagctttatctatttctattccatttagttttttatttggtcaataacagatattgaatattattattaatagatggcttctaagtatctttgaagaagctctcatgatctttcactatcaaataaaatacattaatcaatttctgatatcaaattatcttttgattattcttgattataattcctgatattacttgaacttggacattgattttgaatatgcctttgtagtctcacatcttatgtaagctttttttaacatcaatatttacaagtgaaatttacctattttagtaatgtttagttttcaagtgtctggcttcataaaaagaattggaaattttacttatttttcatgccttgaacaa

SEQ ID NO: 680181 - DNA, 597 bp, Homo sapiens
tcaaatcatcaccttgaatatttaccattttatytgtcaatcaaatattttaaaataaaactctgtaaaatatacacatatatcacataccatacaatcgactaatttaaaacacgtatagtgtgcaattcaatgttttttagtatatttccagaattatacaaccatcaccacagttttggaacattttcattactcccagaatcaaacttatttgatgtcttttaaaaaatagtcttttttttttaattggctctggagtcttttacaacttgttcctcaaattatttttggaatagctttcctactgataatatattaatagaaaaatctaaatttaaattgaaaaaatgacctgcttctaaaatggaaaaaacttatcacccttttcccccttctccacaccccttgattacatgtttcttaggtaaaatttgttctgtgaaatgctgcatatctgtaacaaacaacctctggagttttttctgttgtcccatttgcatttccatttgcaaaaaatcctttttattgcatggaatggtttattcaaagcttctggcatttttggtattcatctcacattttacaaagcgatta

SEQ ID NO: 680182 - DNA, 833 bp, Homo sapiens
cctccttcctcagccttccaaagtgctgggattacaggcgtgagccaccatgcacagcctattttaacattttcgaagctgaagaaactcagactatttaactcaaaggctgtaacaaaagaacatcgagattgttagaaacctacttgtggaactgaaaaaaatgtgtcccattgtttcacttattttacaaaggagacctcattctatcctggcataatctctaagggctttcttcacttaagcttcccatcaggtttaatagtgcctagtccctctttcaggtcctcaatatagcccacacatttcccttttatctaccttcatattgacaaattcacacttgtttttaggtttagctgataactttctgttgtttaatgtttgtggtcttgtaactaattgcatatccccattcactcatataatattaaagaagataattatgcctcaatattactttctctattataaaatttggcaaagatatttctgataaaagaaaaatttcatttgtaatttgaatattcttttaaacatgtttttataccatttaatagtatctaaatagtagaaatatcctattagaggtrtatgtgttttaatttcataatcattatagaaaacacctattacaaattgctaagtacagaaaacaaattatatacaaatatcttcattgcataaggataaataatgaaaatgtccaaatttaggggtattattaaattactcatggcatagccattaaaaatctgaggttaaataattttaatatcatttgaaaatgtttatgacatgaaattacatgaggaaatcctgctataaaacta

SEQ ID NO: 680183 - DNA, 1388 bp, Homo sapiens
atacgttttcctttcatctactatttcctttggagtcactaaccttcaaaagccccactattcggggactacattttatgtcacaagagagcagtgcccccttttggtgccaaatgccaaaagttctttgagggcaaggacacagtcacttctgcagatcctcaacactgccacataaaatcatttaagcaaagcaaactattaagctaccaatccttcacatggtaaaagaggaacaatttacccacattagcataaacatggatacatttggcaaagatcacttttcatgtatcatgttcttttcttgaacaccaactataggaccttacatgctaacagaaaactgatgtatattaattgagtgcataggccttgttggctctttctaacacaaatctcttgacataaagaaaggaccgggactttctctagaactaatatgtctataatgtctctcatctaatgatatcaaaatgcttttttcgactggcccacggaggtatcagatttcatattcaaatctagatcttgcgtacaactctgtgaaatatgaaaaatagagttcagtaattgtttggatataaaattgtctaatagaatagggtagaatagaataatccatttattagaaaggaatattatctgtttctccctttcatttccaagaaacaacaaataacaccaactctttgctaacaaacagcataagcccattatcataccayagtacttaagtataaactgttctattattttatggtatctttcaagaagtaccattttatagctgcaaatgaaaataataccaacagtatgctcttccaaaatagtcaaaagtaataagatcttttccatgcccccatcagtttgctttgagtggacagaaccataacaaagaggtctttttataaacaatgctttgctttatttcctgctacctatgacagaatttgcaggtatgccctgctgcattcactaatgaatttatctcactttgttaaataaaaacataaaggtattattttgcttttgtaaatgttatacacattatatataagcttatatataatggctatcatatattatatataagtttcctatgctgtttcatatcacacaagtgcttaccaatttcttcaattactacccatcagtgtaattcttaactatatactggaaaagcatcaaagtgagattttttccccagcagtatgaattatttttaaagcacatcagttataattcatctaacaaggtgggatgagagagatcagactctttcacatacaatctgagcttaaaataaatgctaagaagcaatactgtaaattccttgaagtatatgaagatggccagaggcatgcatttacctctgaaaaagcagc

SEQ ID NO: 680184 - DNA, 1388 bp, Homo sapiens
atacgttttcctttcatctactatttcctttggagtcactaaccttcaaaagccccactattcggggactacattttatgtcacaagagagcagtgcccccttttggtgccaaatgccaaaagttctttgagggcaaggacacagtcacttctgcagatcctcaacactgccacataaaatcatttaagcaaagcaaactattaagctaccaatccttcacatggtaaaagaggaacaatttacccacattagcataaacatggatacatttggcaaagatcacttttcatgtatcatgttcttttcttgaacaccaactataggaccttacatgctaacagaaaactgatgtatattaattgagtgcataggccttgttggctctttctaacacaaatctcttgacataaagaaaggaccgggactttctctagaactaatatgtctataatgtctctcatctaatgatatcaaaatgcttttttcgactggcccacggaggtatcagatttcatattcaaatctagatcttgcgtacaactctgtgaaatatgaaaaatagagttcagtaattgtttggatataaaattgtctaatagaatagggtagaatagaataatccatttattagaaaggaatattatctgtttctccctttcatttccaagaaacaacaaataacaccaactctttgctaacaaacagcataagcccattatcataccatwgtacttaagtataaactgttctattattttatggtatctttcaagaagtaccattttatagctgcaaatgaaaataataccaacagtatgctcttccaaaatagtcaaaagtaataagatcttttccatgcccccatcagtttgctttgagtggacagaaccataacaaagaggtctttttataaacaatgctttgctttatttcctgctacctatgacagaatttgcaggtatgccctgctgcattcactaatgaatttatctcactttgttaaataaaaacataaaggtattattttgcttttgtaaatgttatacacattatatataagcttatatataatggctatcatatattatatataagtttcctatgctgtttcatatcacacaagtgcttaccaatttcttcaattactacccatcagtgtaattcttaactatatactggaaaagcatcaaagtgagattttttccccagcagtatgaattatttttaaagcacatcagttataattcatctaacaaggtgggatgagagagatcagactctttcacatacaatctgagcttaaaataaatgctaagaagcaatactgtaaattccttgaagtatatgaagatggccagaggcatgcatttacctctgaaaaagcagc

SEQ ID NO: 680185 - DNA, 638 bp, Homo sapiens
acatttggtaaatcaagaaccagaattcattatagtcgatcctgaccacaaaaccaaagactaacacgatatacaaagattttataatggaatacaggcagttaacccgtggtagtcttcaaacacacttttcttgtctgaagttactttggtggaagatgaaataggagataatggaaaattgggtaaaagcacacaactgaatacattaactgagcctatattttctcaaccaaaagtcaggacacaggatctgaacctgtgaaacagaagtagtcccagagtttcatgtttcatgtaaccatcatttgcctaatgtttgatgaaaaaatatatacatatgtgtgtgyatatgtgtgttgtaaataccaaattaaatttataattctattgactttaaaggtaaagtcacacaaacaatatatgatcataaaatcaagtaatacacaaaatatatatagacaaagcaaaaattgcctcattatcctacactacacaaaaaagccaatgggaacaatttggtggcctcctggacttctttatgttaacattcacaaaattatggtagcacttaaggaaatgaatgttgtgtaaattgtacaagtgacatgaggcagggtttaaccttaaacacattg

SEQ ID NO: 680186 - DNA, 595 bp, Homo sapiens
gaggggcctggtgagaggtgattggattatgggggtggacttcccccaagctgttctcttgattgtgagtgagttctcagaagatctggttgtttgaaagtgtgtggcacttccccctttgctccctcctgccaccatgtgaagaagctgcctgtttcctctttgccttccaccatgattgtaagtttcctgasgcctcccagtcacgcttcctgttgagccttcagaatgtgagtcaatgaaacctcttttcttcctaaattgcccagtctcaagtagttctttctagcagtgtgaaaacagactaatacactcttcttatattattactatgccccactatgaaatatctccccttgctgggttagagtgttgagtatctacaaaattgagatagaaatttcaaggcactgagaaccagaaaaaggtcaaagagtttcacataccctatttattacctttcaaatgcagggcctaaaacatattcagaatttctaacatgtctttcagtcctaattttaagggtgggaatctttaatcaatcaaatagtcctgggctctagctagttctgttcacaaggtgactggctgtata

SEQ ID NO: 680187 - DNA, 595 bp, Homo sapiens
gaggggcctggtgagaggtgattggattatgggggtggacttcccccaagctgttctcttgattgtgagtgagttctcagaagatctggttgtttgaaagtgtgtggcacttccccctttgctccctcctgccaccatgtgaagaagctgcctgtttcctctttgccttccaccatgattgtaagtttcctgaggcctcccagtcaygcttcctgttgagccttcagaatgtgagtcaatgaaacctcttttcttcctaaattgcccagtctcaagtagttctttctagcagtgtgaaaacagactaatacactcttcttatattattactatgccccactatgaaatatctccccttgctgggttagagtgttgagtatctacaaaattgagatagaaatttcaaggcactgagaaccagaaaaaggtcaaagagtttcacataccctatttattacctttcaaatgcagggcctaaaacatattcagaatttctaacatgtctttcagtcctaattttaagggtgggaatctttaatcaatcaaatagtcctgggctctagctagttctgttcacaaggtgactggctgtata

SEQ ID NO: 680188 - DNA, 649 bp, Homo sapiens
agatatacctaatgctagatgacgagttagtgggtgcagcgcaccagcatgtcacatgtatacatatgtaactaacctgcacattgtccacatgtaccctaaaacttaaagtataattaaaaaatagtaaatatttagctacattttaatactttacatgttataacaatatcattaattttgttgtttttaagctttatttgtacttgtaaatttttattttgtagttacttaagaactaaaggcaaaagtgatttatattttgcaattctgttatttcaataaaaatagtcctttttattcattggaaaaaaaagaaaaaaagaaaaatttcaatcttaattctttaacagatgatcttaatgatcttacctgaattccatcatcagtgattctataacattcagatacagaaagttccttcaattttttatgtctggaaagcacattcaaaccctaaaaatatttaatataaagatcattttgtgattatcatttagtatggaatatatagttccaataaccatttatacaaactgacaacataaaaaaccatttatgaaaactaataaattttagttgytgtcatatttctttacacttaacaaatcgtaagaccacttagattaggcaatgccattaagtaaaa

SEQ ID NO: 680189 - DNA, 543 bp, Homo sapiens
tgattatgcagctagctgacrcaaacatcacaaattcaagtaatgacttaaaatttggtaaagagaatttaccaaatatcagtactacatacattcgtgcgtgtgatttttggaggctgagctatcaaaaatgcaagaggatagaaagaaaaatacttctgagattaggcaaacacagtgaaaaataacaacaatggatactatctaacatttatgggatatcaatcgtgacacacactatgctagtagctattatctcttttaaaaatagaaaaaatagtattaactaagataagtaaatacaattttttgctttttacatctaggaaacatgacctgcttagtataacgtgaaagctttttacattgtagtgctgctaaggattagtgaaagcattgctggcttgaagttggagtttaatagaaaaatgtaggcagctagtcatacctgtaatcccagcactttgggaggttgaggcaagagaatcacttgaggccaggagttgaagaccagcctgggcaccataatgagaccccatgtct

SEQ ID NO: 680190 - DNA, 543 bp, Homo sapiens
tgattatgcagctagctgacgcaaacatcacaaattcaagtaatgacttaaaatttggtaaagagaatttaccaaatatcagtactacatacattcgtgcgtgtgatttttggaggctgagctatcaaaaatgcaagaggatagaaagaaaaatacttctgagattaggcaaacacagtgaaaaataacaacaatggatactatctaacatttatgggatatcaatcgtgacacacactatgctagtagctattatctcttttaaaaatagaaaaaatagtattaactaagataagtaaatacaattttttgctttttacatctaggaaacatgacctgcttagtataacgtgaaagctttttacattgtartgctgctaaggattagtgaaagcattgctggcttgaagttggagtttaatagaaaaatgtaggcagctagtcatacctgtaatcccagcactttgggaggttgaggcaagagaatcacttgaggccaggagttgaagaccagcctgggcaccataatgagaccccatgtct

SEQ ID NO: 680191 - DNA, 596 bp, Homo sapiens
atgtagccggaagattaataaattcactaaattatagaatgcttaattttttaaccttgatttttctccttttctttaagaatatttttccctgttacatgacttgcagaaatttgtcttatttttttactttttattttgaaaaatttcaaatctacaaaaaagtaatagaagactttatagtgtagggtaatgaacacctgtgtacacttcatcacgttccccaattgttaagattttctcacatttgctttatctctccatgaatatgtacacatcatccatctaactaatttatgaattacttgagaataaattgcccctaaatacatataacatatgtgtccttatagtcttgcctggagcaatagtcttatgatcaaattgaggaaatttaacattattagtacaacacaaattacacaatatatagttcatatttttttcaattgtcccaataatgccctttagagaaaaacaaacgaaaaaccyttttttttttttttttttttttttttcccaattcaggagttacttcagtattccatatggtgcttagcctctttagtcttaagtctggatcagctcatcaatcc

SEQ ID NO: 680192 - DNA, 659 bp, Homo sapiens
taaatgtaagcattacttttttttttttttttgagatggtgtctcactctgtcacccaggctggatggagtgcagtggtgtgatctccactcactgcaagctccgtctcccgggttcacgccattmtcctgcctcagactcccaagtaactgggactacaggcgcccaccaccacgcccggctaattttttgtgtttttagtagagatggggtttcaccatgttagccaggatggtctcaatctgaccttgtgatccgcccacctcggcctcccaaggtgctgggattacagacgtgagccaccgcacccagccacattacttctgataaatgatgtaaaactgtgatttttctgtaaagggaatacctttgcatccagaccagattgccccctccccactttcaagtaggcaaaagaaaacacgtatttgctaatgattaggacatgtggcaggaagaactttttcacaggcttcagtgatatattcataatcactgaccacaagaccacgggacactagtttttggcatggatactgcttatttaaagatgtaattactacagactgaatttgtgtccaaaatgctgccaataggttaaattgacaatggtgttagtcctgatcatgattaaattatttacattcctgtatattctt

SEQ ID NO: 680193 - DNA, 659 bp, Homo sapiens
taaatgtaagcattacttttttttttttttttgagatggtgtctcactctgtcacccaggctggatggagtgcagtggtgtgatctccactcactgcaagctccgtctcccgggttcacgccattctcctgcctcagactcccaagtarctgggactacaggcgcccaccaccacgcccggctaattttttgtgtttttagtagagatggggtttcaccatgttagccaggatggtctcaatctgaccttgtgatccgcccacctcggcctcccaaggtgctgggattacagacgtgagccaccgcacccagccacattacttctgataaatgatgtaaaactgtgatttttctgtaaagggaatacctttgcatccagaccagattgccccctccccactttcaagtaggcaaaagaaaacacgtatttgctaatgattaggacatgtggcaggaagaactttttcacaggcttcagtgatatattcataatcactgaccacaagaccacgggacactagtttttggcatggatactgcttatttaaagatgtaattactacagactgaatttgtgtccaaaatgctgccaataggttaaattgacaatggtgttagtcctgatcatgattaaattatttacattcctgtatattctt

SEQ ID NO: 680194 - DNA, 659 bp, Homo sapiens
taaatgtaagcattacttttttttttttttttgagatggtgtctcactctgtcacccaggctggatggagtgcagtggtgtgatctccactcactgcaagctccgtctcccgggttcacgccattctcctgcctcagactcccaagtaactgggactacaggcgcccaccaccacgcccggctaattttttgtgtttttagtagagayggggtttcaccatgttagccaggatggtctcaatctgaccttgtgatccgcccacctcggcctcccaaggtgctgggattacagacgtgagccaccgcacccagccacattacttctgataaatgatgtaaaactgtgatttttctgtaaagggaatacctttgcatccagaccagattgccccctccccactttcaagtaggcaaaagaaaacacgtatttgctaatgattaggacatgtggcaggaagaactttttcacaggcttcagtgatatattcataatcactgaccacaagaccacgggacactagtttttggcatggatactgcttatttaaagatgtaattactacagactgaatttgtgtccaaaatgctgccaataggttaaattgacaatggtgttagtcctgatcatgattaaattatttacattcctgtatattctt

SEQ ID NO: 680195 - DNA, 659 bp, Homo sapiens
taaatgtaagcattacttttttttttttttttgagatggtgtctcactctgtcacccaggctggatggagtgcagtggtgtgatctccactcactgcaagctccgtctcccgggttcacgccattctcctgcctcagactcccaagtaactgggactacaggcgcccaccaccacgcccggctaattttttgtgtttttagtagagatggggtttcaccatgttagccaggatggtctcmatctgaccttgtgatccgcccacctcggcctcccaaggtgctgggattacagacgtgagccaccgcacccagccacattacttctgataaatgatgtaaaactgtgatttttctgtaaagggaatacctttgcatccagaccagattgccccctccccactttcaagtaggcaaaagaaaacacgtatttgctaatgattaggacatgtggcaggaagaactttttcacaggcttcagtgatatattcataatcactgaccacaagaccacgggacactagtttttggcatggatactgcttatttaaagatgtaattactacagactgaatttgtgtccaaaatgctgccaataggttaaattgacaatggtgttagtcctgatcatgattaaattatttacattcctgtatattctt

SEQ ID NO: 680196 - DNA, 615 bp, Homo sapiens
ggagacccttttctctatggagagaggtgtttctctttttcttctcttctccctattaaacctccgcctctgaactcctcgtgtgtgtccgtgttctaaattttcctagtgcatgccaatgaaccccagggtatatactccagacaatgtagcagcttcattaatatttgagtagcaatggtcttggacacttacagcttctagttctcagctcttctcaccyttgttctcctccatgtcttccctcattcctcattacctaatatgcatgcaaaacaggagctcaataactatgctttttccccctgctatctgcatggagttgatacttttcacacattgttctcagctattccaacctttgtttataaagccaatgtttcattttttcagtgcaaacatctgacatgtttacaataatttgcattgtttatgtgatcatatgttacattattttacatgttcgttttgtgagtttctgttctgtcactggaaagccagtcagacattatgctttaaaaaaatattttggtaaaatatggttaaaaaattttataggtactgcgtattaaattaatgcgattttaggatatattttgaattttaggtagagaa

SEQ ID NO: 680197 - DNA, 615 bp, Homo sapiens
ggagacccttttctctatggagagaggtgtttctctttttcttctcttctccctattaaacctccgcctctgaactcctcgtgtgtgtccgtgttctaaattttcctagtgcatgccaatgaaccccagggtatatactccagacaatgtagcagcttcattaatatttgagtagcaatggtcttggacacttacagcttctagttctcagctcttctcacctttgttctcctccatgtcttccctcattcctcattacctaatatgcatgcaaaacaggagctcaataactatgcttttyccccctgctatctgcatggagttgatacttttcacacattgttctcagctattccaacctttgtttataaagccaatgtttcattttttcagtgcaaacatctgacatgtttacaataatttgcattgtttatgtgatcatatgttacattattttacatgttcgttttgtgagtttctgttctgtcactggaaagccagtcagacattatgctttaaaaaaatattttggtaaaatatggttaaaaaattttataggtactgcgtattaaattaatgcgattttaggatatattttgaattttaggtagagaa

SEQ ID NO: 680198 - DNA, 615 bp, Homo sapiens
ggagacccttttctctatggagagaggtgtttctctttttcttctcttctccctattaaacctccgcctctgaactcctcgtgtgtgtccgtgttctaaattttcctagtgcatgccaatgaaccccagggtatatactccagacaatgtagcagcttcattaatatttgagtagcaatggtcttggacacttacagcttctagttctcagctcttctcacctttgttctcctccatgtcttccctcattcctcattacctaatatgcatgcaaaacaggagctcaataactatgctttttccccctgctatctgcatggagttgatacttttcacacattgttctcagctattccaacctttgtttataaagccaatgtttcattttttcagtgcaaayatctgacatgtttacaataatttgcattgtttatgtgatcatatgttacattattttacatgttcgttttgtgagtttctgttctgtcactggaaagccagtcagacattatgctttaaaaaaatattttggtaaaatatggttaaaaaattttataggtactgcgtattaaattaatgcgattttaggatatattttgaattttaggtagagaa

SEQ ID NO: 680199 - DNA, 615 bp, Homo sapiens
ggagacccttttctctatggagagaggtgtttctctttttcttctcttctccctattaaacctccgcctctgaactcctcgtgtgtgtccgtgttctaaattttcctagtgcatgccaatgaaccccagggtatatactccagacaatgtagcagcttcattaatatttgagtagcaatggtcttggacacttacagcttctagttctcagctcttctcacctttgttctcctccatgtcttccctcattcctcattacctaatatgcatgcaaaacaggagctcaataactatgctttttccccctgctatctgcatggagttgatacttttcacacattgttctcagctattccaacctttgtttataaagccaatgtttcattttttcagtgcaaacatctgacatgtttacaataatttgcattgtttatgtgatcatatgttacattattttacatgttcgttttgtgagtttctgttctgtcactggaaagccagtcagacattatgctttaaaaaaatattttggtaaaatatggttaaaaaattttataggtactgcrtattaaattaatgcgattttaggatatattttgaattttaggtagagaa

SEQ ID NO: 680200 - DNA, 1116 bp, Homo sapiens
ggccgagagcccgtccacggctgctccacacacaccgagggccgccctgtgcggtggtgcgggggagggtctgcaaactacgacccccaggtgaacctgcccgccgctcctctctgtaagtcagagtctcgctggcccaccaccacactcgcccgctcaggcgctgaccagggtggctctcctgctctgctggcatagctcagtggttgtgacagagaccatctgggctgcaaagctaaagatatttgccgtctggccttctacagagaaggtctgcccgcctgcatacaagcttccgtccacctccacaggcttcagcttccacctccacggctccctctctctttgctcaagtccctcccctgcaaaatgaaactcacctataagatggggtcagatgcagatgttcaggtccttggcaccagcctgaccagtgagcccgccctcctcacggggagagatgtgagcactgaggtaggtaggtctctaacatggagccaaggtgcccctcctctggagtgtgggctagggcctgtgactctgacgggacaagatgtcactcctgcgcttaggttatgtggcaaagacaaggaactttgcagctgtaattagagccyctgaatcagctgactgagccaatcaagagagaaacaccctgggtgggcctgactgcatcaggtgagcccttcagggaccaaaccctttctgctttttgtgtgtgtgtgtgtgtgtgtgtgtgtgtgtgtgtgtgtgtgtgtttgagatggagtcttgctctgtcgcccaggctggaatgcagtggcgcgatctcagctcactgcaacctctgcctccagggcgattctcctgcctcagcctcccaagtagctgggactacaggcatgcgccaccatgcccaaataatttttgtatttttagtagagatggggccttgccatgtaggccaggctggtctcaaactcctgaactcaagtgatctgcccgcctcagcctcccaaagtgctgggattacaggcgtgagccacagcgcccagttaattgttgtacttttagtagagatggggtttcgccatgttggccaggctggtctcgaactcctgacctcaggtgatccac

SEQ ID NO: 680201 - DNA, 1029 bp, Homo sapiens
ctgcttggtgtgctgggctcacctctctccagctgctttctttaaactgataattctgacatttgccctcacatttaaagtgaccacctctcagtcacagcttgagctcctggtcccagtgtttgctgcttgctttgaacacatccattaaagctccctgctggaaacctgtcagataacaccctggacttaataaaggcattggcttaccggtctcttctctcctccctgcctgggctcactgacctctgtgtctgtggcctccaggtgtgctgagtgctccctagtgtctgtaagtagtaaaaatacttatattttcacgttcttgttatatcattatagcctcacatgccatccagggcctgacattgaggctgccctatgggacttgtgctggttgagcttctgctggagctcttgttttggggcctctggttctcctggggacaggagcttccagctaacttgattgaaaacctgatgcctttcattgraacactgggtcaggtgatgtattcatgggcttcacctgccataacataaccttagcctgggtgaattaaataatagaaatctatttttcacagttctgtgaataatgtgctattttaaccactttaaaatgcacaatcaagtgaaattaaccacatacaccatgttaaattaccatcaccactatttttcctagaaaatttttatcattttaaactgaaactttgtcacttttaaacaatacctccctgtatgttccaccctagaccttgatcatctccactctctctctatgaatttgcctattcttgatgtttcatataaatggaattatacaattatgttattttgtttctgacatatttcacttagcataatgtttcccaagtccatgcatgttccagtgggtgtcagagcttcattcctctttatggcaggttaacaatctgttgtatgtgtcaccatatttgtttattcatgtgttgatgaacacttggattattttcatattttatcttttgtgaataatgctgcaat

SEQ ID NO: 680202 - DNA, 1029 bp, Homo sapiens
ctgcttggtgtgctgggctcacctctctccagctgctttctttaaactgataattctgacatttgccctcacatttaaagtgaccacctctcagtcacagcttgagctcctggtcccagtgtttgctgcttgctttgaacacatccattaaagctccctgctggaaacctgtcagataacaccctggacttaataaaggcattggcttaccggtctcttctctcctccctgcctgggctcactgacctctgtgtctgtggcctccaggtgtgctgagtgctccctagtgtctgtaagtagtaaaaatacttatattttcacgttcttgttatatcattatagcctcacatgccatccagggcctgacattgaggctgccctatgggacttgtgctggttgagcttctgctggagctcttgttttggggcctctggttctcctggggacaggagcttccagctaacttgattgaaaacctgatgcctttcattggaacactgggtcaggtgatgtattcatgggcttcacctgccataacataaccttagcctgggtgaattaaataatagaaatctatttttcacagttctgtgaataatgtgctattttaaccactttaaaatgcacaatcaagtgaaattaaccacatacaccatgttaamttaccatcaccactatttttcctagaaaatttttatcattttaaactgaaactttgtcacttttaaacaatacctccctgtatgttccaccctagaccttgatcatctccactctctctctatgaatttgcctattcttgatgtttcatataaatggaattatacaattatgttattttgtttctgacatatttcacttagcataatgtttcccaagtccatgcatgttccagtgggtgtcagagcttcattcctctttatggcaggttaacaatctgttgtatgtgtcaccatatttgtttattcatgtgttgatgaacacttggattattttcatattttatcttttgtgaataatgctgcaat

SEQ ID NO: 680203 - DNA, 1029 bp, Homo sapiens
ctgcttggtgtgctgggctcacctctctccagctgctttctttaaactgataattctgacatttgccctcacatttaaagtgaccacctctcagtcacagcttgagctcctggtcccagtgtttgctgcttgctttgaacacatccattaaagctccctgctggaaacctgtcagataacaccctggacttaataaaggcattggcttaccggtctcttctctcctccctgcctgggctcactgacctctgtgtctgtggcctccaggtgtgctgagtgctccctagtgtctgtaagtagtaaaaatacttatattttcacgttcttgttatatcattatagcctcacatgccatccagggcctgacattgaggctgccctatgggacttgtgctggttgagcttctgctggagctcttgttttggggcctctggttctcctggggacaggagcttccagctaacttgattgaaaacctgatgcctttcattggaacactgggtcaggtgatgtattcatgggcttcacctgccataacataaccttagcctgggtgaattaaataatagaaatctatttttcacagttctgtgaataatgtgctattttaaccactttaaaatgcacaatcaagtgaaattaaccacatacaccatgttaaattaccatcaccactatttttcctagaaaatttttatcattttaaactgaaactttgtmacttttaaacaatacctccctgtatgttccaccctagaccttgatcatctccactctctctctatgaatttgcctattcttgatgtttcatataaatggaattatacaattatgttattttgtttctgacatatttcacttagcataatgtttcccaagtccatgcatgttccagtgggtgtcagagcttcattcctctttatggcaggttaacaatctgttgtatgtgtcaccatatttgtttattcatgtgttgatgaacacttggattattttcatattttatcttttgtgaataatgctgcaat

SEQ ID NO: 680204 - DNA, 656 bp, Homo sapiens
ccataaaatgttgtcaggagtttagacctcaggttatgttctgactctaataacaaaagaaaaatttggaggaaacattaaaatgttttcatwagtggaaatttttactgatggtccaaacatctaagatcaattgctggtagtagtatttctcttgagacgaaaatgaggtttaggtgtgccgtgaattccagcaggatcacattatgctcaaagaaagatgccaaaggtgatttgaattagcagctccttaagtagagagagtcccgttaaaaggacagaactggtcagtgcatcaattacataaagagaggaaggatgccaaattaaaagaagtgatgagtgttatgttagtaaatatagaaagaactgcctgcttataatttctgggcagagttaggaaaaatgcggaggaccccaaaacaggtatgtgaaatgctttcttcattttctcttaagctcaggaaacaccactagagtttaagtttgtgtgaattagtaagaggctaagtgagatggcaatggctcgtgtgtctccccacacgaagaactccaacttatgaaaacggcatcatcatgaggaaacagttgtatgtggcacaggcagtaaaaccatgagatagcacctacctggccacctcgatctggtccccaaa

SEQ ID NO: 680205 - DNA, 656 bp, Homo sapiens
ccataaaatgttgtcaggagtttagacctcaggttatgttctgactctaataacaaaagaaaaatttggaggaaacattaaaatgttttcattagtggaaatttttactgatggtccaaacatctaagatcaattgctggtagtagtatttctcttgagacgaaaatgaggtttaggtgtgccgtgaattccagcaggatcacattatgctcaaagaaagatgccaaaggtgatttgaattagcagctccttaagtagagagagtcccgttaaaaggacagaactggtcagtgcatcaattacataaagagaggaaggatgccaaattaaaagaagtgatgwgtgttatgttagtaaatatagaaagaactgcctgcttataatttctgggcagagttaggaaaaatgcggaggaccccaaaacaggtatgtgaaatgctttcttcattttctcttaagctcaggaaacaccactagagtttaagtttgtgtgaattagtaagaggctaagtgagatggcaatggctcgtgtgtctccccacacgaagaactccaacttatgaaaacggcatcatcatgaggaaacagttgtatgtggcacaggcagtaaaaccatgagatagcacctacctggccacctcgatctggtccccaaa

SEQ ID NO: 680206 - DNA, 1310 bp, Homo sapiens
caaacacctccttcagcatcacatcatccatactggggagaagccctataaatgcctggagtgtgggaaagacttcaaccgcaggtcacacctcacacggcaccagcggactcacaatggagataagccctttgtgtgcagtgaatgtggaaggaccttcaatcgcgggtcgcaccttacacggcaccagcgggttcacagtggagagaagccttttgtgtgcaatgaatgtggaaaggcctttacctaccgctccaattttgtcttgcataayaagagccacaatgagaagaaacccttcgcatgcagcgaatgtggaaaaggcttttatgagagtacagccctcattcaacacttcattatccatactggggagaggccctttaagtgccttgagtgtgggaaggccttcaactgcaggtcacacctcaagcagcatgagcggattcacactggtgagaagccctttgtgtgcagtcaatgtggaaaggccttcactcactattccacctatgtcctgcatgaaagagcccacactggagaaaagccttttgagtgcaaagaatgtgggaaagcctttagcattcgaaaagacctcattcgacacttcaacatccacactggagagaagccctatgagtgtttacagtgtggaaaggcttttacccgcatgtcagggctcacaaggcaccagtggattcatactggagagaagccgtatgtatgcatccaatgtgggaaagccttttgtcggaccacaaacctgattcgacactttagcatccacactggagagaagccctatgaatgcgtggagtgcgggaaggccttcaaccgcaggtcacccctcacaaggcaccagcggattcacactgcagagaagtcccacgaacccatccagagtgggaacgtttcttgtgagagcacagatctcattcaacactccatcatccacactgagagtagcccagtgagtgcagtgaatatggaaacgccttcaattgccgctcattcctcctcactcgacatcaacggattcatagtggaagaaaccctaccattgtaacagatgtggaaagactttttacgtacacttcagtcaacatccaagaattcctattagcgaaatagttttttaatataaccactgaagaaaatctgtggtgagaggaaacatcttaccatctggtcattcatactgaagagaaactccataagtatcatctctgtgggaaaacctgttttagatcatcatttgtcatctaaacaattatgttagaaattgacacagccaagagtcttattctaca

SEQ ID NO: 680207 - DNA, 1310 bp, Homo sapiens
caaacacctccttcagcatcacatcatccatactggggagaagccctataaatgcctggagtgtgggaaagacttcaaccgcaggtcacacctcacacggcaccagcggactcacaatggagataagccctttgtgtgcagtgaatgtggaaggaccttcaatcgcgggtcgcaccttacacggcaccagcgggttcacagtggagagaagccttttgtgtgcaatgaatgtggaaaggcctttacctaccgctccaattttgtcttgcataacaagagccacaatgagaaraaacccttcgcatgcagcgaatgtggaaaaggcttttatgagagtacagccctcattcaacacttcattatccatactggggagaggccctttaagtgccttgagtgtgggaaggccttcaactgcaggtcacacctcaagcagcatgagcggattcacactggtgagaagccctttgtgtgcagtcaatgtggaaaggccttcactcactattccacctatgtcctgcatgaaagagcccacactggagaaaagccttttgagtgcaaagaatgtgggaaagcctttagcattcgaaaagacctcattcgacacttcaacatccacactggagagaagccctatgagtgtttacagtgtggaaaggcttttacccgcatgtcagggctcacaaggcaccagtggattcatactggagagaagccgtatgtatgcatccaatgtgggaaagccttttgtcggaccacaaacctgattcgacactttagcatccacactggagagaagccctatgaatgcgtggagtgcgggaaggccttcaaccgcaggtcacccctcacaaggcaccagcggattcacactgcagagaagtcccacgaacccatccagagtgggaacgtttcttgtgagagcacagatctcattcaacactccatcatccacactgagagtagcccagtgagtgcagtgaatatggaaacgccttcaattgccgctcattcctcctcactcgacatcaacggattcatagtggaagaaaccctaccattgtaacagatgtggaaagactttttacgtacacttcagtcaacatccaagaattcctattagcgaaatagttttttaatataaccactgaagaaaatctgtggtgagaggaaacatcttaccatctggtcattcatactgaagagaaactccataagtatcatctctgtgggaaaacctgttttagatcatcatttgtcatctaaacaattatgttagaaattgacacagccaagagtcttattctaca

SEQ ID NO: 680208 - DNA, 597 bp, Homo sapiens
gtttcatatagttttctaatattatactctacaagtgtttcttgtacccatactactgttttttgtttttgttctttatgagagacggtcttactgtctctcccaggccggagtgctgtgacaccatcagaactctgtgcagccttggctcaagtcatcatcctggctcagcctcctgagtagctgggattacaggcttgtgccaccacaccctgctattactttttttttttttttttttttttttttggtagagatggggccttgttacgtggctcaggctgatctattaatagaattcctgacctcaagcagttctcttgcttcagcctcccacattgcrggaattataggcatgagcctctgtgcctggccttttggaaatttttaacacatcaaaacttactaagtgctaatttaagaatttattccatactcatttcatgagatagctgatatatttgggtttatatacatcctctggttgtgtgtgtgcttttctttgccttacttattgtgtgtactttattttttgtaatgttttctttacatttacattttctttaaatttgtaagatatatactctgattcagtta

SEQ ID NO: 680209 - DNA, 924 bp, Homo sapiens
tcctggcctcccccggggtggggggcgtccgtgctgggccgcctgccacctgagctgtgcggaggaaccgccagacttcccgctgcccaggcggcaggtcgtgattcagtccccccttttcagcctgaccctggacccccttgctctgctgggcctgtctctctaactctagaggcccttttataccagttcttctgggaataaagttctgatctcctcgagggttgtgggcgatcsgagcgtgggaccttccccggggtgccgccccatttcagctgctgaggagggacagtgtgggtgttcggtggctgcgatggcttgggttcggatggtttctggttttcggatcagagctttacttggtgagtggttgagtattggtctgggtttaggtttcagtgggccagactccacaggtgctccctgtgacagctggagcttgtgtcctgagccagccactggccgctggggcgttctgtctggccagttttaagaagtaacttggcttgccctagatggatttgaactcttggctttgttagcattttgccatctaagttccttctccaagtcctcccagccatcgtgtcattagaacgttctggaaatgtcactaaaatgtgcccggaaataagtgcatcaagatagattggtggctcttggtgtggccatctgcacctgtcctggccccagaagctgtgctgcctcttccgcatggaggagcaaagcgcaggtcgctcctgaggctgagctccgctcctcctgggccctgggtcctccgcagacacgtcccacccactgctcttctctctgccagaagctgccggccatgaggacgcatgggtgggcgctgtggagagtgcaggcttgggggtagagaccagtgatggctctgcagagcttagcctcagagtaggggcgtgg

SEQ ID NO: 680210 - DNA, 1936 bp, Homo sapiens
ggaagaaccagggtgtgaccaaggagaaaagagcaaaaacaggctcaaaattcaagacagccacacccaggggcctcttccatccctccatctggcctctccgaaaacatcctgcttccttctgagcccaaagctccaaccactgaaagaaaacttggaccattgttcctgagtagatgagaagcctccatctccggcttccagggctctgtatataagaccctaaactggagggtatggggctgggaggacaccaaggtagacctcaagaaaccagagcccatgggactgtccttgacagctgccttcctgctccccgaatacagaacctcctacctcaccacggcccagttgggctttttctagaagacagcggaggtttggaggtcctactctcccacctggcctggcagaaatcccagaacagaactacagaatgcaattggggcagggagtggggagaaaatccagcactgcttcctttttcaaatcaattatggccagactgactcatcttctctcatagaccagaaagtcccacatcttgttgtttcttaatcatatggaaacctaaatatagacatatctgcagaaggacaagctgagaaaaccagtatccttgttctcccaggggaaagctcgattctcactcttttctcctgggttttagttttgggactgtgtycccagtagtgcacagagcatgcgcctgttggggcaatggcagcaactcagacctacttccaggtctgctgctgcgcctgggtccccatcacataccgcttgatcttgcctctggaaagacctccatcttccatcccaccgtgagagcaatatgatgagaaggaagccaggcacctcagtcacatctcagcagagggcctttgtgaatggaaccctcactgatgtctggccttgagcagacacccaaggctgcaggctccagagatgatctcagcagaagagtcccactgagcaccaggccaggcatagtggagtcaatcaggcacccaggaggaagcaggacccctgcaatgctttgcgtcccagtccttcttcccttcactcatttctgggaaacagcacaaaggatggctttattgggaaatagcttattacccttctggaagggtcttgaggccccaagtttcagaaagctggggccacggagaaaatgtagctgtgctgcacagaacagagatgcaaatgagatagccaatcctatgatcctaacaaaagtcagtttgtccggaaaaagcattttagaggagatcaaagtcatgtcagagtagccacgaaaaagctttagcaaagcacagtggtcagatttagcaatgagaataatgagaccagggaagagcggccagtagcctgggattctttggtgcaacatgaatgaggacaaaatcaggatgtcattgacagccaaccaacagcccaggcttcatgcagcaggcaacctgggcagcaggacctggacttcaaggctaaaggagcgtctgtcagctaactctcctgctgtctccacgccatgcccaaagcacaatctaatatcttcctggcatccctagacaagaggtggaaacctggcagctcataagccacaatacagcccacaatcttgctcagttcaaacagtagtgggtaaatatttgaattaattgctaatattttaaaagcagatttgggactcggtgcagtggctcacgtctgtagtcccagtaccctgggaggctgaggtgggcagatcacttgaggtgaggagttcgggaccagcctggcctacatggtgaaaccccctctctattaaaatacaaaactagctaggtgtggtggctcatgcctgtagtcccagctacttgaggggctgaggcaggagaatcacttgaacctgggaggcagaggttgcagtgcaccgagattgtaccgctgcact

SEQ ID NO: 680211 - DNA, 1936 bp, Homo sapiens
ggaagaaccagggtgtgaccaaggagaaaagagcaaaaacaggctcaaaattcaagacagccacacccaggggcctcttccatccctccatctggcctctccgaaaacatcctgcttccttctgagcccaaagctccaaccactgaaagaaaacttggaccattgttcctgagtagatgagaagcctccatctccggcttccagggctctgtatataagaccctaaactggagggtatggggctgggaggacaccaaggtagacctcaagaaaccagagcccatgggactgtccttgacagctgccttcctgctccccgaatacagaacctcctacctcaccacggcccagttgggctttttctagaagacagcggaggtttggaggtcctactctcccacctggcctggcagaaatcccagaacagaactacagaatgcaattggggcagggagtggggagaaaatccagcactgcttcctttttcaaatcaattatggccagactgactcatcttctctcatagaccagaaagtcccacatcttgttgtttcttaatcatatggaaacctaaatatagacatatctgcagaaggacaagctgagaaaaccagtatccttgttctcccaggggaaagctcgattctcactcttttctcctgggttttagttttgggactgtgttcccagtagtgcacagagcatgcgcctgttggggcaatggcagcaactcagacctacttccaggtctgctgctgcgcctgggtccccatcacataccgcttgatcttgcctctggaaagacctccatcttccatcccaccrtgagagcaatatgatgagaaggaagccaggcacctcagtcacatctcagcagagggcctttgtgaatggaaccctcactgatgtctggccttgagcagacacccaaggctgcaggctccagagatgatctcagcagaagagtcccactgagcaccaggccaggcatagtggagtcaatcaggcacccaggaggaagcaggacccctgcaatgctttgcgtcccagtccttcttcccttcactcatttctgggaaacagcacaaaggatggctttattgggaaatagcttattacccttctggaagggtcttgaggccccaagtttcagaaagctggggccacggagaaaatgtagctgtgctgcacagaacagagatgcaaatgagatagccaatcctatgatcctaacaaaagtcagtttgtccggaaaaagcattttagaggagatcaaagtcatgtcagagtagccacgaaaaagctttagcaaagcacagtggtcagatttagcaatgagaataatgagaccagggaagagcggccagtagcctgggattctttggtgcaacatgaatgaggacaaaatcaggatgtcattgacagccaaccaacagcccaggcttcatgcagcaggcaacctgggcagcaggacctggacttcaaggctaaaggagcgtctgtcagctaactctcctgctgtctccacgccatgcccaaagcacaatctaatatcttcctggcatccctagacaagaggtggaaacctggcagctcataagccacaatacagcccacaatcttgctcagttcaaacagtagtgggtaaatatttgaattaattgctaatattttaaaagcagatttgggactcggtgcagtggctcacgtctgtagtcccagtaccctgggaggctgaggtgggcagatcacttgaggtgaggagttcgggaccagcctggcctacatggtgaaaccccctctctattaaaatacaaaactagctaggtgtggtggctcatgcctgtagtcccagctacttgaggggctgaggcaggagaatcacttgaacctgggaggcagaggttgcagtgcaccgagattgtaccgctgcact

SEQ ID NO: 680212 - DNA, 1936 bp, Homo sapiens
ggaagaaccagggtgtgaccaaggagaaaagagcaaaaacaggctcaaaattcaagacagccacacccaggggcctcttccatccctccatctggcctctccgaaaacatcctgcttccttctgagcccaaagctccaaccactgaaagaaaacttggaccattgttcctgagtagatgagaagcctccatctccggcttccagggctctgtatataagaccctaaactggagggtatggggctgggaggacaccaaggtagacctcaagaaaccagagcccatgggactgtccttgacagctgccttcctgctccccgaatacagaacctcctacctcaccacggcccagttgggctttttctagaagacagcggaggtttggaggtcctactctcccacctggcctggcagaaatcccagaacagaactacagaatgcaattggggcagggagtggggagaaaatccagcactgcttcctttttcaaatcaattatggccagactgactcatcttctctcatagaccagaaagtcccacatcttgttgtttcttaatcatatggaaacctaaatatagacatatctgcagaaggacaagctgagaaaaccagtatccttgttctcccaggggaaagctcgattctcactcttttctcctgggttttagttttgggactgtgttcccagtagtgcacagagcatgcgcctgttggggcaatggcagcaactcagacctacttccaggtctgctgctgcgcctgggtccccatcacataccgcttgatcttgcctctggaaagacctccatcttccatcccaccgtgagagcartatgatgagaaggaagccaggcacctcagtcacatctcagcagagggcctttgtgaatggaaccctcactgatgtctggccttgagcagacacccaaggctgcaggctccagagatgatctcagcagaagagtcccactgagcaccaggccaggcatagtggagtcaatcaggcacccaggaggaagcaggacccctgcaatgctttgcgtcccagtccttcttcccttcactcatttctgggaaacagcacaaaggatggctttattgggaaatagcttattacccttctggaagggtcttgaggccccaagtttcagaaagctggggccacggagaaaatgtagctgtgctgcacagaacagagatgcaaatgagatagccaatcctatgatcctaacaaaagtcagtttgtccggaaaaagcattttagaggagatcaaagtcatgtcagagtagccacgaaaaagctttagcaaagcacagtggtcagatttagcaatgagaataatgagaccagggaagagcggccagtagcctgggattctttggtgcaacatgaatgaggacaaaatcaggatgtcattgacagccaaccaacagcccaggcttcatgcagcaggcaacctgggcagcaggacctggacttcaaggctaaaggagcgtctgtcagctaactctcctgctgtctccacgccatgcccaaagcacaatctaatatcttcctggcatccctagacaagaggtggaaacctggcagctcataagccacaatacagcccacaatcttgctcagttcaaacagtagtgggtaaatatttgaattaattgctaatattttaaaagcagatttgggactcggtgcagtggctcacgtctgtagtcccagtaccctgggaggctgaggtgggcagatcacttgaggtgaggagttcgggaccagcctggcctacatggtgaaaccccctctctattaaaatacaaaactagctaggtgtggtggctcatgcctgtagtcccagctacttgaggggctgaggcaggagaatcacttgaacctgggaggcagaggttgcagtgcaccgagattgtaccgctgcact

SEQ ID NO: 680213 - DNA, 1857 bp, Homo sapiens
gatttcccttgtagtgtaagtgaattaaaacctaaagtcttccattttccaaagttgaattggttggatcccaaagaacttaaaatattcatttattgattgtaaaattagttcaacaaacactcttttgtctctgcattcttttcttctgcgtttcacaaatcagtcatttgacggaagacgccttgttctgtactctacaccaaggagagaaaaataattttacacactttcccctatagcagtcaaaatgaaagggaaaaataataaatctagaaacagtattggtggcttctttttccacgttatttattctttttcttccccacgttctcccttcttcccaatctattctcttccctttctcttttctctcttaccgtctttgttactctcttctctcctttctcctcttccctctctctgtttctatttctttccatttttcctcctttttaaaagaaaagttatgtttctaatgaccacaaaaatcacattgcagacctgaacactggagtcctgtctctctctttaggttctttgccacgaataaatgattttattacaacagaaaaaaaataagggaagtgacatttttctttcaaatattgttgatatgattacttgacctttaagataggctaaggaataaaaaggaaggattctttctaagggttttcttctcaaggccctaacaccaagtgtagctgattgttcacagcattatgaaattctaaacccattccatgaacctttacttagaagcagacttggccgaaaactttccttcctccctcctccctttttcctctctggcttttggttgttttcccttcatctgttgtatgacatccaagatttcacatggaaacaccccatggcttgtttttcattgcaggttaaaatcaactttaattttgttatttttccccctaagatgtcgcccatcccattaacatgattaggcttttcttttgaatcattacctgaggtaaaaatcttattggcacgttggcccctgaaaaatgaggccaaaggygaggagttgtgcccgccaggctgatacatggcaagccgtcagggccgaggctcgatttcacaccatgatttaagataccatgtgctcagctcagctctgatgataaagcatccgtggttgttaagaattagaaaatagaactgtgtttcctcaatagagaggaactaaccaacatcaaatatcacatttatgtgcattaacagccatatattgaatgacaaaatgtaacaaaggttcctgctagagagacgtcgactgcttgggttagctgacttcaaagttttgtgctgccttttgttcattattggaagctctggtattgccaacaggagctacaaaaccatccatttaacggtataaactaaattatgtttcacaaactgggtttccattgtggtaatatgatgcatacaaacatggttaaatagaagacataggaagagatgcaaatagcagcttcccatgctttcttagcaaaaaaaagagcactgtacactcaatggtatattatgcctgaaaccaatcagtgattaaaaaggttgttttttaaccagactggagtaaatatttagcctacaaaaaattatgtaaaaaaattatgcaacactagtgaggattaaaagagcgaatagagactaaattacatagaaaacatttatttttacttttccactctgtataaaactccatcagacagggtcaaagacaatcctggcatggccaggcacagtggctcacgcctgtaatcccaaaatatttgggggccaaggcgggctgatcactggaggcaaggagttcgagatcagcctggccaacat

SEQ ID NO: 680214 - DNA, 1857 bp, Homo sapiens
gatttcccttgtagtgtaagtgaattaaaacctaaagtcttccattttccaaagttgaattggttggatcccaaagaacttaaaatattcatttattgattgtaaaattagttcaacaaacactcttttgtctctgcattcttttcttctgcgtttcacaaatcagtcatttgacggaagacgccttgttctgtactctacaccaaggagagaaaaataattttacacactttcccctatagcagtcaaaatgaaagggaaaaataataaatctagaaacagtattggtggcttctttttccacgttatttattctttttcttccccacgttctcccttcttcccaatctattctcttccctttctcttttctctcttaccgtctttgttactctcttctctcctttctcctcttccctctctctgtttctatttctttccatttttcctcctttttaaaagaaaagttatgtttctaatgaccacaaaaatcacattgcagacctgaacactggagtcctgtctctctctttaggttctttgccacgaataaatgattttattacaacagaaaaaaaataagggaagtgacatttttctttcaaatattgttgatatgattacttgacctttaagataggctaaggaataaaaaggaaggattctttctaagggttttcttctcaaggccctaacaccaagtgtagctgattgttcacagcattatgaaattctaaacccattccatgaacctttacttagaagcagacttggccgaaaactttccttcctccctcctccctttttcctctctggcttttggttgttttcccttcatctgttgtatgacatccaagatttcacatggaaacaccccatggcttgtttttcattgcaggttaaaatcaactttaattttgttatttttccccctaagatgtcgcccatcccattaacatgattaggcttttcttttgaatcattacctgaggtaaaaatcttattggcacgttggcccctgaaaaatgaggccaaaggcgaggagttgtgcccgccaggctgatacatggcaagccgtcagggccgaggctcgatttcacaccatgatttaagataccatgtgctcagctcagctctgatgataaagcatccgtggttgttaagaattagaaaatagaactgtgtttcctcaatagagaggaactaaccaacatcaaatatcacatttatgtgcattaacagccatatattgaatgacaaaatgtaacaaaggttcctgctagagagacgtcgactgcttgggttagctgacttcaaagttttgtgctgccttttgttcattattggaagctctggtattgccaacaggagctacaaaaccatccatttaacggtataaactaaattatgtttcacaaactgggtttccattgtggtaatatgatgcatacaaacatggttaartagaagacataggaagagatgcaaatagcagcttcccatgctttcttagcaaaaaaaagagcactgtacactcaatggtatattatgcctgaaaccaatcagtgattaaaaaggttgttttttaaccagactggagtaaatatttagcctacaaaaaattatgtaaaaaaattatgcaacactagtgaggattaaaagagcgaatagagactaaattacatagaaaacatttatttttacttttccactctgtataaaactccatcagacagggtcaaagacaatcctggcatggccaggcacagtggctcacgcctgtaatcccaaaatatttgggggccaaggcgggctgatcactggaggcaaggagttcgagatcagcctggccaacat

SEQ ID NO: 680215 - DNA, 610 bp, Homo sapiens
aagctctctgatttaatatcatgttgacacgttgccattgcatacattttacaaaacagctttatcccaaatgcccacccgctgatgaatggctaagcataataggtattatgataaaatactatttgttaatttaaaaaggaatgaaatacctttttacttcattcgtttacttcatacatggaacaacatagataacccttaaaatcattatgcaaagtgaaagaagctagacacaaaagwgtacttagcgcaggattccatttccatgaaatattcagaaaatgtgaatctacagagacagtaagttagtgcttgcctgggaagggcagtggaaagaagtgggtgcaaagggacacgagggatctcatggggatgatggacatgttacagttagcctgcagtgatgcttgcagaattttatagatttactaaaatcactgaattggaaacttaaaatttctaaactttatggtgtataaaatatgccttaataaagctgttcaacaacagcaatgaaaatctcacatttgttcttttttttttttttcagttttaacaccaatgagagaaaacactaccttgtttagcatcattgtcctaaatattt

SEQ ID NO: 680216 - DNA, 1147 bp, Homo sapiens
atttgctgactcagtagagctctctcttcacccatagaatggagctaatacctcccttcctgtttccggcatttccatgaagatagtttatcaattattgagtgctgagatgtatttagcatgtccttgcaccatgacctggtggcagaagctgagcggtcatacagtgggttgtagtagggtctagctagctaagccaatggtgttttatgatgtggacaagctggagatgcagagcatcagacaacaccttratggacggaatataaaggcctagtatctggcttgtgttttttgggtataacgtggtgactccacagcctctccagctcaggacagcagggctttgaaagcagagaatttgggtatgaatcctagattttccaatgactaactctataatatggaggagttctatctgattatcctcgaatcatcctttgtaaaatggaataatatgcttctcttccttcgatttgttgtaaggagccaatgaaactgtggccataaagcccttagctcttactaagaaatcagtaagatgtagtgtcaatgagaatgctttgtgcttataggtgccaagcgcatatgacttgtttttgaaaatctcctcagagaaagaaagagaatgaacgcaggtctaaaatatgttgataaaggggggaaaaggatactctactgctgacatcaggcacagcatgatagagatgctaggaagaccccatctggcccatgtcacctgggtttatcaggtttctcatcagatttcttcccttcctaacagtgaccctaaacatcaaaagattttggggtgagttctctgatagaaatagacagggaggccaggtgcagtggctcacacctataatcccaacactttgggaagccaaggtgggcggatcatgaagtcaggagatcgagaccatcctggctaacactgtgaaaccccatctctactaaaaatacaaacaattagccgggcgtggtggtgggtgcccgtaatcccagctactcaggaggctgaggcaggagaatggcgtgaacccgggaggcggagcttgcagtgagctgagatggcgccactgcactccaacctgggcgacagtgtgagactctgtatcaaaaaaaaaaaaaaagaaaagaaata

SEQ ID NO: 680217 - DNA, 591 bp, Homo sapiens
ttataaaaatgactgtaaggctctctggaaagtcatacatgcaatgattgtttcagatttttgacctaaaaaaaaagaaaatcagaataacatattatgtctccattaataactgtttatcaagtgcagggttggttcccaatgaagtttgaagactctgcttactttattgtctggttgaggagataagcatgcactagaaaatagtcagaaagtgtgggaatagaatcgtgagggtcctcagaggccagagagcatggtctgaataacaccacaatttgttggaagacttttcatgatgaaaatcctattttagactttatgatgttagcatatagtctagattaaactccaaaggttctcccaaaatagaaaatgtgttccttttgttttttaagtcataattcacagtatgaaaacaaaagaatgtattcagccattctcttggaaagttgatgggatatttaccctatgctgatctggctgtcctgttagtaaaaactagagttgaatagtgaagatagttcttaagttatcttttagagatgtactctacaaagcctrttaaggcaaagagtaaatttttagcca

SEQ ID NO: 680218 - DNA, 1149 bp, Homo sapiens
gattttcattatttatgtgggagagggctcaatctagtccaattaatttttataagagacagtctactttggattatatggataatattctatatgaagatygggttggcttaggcaaagttatttcagtactcacctttattttattctgtactacaccacagagaaatctactaggcactgaatattttaatgtttcgtgttctttacaagttttttttttcactttctgtgaaggttatactgtagtaattcaacattggcccccagctatttatgcttatatcaatttctgcaaaagtcaaaatgattgagaagtactcttttgtcaggccctagtgctaattcataatggaataaaaccatgtattctgccttcctctcttctttgtcacatatttgttattgactgaaaaccacttctgaatgtgttcgttgtatttcctatccattgtgatggataacagaatggatattgctctgcctgctttataattatcggaaacaatgacttatacctagctcttctaaaacaaaaatcattttaacacccattctcaagcataatttatatctaacaactttctacagtaggtcaaatatttttatttaggagtataatctgtaaccagattgtcttgggagattcactagatattacaatacttaaaactagatagatgattgatggatatttttatgtttcatagaccgcaattaattggttacatctgggttagctattttccaaactaaaattattgtgactatgctttataccatacaattctggtaccctaaatactcatctgtcctggtatgaaatgagactcagtgttttgtgtaaaggaaaatgtggattctgactggctacagttattgctgggccagcttttatgtctaagtagaattgccatatgcacaggcagattttcagtttagcatactcaatttttatataaggtgtaacacctacatttcacatatttacaaaatatatagacttgtttttattcacctacaaagaatatcttcatgctgtattcttgctagtgtgaaataagatgtgttatacgtgtcaaatatctattggatttcaaagtcttagtacgaaaaggtaaatattaatacataatattttatattgag

SEQ ID NO: 680219 - DNA, 598 bp, Homo sapiens
tcctgcctcagcctcccaagtagctagaagtacaggcatgcgccatcrcgcccagctaatttttgtatttttagtagagacagggtttcaccatgttggccaggatggtctcgatctcgacctcgtgatccgcctgcctcagcctcccgagtgctgagattacaggcatgagccacctcgcccggccaacagctaatttttgtatttttagtagagatggaatttcgccatgttgaccaggctggtttcaaactcctggcctcaagtgatccaccagccttagcctcccaaagtgctgggattataggcatgagccaatgcacctggcctcccctctctttttaacctctccacacttcttccttctgtgtgcaaaacaagtctctccatcctaaaaagaaacctgtggcccctgtggttccctccagctatctcgatgttctttttctcaaatcacactcagagcctttaatcagccaaacctggctccaattcatcacctgtatttcatttttctttctcttttcctttctttctttttttttttgtgtgtgtgtgttttttgagacaacatctaactctgtcacccaggctggag

SEQ ID NO: 680220 - DNA, 628 bp, Homo sapiens
tgaaccaaagggcacagtaggagcgggcagcgagaggtcattggaggatacaaggttaagtcccactttggacctgggagacaggcaagtggagacatcagcactggacaggtcctggagatgaaaattttggaaggtctcgcctctcagagaaccaggaagaacaatactacttaataatggaccacacaagacctgccagcaaaagacagtgcaaggaggaaaaccaagagcgtgtggggtccaggaagctgaggtatgtctcgggtccagtaaaacagggactggagtggctgtaatgatcccatcttctttccactgaacaggcaagacccccgggagaggcaatcttccagctcctcctccatgttagcttgtacaygagccctccaagcttggacaatgacagctacagagccaagcaggaggagggcagggaccctggaaaaacaggaggaagcaactcgagccaacaagatatcacacctgaacaccaaaaaacagctgccaagagaaaactgaccaagccccacacgccacacaggaaatgcctggacaaatggtgcctctaacccttggcttcacaggcttatgctgttgcacccagacctgtcactgtcccaagcac

SEQ ID NO: 680221 - DNA, 1511 bp, Homo sapiens
tgcgcttcctgtgaaagaaggccggtttgacatctattaaacaaatccatctcagcattcttaacagcctttatattgtttgatatcaagctcagtcatttaaaaaatatgcctctgtctttgtaagattacctatgggttggagaagacttatgtaatattcaactcagcagataatgtatataaaaattattgcatatgatttaatgatctggaatcaattttaactgtttatatgtcacacttgggaaaaagcaggacaattataaaatttaataatggcatctccataaaaagcaataattcatattctactttaaaaatcctttctcttatgtagaggagtaagtggcatcctggtggcaccagaaggatgtactggtgagcttgtgtagtggtcactaagttaacgcgtgttgctttatttgactgatactgatgttgccatcttagcttccggcagttaggtgggcagaaaacccaaagttagtaactttggacagttgcaacaatgttagtaactcaagggccaaagtgatggattaaacggccagtccaggcaatctctggttcaccctcatgatgacagagtgcttttaggtagtgaggcagtgcttagtctcaaggcagcctcccttcccctcatgcattacctggtgtttgtgggcaggagtgtggatcctgtatacatgcctggggttgtgggtgtggggaggggcctccagtgtgctggggtataccctggggcctctgtaggtgcctgatccatagatgctccctgtggcctcgtcacaggggtcaccaggcccctggtggcttacagtgtggaagttggaggcttcaccataatctgtggcctgagcttggcctcagggaatatttccgggtggtgtcagctgtatctcctccttactcagtgtcgtaggggagcagcgactctctgggacagtgggatgggtggtaaaagaatttaccaagacagttgtaggtaaagaaaggcagattcattggacaccacagagcttacatgtttgtggtgatgtgggtgtgaacatacgattatcgacagtgcataatgcttgatgaaaataatagatgctgatgttattgttttatgtatttaatatcctatattttttattgttattttagagtatatgcttactacttttttttaaggtaactgtgaagcagcctcaggcagtttcttcaggaggtttccagaagaagkcattcttatcaaggagatgacagctccatgcctgttactgcccctgaagaccttccggtgggacaagatgtggaggtagaggacagtgaaattgatgatcctgaccctgcttagccttaggcgaaagtgtctggttgtgtcttgttttttaacaacaaacggtttaaaagtaaaataaataaataatgaaaaaagctcatagaataaggttaaaaagaaacaaaatatttttgtatagctatataatttgtgtggcttttttgtttatttgtttgagaca

SEQ ID NO: 680222 - DNA, 1511 bp, Homo sapiens
tgcgcttcctgtgaaagaaggccggtttgacatctattaaacaaatccatctcagcattcttaacagcctttatattgtttgatatcaagctcagtcatttaaaaaatatgcctctgtctttgtaagattacctatgggttggagaagacttatgtaatattcaactcagcagataatgtatataaaaattattgcatatgatttaatgatctggaatcaattttaactgtttatatgtcacacttgggaaaaagcaggacaattataaaatttaataatggcatctccataaaaagcaataattcatattctactttaaaaatcctttctcttatgtagaggagtaagtggcatcctggtggcaccagaaggatgtactggtgagcttgtgtagtggtcactaagttaacgcgtgttgctttatttgactgatactgatgttgccatcttagcttccggcagttaggtgggcagaaaacccaaagttagtaactttggacagttgcaacaatgttagtaactcaagggccaaagtgatggattaaacggccagtccaggcaatctctggttcaccctcatgatgacagagtgcttttaggtagtgaggcagtgcttagtctcaaggcagcctcccttcccctcatgcattacctggtgtttgtgggcaggagtgtggatcctgtatacatgcctggggttgtgggtgtggggaggggcctccagtgtgctggggtataccctggggcctctgtaggtgcctgatccatagatgctccctgtggcctcgtcacaggggtcaccaggcccctggtggcttacagtgtggaagttggaggcttcaccataatctgtggcctgagcttggcctcagggaatatttccgggtggtgtcagctgtatctcctccttactcagtgtcgtaggggagcagcgactctctgggacagtgggatgggtggtaaaagaatttaccaagacagttgtaggtaaagaaaggcagattcattggacaccacagagcttacatgtttgtggtgatgtgggtgtgaacatacgattatcgacagtgcataatgcttgatgaaaataatagatgctgatgttattgttttatgtatttaatatcctatattttttattgttattttagagtatatgcttactacttttttttaaggtaactgtgaagcagcctcaggcagtttcttcaggaggtttccagaagaaggcattcttatcaaggagatgacagctccatgcctgttactgcccctgaagaccttccggtgggacaagatgtggaggtagaggacagtgaaattgatgatcctgaccctgcttagccttaggcgaaagtgtctggttgtgtcttgttttttaacaacaaacggtttaaaagtaaaataaataaataatgaaaaaagctcatagaataaggtwaaaaagaaacaaaatatttttgtatagctatataatttgtgtggcttttttgtttatttgtttgagaca

SEQ ID NO: 680223 - DNA, 1439 bp, Homo sapiens
tgccgtgctggatctcacacccggctctgacacgctgccgtgtcccccgtgtgcctgcgcctggggtctccgtgtgtgtgtctgtgtacacgcatgtggttttgctttcttgtgggctggaaaatctaatagtagtcagggcgtggtggttgacacctataatcccagcactttgggaggctaaggtgggtggatcacttgaagtcgggagtttgagaccagcctggccaacgtggcaaaaccttgtctctaccagaaatatcaaaaattaaccgggcatggtggcacatgcctctaatcacagctacctgggaggccgaggtaggacaatcacttgaacccgggaggcggaggctgcggtgagccgagatcgcaccactacactccagcctgggcgacagagcgagactctgtctcaaaacaaaacaaaatgcaggcacggacgtttcagccccctcttcctgtggatgctgagagggtttccagaagaaggagaatgtccccgtgctggtggctcatccaggtgtgggccggtgtgcggcggggcgtgggcagaggagaggcttcgggctccggtttcctctcctgtggatgcgtcgcccccgcatggtggtcctctgcggaagtccccctgtccgtcccgttggcagccgcagtggaaagacggatggacgggctgtgacagggacagcccagtgtgaccccagccctggccgtcgcggttgtggcattctcgctgtcagggggctgttcccgtggctctcatggctgtggaggggcgtggagggggcggtccccatggccagaacctggccgtggcgggtggaggacttgaggccggctcagtggtcagcgctgctgcttgttcccctacacagaggcgttgggtggagctgcctcaggtatccctcctggctggggtgtgtgcgtcaccctgagtctccagcccatgctgaggagcctcgcaggcagggcccagcagcctatactccaggccattgctrtccgtttctccagaaggccctgctggtgggtggtcccaggagctgggcctcagtgggggatcccaggacagtggagcctgggaggggccccagtgttgaggcgtgaggtactgtctggaactagggggtgcccccaaagcggcacggcgcccagtccctgtgctggaagagagatgagctgcggtggggggtgggggactacgtctcacagatccctctcccagggcacatgaggagattcctcccccaaaacgcccaggaaggaagttaaattttaatatgggtctggtttagagaaactaggttagccatgcgtgggtgtttctggatgtttgggcagtaaggagagtcggtagctcaagaaatccgctggccgctaagcaggggtgaggggcaccgactgccatcccttcttcaaccacggccactcggcca

SEQ ID NO: 680224 - DNA, 1503 bp, Homo sapiens
cacaaaaacaaaaatagaacaaatcaaaagaatctaggtcaggtttatggcttatgcctatagttctagctactcaggaagctgaggcaggaggatcacttgaggccaggatttcagagctgtggtgaactatgatcacgccaccgcactctagcctgggaaacagagcaagaccctgtctctttaaaaaaaaaaaaaaagaaaagaaaaagaatctgaaggttgaaaacaggaataggctggtggatattggaaaaccgttggcagggttgcattcaacatccactttactaaaacagccaatagccttctttttcattttagtggagatggtactgatagggagactcagatgtcattgaacagccataatgaggcagtgaatgattgtggtatcctgtaggtctctgatgttggctctagacagctcaacattcctacaatggcttaaatgacgacatcaaaaagcctgatgatgctaaactaggagagatggctgataagacagcacaactacagtttccagtgatctgctttagccaggggaatgatgggccaaacctacaggtggacattgacaaggataaatgggaagtcctgtgtttggataaatagggcaataaattgtgcaaagacagaatgagagggactggcttgttggtcattcaggtaaaacaaacatatggagatttcggttggccacaaacttaatcacacaaagtttattgtagctgctaaaagttgcattaatacaaacaagtctaccttatcaacagacatgctcagctgggcatggtgtctcacgcctgtaatcccagcattttgggaggctgaggcaggcagatcacgaggtgaggagttggagaccagcctgaccaacatggtgaaaccccatctctactaaaaatacaaaaattagccaggcgtggtggcacatgcctgtaatcccagctactcaggaggctgaggcaggagaattgcttgaacctgggaggtggagattgcagtgagcagagattgcgccactgcactccagcctgggcgacagagcgagactccatctcaaaaaaaaaaaaraaaagaaaaaaatagacatgctcatcattactttgatacagaaacacatcagttttactctgtgcttaccagatcatggcaggaattttgagttcagtcttaggcactatggtaacaaaatacagaatggccaaaagagggtcccggatggtaagaaatctagacagatctcactgatctggcagaaaccagacaggattatactgtcaaaggaagactaagaaaaaagtgggtgttggagcacttttaaaggccctcacacagacatgggagcacaccagtctaaggggcagctctgggattaatgtatggcagttacagagggacagagcctggttcaataaacaaatccaagctaaaagagcggttggagccagattccagctgagcttccaccaggaaaattcaggagaggtatctgtcgta

SEQ ID NO: 680225 - DNA, 1503 bp, Homo sapiens
cacaaaaacaaaaatagaacaaatcaaaagaatctaggtcaggtttatggcttatgcctatagttctagctactcaggaagctgaggcaggaggatcacttgaggccaggatttcagagctgtggtgaactatgatcacgccaccgcactctagcctgggaaacagagcaagaccctgtctctttaaaaaaaaaaaaaaagaaaagaaaaagaatctgaaggttgaaaacaggaataggctggtggatattggaaaaccgttggcagggttgcattcaacatccactttactaaaacagccaatagccttctttttcattttagtggagatggtactgatagggagactcagatgtcattgaacagccataatgaggcagtgaatgattgtggtatcctgtaggtctctgatgttggctctagacagctcaacattcctacaatggcttaaatgacgacatcaaaaagcctgatgatgctaaactaggagagatggctgataagacagcacaactacagtttccagtgatctgctttagccaggggaatgatgggccaaacctacaggtggacattgacaaggataaatgggaagtcctgtgtttggataaatagggcaataaattgtgcaaagacagaatgagagggactggcttgttggtcattcaggtaaaacaaacatatggagatttcggttggccacaaacttaatcacacaaagtttattgtagctgctaaaagttgcattaatacaaacaagtctaccttatcaacagacatgctcagctgggcatggtgtctcacgcctgtaatcccagcattttgggaggctgaggcaggcagatcacgaggtgaggagttggagaccagcctgaccaacatggtgaaaccccatctctactaaaaatacaaaaattagccaggcgtggtggcacatgcctgtaatcccagctactcaggaggctgaggcaggagaattgcttgaacctgggaggtggagattgcagtgagcagagattgcgccactgcactccagcctgggcgacagagcgagactccatctcaaaaaaaaaaaagaaaagaaaaaaatagacatgctcatcattactttgatacagaaacacatcagttttactctgtgcttaccagatcatggcaggaattttgagttcagtcttaggcactatggtaacaaaatacagaatggccaaaagagggtcccggatggtaagaaatctagacagatctcactgatctggcagaaaccagacaggattatactgtcaaaggaagactaagaaaaaagtgggtgttggagcacttttaaaggccctcacacagacatgggagcacaccagtctaaggggcagctctgggattaatgtatggcagttacagagggacagagcmtggttcaataaacaaatccaagctaaaagagcggttggagccagattccagctgagcttccaccaggaaaattcaggagaggtatctgtcgta

SEQ ID NO: 680226 - DNA, 1459 bp, Homo sapiens
ggaggctcatggagatttccacccatttccaagatcaaatgaaaagtcactggaaatacagttaaaccagtttaaaactaaccaaccaacccacccacacgctcatgaggatacttgagattgtgagaagaggagatcaaagcaagttggggacatttacttctttttcctgtgccatatggactttttttttttgtagttcatttacccatttgtttaacctatgttgccaaacttttgctatgggactcaagaattccaagagtatcattaagttacaaacctaattagaaactggagacaggaagggactaaggctggagggtggcattgaacatctagaatcgcagccattgggctaattagcccaaaatgaaggaatctagcagtagcagccagccctcaggatggcagagcaggaggctctcagtctgttgaccttttttgtgaagcaaacagatggccacatcttgttccagctgcaaacgccatgcagccttctgcgaggccggctggtgtgtgcctcaggacaagtctgcatggatgtgctggtgaggctaggccatctcagcaaggcctttgtccatggaagggagccgccttctggctaaattcctggagatgtttcagggaagccagctgttctgttaagagtggggctttgaggtcagacaggcctggggatgaatccctgctctatccctagctgtggaaactgttaacctctctcggatttcttattataagtatttattgtgtgcttactatatgccaggcactgtgctaaatgctttgcatgagtaactcatgccatccacacacagactcaggatgtgtgtgcgatgtccccaggatcacagaactcataagggggtgtagtcaggattcaaatggagtctgattccagtgcttgaattcttaaccactgcatgataatgcctcacctaacartaggatctacactcccatgagaatgtgctgaggctccaatgaggcaatctatgtatagctttaagaagtgaccaattcatggctgctgttactactaatctttttgtaataaacccacatagttaaggttggccaaggcagtgattagatatgtactctgctactaagtccgttttttcaaggtcctgttctcacctgggtttcagttaacaaagaacctaaaaaagaaattctggaggcaccatcatttcctcccccagctctcaggggagggatttattctccctgagctgaggagcaaagggaaccacgtagcgatcaaacatggatgaaaggcagcagcggaagcagcccatgtccaagtggagccagctgggacctccaggcaaggtgccccgtgggggctgtcaccccagaactggcccatgtctacaaccagccctccttggcaccccagctgcatctactcacaagtttcaaccaggcttcctcaatggattctcctctc

SEQ ID NO: 680227 - DNA, 1459 bp, Homo sapiens
ggaggctcatggagatttccacccatttccaagatcaaatgaaaagtcactggaaatacagttaaaccagtttaaaactaaccaaccaacccacccacacgctcatgaggatacttgagattgtgagaagaggagatcaaagcaagttggggacatttacttctttttcctgtgccatatggactttttttttttgtagttcatttacccatttgtttaacctatgttgccaaacttttgctatgggactcaagaattccaagagtatcattaagttacaaacctaattagaaactggagacaggaagggactaaggctggagggtggcattgaacatctagaatcgcagccattgggctaattagcccaaaatgaaggaatctagcagtagcagccagccctcaggatggcagagcaggaggctctcagtctgttgaccttttttgtgaagcaaacagatggccacatcttgttccagctgcaaacgccatgcagccttctgcgaggccggctggtgtgtgcctcaggacaagtctgcatggatgtgctggtgaggctaggccatctcagcaaggcctttgtccatggaagggagccgccttctggctaaattcctggagatgtttcagggaagccagctgttctgttaagagtggggctttgaggtcagacaggcctggggatgaatccctgctctatccctagctgtggaaactgttaacctctctcggatttcttattataagtatttattgtgtgcttactatatgccaggcactgtgctaaatgctttgcatgagtaactcatgccatccacacacagactcaggatgtgtgtgcgatgtccccaggatcacagaactcataagggggtgtagtcaggattcaaatggagtctgattccagtgcttgaattcttaaccactgcatgataatgcctcacctaacaataggatctacactcccatgagaatgtgctgaggctccaatgaggcaatctatgtatagctttaagaagtgaccaattcatggctgctgttactactaatctttttgtaataaacccacatagttaaggttggccaaggcagtgattagatatgtactctgctactaagtccgttttttcaaggtcctgttctcacctgggtttcagttaacaaagaacctaaaaaagaaattctggaggcaccatcatttcctcccccagctctcaggggagggatttattctccctgagctgaggagcaaagggaaccacgtagcgatcaaacatggatgaaaggcagcagcggragcagcccatgtccaagtggagccagctgggacctccaggcaaggtgccccgtgggggctgtcaccccagaactggcccatgtctacaaccagccctccttggcaccccagctgcatctactcacaagtttcaaccaggcttcctcaatggattctcctctc

SEQ ID NO: 680228 - DNA, 1459 bp, Homo sapiens
ggaggctcatggagatttccacccatttccaagatcaaatgaaaagtcactggaaatacagttaaaccagtttaaaactaaccaaccaacccacccacacgctcatgaggatacttgagattgtgagaagaggagatcaaagcaagttggggacatttacttctttttcctgtgccatatggactttttttttttgtagttcatttacccatttgtttaacctatgttgccaaacttttgctatgggactcaagaattccaagagtatcattaagttacaaacctaattagaaactggagacaggaagggactaaggctggagggtggcattgaacatctagaatcgcagccattgggctaattagcccaaaatgaaggaatctagcagtagcagccagccctcaggatggcagagcaggaggctctcagtctgttgaccttttttgtgaagcaaacagatggccacatcttgttccagctgcaaacgccatgcagccttctgcgaggccggctggtgtgtgcctcaggacaagtctgcatggatgtgctggtgaggctaggccatctcagcaaggcctttgtccatggaagggagccgccttctggctaaattcctggagatgtttcagggaagccagctgttctgttaagagtggggctttgaggtcagacaggcctggggatgaatccctgctctatccctagctgtggaaactgttaacctctctcggatttcttattataagtatttattgtgtgcttactatatgccaggcactgtgctaaatgctttgcatgagtaactcatgccatccacacacagactcaggatgtgtgtgcgatgtccccaggatcacagaactcataagggggtgtagtcaggattcaaatggagtctgattccagtgcttgaattcttaaccactgcatgataatgcctcacctaacaataggatctacactcccatgagaatgtgctgaggctccaatgaggcaatctatgtatagctttaagaagtgaccaattcatggctgctgttactactaatctttttgtaataaacccacatagttaaggttggccaaggcagtgattagatatgtactctgctactaagtccgttttttcaaggtcctgttctcacctgggtttcagttaacaaagaacctaaaaaagaaattctggaggcaccatcatttcctcccccagctctcaggggagggatttattctccctgagctgaggagcaaagggaaccacgtagcgatcaaacatggatgaaaggcagcagcggaagcagcccatgtccaagtggagccagctgggacctccaggcaaggtgccccgtgggggctgtcaccccagaactggcccatgtctacaaccagccctccttggcaccccagctgcatctactcacaagtttcaaccaggcttcctcamtggattctcctctc

SEQ ID NO: 680229 - DNA, 957 bp, Homo sapiens
aaggagatgtaattgaatacagtggttatttttaaaagagcatttgatttcatgtgaaatttgtacaataccagatctcttggatgtagggctcaggggcaatggttcacgtatcataaagattgatgtgaagagatatgtagtttgtttttttgtgctaattttttttcctaagccatttaaaaagtttacaaaacctttagtagtatactaaaaagtatactgtactactttattcactttcaccataaatatcttttaaaaaattttctgttttgatggtttagttttttaatgaaagtatttatctgtaattcaagaatatactgtaccctgaaaagagctgacactgtctggaaagaagaacccttctttttgccacctttctttccaccaccaccctctaaaaaacaaaatgggaaaaataaagttatttgcaactgccttttaagtactatccataaacatcaggactgccaaaattccctttagaatttaaatttgcactcattcacttgcatcattcctattctttccatatctctcstccctcaattgtagattaagaaagtctaagatttggctgactttatagtcattcatgaaaaaaccaacaacaaaagaattgtgagtgtaaggggtagatgtgggtaggggatgggactcccctactccaagtcagcaatgtctgttctctgaaggaagggccaaggagacagagtagtaatgccttgttagtgcaggcctcacttggacaacaggcagagttgcacacttggtcccaggtaggtgagcctctgctcacctgcagggaaatcctggctcccatttgcctgtgcttccatggtgttacttgcacatctggtcttagaacacttaagagaacagaacttcagttccccaagcactagggccctgacaaaggatttccttatctccagcctagctggagaacct

SEQ ID NO: 680230 - DNA, 957 bp, Homo sapiens
aaggagatgtaattgaatacagtggttatttttaaaagagcatttgatttcatgtgaaatttgtacaataccagatctcttggatgtagggctcaggggcaatggttcacgtatcataaagattgatgtgaagagatatgtagtttgtttttttgtgctaattttttttcctaagccatttaaaaagtttacaaaacctttagtagtatactaaaaagtatactgtactactttattcactttcaccataaatatcttttaaaaaattttctgttttgatggtttagttttttaatgaaagtatttatctgtaattcaagaatatactgtaccctgaaaagagctgacactgtctggaaagaagaacccttctttttgccacctttctttccaccaccaccctctaaaaaacaaaatgggaaaaataaagttatttgcaactgccttttaagtactatccataaacatcaggactgccaaaattccctttagaatttaaatttgcactcattcacttgcatcattcctattctttccatatctctcctccctcaattgtagattaagaaagtctaagatttggctgactttatagkcattcatgaaaaaaccaacaacaaaagaattgtgagtgtaaggggtagatgtgggtaggggatgggactcccctactccaagtcagcaatgtctgttctctgaaggaagggccaaggagacagagtagtaatgccttgttagtgcaggcctcacttggacaacaggcagagttgcacacttggtcccaggtaggtgagcctctgctcacctgcagggaaatcctggctcccatttgcctgtgcttccatggtgttacttgcacatctggtcttagaacacttaagagaacagaacttcagttccccaagcactagggccctgacaaaggatttccttatctccagcctagctggagaacct

SEQ ID NO: 680231 - DNA, 945 bp, Homo sapiens
gcaatgtccaagaccccgatgaagtactgcctgggctgcttggtgtccagctgctggttgatgcgggtgaccatccacaggaacatcttctcgtagacggctttggccagagcacccaccgcattgtacaccttcacagatagagtaatgtttgttggtattgttaaagacatgccatgaaggcctgagatgtgtgtgattcattgaggtcatgcacttacctgctgcacagtctggcctttggtgacatactcattgccaaccttgaccctagggtagcagagggctttgagtaggtctgcagagttcagactctggagataggctgccttgtcagcgactgcagagacacagttcaggacatgttgtttcatgaaggatatcctcttttacctaatctttccatttttctccaattcaatctattatttaaataaaaagcttaaataattctataaaaggccaaatgaggttttctaaccttagagcatgtggttgccagtaaatggttgattggttatactgatctttagtgatttatttcaagtagtttttaagaaatttttcatyaactgtaaacatatgtagtatttattgccgtcttgcagttttttgtaagtaaaagccatagtccctgtttttaagacacattaggtgtagttggaaggataagataaatattcactgttagagagggtaaaagtcagaatattttgattcttatcttagtttttcacctccctattaaaccttgctggattaatttctttatctacaaatgtggagattaaaatttactgcatgatccctacagaatccctttctaaaattctgtcggtgactataacgtaaataaatgccacatgtcaggtacaccagtaactgctgaaacatttagaggaggaagaaagaatgtcaattcgaggtggtcaggaaaggctttaa

SEQ ID NO: 680232 - DNA, 945 bp, Homo sapiens
gcaatgtccaagaccccgatgaagtactgcctgggctgcttggtgtccagctgctggttgatgcgggtgaccatccacaggaacatcttctcgtagacggctttggccagagcacccaccgcattgtacaccttcacagatagagtaatgtttgttggtattgttaaagacatgccatgaaggcctgagatgtgtgtgattcattgaggtcatgcacttacctgctgcacagtctggcctttggtgacatactcattgccaaccttgaccctagggtagcagagggctttgagtaggtctgcagagttcagactctggagataggctgccttgtcagcgactgcagagacacagttcaggacatgttgtttcatgaaggatatcctcttttacctaatctttccatttttctccaattcaatctattatttaaataaaaagcttaaataattctataaaaggccaaatgaggttttctaaccttagagcatgtggttgccagtaaatggttgattggttatactgatctttagtgatttatttcaagtagtttttaagaaatttttcatcaacygtaaacatatgtagtatttattgccgtcttgcagttttttgtaagtaaaagccatagtccctgtttttaagacacattaggtgtagttggaaggataagataaatattcactgttagagagggtaaaagtcagaatattttgattcttatcttagtttttcacctccctattaaaccttgctggattaatttctttatctacaaatgtggagattaaaatttactgcatgatccctacagaatccctttctaaaattctgtcggtgactataacgtaaataaatgccacatgtcaggtacaccagtaactgctgaaacatttagaggaggaagaaagaatgtcaattcgaggtggtcaggaaaggctttaa

SEQ ID NO: 680233 - DNA, 587 bp, Homo sapiens
gttcatctagagaatttttctttgcccaaaggcaggagccaaatgtaacaagatgctaagaattcaagaagaagaatcatcatataagatgaggggctgggtgcagtgactcacccctgtaattgcagcactctgagaggccgaggcaggagaattgcttgaacccagaagtttgggttcaagcttgagcaacgtggtgaaactctgtctctatgaaaaatacaaaaaaattagccaggtgtggtggcacgcacctgtgatcccagctacttgggaggctgaggcgagaggatcgcttgagcccaggaggttgaggctgcagtgagctgtggttgcaccactgcactccagcctgggtgacagagtgagaccctgtctcaaacaaaaacaacaaaagaatccaaaaccaggcacttccaaaccagggagcataggttgttttacaaactcactgcccttttcttttccaatatccctactatttgttttgctggtggttatgrtgatgggaaaggatgtaattgagaatggaacatgaaataagaacttggtcataacctgtataaaactgtgtcaaagtttactcc

SEQ ID NO: 680234 - DNA, 917 bp, Homo sapiens
ccgaagagcagctgccgtggcttcgtgctgcagggtggactcttccaggtccctgcgcattttctggaactcagcctcccgcttcttgttcatctcaatctgggctgaagtggccccaccggcttcttccagcctctcactgatctcctccagctcccgggagaggtcagagcgctgcttctctgctttggcccgggaggcccgctctgcctcgatttcctcctccagctcctcaatgcgggcctggttgtgatatgtcaacattaatgtgaatttatgtcagttttgtttcctgtaatgcccagaaaaggtggaggttataacttacctgtaattctttgatcttcttttgtagctgyattgcaagggcttgttcatcttcaatcttgccttgcagattgctcatttcaaactctttcctattagaagagcaacacattagcttataatcacttctcttaccaatcttcttttctatgtataatctaagactttttttatactgctggtgttgaaggagtgagtagtacaatgttttacagattaataattgtattagtttaattaaataaaaaggtcaaagatgtcattatttttttccatatgtcatgatgtaacattttggagatctttttagcgtatgtttcatttgcattgacatacaacaagcaggttatagctgaattataccatacttactttttgagtttctcattaagttgctgtttgtcattttctgtatccattgtggattcttgggccaattttaggtcaccctccagttttctcttggctctttctaagtccatgcaaagtttcttttcttgttccagagatccttcaagctaaatttatgatgcattttatttatttcagctcttaagcactgaaccctatgctagtagccttcaaagata

SEQ ID NO: 680235 - DNA, 646 bp, Homo sapiens
gtccgggccctcgggaagccttggacagaaccctccaccccgcagaccaggcgtcgtgtgtgtgtgggagagaaggaggcccgtgttgagctcagggagaccccggtgtgtccgttctttagcaatataacctacccagtgcgtgccgagcaggcttggtggggaagggacttgagctgggcaagtcctggcctggcacccgcagccgtctcccttccgtggcccagggaggtgtttgctgtccgaaggacctgggccggcccatgggagcctggggttctgtccagataggaccagggggtctcactttggccaccagttcttcggccagcacctctgccctccagaacctgcagcctggaggggtgaggggacaaccacccctctttcctccaggttggcaggggaccctcttctcccgtctgccctgygggttgcccgcctcctccagagacttgcccaagggcccatcaccactggcctctgggcacttgtgctgagactctgggacccaggcagctgccaccttgtcaccatgagagaatttggggagtgcttgcatgctagccagcaggctcctgtctgggtgccacggggccagcattttggagggagcttccttccttccttcctggacaggtcgtca

SEQ ID NO: 680236 - DNA, 1712 bp, Homo sapiens
gatctaagcaatgaccagctagctactttacacccatgtttgcaagaaccatctagcatttacactttctccgagctcagtttccttgggccaccaggcttcgcttaagccatcagttgattaatagaattcagtactaaattcaaaagtatcagctgtttctcacacctgtaatcccacactttgggaggccaaggcgggcagatcacttgaggtcaggagttcgagaccagcctagctaacatactgaaacctcatctctactaaaaatacaaaaatcaaccgggcatgatggtgggtgcctgtaatcccagctactcgggaggctgaggcagaagaatcgcttgaacccgggaggctaaggttgcagtgagccaagatcgtgccactgcacttcagcctaggtgacatagcaagactccatctcaaaaaaattaaatacaataaaatgctctcctgtaggcttgtacagcaggagccctggaaggcaggagattcagtattgggctatttcagtcaagtcccttcacctcttggggatcagtttcccgattttacaaaatgagtaagattttacaaaaaggaattgaaaaagataacctcaattttccccttcagctttaacattcaataattctaactctattcaggggttacagattcatcctagccccatcccttttgcaagtgtaaacatctgatgatacaggcaagggaagagaggaaaggggcagctggcaccagaacttcagtgctggccagacagagccttctcatgatggcaggtaatctcagctcatacaaaaactgcaatctggtcccactcatctaaatgcaacccacagcccggtccacatggtgagaccctgtctctacaaaaaataaaaattatgccaggcgcggtggctcacatctgtaatcccagcactttgggaggccraggtgggtggatcacgaggtcaggagttccagaccggcctggccaacatggtgaaaccctgtctctactaaaaatacaacaaattagctgggcatggtggcgggcgtctgtaatcccagctacttgggaggctgacgcaaagaattgcttgaacctgggggatggaggtggcagtgagccgaaatcatgccactgcattccagcctggactccatctcaaaacataaattaaaaaaaaaaaaaattggctgggcatggtagcacatacctatagtcctagccacttgagaggctgagtagggtcacttgagcccaggagtttttttgtttttgttttttgagacggagtctcgttcttgtcacgcaggctggagcgcagcggcacaatctcagctcactgcaacctctgcctcctgggttcaagcagttctcccaccgcagcctcccgagtagctggaagcacaggtgcgcaccaccacaccaggctaatttttgtaattttagtagagacggggtttcaccatgttggccaggctgatctcgaaacctgacctaaggcaatccacccacctcggcctcccaaagtgctgggattacaggtgtgagccaccgtgccctgcacgagcccaggagttttgaggctgcagtgagctatgatcgtgccactgcactccacgtctctctagggtctttatcaaattttatcactatatgttttgtttcaaggtggtcctgagccctccattaaaactcttaagaccttctgggcaca

SEQ ID NO: 680237 - DNA, 1712 bp, Homo sapiens
gatctaagcaatgaccagctagctactttacacccatgtttgcaagaaccatctagcatttacactttctccgagctcagtttccttgggccaccaggcttcgcttaagccatcagttgattaatagaattcagtactaaattcaaaagtatcagctgtttctcacacctgtaatcccacactttgggaggccaaggcgggcagatcacttgaggtcaggagttcgagaccagcctagctaacatactgaaacctcatctctactaaaaatacaaaaatcaaccgggcatgatggtgggtgcctgtaatcccagctactcgggaggctgaggcagaagaatcgcttgaacccgggaggctaaggttgcagtgagccaagatcgtgccactgcacttcagcctaggtgacatagcaagactccatctcaaaaaaattaaatacaataaaatgctctcctgtaggcttgtacagcaggagccctggaaggcaggagattcagtattgggctatttcagtcaagtcccttcacctcttggggatcagtttcccgattttacaaaatgagtaagattttacaaaaaggaattgaaaaagataacctcaattttccccttcagctttaacattcaataattctaactctattcaggggttacagattcatcctagccccatcccttttgcaagtgtaaacatctgatgatacaggcaagggaagagaggaaaggggcagctggcaccagaacttcagtgctggccagacagagccttctcatgatggcaggtaatctcagctcatacaaaaactgcaatctggtcccactcatctaaatgcaacccacagcccggtccacatggtgagaccctgtctctacaaaaaataaaaattatgccaggcgcggtggctcacatctgtaatcccagcactttgggaggccgaggtgggtggatcacgaggtcaggagttccagaccggcctggccaacatggtgaaaccctgtctctactaaaaatacaacaaattagctgggcatggtggygggcgtctgtaatcccagctacttgggaggctgacgcaaagaattgcttgaacctgggggatggaggtggcagtgagccgaaatcatgccactgcattccagcctggactccatctcaaaacataaattaaaaaaaaaaaaaattggctgggcatggtagcacatacctatagtcctagccacttgagaggctgagtagggtcacttgagcccaggagtttttttgtttttgttttttgagacggagtctcgttcttgtcacgcaggctggagcgcagcggcacaatctcagctcactgcaacctctgcctcctgggttcaagcagttctcccaccgcagcctcccgagtagctggaagcacaggtgcgcaccaccacaccaggctaatttttgtaattttagtagagacggggtttcaccatgttggccaggctgatctcgaaacctgacctaaggcaatccacccacctcggcctcccaaagtgctgggattacaggtgtgagccaccgtgccctgcacgagcccaggagttttgaggctgcagtgagctatgatcgtgccactgcactccacgtctctctagggtctttatcaaattttatcactatatgttttgtttcaaggtggtcctgagccctccattaaaactcttaagaccttctgggcaca

SEQ ID NO: 680238 - DNA, 2322 bp, Homo sapiens
tccacctgcttctttatgcatttgctaatacgactactagaaacatcaagcttacatatgtggcttgtattatatttttgttggacggtgccactctagatatcagaatctacaaagtgactgagattcaaactcttcaatgaagcactttttaaatgctctacttgagaattaattccactcactgctctgctgccgtcgcggtcctgactttccaaggctgtgcccagagcgcggcacacgtggctctcacacaggcaggcctgcacggcacgcagcagtggaggaggttaccctgggtcgctgacgccaggggaagccaagcgaccgaycccacacttctgagccccgccggggaagtccccgggcgcggaaacaggtggtgcgccggcggttcgcagctgctgggcccgccggcctgggcgcagccggggacagcgacgcgtttcctgcccgggaagggcccgagcgcagggccggctatagcggtcccgcagctgcctgcttcgattttagcactgctgctcccaagagggagcaacgcggccctctgtccctcgtagggcttgaaatgtaaattattcatatcaggggaatgtgtgcttcaaaaagcaagctggacaagaaccgacgggtaatcctcgacaaattcttctacttaaccctcaccattagaagtctgaggcctgaaaaatctcttgaccggagagatactaactccacaggtgcccaggatcaggatctatgacataaatgaaaaacattccaaattcactgatttttaagagtatttagatagtagaaaattattaattctctttattagctcaatactttgttcagccagcatttgcagagcaaaatctgcgtggatttatttagtgaaaattatcttttaaaaccacaaagatttaaccatagtacataaaatttagttgcagtaagcaaattatatttttaagctgaaccctaagaaattatccaaaaatatatagttatacacagcacttatgattgctgaacaaatgaatcatataaaatttatgtttagttcaatttttagcaagagtgaatgacttcttagatgatttttctcctagtctcatagtgcagtgtagacacaaatggaccttatttattcaactaggcaaatcttagttcaaaagagtttgtgacaaaggctgacctacaggactaaaaccgtgcttgccttgtaggaaaataaaaaaaaatgtaatcgaatggacaataattttttaaatacattattcaaggaggaataagccctgtaacagaatccataaaacaccatgctccatcagtctctttttcctaatagaatgaccaagtattctctccaattaattttaatagcaaaccaccattttctaaaatgacttaaatgggttcaatcaagtagaatgactccaagggaaaccactgactcagatatgaaatgtgccttacatcatactccatacatcaaagactatactttcagggatcatttctatactttgttacatcatactgcatacatcaaacaatgaagaatccaggtttcaaattacaaatacatatatacctttaagtcttaccctcaaggtaagataggaaagtgggaaatgctgtctgctcactgatattccataaaatattcactgtaatttctggatttccaagatacatctatctagcagaggtggtttgtcaagtctgagcttttccacctgtccacccccgtagcaatggggctgatgttcacaccctgcagaccatcatcagcattcatggcaccccgacagataaccccattaaactctctccctgactcaggtaaacacttcacaatgtaatgtgaggaggacattattactgaaataaacctgaaagccgctctaaatctatagaaaaagtgcaacactcacaaatataaataccattacacactatttgtaagatccctcataaatgactatgttatagctgagacctgcagcggaactcccaccaccaaatgttgtggtagtgtaaggaccattgttattttcacttgcaaatattcctgataggtcatattttaagctgctaaaaactgatacaagctgttcattctttcagggataaggtgacaaccagcaagagaaaaaaacaaggtaatgcacttgagacagtaaggtaggctctcggaaaaggagggctgtggtgatcagagcccacggacgtccaaaaatgtgacttggctgggcctaaaagaggggagcggctcttctaaaaacaaaatcaccccctggaaattatgttggttggttccttggggca

SEQ ID NO: 680239 - DNA, 1350 bp, Homo sapiens
tgagtttggttttttaattatatgaacctgaaaatttcccatataaaataatgatgctttggttttagaacataccatttgcattttgaaagaaatatatacacatatttagaattttaatatgagtactttgagttgtaatgttcataaagttttatttcagtagtggcaacataaattgtatattcctgttaagctcttaaaatgttcctgttaaagcatttaaattattgtgttaatttgataaaatcataaccaaatttcacaaatgtgttaaattggtcatttagcaaaatattcgtcagaaagattggtttttggcagaattactatgtggcaaactgaatttcagtaatttggtttggtaaatttatcttcagcaaattggcttgatttcatgcatggttgggggataatgtttattcttgtggatgtctcctacayaaagatctcaaatcatgccagtggtagaatacaaacaaatgacactcctcatacccctatctctagttgagcagatagcctttctcttttttgtggtagaaaaattattgacgtgccagtaagctaaaaatgtcatgctccctggtgggattgctaaaggagttaaaacaaattgagtatttaaataatgcctttggggcacctttatttatttcccctgcagtcaatccagtttttagcttcatgcccattatgattcaagtactaactctgccagaaggcttgccatcacatggaaataaccatggcctttgttaaatccctttgcttctgtagcttgctttaaaacttggcagaacagaggaggaagctgcaagctgctgatgctggtgttctcgcactgctgatcagttaggctacgtctgattcttcagtgcccagttctctaggatctggggtcaattctaaaccctgctgtgagctcagatcttactggggaaaatgtctgacaaaattttggcagatgcattatctgaacactccctgccaaaacctctgctgtgagcaatgcaaaacctggccagccttgagaagggttggccaagttccaacccttgtaataacccacatgttctacctactgtgccatttggactgctcccaaatgcaacatcatctgccaagagcaatgtatgcctctgtgcctcccagcggactgcctccaggaatcaggacatcgttttcttcctctatatttgcatgccctgcatcctgtggtccctattaagctccaactgtgccatgccccacaagaccatattctacatcatatatgtcccttccaaaggtacctagactacagggtgaacccacagatcgagctctagctgctctttaggtccatag

SEQ ID NO: 680240 - DNA, 848 bp, Homo sapiens
tttcaagatgtactactgtaagtcacactgacgaaaagaaacaaggctctataaaaagcattaagggggaatcaattctctgccagaacatcttggatgctggatagttcactatgtcaataaaaatataactacatytcaaaggattttcttttgttatcatggtccacaaatctatgtgaaaggcttacatagagaacagaaaacatgcctgctgtgtttctgtattaccaaactgtgagctctaaaaatgttttttactctaattactatagaacaataggcagtgttaggcttaagtttaacttctacgagtgtgattttcattgttattttgaccctgaaatgtccattatgccatgtggaaacagatttgagagaataaggactttacagctgtagggtgcctaatctttaaatcttctctcttcaccctgtttattgctgttgtaaattcacattctatggctataactgatttcacagcatttgaaaagaggaaaatgctcatatgagatgtcagtttgattctcccccaatctgggctggggataataagacttgtttaaatacactttgagagaacctaagagttatgtataagcaatagtaatggaaaaagctgttttgagtttataccaatagctaaattttgtgctgtcagactcttaagagaaacactctcattgaatacactggcacagactaatagaaaaaggaagggagcaccatgaggggattagatatgtagtcaagagactacatgagaaactttatgtgtacagcatatcttgaataaattatcatatcccagaatatcattttatttcccaaatgtaaaatgagga

SEQ ID NO: 680241 - DNA, 848 bp, Homo sapiens
tttcaagatgtactactgtaagtcacactgacgaaaagaaacaaggctctataaaaagcattaagggggaatcaattctctgccagaacatcttggatgctggatagttcactatgtcaataaaaatataactacatttcaaaggattttcttttgttatcatggtccacaaatctatgtgaaaggcttacatagagaacagaaaacatgcctgctgtgtttctgtattaccaaactgtgagctctaaaaatgttttttactctaattactatagaacaataggcagtgttaggcttaagtttaacttctacgagtgtgattttcattgttattttgaccctgaaatgtccattatgccatgtggaaacagatttgagagaataaggactttayagctgtagggtgcctaatctttaaatcttctctcttcaccctgtttattgctgttgtaaattcacattctatggctataactgatttcacagcatttgaaaagaggaaaatgctcatatgagatgtcagtttgattctcccccaatctgggctggggataataagacttgtttaaatacactttgagagaacctaagagttatgtataagcaatagtaatggaaaaagctgttttgagtttataccaatagctaaattttgtgctgtcagactcttaagagaaacactctcattgaatacactggcacagactaatagaaaaaggaagggagcaccatgaggggattagatatgtagtcaagagactacatgagaaactttatgtgtacagcatatcttgaataaattatcatatcccagaatatcattttatttcccaaatgtaaaatgagga

SEQ ID NO: 680242 - DNA, 3674 bp, Homo sapiens
aaaaattagaagacttcttttctttaaaaattcaatataagattttcattactagtctttatgtcttttggctccatgttcattttcaaaattgatataaactaattcctttaagaaaatctttttaattagtcatagtcatgataaaatgacacagcaatattatatttacaatcattaatgggacctacagattgacaatttttgtcattgctgtactattctgaagtgtatatatatatatatatacactaacacaaaagctgctgtaatatttctaatttagattgcaaagacagtgacaagtcatcatatctgaagaggagttttataccattcctttggactctgagctctcggcggcagctaccccagtctacagtgctagctctgcatctggcacagaggaggtgctcagaagtgctcaaatcaactctgtgtccttggtggttctcccaggtggccttgggaagccacccaccccagaagaatatggacccaatgggtaatgtttctgtcatctctgacaatgttattagttttctagggtgcttgtttgtttgtttttgttttctgagacatggtcttgctttcttgcccaggctggagtgcagtggcgcattccatagctcaccgtaacctcaaactcctaagctcaagggatcctcccgcctcagcctccagagcagctagcactacaggtgcacgccatcatgcctggctaattttcctgtagagatggagtctcactgtgttgcccaggctgctctcaaacttctggcctcaaatgatcctctcgcctcagcctctcaaagtgctgggattacaggcttgagccactgtgctggcttgttgttttttaaaaaatacattatcttttaaggagttcaagttcacaagagattagcacagaatgtggtatatgccaaaagtaaaaactttaaccctcttctaggaagagtaagttattaataatgaaaaaatctgtattctgaaatcccgctttcttgggtttacctgaaagcattcttcaacaacaccaggccctcccctgactatattctgggtcaaagttctttaagaattctagagacacactgaatatgacaagcagagaactccgtacctggttgggctgaggtatacgctgttgctggttttcactgggtttcactggaattggtttgatgagatttggattgtcatagatggcagaggaactggttatcttttttggctcagaacaggttttacactgaaatagaaaagaaaatcccctcatttttggcttagaaaagctttagtctttttaaaagactacctttttacttcttatctaattggtagacggctgtgtttttgatagattttcatgcacaaaggaaaatcccttaaatttctctaagagctatgtttgagtataaatcaagttaaaatttaatttttcttagttggacaattcagtgctctaaatattactaacaacaccagcctccaggaccaggggttcttaagacacctgtataattgaaaggytctgtgcttaatatattgactatacgtttaaatatatatagtctaatgtctttcaatgataaacaaatatagaaaccattccttaaataacatgtctggacaatttaagcagttgacttaaaattggagagtagttgagtacatttcatcaaagtaactaaatcttttttggtctacaaaccaaaaagctgactcaaaccactgatttaaaaattactaacatcatctttatttaataaatgacttcttgcataaacagagtaattcaaatctgagcgttctgagctacttactacaaattagaattttgtagagaaagagacaagagacaaatctcatcatttccaacactgactcattattatacattaatctaaccaaccatgcaattgctaacacagtaggattcataacaaaaagagcatggcaatgatactggtgtctagtttgctaaaacactaaataaaacaatataaaatgctgctttctgtactacagactctctgaagcatcatttgtttccactgtacagccaaggcctcaggccccaaaatattccacacctgacatgaaatgaaatataaacacaatcttgtccctcaggaacccagcattcccaatgtgttttacagttatcaatgtgtattctctaatccaacgatctgggggtgtggcatctattaccactgtatgcactgtatgtgaggttaaccatacaaaagattctcttcctccaggcattctatcaataatttgtatatttagcacaagtattacgtgggatgcaaaatcaccttataagtcataaagtgttacttccaattcttcttaggtgaatgagggtatggcggcatggaccaactggcatggctttcccaagtcatggataaccaagacaagacaagaatacaggctaacatttaatcccttacacaattttggcatgaaaagccttgctatttaaaagaacgtgaatgcttcctttctttgaatgacgctttctgtatttcttctttttctatgttcagaaacactgaatttccggcaaagaaaggcagatttttcccagcttccctatgcccatatccatatgggctaacaggatgctttgtctgttgatatgaataagcctgatagcttttcctagttaaaatgttatctccagaagctgttttctgtgtcactacaactgcctacctacaaaaccttgcttttatgtaacaattgctccctcttatcagagtgctcagaattaatcatccacctcagtagtttgtagctcattttccagttgtttaattttgtatgcttttcccgacctaaatatctttaaaatcctggggggaaaaacagtttttgaaaaagcatataatggattcttcacagagaacctgaggcatttctttaaaacttcaaaaacttcctctgttggatgctgaggttaaaatacaataaaacctcaaaaagtatgtcatataatccagttttaatcacacacaaacacatacatacataaacatatgtatttatgccaagagagatgtttgaaacaaaatacaataaaagtataaaaagtttctatcttcagtttataggattattggtgatttttctttttatattcttttgaattctatcattcaacaaaaaaatttctataatttcataaataactcacagctatatccagaaaagagccaataattcttgtcttaaaccacaaaacacaaatagtccacttctgaatactccaagcttaactatgcagcctgtagatcatttctggtcctgcctcttgttcttactaaaatttggttattttactgttcacttgcatctcaactagaaattgaatagggcggagataaaaagagatgaaatgcaaattaacatcttttctactttaaagcagattcacagaaagttatttctcaaaagagaatgcacaaaatttcagccaaaataagttttcaaattattttattaacctcctgtaaactagacagacttcactttacccatatcatatatactgatagctcaacatttttcctacttccacttcttgggatgttcacaaatttaagaattctagagagacttaagcgtaaggcctgagactataaacctcctggaag

SEQ ID NO: 680243 - DNA, 1117 bp, Homo sapiens
caattgataaagtgtacctttcggcaaagaaacatgaggagaaaacacaatatttttctatattgcaaaacttttcatttcacaggacctgccattagtaagtcatattatagtttcaatagctttatttttttctctcataaaaatttattctctaaataataggataaccacctattatgacaattatatacagcatcattttaatgcatcttaatgatgcaytggggttaaaatgtcaaatattatttacattatactcattaaaattacactgaatagtatatggtaggcaaattcatgtatcttgagttcaaagagtaggatgaaaaatatacagaaaacatttcttcactgcaaggtctttatgaaagctgtccacaaagcataaggtgcatgtgtgtgcacacatatgtatttatatattgagtattatgttcttgttttctgtgtgtagagatgtccctgcaactggcatattttcagcaatcttcctctgggctgaccagcagtgcaacacaagtggtcagaaacgatacgagagtaaaatgtagtatgagaaaggcgatggctacttcatttcaaatctgacaaggactatttagttacctactacgacttccacattacaaagggttattaaattcttaatgactgaaagaaactttttggactttgattttttatttacttgtattcagaagatggcactcctacaatacaggccctcaaacactttgtcagctcactcggccaaaagtgatacataaagaaaaagtgccatagcagactcgttaattcttcgttcagggagccacctatgtgtgtgtctctgcagtctcctcactaagaacttgcctcacccagccctgctcaggcttaagatcagcaatgggttcacactacaaatccataaagcttcaaaagacagggtttaggtttatatcatcatatttatattcacttaaactcttccaaggaagaatctattccatcattagggcatgcatttcctaaacattaacatttgttaaaatgctgacaccccccatagccactgataccaaatgcaaacacaatggcaaacactgtacaattttaaacacttggccaaact

SEQ ID NO: 680244 - DNA, 1491 bp, Homo sapiens
tgttttttttttttctgacctaatgcctctactgataaaaatatttttactattattggttctgtggaactagtatgactgtgatagtgagaggactgcattccatttgccttgtgctccatcagagtcagctgtcggtgtgtcctcatgccagactcattgtaattaggaaggagacagaagaggcaagaagagcccagcgggaggctcccattttggcttgaaggcagtagcaccacaaattagaaaaaccattgcttgccttctacacggactcaacacaatactattgtgtctaccaatgggaggttctgaatatttttttaaaacctttgaaaacataaaaaccattcttagctcaagggacacaggaaaacaggccacaggccagaggttgcagacgcgtggtctaaacaattaacagaacaataaatcaagcccggatatgtcacatttgctgacctccctgttgtaaatactctcacaatgacttgattcgagaatgtccacgtaaacactgctgcgaggggagctagggagagttgagcagtggtttaccrtggtgtgctctttccaccacgcggatagcataggctgacatgtatgataagcaaccttgagagcaaagggaatggtaaaatgtggtaaaataattaggaaggaaggagtttttgagtatttattctctttgtttctaatataatttatttagttgtaagttcacataattcggtttttatactggccatgttgaacaatcggctggcaaaatttctgaaaatttaacaatattctctcacaaactagtacaagctggctccagtacaccacggctggagaggggaagctagaatgttgagaggcagtcaggatgaaagcaacagagcaaggaaagctgaagtttatggctgtggacgagcgcttcctccatcagctgagatggagccatgcgtgggcgttgcacagggcagcagccaatgatgggacggagctcattcaggccctctgtcttaataagcacaactcaactaatttgggaagaaaactcagttcagttggccagtacctggcagggacaggtagcttgacttaatatatagtaaatctaattataaaaatatagtactgtgctcaaaatttacatgtgagtagaatgatcgtgatgaaacagaagacagaacttttcccttacgataacattggattttctttcctaacctagctctcctacaaacatgcaaataaactgaaccagctaaagaagtggtcccaaggttttaataaaaaaaacatttaacccttccctaaatattatctaatgagggagcaaaatgtgtcactctcccttaacagatgggattctcatggctgctgttaaaggggaaaaaggagaaaccaaactgggtgactctctgagttacatctttggctctgaactcggtgagtctatggtttgataggttggcagggcaaagggaaaaacagagttgg

SEQ ID NO: 680245 - DNA, 626 bp, Homo sapiens
ccacgactgggcccacaccctgggcctgcaggggccgtgcccttccaccaaccccaggaaggctgagagggagcccggagagtggccagccagagccccgggccaaagacggcccgagattccatgtggccaggacgcaggggaggctgccacagccgtctaggctgggctccgcctaccgctgcctgtctgggcacccaggccctctaggacasctgcccatcacccccatcacacacactgcccaggcagcaaggaaccaggttttaaaaatctctatatttgtacttggaacagccatataccctcctggttcattttaaaacacatgccccatcctcacccccagcctcctgcacccccgtttccttgtcaaatattctcaatctcaaacagaccctctgggaagcagaacagagaagcctcctgagtggcccctcatgggagctggtccctgacatgaaggaggctaaggtgtccactgggccctggggccgggctcagggtggtgtccctggggctgggctcagggtggtattcccaggcagggcacaggaggcttggctgggggaaaaaggaggaagaccagaggggcagacagcctctatgctggctcctttctcctc

SEQ ID NO: 680246 - DNA, 551 bp, Homo sapiens
cacagcgaaaccccgtctccaccaaaaaaatatgaaaaccagtcaggcgtggcggcgcacgcctgcaatcgcaggcacttggcaggctgaggcaggagaatcaggcagggaggttgcagtgagccgagatggcagcagtacagtccagcttcggctcggcatcagagggagaccggggaaagagagggagagggagaccgtggggagaggggagaggggagagggagtcatctcctttcctacacagagctgttcaagcagggggactggcctcacctgttccgtgtccttcaggccccagtgccttcgtgtcaactgagtgaggaatggaggacatgaaagagctcaagactgggcatcaggggacccagactccagactctgttgctcagtgactagctagctagtgagttcactcrgcagccctgggccttgtgctggctgggattcctgccctgcagaatgaggagatgggttgagatctctggtctcccttctggcactggccttctgtgacctaagtattcgctgtgcacctgtcgggtcctcag

SEQ ID NO: 680247 - DNA, 576 bp, Homo sapiens
gactctgtccctggagtgaaatccttagggttggaacttgtgggaacattccaacttgctaagcagggtccactgggagggaagctctatctgggaactcacccccagcgcacacacatctcccccagggtcccaaggccccgcagcttcctcccccgaccaaaccccaagacctggatcccaggagacaacagtctccacagtgagagcaacattaagggcaaagccatggagaaatgtgggagaggccggcctcaaatctttccatttaacaaaccccagtgatgggtatggacagcatgcagggcttttggggcgcttccccccgctcctccatcaccctcagcctccacacttcaaagttcaagttcaaagctgttcaagtttcctaccagcaaatagccctaacttgcctctagagtaggccaaatgccaactctgtaaaacacacttacattatcggttacagaatgtcactcttaccrtcatgtcttgcaacaaccctgtgagggcagtattaatgcccccttacagcagaagacactgcagctcgaagacagcttaagtggcagaata

SEQ ID NO: 680248 - DNA, 2445 bp, Homo sapiens
gaattttacctcaataaagataaataaattttttaaatgagagaagaaaaagaaagagcctccatgcaaagactgggaaaaagaayatccagatcaagggaaacagcatgtataggggctctgaggtaaggaggagcttggcaaggtcaaattcacagaactggccaggggcagtggctcatgcctataatgccagcactttaggaggccaaggtgggcagatcacttgaggtcaggagttctagatcagcctggccaacatagtgaaaccttgtctctacaaaaattacaaaaattagccaggtgtggtggtgtgcacctgtggtcccagctacttgggaggctgaggcaggagaattgcttaaacctgggaggcggaggttgaagtgagccaagatcatgccactgtactccagcctgggcaacagaatgagactccatctcaacaacaacaacaacaaaaaattcacagaactgaccaaaggccaaggtgtctggatggttaagaagcagatgaggaagagttgagatgggggagactgggaagatccaacctgaggtcactgagggtctcctaagttcatcagatgttacaattggaaagagcctcagatatcaagctgttgtactgacatattttttggagttgagaaagtgaagacagacagaggtgaggcagctccctcaagctcacagagatagttttacatgtcccatagacacgttcaggaagcacatcttctccctgaacttaggatgggagagttgtgttcatgagcatggaggaagcatgtggcctggttccctgatgttttgcacccaggtgacgaggagctggtccgggaggtgctgtttgacgcggtggtgacagcccccatggaagcctactggacagcgctggccctcaacatgtccgagtaggtccaggttcccaggttcccaggccccaaccagcccccagaattcccttggctaagttgggacccctctcaccatctggctggtggctcaggagagaacccacgtcctttggcctaagattaagtggaggtccccctgggcactggactaaatccccaccccaggatagtcccattccgacagctcctttctctgggttggactccagccatgagacttcaatggccaaaatgcccctggccaaagagcagttcaaataggtttccagcaggtaaggtcatggcaccaatgaacttgacctcggttttcccagccccttagaaatcctcgctccctttgctggtcttctcctgatactattgtgtttagtggcctggtagaaagaagatgagtggcatgtgagtgtgagtgtagggcatgtgtgtgcccatgagtgttggggggcagagtaaggtattaatgaggttaaggttgcagtgggtcataccttgctcctgaataggaagattcaacattgtgaagatgtcaaacctcctctacacagtcaataaatttaagcacataattagatactagaaaattaaaaattagttttttagtgctatcctaataaaaaacacctacagaattttatagggacagtctcctattgaaaaaagcaagatgtggaatgctaccattctacatagtatagtacgctaccttttctgtaaaaagtgggtgccatagtatttgtgtggattatatagataacatctatgatctgtatactgtctacgcaaggctactcaggaaacattcctcattagctgtttctggttggaaaatgggtaactgaaacagggatggaagggacacttttcaccctaacatgttggtgtaattttgaaccatatgaatatatgacctatacaaaattagaataaagaaagaaaaacaatctagtgggccaggcactgttctgagtgcttagtgtatataacccatttgatcctcaccgcagtcctcacccacacaggagctctcattactgccatttgacagatgaggaaaacaaagcatagcgagatcaagcaactcgcctgaggtcatacgcctcgaaagtggcagagctggaatcaacagcaggcagcctcactcctgcgccccgactcttaaaccctgcactgttgtgccttctacagagggctggagcaaataggtttggagaggggcaccatcttcatctttccaacctcagagattagtcagtgatgatttttaatgtggagaaatattgagaaggaaatattcttaaccagagcatgcttcagaaaagacttcctaggaagttaatataaaatagcatacagttaaggagaaaaaaatacataaccatctccaaagatatagaaaaggcattaaataaatattaatattcattcatttaaaaaaattttgtagagatgggggtctctctatgttgctcaggctggtcttgaactcctggcctcaaacaaccctcccacctcagcctcccaaagt

SEQ ID NO: 680249 - DNA, 2445 bp, Homo sapiens
gaattttacctcaataaagataaataaattttttaaatgagagaagaaaaagaaagagcctccatgcaaagactgggaaaaagaatatccagatcaagggaaacagcatgtataggggctctgaggtaaggaggagcttggcaaggtcaaattcacagaactggccaggggcagtggctcatgcctataatgccagcactttaggaggccaaggtgggcagatcacttgaggtcaggagttctagatcagcctggccaacatagtgaaaccttgtctctacaaaaattacaaaaattagccaggtgtggtggtgtgcacctgtggtcccagctacttgggaggctgaggcaggagaattgcttaaacctgggaggcggaggttgaagtgagccaagatcatgccactgtactccagcctgggcaacagaatgagactccatctcaacaacaacaacaacaaaaaattcacagaactgaccaaaggccaaggtgtctggatggttaagaagcagatgaggaagagttgagatgggggagactgggaagatccaacctgaggtcactgagggtctcctaagttcatcagatgttacaattggaaagagcctcagatatcaagctgttgtactgacatattttttggagttgagaaagtgaagacagacagaggtgaggcagctccctcaagctcacagagatagttttacatgtcccatagacacgttcaggaagcacatcttctccctgaacttaggatgggagagttgtgttcatgagcatggaggaagcatgtggcctggttccctgatgttttgcacccaggtgacgaggagctggtccgggaggtgctgtttgacgcggtggtgacagcccccatggaagcctactggacagcgctggccctcaacatgtccgagtaggtccaggttcccaggttcccaggccccaaccagcccccagaattcccttggctaagttgggacccctctcaccatctggctggtggctcaggagagaacccacgtcctttggcctaagatyaagtggaggtccccctgggcactggactaaatccccaccccaggatagtcccattccgacagctcctttctctgggttggactccagccatgagacttcaatggccaaaatgcccctggccaaagagcagttcaaataggtttccagcaggtaaggtcatggcaccaatgaacttgacctcggttttcccagccccttagaaatcctcgctccctttgctggtcttctcctgatactattgtgtttagtggcctggtagaaagaagatgagtggcatgtgagtgtgagtgtagggcatgtgtgtgcccatgagtgttggggggcagagtaaggtattaatgaggttaaggttgcagtgggtcataccttgctcctgaataggaagattcaacattgtgaagatgtcaaacctcctctacacagtcaataaatttaagcacataattagatactagaaaattaaaaattagttttttagtgctatcctaataaaaaacacctacagaattttatagggacagtctcctattgaaaaaagcaagatgtggaatgctaccattctacatagtatagtacgctaccttttctgtaaaaagtgggtgccatagtatttgtgtggattatatagataacatctatgatctgtatactgtctacgcaaggctactcaggaaacattcctcattagctgtttctggttggaaaatgggtaactgaaacagggatggaagggacacttttcaccctaacatgttggtgtaattttgaaccatatgaatatatgacctatacaaaattagaataaagaaagaaaaacaatctagtgggccaggcactgttctgagtgcttagtgtatataacccatttgatcctcaccgcagtcctcacccacacaggagctctcattactgccatttgacagatgaggaaaacaaagcatagcgagatcaagcaactcgcctgaggtcatacgcctcgaaagtggcagagctggaatcaacagcaggcagcctcactcctgcgccccgactcttaaaccctgcactgttgtgccttctacagagggctggagcaaataggtttggagaggggcaccatcttcatctttccaacctcagagattagtcagtgatgatttttaatgtggagaaatattgagaaggaaatattcttaaccagagcatgcttcagaaaagacttcctaggaagttaatataaaatagcatacagttaaggagaaaaaaatacataaccatctccaaagatatagaaaaggcattaaataaatattaatattcattcatttaaaaaaattttgtagagatgggggtctctctatgttgctcaggctggtcttgaactcctggcctcaaacaaccctcccacctcagcctcccaaagt

SEQ ID NO: 680250 - DNA, 786 bp, Homo sapiens
ccagcctgcatgaggataccataaagcggaagccgggcggctctttgaagggatgacgtgggaagggtatcctctcctttccagcattccttcatttggggagcactgcctccttgggacaagactctgtattggggaggcagcactgaatggggaagtccctggtctggtgggggacagccaccacctggcacgtgatggtggcragaatgcctaatgcttatgagtgccgcagtgtgcagctctgtgccttacacacgtcacctcccaccatctcccaaggaccgtgtggggtggatcatacagtcaggcactgcataacaagagtctgatcaaggacagagcacatgtacgatggtagtcccataaaactatcacggagccgaaacctccctatctttctgccgtcgtaatggtgcagtggcactcattacttacgtgtgtgtggtggtgtggtgctgttgtaaacaaacctactgggctgacagtcttatcaaagtctagcacagacagttctgtacagtactgtacagtacacaatacttgataataaatgactgttactgatttacgtatttactgtgctatacttttaactgttattttagagtatactcctacttattaaaacaaacgttaactgtaaaacagcctcaggcacgtccttcaggaggtagccataagaaggcattgtcatcttaggacatgcagctgtgtattattttccccgaagaccttccagtggcacaagatgtggaagacagtgatatggatgatcctgaccaa

SEQ ID NO: 680251 - DNA, 1218 bp, Homo sapiens
caaataataaaatgtaaatgctaagtacatagttgttatactgtattgtatagagaataatgataacaatttaaaaagtgtgtacatgttcagtacatacataatattttttcaagtatttttgatctgcagttgattgaatccatagatttaaaacccacagatacagacagtcgactgtatatagttaggtaaaatgagaattatatatggtgtagataaatagaaaggggggaagataaaagaaagggagagaaagagggagaaaaacagaagtgtatttgggaatgtgaatacatgctaaacatattttgatttaaatcaagagtaacatggacaaatttgtagatacaagacaacttcagcagacttaaaggataattggaggaaaatgagatagatctgtaaaattaaatgtatggattaagatctctttaggcttcataaaaatacactttactaaattaagttttattatcttttgaggaaaacttatattatatccctgtatgtccctaaatatagtcgaaaacagaaatagaattatccttgcaccagcagataaactgtacttaacaataaacaaatcactagtactccataataccttttacattttggttgccaatgcttgagcagactagcaaaatacattcttgtcctcacaaaacccttgtatacattctatacaccaggggttcccaacccctgggaagctgaccataagggtctgtggcctgttaggaacagggctgcacagcagaagataactggcaggtgagttagcataactgcctgagctccgcctcctgtcacaacagtggtggcattagattctcataggaccatgaaccctatggtgaactgtgcatgtaagggatctacrtcgcacaatccttatgagaatctaatgcctgatgatctgaggtggaagagtttcatcccgaaaacaacaaccctccatccatgaaaaaattgtcttccacaaaacctgtccctggtgccaaaaaggttggggactgctactatacactctcagaaaaaaattacttaattgcatgcatagtcttgaaaactatttaaagagtttttcaccatctaaaggtgtttttgatgatgccctccttaggcaaaacttcacctttgcactgaaacttcttaatagataggcccccagagactttacctactagagtctagtcctatccacttggcatt

SEQ ID NO: 680252 - DNA, 679 bp, Homo sapiens
cactctaagaacccactgggctcaggtaagctggtctgtcattgctccagcctggtctctgactctgtgaggtaccttccccaccttgctctctctggcctacctggccctcagcgccccaatccagttcaggcctcaactagatactctcctggctgccttcacctctgagctggggcaccacccttcctgcattgtttgcttggaattctgtaattctcagtttgggtatctcttccgtagaccaggttcacaaggacaaagtctgagtctttctcttttgctaaccagggtatcacactattgtaggttctccataaatsgtgcagaaggaaggaaaggagagagggagggatgaaaggaagaaaataaaggatgaaggaacattgggagagggagtcgaatgaaagccagaagagggaggaaagaagggggaagggagagaggagcgaggacaagggaggtatggcggggtggttaggaagtcatcttcgtcctataaatccataaactggttcacattccagctcacagacaaggaccaaacaccctctaacaacagcctctctctctgtctacaccgaaagaaatatctcctgaattcaggcctgccctctgtcctgtaaccaataatttggtctttcctggcgtaattcagtcattacatttgcacttgatc

SEQ ID NO: 680253 - DNA, 679 bp, Homo sapiens
cactctaagaacccactgggctcaggtaagctggtctgtcattgctccagcctggtctctgactctgtgaggtaccttccccaccttgctctctctggcctacctggccctcagcgccccaatccagttcaggcctcaactagatactctcctggctgccttcacctctgagctggggcaccacccttcctgcattgtttgcttggaattctgtaattctcagtttgggtatctcttccgtagaccaggttcacaaggacaaagtctgagtctttctcttttgctaaccagggtatcacactattgtaggttctccataaatcgtgcagaaggaaggaaaggagagagggagggatgaaaggaagaaaataaaggatgaaggaacattggragagggagtcgaatgaaagccagaagagggaggaaagaagggggaagggagagaggagcgaggacaagggaggtatggcggggtggttaggaagtcatcttcgtcctataaatccataaactggttcacattccagctcacagacaaggaccaaacaccctctaacaacagcctctctctctgtctacaccgaaagaaatatctcctgaattcaggcctgccctctgtcctgtaaccaataatttggtctttcctggcgtaattcagtcattacatttgcacttgatc

SEQ ID NO: 680254 - DNA, 679 bp, Homo sapiens
cactctaagaacccactgggctcaggtaagctggtctgtcattgctccagcctggtctctgactctgtgaggtaccttccccaccttgctctctctggcctacctggccctcagcgccccaatccagttcaggcctcaactagatactctcctggctgccttcacctctgagctggggcaccacccttcctgcattgtttgcttggaattctgtaattctcagtttgggtatctcttccgtagaccaggttcacaaggacaaagtctgagtctttctcttttgctaaccagggtatcacactattgtaggttctccataaatcgtgcagaaggaaggaaaggagagagggagggatgaaaggaagaaaataaaggatgaaggaacattgggagagggagtcgaatgaaagccagaagagggaggaaagaagggggaagggagagaggagcgaggacaagggaggtatggcggggtggttaggaagtcatcttcgtcctataaatccataaactggttcacattccagctcacagacaaggaccaaacaccctctaacaacagcctctctctctgtctacaccraaagaaatatctcctgaattcaggcctgccctctgtcctgtaaccaataatttggtctttcctggcgtaattcagtcattacatttgcacttgatc

SEQ ID NO: 680255 - DNA, 595 bp, Homo sapiens
cggcattatcactatgctaagagccagcaacagatactaaacagaagttataaatagcaaagcaagacccaaaaatgcaaagtagaaaatacagtattccaaactctcaaacgtccccagcaacagatccagagaaagagttactcagacaaaagctaccatttttttttttttttttttttttttgagatggagtctccctctgttacccaggctggagcgcagtggcgcgatctcggctcactgcaagctccacctcccgggttcatgccattctyctgcctcagcctcccgagtagctgggactacacccaccaccacgcccggctaatttttttgtatttttagtagagacggggtttcactgtgttcggcaggatggtctcgaactcctgaccttgtgatccgccggcctcggcctcccagagtgctgggattacaggcgtgagccactgctcccagcaaaagctaccatttttaagcccttactccatgccagaaactggatatgcactttgcatgcatcaactcaatcttgacaacactgactctgagatggatcctattattcttcccattttataaacaaggacac

SEQ ID NO: 680256 - DNA, 616 bp, Homo sapiens
actctggagaggaggaaggaggaataggttacgtgctatcgaagtaaagaggtcccagatcacatagggccttgaagatcagtgtgagactttggtctgcatgagacgaaaagtcgctggaggattgtaggcgagagtgtcaagacctgacttatattttgatgggacctctctgtgcagagttgaaaccagcctaaagtagcagaagcagggtgaccagagaagaagctattgcratacttaaatactaggcgagagggaattaccacttaaataaatgatgagcatgggcactggagtgagtatatgcctcagactgagcataagaagtaagataggaatctgtatttctcttggtctgcttaactcccacacacctctcaccgtgagagcatctaattgccacatgagtgatgcgagtggttagagacaagtgtttttcattcattctacgtgttcactaaaccataaacaagtcctagaagtgtcttcatcagccaggcccctcactctggtctggagactggtggagtactagggtctgaatgtttgtggtcctccaaaatatgtatgttgacatccaatccccagtgggttgctattaaaaggtaaggtc

SEQ ID NO: 680257 - DNA, 2673 bp, Homo sapiens
tcccctcacctcagtctccctcctgagcagctgggaccacaggcacgtgccaccatgcctggctaatttttgaaaaaattttttgtagaaatgaggtctcgctatgttgcctaggctgatcttgaactcctgggctcaagcgatcctcctgccttggcctcccaaagtgctgggattgccggcatgagccactgcacctgctttattgtgatttattctctacagtattttgttagagtttggctgggtgtggtggctaacacctctaatcccagcactttgggaggcgggaggatcacttgagcccaggaggtcaacgctacagtgagctatgattgtgccactgcactccagcctgggcaacagagcaagcccttgtctcaaagaaagaataaatcacactggattaaaaaaaaattttcaaacatgagtcaagaagcagcctgtgaaatatcaggctcagccccaactacatttcagggctaactaggcccagagacccactgttggtgctatttcgtcagctcttatccaggaccctgatccaggctctcctcaacattcgcaagagagtgtttgagaaagaatggttaaaagcaagtgttcagtcgcacacactcagagagatggcacagtttgtaatcctagctctgtgggtctcagagtatggcccctggccagactcagcagcctcaccttcccagacctcccgactcagaaactccagggcggggactcaggaatctgctttaaccacccctccagtgatcctcgtgcatggtcaagtttgagaagcattgtatatcctagctgaatctttctttaggatggatatcttccttgaggatggataatgccatctttctaggatgagtgatggagctgcagaggcatttcagaaggtcggtcactaggtttcaagggcttaaggtgacacagaaactgcagtgttgtagaagcaaaccaaggacaacagtgcacccagctaggttagatcaaagtggcgggtagcgaaggggagtggcagcctccctttcacagaaggtttgctatcacaccccacccgcagacaaagccccctgggtatcacactgaggggccatgcacggaaggtgggcaccatgcaatgaggcaatccacaccagcctcaaaggtgctactctctgctagtcaaagtctacctagaagacacttccagacaaaggccagcctcagtaaccaagacgtgcctgcaatgattaactgaacagttttttaaaacctggaaggtgtttgtgtgctcagatcacatcctacgtggttgggcaaaagctggcaaagtgtgacacatagctgacactggaaaacgggaatccaggtgaaaaacagttttctaggtgcaggtaggagaaagggggcaaacaaaatctgacagatacacgagagagaactccagggtgttggccaggcgcagtggctcacgcctgtaatcccagcactttgggaggctgaggcgggcaaatcatgaggtcaggaatttgagaccagcctggcctacatggtgaaactctgtctctactaaaaatacaaaaaaattagctggacatggtggcgggcgcctgtaatcccagctacttcagaggctgaggcaggagtatcgcttgaacctgggaggtggaggttgcagtgaactgagatcatgccaccacactccagcccgggcaacagagtgagactctgtctcaaaagaaaaaaaaaaaagaactccagggcataaactgcatgggagtcccctaccctctgccccttgggcccaggtctctcaattccatacactcagagttggatctcttaaacaaacaggcaattgcccagatggcccgaccaggcctccactcattggtttctttctggtcctctgactgttgtgcctcgcctgtctttctcccagacgttgttggaattcccacctccacatgcccacccctagatccagcttcctggctggtgcctgggagcgtggcttctgcccgcccactggcctggcctcagaggtctgccctaccctgacgctagcaactgctcagactaggcagcccgtggatggaactgcctgatgctgtcctcccatgcaaagagaatggagccctggaagaaggctctctggagtcaccccaacaaaacaccatgtgagccttgcacttccttgcagtgtggcagggcacatctcacatgggtgcttgcagggatgtggaggtgggaatgtgagagggtggggaggggtgtggagtggccaggatccaggggagaatgccccacggagacagagacccttggcttggtatgaagggagcacaagaaggagtaaatccaggacacggctagactgtggcacccctktgggagtgcccgcacttagggacacatgaccttgggggaattctggacagcttagaggcttactccatgacagaagatacttcccttctggagacctcaacttctctctgtgttagttggctgaggctgccatcacacaatatcacaatcttggtgactcaaaaaacagaaacttatttcctcacagttccctgggctggaagtccaagatcaaagtgttgacaagcttggtttcttctgaggcctcagtgtgccaacaaggacccttgctgtctcttcccactccgaatttcc

SEQ ID NO: 680258 - DNA, 2673 bp, Homo sapiens
tcccctcacctcagtctccctcctgagcagctgggaccacaggcacgtgccaccatgcctggctaatttttgaaaaaattttttgtagaaatgaggtctcgctatgttgcctaggctgatcttgaactcctgggctcaagcgatcctcctgccttggcctcccaaagtgctgggattgccggcatgagccactgcacctgctttattgtgatttattctctacagtattttgttagagtttggctgggtgtggtggctaacacctctaatcccagcactttgggaggcgggaggatcacttgagcccaggaggtcaacgctacagtgagctatgattgtgccactgcactccagcctgggcaacagagcaagcccttgtctcaaagaaagaataaatcacactggattaaaaaaaaattttcaaacatgagtcaagaagcagcctgtgaaatatcaggctcagccccaactacatttcagggctaactaggcccagagacccactgttggtgctatttcgtcagctcttatccaggaccctgatccaggctctcctcaacattcgcaagagagtgtttgagaaagaatggttaaaagcaagtgttcagtcgcacacactcagagagatggcacagtttgtaatcctagctctgtgggtctcagagtatggcccctggccagactcagcagcctcaccttcccagacctcccgactcagaaactccagggcggggactcaggaatctgctttaaccacccctccagtgatcctcgtgcatggtcaagtttgagaagcattgtatatcctagctgaatctttctttaggatggatatcttccttgaggatggataatgccatctttctaggatgagtgatggagctgcagaggcatttcagaaggtcggtcactaggtttcaagggcttaaggtgacacagaaactgcagtgttgtagaagcaaaccaaggacaacagtgcacccagctaggttagatcaaagtggcgggtagcgaaggggagtggcagcctccctttcacagaaggtttgctatcacaccccacccgcagacaaagccccctgggtatcacactgaggggccatgcacggaaggtgggcaccatgcaatgaggcaatccacaccagcctcaaaggtgctactctctgctagtcaaagtctacctagaagacacttccagacaaaggccagcctcagtaaccaagacgtgcctgcaatgattaactgaacagttttttaaaacctggaaggtgtttgtgtgctcagatcacatcctacgtggttgggcaaaagctggcaaagtgtgacacatagctgacactggaaaacgggaatccaggtgaaaaacagttttctaggtgcaggtaggagaaagggggcaaacaaaatctgacagatacacgagagagaactccagggtgttggccaggcgcagtggctcacgcctgtaatcccagcactttgggaggctgaggcgggcaaatcatgaggtcaggaatttgagaccagcctggcctacatggtgaaactctgtctctactaaaaatacaaaaaaattagctggacatggtggcgggcgcctgtaatcccagctacttcagaggctgaggcaggagtatcgcttgaacctgggaggtggaggttgcagtgaactgagatcatgccaccacactccagcccgggcaacagagtgagactctgtctcaaaagaaaaaaaaaaaagaactccagggcataaactgcatgggagtcccctaccctctgccccttgggcccaggtctctcaattccatacactcagagttggatctcttaaacaaacaggcaattgcccagatggcccgaccaggcctccactcattggtttctttctggtcctctgactgttgtgcctcgcctgtctttctcccagacgttgttggaattcccacctccacatgcccacccctagatccagcttcctggctggtgcctgggagcgtggcttctgcccgcccactggcctggcctcagaggtctgccctaccctgacgctagcaactgctcagactaggcagcccgtggatggaactgcctgatgctgtcctcccatgcaaagagaatggagccctggaagaaggctctctggagtcaccccaacaaaacaccatgtgagccttgcacttccttgcagtgtggcagggcacatctcacatgggtgcttgcagggatgtggaggtgggaatgtgagagggtggggaggggtgtggagtggccaggatccaggggagaatgccccacggagacagagacccttggcttggtatgaagggagcacaagaaggagtaaatccaggacacggctagactgtggcacccctgtgggagtgcccgcacttagggacacatgaccttgggggaattctggacagcttagaggcttactccatgacagaagatacttcccttctggagacctcaacttctctctgtgttagttggctgaggctgccatcacacaatatcacaatcttggtgactcaaaaaacagaaacttatttcctcacagttccstgggctggaagtccaagatcaaagtgttgacaagcttggtttcttctgaggcctcagtgtgccaacaaggacccttgctgtctcttcccactccgaatttcc

SEQ ID NO: 680259 - DNA, 656 bp, Homo sapiens
ttaatcttgctcttcaatcatcaagttaaatttacagaaaggcagatttcacttcactgtaaaagaagattctttgaatagttagaattgaccaaaactagagtcgtctgcctcccgatgcagtgactcccaatgctgtaaatggaaagtgatcaaatgcaggctgacgtgtcctcagagatgtcaggaggcattcctcagtgggtgggaggttgacccacatgccccttaaggcatctctggaccatgaaatcrcaatgcacttttgactttcattcttctcaggctccatcttgctaaacaccctttgcacaatgggagtctttatctcactaacaccttaatttcaaagagttaatgcatatcattttttttcctttccacttaattttccttcataacctatccctattatgcaccagcatatctggaaactcgtttatcctctttgcacccctatgcagcctctctgatgctgttccccttggctcatcactaccaatccaagcagagtctttctctcagatgaagacgatgaaagagctgaaaaaacacagctggatgtttcacatcctggttggattgacaggggtgccagcagctgggagtcaccctttcacgtcaacggagtcaattagattgggaagccaatgagg

SEQ ID NO: 680260 - DNA, 656 bp, Homo sapiens
ttaatcttgctcttcaatcatcaagttaaatttacagaaaggcagatttcacttcactgtaaaagaagattctttgaatagttagaattgaccaaaactagagtcgtctgcctcccgatgcagtgactcccaatgctgtaaatggaaagtgatcaaatgcaggctgacgtgtcctcagagatgtcaggaggcattcctcagtgggtgggaggttgacccacatgccccttaaggcatctctggaccatgaaatcacaatgcacttttgactttcattcttytcaggctccatcttgctaaacaccctttgcacaatgggagtctttatctcactaacaccttaatttcaaagagttaatgcatatcattttttttcctttccacttaattttccttcataacctatccctattatgcaccagcatatctggaaactcgtttatcctctttgcacccctatgcagcctctctgatgctgttccccttggctcatcactaccaatccaagcagagtctttctctcagatgaagacgatgaaagagctgaaaaaacacagctggatgtttcacatcctggttggattgacaggggtgccagcagctgggagtcaccctttcacgtcaacggagtcaattagattgggaagccaatgagg

SEQ ID NO: 680261 - DNA, 656 bp, Homo sapiens
ttaatcttgctcttcaatcatcaagttaaatttacagaaaggcagatttcacttcactgtaaaagaagattctttgaatagttagaattgaccaaaactagagtcgtctgcctcccgatgcagtgactcccaatgctgtaaatggaaagtgatcaaatgcaggctgacgtgtcctcagagatgtcaggaggcattcctcagtgggtgggaggttgacccacatgccccttaaggcatctctggaccatgaaatcacaatgcacttttgactttcattcttctcaggctccatcttgctaaacaccctttgcacaatgggagtctttatctcactaacaccttaatttcaaagagttaatgcatatcattttttttcctttccacttaattttccttcataacctatccctattatgcaccagcatatctggaaactcgtttatcctctttgcacccmtatgcagcctctctgatgctgttccccttggctcatcactaccaatccaagcagagtctttctctcagatgaagacgatgaaagagctgaaaaaacacagctggatgtttcacatcctggttggattgacaggggtgccagcagctgggagtcaccctttcacgtcaacggagtcaattagattgggaagccaatgagg

SEQ ID NO: 680262 - DNA, 656 bp, Homo sapiens
ttaatcttgctcttcaatcatcaagttaaatttacagaaaggcagatttcacttcactgtaaaagaagattctttgaatagttagaattgaccaaaactagagtcgtctgcctcccgatgcagtgactcccaatgctgtaaatggaaagtgatcaaatgcaggctgacgtgtcctcagagatgtcaggaggcattcctcagtgggtgggaggttgacccacatgccccttaaggcatctctggaccatgaaatcacaatgcacttttgactttcattcttctcaggctccatcttgctaaacaccctttgcacaatgggagtctttatctcactaacaccttaatttcaaagagttaatgcatatcattttttttcctttccacttaattttccttcataacctatccctattatgcaccagcatatctggaaactcgtttatcctctttgcacccctatgcagcctctctgatgctgttccccttggctcatcastaccaatccaagcagagtctttctctcagatgaagacgatgaaagagctgaaaaaacacagctggatgtttcacatcctggttggattgacaggggtgccagcagctgggagtcaccctttcacgtcaacggagtcaattagattgggaagccaatgagg

SEQ ID NO: 680263 - DNA, 595 bp, Homo sapiens
tttactaggggaaaaatgtctatggaaactaaaaaaactacagtgactattagtacctcaataaagaagactattggaattttccctgctttttaagtgaaattgacctgggagtrtttaaatttgccttaaatcatatggttgtttttattataatttttccttatgtacacaagtagtgggtaattattgtgaaaaaacttcagactttacaggagttcataaattagaaaataaaagtctttataacatcagtgataactattagcaatttgatatatggtatatatttttttccctctgcatataccgttacctatgtgtgagcacatgttgttctgtaacttttttaacttaacagtgtagtcaactgataattcaataatggaagtaaaggtaaaaataaactaagcctacagagatttttacatctttgctatttaatatgtgatgaacctccatattcaggaattttatttacaaacaccttatctattctttgtccttcctctttagagtggatgtaactgaaattcagatagctttagtgattgtctttgtgttgtctgcatttggaggagcaacaatgtgggac

SEQ ID NO: 680264 - DNA, 595 bp, Homo sapiens
tttactaggggaaaaatgtctatggaaactaaaaaaactacagtgactattagtacctcaataaagaagactattggaattttccctgctttttaagtgaaattgacctgggagtatttaaatttgccttaaatcatatggttgtttttattataatttttccttatgtacacaagtagtgggtaattattgtgaaaaaacttcagactttacaggagttcataaattagaaaataaaagtctttataacatcagtgataactattagcaatttgatatatggtatatatttttttccctctgcatataccgttacctatgtgtgagcacatgttgttctgtaacytttttaacttaacagtgtagtcaactgataattcaataatggaagtaaaggtaaaaataaactaagcctacagagatttttacatctttgctatttaatatgtgatgaacctccatattcaggaattttatttacaaacaccttatctattctttgtccttcctctttagagtggatgtaactgaaattcagatagctttagtgattgtctttgtgttgtctgcatttggaggagcaacaatgtgggac

SEQ ID NO: 680265 - DNA, 623 bp, Homo sapiens
cagtgagctgagattgcaccactgcactccagcctggggacagagtgagactccgtctcaaaaataaaaaaaaatttttaaaaaggctaaatttatctaaatttataaaatacaccccaattaaaaggacacatttcaatgaattattgttagaactcattatagaaaatatgtaaaagtactctattagaaagaatccaaaaaggataaaaatagttaaagaagaaaactatttttaatataatcaattttatatatatatatatatatwtttttttttttttaaagacacgggggtctcactatgttgaccaagctggtcttgaactcctggcctcaagcaatcctcctgccttggccttccaaagtgctggaattacaggtgtgagcccctgtgcctggccatcaatgatacttttaaatacattttttactaagagacaaagaccaaggacagaaaaaaatcttagtttaagtaaatttctagataaattaagatcactttatttttcaatgagaaataggtgaataagatcagttttaaatgcttttgtggagctctttattgggcatttttacccataagaactgcatttcataaaatgtttactacttcaaataat

SEQ ID NO: 680266 - DNA, 656 bp, Homo sapiens
ggttagggccttaacatgtggattttgagaggaaacacagttcagttcatagtagttgggaaatgtasccttttagctgggtgcattgctgccacacataaatgaggatcctgttagggaggatgaagaggagaatggatgttgggtgacagctgatagttactgccacagcggctgttgtctgagtttcccaggttggtaatgagaaccttggggttggaaccttatgtagtgttcattggaggcaggtaagggtgatctgtataaaataatgcacagaaaattatgaagggaaagatgagggatatttaggaattatttttattttggggggtacatggtgtatatatttatggagtatgtgagatgttttgatatgggcatgcaatgtgtaataatcacatcgtgggaaattgggtgtccatcttctcaagcacttttcctttgtgttacaaacaatccaattgtactaggaattatttttgataaaatatagtccccattctgaagaaagtgatatcccaaggaaaagtcagggaactttttttttctttaagagtataattgtaggcaaatatttatgaacaagtaagggcaactttacatctttattggtttgtatttttcaccaatcttctcattgggtgtgttttcta

SEQ ID NO: 680267 - DNA, 1074 bp, Homo sapiens
cttttgacaaccattataactaagtgtcaaaaataaactgaatttagaacccgactttaaaactcctgtatcacagagtattaaagatttgctcaaataatgaggtgtattatatttctggtgagaactttattcaataaataagatacatattttaaaatattatttttccatttttaccatagactttttaactttcaattttgaatatgttttataatgtacaacatgtaggcaaaataatacctgtatatattatttatgaataaatacatatacaaacagtggctacatagtctcaaaatacttttactagaaaagaatgattgatcaaaaaagtgtagatctccctgttctagatctgggagcttcttaaactgggctgcagatcagactcacatggagggcatgttaattccacattattttgacttctttcctgaatcagattatctgagaggtagagcctggaagtatgattttttaacaacttccaaagtgatgcttttggcactgatctgtgagtggcattcaaatccatgttcataaataattgtctattaattcaaacttcaggacacaaacagatgttagttgccaaaacttatgtgggcaagaaggataataatacagggagtaatacaattaactggcaatcaggaggcctttggaagaagttaaaacagaactaggtttctgggctggtttttatccaggaactcctaacataaatatccccartataataatatattacagccatctttatgcatctcaattctcccattagtaaaatgagagataaaaatgccacctaatgcttaggactgttaagagaattaaatgagacaatatatgtaaaatacctagaacagtgccttggcacacagcaaaatctagctgttattgagatatcgtaatttgtatgtatcacgtgttttaggataggtgattcctagaaagaatagtaataaaaaattatttgtactgagcataaattattaccagggcatggtggtgcacacctgtggaccctgctacttgggaggctgaggtgggagggtcacttaagcc

SEQ ID NO: 680268 - DNA, 1074 bp, Homo sapiens
cttttgacaaccattataactaagtgtcaaaaataaactgaatttagaacccgactttaaaactcctgtatcacagagtattaaagatttgctcaaataatgaggtgtattatatttctggtgagaactttattcaataaataagatacatattttaaaatattatttttccatttttaccatagactttttaactttcaattttgaatatgttttataatgtacaacatgtaggcaaaataatacctgtatatattatttatgaataaatacatatacaaacagtggctacatagtctcaaaatacttttactagaaaagaatgattgatcaaaaaagtgtagatctccctgttctagatctgggagcttcttaaactgggctgcagatcagactcacatggagggcatgttaattccacattattttgacttctttcctgaatcagattatctgagaggtagagcctggaagtatgattttttaacaacttccaaagtgatgcttttggcactgatctgtgagtggcattcaaatccatgttcataaataattgtctattaattcaaacttcaggacacaaacagatgttagttgccaaaacttatgtgggcaagaaggataataatacagggagtaatacaattaactggcaatcaggaggcctttggaagaagttaaaacagaactaggtttctgggctggtttttatccaggaactcctaacataaatatccccaatataataatatattacagccatctttatgcatctcaattctcccattagtaaaatgagagataaaaatgccacctaatgcttaggactgttaagagaattaaatgagacaatatatgtaaaatacctagaacagtgccttggcacacagcaaaatctagctgttattgagatatcgtaatttgtatgtatcacgtgttttaggataggtgattcctagaaagaatrgtaataaaaaattatttgtactgagcataaattattaccagggcatggtggtgcacacctgtggaccctgctacttgggaggctgaggtgggagggtcacttaagcc

SEQ ID NO: 680269 - DNA, 897 bp, Homo sapiens
ccatacattcctcttagaaatcatcttaatttgttattttcatctactctagtgggaagataaaatcactacatggcagagccaggagtttcaggcccatttggggatttcctcaaggatatcttataaatgtaaatttgctggttattcatatgtattgcttaattgccttcccgtctccccagtgattatgccagctaccaccattattactaaaaaggttaactttttttaagcaattcatttttctgaactgtgtattagtttgctaagggatgtcatagcaaaagaaccaataaacaacataaatgtattttctcacagttatggaggctggaagtccaaggtgtaggcagagttggtgtcttttgaggacacactctgtggcttgtagatgatcatcttctcctagctctgtgtgtctgcatcctaatctctttataaagacaccagtcctattggattagggcccactcgtatgacctcattttactttaaagrccctatttccaaatatagtcccattctgagatgctgggggttaggactccaacatgtaaatttggtgagggagcagaatacaatttagtccataagaaatcataaaacacaaatatgtaagagaaatgtgagcataagaaaaagttaaaaagctcatacatagcttcctcagttggaacaaatcaaagtgctttcttgtttttgccatatgcacatctaattattggctcttactagtttacaataccaacagcaatgcaagtatatgtcagttttatcacaaactcagaattaggtattcttaaaaataagattagttatatttttattgtatttctcttttaattcagtttcccaatttcccttaatgaatttgctaggttgaaggttttccta

SEQ ID NO: 680270 - DNA, 585 bp, Homo sapiens
tgcacacccattgcacaactgaatgagacaactggctgtccagcggggtgcrctgttagatttagaggtgatatctgacattaagaggaccatgacagctccccatatgtaaccagggcatttcgaaccttgggcttctggacaccagggctacacgccaagcagcatagatgctcagtggaattttgtggatggctttgactccctggccttgcctctaggccgggggagagggagtgaggtcatggggccagggaagcccttggactcagcactttgtggtaagtgcacaatggagctggccaggcggctgagcagcgcttttgttgtgtgggaataagcaggatgggtacaaagcaaagggcccagtcagcgttcagcctgcacccacctcccccatgaggggctgctgctgcaggatcttgtttttttgccctgtgcctttctacctcttcaaacaggcaggggagccagggcctggctgggcctgaaaaggcagcagggcaggcactgggggagaacttgcctccatttctttctgaaccctttctgaggtcatccattcctctgcttccaggcataaaa

SEQ ID NO: 680271 - DNA, 639 bp, Homo sapiens
tttgttgtttatctgaaactcagctttaattgggtatgtatcctgcgttttatctgccaaccctagtctcctcttgcttttgtctggagcatcccatgatccgcctctgccaatctgcttctcttttgtcctttggagaagacagtgtaaagagtcaccacctgcaggaaatcttccctggcttacccaggctgaccagccraccacagcatcctataacaaagaggagaaaggaagaaaaccaatatgtttttaagtctttttccaaatgttatctagtttagtgctcccaaataaccctgggagatatgcctaactagctccattttctaatgcagaaaacactcagagaacttatgttatcaacctgaggccacataagctaggaagtggcagagccacattacaaactcaattctctttgtttcaaaagtctgtattttttatcatgttgcttataggcatccctcttcctcttgactcgtgtgaacaacagagtagctaggaaagcaactttattctcatctcctcggcccctttatttatttctttttctggtggggctagtttctcttctttgccttagatgtaaatttgaatggtctcatggcttttcttgacacttgttggtaataaaaa

SEQ ID NO: 680272 - DNA, 599 bp, Homo sapiens
ttggccaggctgatctcaaaaactcctgacctcagacgatccgcctgcctcagcctcccaaagtgctgtaattacaggcgtgagccaccacacccggcccaggagagtatgtttaatgtgagttrgaaatgcctgtggccatcctagtggactgcgtcctccaggaccagtaagaggcttaaagtatcctgaggaacattaatgtctacagagtggagagaagaacagcacattgactcaaacggagcagccagggagataagagtcaagacaacttggcttcctgaaagttaaggaggaagaaggaaggttctcagtaggatctccaggattctgtttaggagggagttagagaaggcaatcagttacagggaaggctggggtctggtctttaccctgagtttgtatagtaagcatgctacgtactgctgcgtagtaagcaggctacgtactgtgtcagctgggtgcagtggctcacgaccgtaatcccagcactttgggaggctgaggtgggaggatcgcttgaggccaggagttcgagaccagcctgggtgagataagaagactccctcaagcctctacaaaatatatatattata

SEQ ID NO: 680273 - DNA, 565 bp, Homo sapiens
acacctgaccaagaatagctaccatttaatgagcacttaatatatgctggcaatgtcccaagcattttgttatatgaagctcatcatcccaactccatgttatggaaatccttagccccatttaatagtttagcaaactgaggctcagaggtgaattgaaatacccaggggcctcaaacctagtggtgacagagctagaaacagaatcaaatcactctagctccaaagcatggtttgcttccaaagacacactcccttacacacagggtgttggagcatgaataggaatggagcgtgaataggaattgagggagcagagggtattccaggtagagagaagcatctytgcagagacctgaatagtgaacgttccctggcatgctctgggaataatcatgaatgcagtatgactggagcagggctacctggaggaagaggccagtgtgggaaatgtcttgagtgccaggctgaagcgcttggacactgtctcacaggcatgggtagccagtagaagtctgtgagcagaacagtggtgactgggtcagctgacttccggggagctgac

SEQ ID NO: 680274 - DNA, 2607 bp, Homo sapiens
tttttttactcttttttcagtgactatcagagcagtggttcttaaagtgtggtccctcaaccagcagcagcatcaacattacctgggaacttgttagaaatgcaaattcccaggccccaccccagaatcataaaccgttagggtaaaatccagcaatccaggtttaacaggtcctccctgtgatgttgatgcatgctgaagtctgagaactcctgccctgagacaactttcgcttctggcgggcagctgggctgtgtgcagatggccttcatccgacaaggggtggagctgattcaaagcctggtttcagtgctgtgagggctggtttgtttctgagttgctcctacttccagcatgtagccctaaagaggtcccagctgaaaaccagggtatttattgggggccctcctccttaacaggtcctgacctccaatttttcacccccagccctgaggtttctggaagagcagcctctaagctgccccttaggaatcaggaaaggtctcaaagggaaacgcagtgtcaagtgtcaggctggcctccctgtgtttctctttcctctgggatcttggcattctgaccctccagttcttactcccttggtgattccttgaagccttcatattacccacccaccacacaccacttttctagctgttattggcggtttggcgtgacatgacttagtctgccccagctgaaaaaggaggccctctatcctgttgttattctattaccaggaatctagagtcaacacgagcatttagaacagttcccggcacatggtcaaaaactcagtaagtgtaagttattcttcttctcccaataaaatcctagagtcatattgagctgagttgttaaaaatcaactcctcctaaatctctcatacatttgacagataaatgaaccaatgtcacactgtatgattggactccaatgcaattggactcagcaggagactgtaatttgactccagcggattcctgaatggtttcctgcccctggtctggaaggtggcagtgtgctctccatccccaaatcagggaatgggaaaccttcgggcccagctaagttctcagctcagaaaaagacaacctgggtgctgcggcctcagagccaccttctctccctctcccattgtgggacccagacccacagccccagctgcacaatttggagcaatctcagcttcagaattccagacctctcatatagttcctctggagcagagtacacacaggcatgcctacacacacacgtgtgcgtgcatgcatacacaaacaaacacacacgagtgtgggcacactcacccgtaggtcctcaggtaaccacacagggtctggaaggcacacaccatccagggaagactaaaccacaacggtggtgatgataattgctctgctctgagtgccggtcccttactccagtgaacagggagaggcagacccaaggaatgggctgaaaggccaggccaagccaagggcaggaaggctgtgtctggggacctgccaccctctccttctggtcaggaatctgtgctgggtctccaggatcacgtccgcgaactccccatgtggccctagtaggatatggggtgagtatgagctgtgtagagaaccatgacccttggctggactgtgagcagatgcagctgctgctaactcagattgctttatggaagaagaggtgtgtgtgggtgtgagtgtgtgtctgtgtgtgtgtgtgtgtgtgagtgtatatgtgagggggcaggctttaatgctgtgctcagccgccaaacctagaaagaacccctcagcctaaggaggttttaaactgattttagataatttggctcagaagaaatctatgcacttaatttttttctggtttaaaagtagtacatgctcattgtaaaaaaaaaaaatgtggaaaacagaaaaamcagtataaaaaagaaaatgaaaagcacctgtgctcccacccctggagataatcactcttgacattttggcggagttgagattacatgcatttaccattttcttttcttctttctcaccgaatctgcaatgagtattttctcacgtcattactctttgtaaacctgtttgaaggcctcgtacaactgtattgtgcacagtaatttatttaacttgttcccaattgctggacgtttaggtggcttccagtttttcatattgtgtaaagccaggaccatgtgtctttgtgcatgaagtgctgagaagccctgcttaaaggcaccatcagagcccaagggaggaggaaagctggtaaaggctgagtgtggctgggattgcggaggctcagctgggtgtactttgaccaagaaagtctgacaggagcagtgatgggggaatagggggaagaactgggattcagctgcccctgcctgctttgaacaattgtccttcaaatgcccctatggtcttcaggtatctttccatccctcctggagagatcagacaggagggcagtcctcctggtgagacagagcgtagggcaggggtgagtcagatgcagtaatctgctctgtgggccctggggctgcccactcccaccccaaggcccctgcatgcctcagcccacatggatggtgacagcaca

SEQ ID NO: 680275 - DNA, 658 bp, Homo sapiens
tttgatctatttaagctatgttttttttctgtttaaaaaatatatagaaatctctactgtaggtcatagaattattttccaatattttcttgtaatgactttcaggtttatctctcatgtttatatctttaatccacctagaatttatttgcttatttatttgtttgtttatttttgscttggggtgagctgctgctctagctctgtacagcctgttccccaagaattcttgctgtgggtcagaaataatcctcttctgtaagtcactgttggttggaatttctattacttgtagcctaacaccttccaattgctacacttattctctctccccactccttttagaattctccttttatgcatcttggagctcatagttctttttttccatttttattttctatttgtgtgtgtatgcatatatgctgtgtaatgtatatggtttttacaaaattcaaattgcatagctaaggtcaaaacagcttgtatgtgtgtatatatgtatatatatatgtgccttattttgggagattgcccagctgtgtacttcagttcaccaattctctctttggctagctctagttgtctgtttaaattctccattgtatatttttctcaaatcactgtatttttttttttacttctataatttccagta

SEQ ID NO: 680276 - DNA, 615 bp, Homo sapiens
aaaatctcagggccaaagttttacatttatatctaggctcattgtttttgcaccttgtaggcagtcaggttaagaattctgatctcatagtctcaggcagggccaattgagaggttgaggggttctatttcttaaaggctatgggtttgagtcagtgataaagttcttctaattccatttcaaggacagraaagacatttactggtgcctggcttctgctaaggggttcagtttctgctcctgtgccaaatgtggagccttggcttcaactccatcccccatggaggctttaaaacctctacccacacaggtatatatctggtttagttacttccatggctaaacagtttcaacttctactcattgcaatgtttctggtacctgcaggttctcattcttgcttttgggcttagctatgcatttcgaattttgtaaaaaccatgtacattatgcagtattcctatgtggtttgaaagggaggagggcttcatgcattcatgcagtctgccatcttgacctggaatctcgtccatttctttatcagtagtttccaagttgcacatgggtttgtgccctaaatattccttagtatgttaccaattttgaagttagcat

SEQ ID NO: 680277 - DNA, 615 bp, Homo sapiens
aaaatctcagggccaaagttttacatttatatctaggctcattgtttttgcaccttgtaggcagtcaggttaagaattctgatctcatagtctcaggcagggccaattgagaggttgaggggttctatttcttaaaggctatgggtttgagtcagtgataaagttcttctaattccatttcaaggacagaaaagacatttactggtgcctggcttctgctaaggggttcagtttctgctcctgtgccaaatgtggagccttggcttcaactccatcccccatggaggctttaaaacctctacccacacaggtatatatctggtttagttacttccatggctaaacagtttcaacttctactcattgcaatgtttctggtacctgcaggttctcattcttgcttttgggcttagctatgcatttcgaattttgtaaaaaccatgtacattatgcagtattcctatgtggtttgaaagggaggagggcttcatgcattcrtgcagtctgccatcttgacctggaatctcgtccatttctttatcagtagtttccaagttgcacatgggtttgtgccctaaatattccttagtatgttaccaattttgaagttagcat

SEQ ID NO: 680278 - DNA, 595 bp, Homo sapiens
ttttttttktctgagagagcttactgcactctctgcacatatttaggcctgctttgttcaaagcctggtgaatatgaaggattttcaaccagtcttgtgttctcaggacacatgtaggcctctagtcacccttggggcagggctatactccaggaaattcttgctaagaaaggtaagaccataaaccaataaatatcttctctgctcatatcagaacatttctgaaaaccaatttattgaagcaatagtttcccccttggggcaaaacagctctgatatggtttggctttgtgtccccacccaaatctcatctcgaattgtaatccccgggtgttgagggagagaacttgtaggaggtgattggatcatgggggaagtttcccccatgctgttcttgtgatagtgagggaattttcatgagatctgatggttttataagtgtttgacatttcctcctgtacatgctgtctcttctctctcctgctgccttgtgaagaggtgcctgcttccccttccaccataattgtaagtttcctgaggcttcaccagccatgtagaaatgtgagtcaattaaatctctttcctttataaacta

SEQ ID NO: 680279 - DNA, 595 bp, Homo sapiens
ttttttttttctgagagagcttactgcactctctgcacatatttaggcctgctttgttcaaagcctggtgaatatgaaggattttcaaccagtcttgtgttctcaggacacatgtaggcctctagtcacccttggggcagggctatactccaggaaattcttgctaagaaaggtaagaccataaaccaataaatatcttctctgctcatatcagaacatttctgaaaaccaatttattgaagcaatagtttcccccttggggcaaaacagctctgatatggtttggytttgtgtccccacccaaatctcatctcgaattgtaatccccgggtgttgagggagagaacttgtaggaggtgattggatcatgggggaagtttcccccatgctgttcttgtgatagtgagggaattttcatgagatctgatggttttataagtgtttgacatttcctcctgtacatgctgtctcttctctctcctgctgccttgtgaagaggtgcctgcttccccttccaccataattgtaagtttcctgaggcttcaccagccatgtagaaatgtgagtcaattaaatctctttcctttataaacta

SEQ ID NO: 680280 - DNA, 595 bp, Homo sapiens
ttttttttttctgagagagcttactgcactctctgcacatatttaggcctgctttgttcaaagcctggtgaatatgaaggattttcaaccagtcttgtgttctcaggacacatgtaggcctctagtcacccttggggcagggctatactccaggaaattcttgctaagaaaggtaagaccataaaccaataaatatcttctctgctcatatcagaacatttctgaaaaccaatttattgaagcaatagtttcccccttggggcaaaacagctctgatatggtttggctttgtgtccccacccaaatctcatctcgaattgtaatccccgggtgttgagggagagaacttgtaggaggtgattggatcatgggggmagtttcccccatgctgttcttgtgatagtgagggaattttcatgagatctgatggttttataagtgtttgacatttcctcctgtacatgctgtctcttctctctcctgctgccttgtgaagaggtgcctgcttccccttccaccataattgtaagtttcctgaggcttcaccagccatgtagaaatgtgagtcaattaaatctctttcctttataaacta

SEQ ID NO: 680281 - DNA, 776 bp, Homo sapiens
attgtttgaactaattatctaccctttcttcttttcttatatgttaattttaattttaattttaatttttatttttgagttgaagtcttgttctgtggccaaggctgcaatgcagtggcacaatctcagctcactgcaaactctgcctcctatgttcaagtgattctcctgcctcagcctggattcttgaacacaggcaatcatctctaaagcctatgctcgagtagctggsattacaggcatccaccaccacacccagctaatttttgtatttttagtacagatggggtttctccatattgaccaggctggtctcaaactcctgacctcaagtgatccacccacctcagcctcccaaagtctgggattacagatgggagccaccacgctgggcctccttttcttttcaagtcactgcaatctggtttgcaccctgacacccaggagaaactgcactagccaacagcacgaatggctggcttcatgctaaatccaatgggtccttctcagtctttcttcatggaactttcagaagcatttgacactgtgaactactccatcctacctggaacagcctgttcctgtgtttcctgttgatggctgtagttacatagcatgtgaagagcatagactttagagtcgactgcctgtgttcaaatcctggttccagcacttacttactagctgtgtgccattggacaagttccataaactctctgtgcctctgactcttagaactattatgaggattaaattggttaacacatgtaaaacac

SEQ ID NO: 680282 - DNA, 776 bp, Homo sapiens
attgtttgaactaattatctaccctttcttcttttcttatatgttaattttaattttaattttaatttttatttttgagttgaagtcttgttctgtggccaaggctgcaatgcagtggcacaatctcagctcactgcaaactctgcctcctatgttcaagtgattctcctgcctcagcctggattcttgaacacaggcaatcatctctaaagcctatgctcgagtagctggcattacaggcatccaccaccacacccagctaatttttgtatttttagtacagatggggtttctccatattgaccaggctggtctcaaactcctgacctcaagtgatccacccacctcagcctcccaaagtctgggattacagatgggagccaccacgctgggcctccttttcttttcaagtcactgcaatctggtttgcascctgacacccaggagaaactgcactagccaacagcacgaatggctggcttcatgctaaatccaatgggtccttctcagtctttcttcatggaactttcagaagcatttgacactgtgaactactccatcctacctggaacagcctgttcctgtgtttcctgttgatggctgtagttacatagcatgtgaagagcatagactttagagtcgactgcctgtgttcaaatcctggttccagcacttacttactagctgtgtgccattggacaagttccataaactctctgtgcctctgactcttagaactattatgaggattaaattggttaacacatgtaaaacac

SEQ ID NO: 680283 - DNA, 593 bp, Homo sapiens
tgtttcccagatcacaccacgggcatggaccgcagagattgcatcttgtgagtctgtagaaacagtcaaggccttgtcctctcttaggtccagagctcaggtgaatgcagattttcccggccatctgtgctgaagtccctgtggggaggctcctggctggtttcctgtaggtagacagctacacatcctgcccttcattggcttcttttcatgaagctcctgctgtctacaaaacatgtctcccttttcttcttgaaccacatctctgttattgaaactctagaagtcagccaggcacagtggctatgcctgtaatcccagcactttgggaggccaaggtgggtggatcacctgaggtcaggagttcaagaccagcctggccmacatggcgaaaccctgtctctaatacaaatactaaaattagccaagcatggtggccactgcactccagcctgggtgacagagcaagactctgtctcaaataaagaaagagaaagtatcatgcttttcagagttctgtgggttgttatggtgaattatcaaacctgaggacgtggtgggaacctccaaatttgcagccagttggtgagaag

SEQ ID NO: 680284 - DNA, 613 bp, Homo sapiens
aaccatcgtgttcaactgtgaaactcacactttggtgaccctgactccaaaacttaatacacccaaggtcagccccagtgatctgcttcatagccaggactttgggtgggtcttcccagggagtagggcaccctcagagaatgtggctttggacttcatcacagctggggccttttgtgtcacttcagatctaaacttgtaaccgtgctagatctgtttctaacgtgacarcatcacgaaccacgagtccagaagcctaatccataatcctccctcctcatgacgaagtctcatgctctgtgctcaacatggttagctgcacaagatgtaaaccaaagcttcactgaaccctcgacccaaatcggtaactcaagtgcatcaatcataatgaacctccccgaactcagtatttatgattatttttgaggcagggtctcactctgtcgcccgggctggagtgcagtggcaggatcagggctccctgcagccccgacctcccaggctccagcgatcctcccgcctcagcctcctgagtagttgggagtagagatgcctcccacatcgcctggctaatttttgtatttttgtggagaggggatctcgccacgttgcc

SEQ ID NO: 680285 - DNA, 627 bp, Homo sapiens
aaagggattttcaaataccagcctttcagcatgaggatcacatggaggaacattaagacacagatgctgggacccagccctattgattgtaattaaaaaactgaggtgaggcctgatttagctccatcattggaatccattcagatttgaaattctctgagttggacagtgcaagagagatcctaaagaaagcaaagtcactgtggactgaaatgagctggcaaggttttctgagcgtggtgaaatatgatctgggcctcgcttgggagggctgtggccaggccttgagtccgtggctcagtgggaccttctgaaacagcctccaatccgtgcccccacttcatttgctartggatgaccccctccagcggctttggtgctgatgggaataagtcaacctgcagcggaagttcagcccaagtttcagcccagcagcttctacacacctgtccgtggtctggtcatgctgccatctctgcggttctctgcggttctctgcggagtcgtggtttctgtaccttgaagagaacttcccctctgggacccagaaacccagtgaatcctcaggaaaaaagggaatgaaattactgaagacaactctgtggcggggagatggaaaagaggctc

SEQ ID NO: 680286 - DNA, 590 bp, Homo sapiens
tgaaatgagtcctctcctttccacttccaccgccacatgtcaaacccccaatatttcttgcctggatttcctcaacaaacttgttattttattttttcttatccacatcccctgcaactcttcagactctccactggcagagaaatttcccaaaatataatggtactgagaacatattcatgctcaaaaaggttaaatatactcgaatccctagcaaatgaagtacaaacatggcataaatcccttcataaaatgactcccaattatctgactatccttgttttatagtaatcatataatttttcgcccacactggaaaatactttttcagtggaaaaggtgtgttattaacaaggaaaaaaggaatatgtggcctcccagttctccttgtggctatcytaaacttaaaacaggtttttggtcacaggttttacaaacaatgcccaactttcccttctctgaaagtgtaaacccactatttctattgtctaggaggctgtttgcatctgttcctttccctcttttaggcctttttaaattcccacttccttcatggacagtttcttcatccgttcaccatccctggtccc

SEQ ID NO: 680287 - DNA, 671 bp, Homo sapiens
tgatgagtgtcattagtttccatttacctcctcattgctgaccaatgtgacatctggagagagatttattggtcaaaacagttttaaaactaaaaaaaataaaatacaaaaaaataakaagaagccccgtagaaagatgctttagagttaatcacaaatataaatgccagaatccctgaaacactgggctaggatataaacatatataaaagatgatccatgtctttctaccatacttagggaaattcaaatcacactgcatcaattttgaaaggaaatggcaaaatgagttaatctctgactttcctcatgtgttcatggagataactatattaatgtgttttgcccctgtttaggcttgaaatatcctttttttcttcagtcttgcatttccatgttgtgcaaaacaccatgctgaatgagataacttgatggtaatgttttttttactgaacgaaagtggccctatggtgatttaaagcagggaaattagtacaaatgagattttccccactttgcttagtatcgcttcagggccttaaaatccaaccttatgctttcaggttaaatcatagaataactctatcgagatacaagcagttcgtgaaagagacagcaccaatcattgatctcttacctttaatttgcttttcttattagacacagtaatt

SEQ ID NO: 680288 - DNA, 671 bp, Homo sapiens
tgatgagtgtcattagtttccatttacctcctcattgctgaccaatgtgacatctggagagagatttattggtcaaaacagttttaaaactaaaaaaaataaaatacaaaaaaataagaagaagccccgtagaaagatgctttagagttaatcacaaatataaatgccagaatccctgaaacactgggytaggatataaacatatataaaagatgatccatgtctttctaccatacttagggaaattcaaatcacactgcatcaattttgaaaggaaatggcaaaatgagttaatctctgactttcctcatgtgttcatggagataactatattaatgtgttttgcccctgtttaggcttgaaatatcctttttttcttcagtcttgcatttccatgttgtgcaaaacaccatgctgaatgagataacttgatggtaatgttttttttactgaacgaaagtggccctatggtgatttaaagcagggaaattagtacaaatgagattttccccactttgcttagtatcgcttcagggccttaaaatccaaccttatgctttcaggttaaatcatagaataactctatcgagatacaagcagttcgtgaaagagacagcaccaatcattgatctcttacctttaatttgcttttcttattagacacagtaatt

SEQ ID NO: 680289 - DNA, 580 bp, Homo sapiens
gaataatcatcagattattcatttctrcttttcaaagttatgaaattattgttcaataaccatgacctattttatttatttagatgtttttttcctgagatacaaatcttaatcattgtatgccatgttaaaaacacacacaattttcaattactatattccttctagatactatcctgcaaatctaaaagtataaatctgggtttagttatattccagtagaaatatggacctccctaaactggactcccaacaagctgaaaatatttcaaaggctagttgttgtgagagaaagcaataatctaaccagatttgtatgctattttagtacttaagttattagcataatatatgactttaacttcaaattaatgtgtagacaacttatcaacagtatatagacatctatcagtaactctttttttgccatgagtacacctacctttcaaaagaggagcaagtgctgttttattcattatctgctgggttaaattagatattggtgtatacacaaccattaaagaagagctattaaatttatctacccttcccagattctgaggagccattccaggaaact

SEQ ID NO: 680290 - DNA, 580 bp, Homo sapiens
gaataatcatcagattattcatttctgcttttcaaagttatgaaattattgttcaataaccatgacctattttatttatttagatgtttttttcctgagatacaaatcttaatcattgtatgccatgttaaaaacacacacaattttcaattactatattccttctagatactatcctgcaaatctaaaagtataaatctgggtttagttatattccagtagaaatatggacctccctaaactggactcccaacaagctgaaaatatttcaaaggctagttgttgtgagagaaagcaataatctaaccagatttgtatgctattttagtacttaagttattagcataatatatgactktaacttcaaattaatgtgtagacaacttatcaacagtatatagacatctatcagtaactctttttttgccatgagtacacctacctttcaaaagaggagcaagtgctgttttattcattatctgctgggttaaattagatattggtgtatacacaaccattaaagaagagctattaaatttatctacccttcccagattctgaggagccattccaggaaact

SEQ ID NO: 680291 - DNA, 996 bp, Homo sapiens
tgacatacgtatttgagttatccaggcaagagccacagctgacggtggagaagctaagttagaaatcaaggacttcagaatatctttgaatactctgaagttacagccctaaaatgaagcagcaagatgcatctgttaatagaattcctgtctcagaggtgccgtgctgccatccaactggcactgggagtctggctttattgatagatggataagattgaacatgacacctgtgtccagtgaatcccctggcgccatttaactagcacttaaagcagctgcttttgaaaaattaccttcagactgggcccaccctagcagaacaaaatcctcaccttaagtacttttccagttcccaataaatgaggatttttgccctgcaagagaactgagccatattttatttgaagccacatctgtcactttatttttatttcccctgctgtctaccttagatcacaatgcctgtgtcatggcaatatccttccaagggatcacagcaaccccctctttgaagaccttacttggctgctcattgcccgtaatataaagtcatgttcagttgtgtttacaaggcctattacaatytgctctcaaaacacaatttcagcctgatctcgccagcctcgtgcctctacacaaaactattggactttctccagccacgctgtaatcttctgcatcttcaaaccattgctcgttcttctctcttcattatcttcttttttatttatttatttattcatttagttatttatttatttatttggtgtcggagtctcactctgtcgccagactggagtgcagtggtgcgatctaggctcactgcgacctctgcctcccgggttcaagtgattctcctgcctcagcctcccgagtagctgggactgcaggcacacaccaccacgcccagctaatttttgtatttttagtagagatggggtttcaccatgttggccaggatggtctcttatctcttgacctcgtgatccgccc

SEQ ID NO: 680292 - DNA, 996 bp, Homo sapiens
tgacatacgtatttgagttatccaggcaagagccacagctgacggtggagaagctaagttagaaatcaaggacttcagaatatctttgaatactctgaagttacagccctaaaatgaagcagcaagatgcatctgttaatagaattcctgtctcagaggtgccgtgctgccatccaactggcactgggagtctggctttattgatagatggataagattgaacatgacacctgtgtccagtgaatcccctggcgccatttaactagcacttaaagcagctgcttttgaaaaattaccttcagactgggcccaccctagcagaacaaaatcctcaccttaagtacttttccagttcccaataaatgaggatttttgccctgcaagagaactgagccatattttatttgaagccacatctgtcactttatttttatttcccctgctgtctaccttagatcacaatgcctgtgtcatggcaatatccttccaagggatcacagcaaccccctctttgaagaccttacttggctgctcattgcccgtaatataaagtcatgttcagttgtgtttacaaggcctattacaatctgctctcaaaacacaatttcagcctgatctcgccagcctcgtgcctctacacaaaactattggactttctccagccacgctgtaatcttctgcatcttcaaaccattgctcgttcttctctcttcattatcttcttttttatttatttatttattcatttagttatttatttatttatttggtgtcggagtctcacyctgtcgccagactggagtgcagtggtgcgatctaggctcactgcgacctctgcctcccgggttcaagtgattctcctgcctcagcctcccgagtagctgggactgcaggcacacaccaccacgcccagctaatttttgtatttttagtagagatggggtttcaccatgttggccaggatggtctcttatctcttgacctcgtgatccgccc

SEQ ID NO: 680293 - DNA, 996 bp, Homo sapiens
tgacatacgtatttgagttatccaggcaagagccacagctgacggtggagaagctaagttagaaatcaaggacttcagaatatctttgaatactctgaagttacagccctaaaatgaagcagcaagatgcatctgttaatagaattcctgtctcagaggtgccgtgctgccatccaactggcactgggagtctggctttattgatagatggataagattgaacatgacacctgtgtccagtgaatcccctggcgccatttaactagcacttaaagcagctgcttttgaaaaattaccttcagactgggcccaccctagcagaacaaaatcctcaccttaagtacttttccagttcccaataaatgaggatttttgccctgcaagagaactgagccatattttatttgaagccacatctgtcactttatttttatttcccctgctgtctaccttagatcacaatgcctgtgtcatggcaatatccttccaagggatcacagcaaccccctctttgaagaccttacttggctgctcattgcccgtaatataaagtcatgttcagttgtgtttacaaggcctattacaatctgctctcaaaacacaatttcagcctgatctcgccagcctcgtgcctctacacaaaactattggactttctccagccacgctgtaatcttctgcatcttcaaaccattgctcgttcttctctcttcattatcttcttttttatttatttatttattcatttagttatttatttatttatttggtgtcggagtctcactctgtcgccagrctggagtgcagtggtgcgatctaggctcactgcgacctctgcctcccgggttcaagtgattctcctgcctcagcctcccgagtagctgggactgcaggcacacaccaccacgcccagctaatttttgtatttttagtagagatggggtttcaccatgttggccaggatggtctcttatctcttgacctcgtgatccgccc

SEQ ID NO: 680294 - DNA, 1326 bp, Homo sapiens
catttggtggtttttagagtataagccttgcacatattttattaaatttacacctaagttggccgggtgcagtggctcacgcctgtaatcccagcactttaggaggccaagatgggcagatcactaaaggtcgggagttcgcgaccagctggccaacatggtgaaactccgtctgtactaaaaatgcaaaaattagctgggcatggtggtgggcacctgtaatctcagctacttgggaagccgaggcaggagaatctcttgaaccggggaggcagagattgcagtgagctaagattgcaccactgcactccagtctgggagatagagtgagactccatctcaaaacagaaacgaaaacaaaacaaaaaattcacgctgaagtattttatttttctaagccaatactatcttaatcggtgttgtgtgttgaatttcagtaccctacatttggccatttggatttgttcattggtaaatcttttttaatattattctcttgtctctctttaaacmaatctttcaaattttcaaattctttttttgttgtgttttcatttttatacaatttaggttacaaaagttgccaaaatattatgaatagttcctatatacccttcaccctgcttacctaaatgataacaaatttctcataatcacagtacaattatcgaaaccaggaagttagctttgatatgttactattcattaatctacagacttttttcaaatttttccaattgtaaaaacttagtattgtcccactactgctcttttccaggatccagtctaggatcccacatttcatttagttttcatttcttctctagtctggaagagttcctcagtgtttctttcctttcatggccttgacaatattaaagggtattggccatttagtttcacctcttgtaaatttatatgtaaacacacacataacacacatatacactttaacttaaatataaacacacctatagctaaatatagagctcacaatcaataataaagtaactgtcctttgtttttattttatggaagacataggctctgtgttcaacctcaagaatctctgctttttaaattttagaagaaattttaaaatatcagtcattgatctcctttctttcttctttctctctgcatccttccttccttccttttttcttttcgttttccttttccttccttcattttacgatatagatcattgctttaaaaatataaaagatcaatcaatttcgataagacaattgcactcatctatacatatttaagtggatatattgtctactctcagtcttctttcaggtataattctttcatttt

SEQ ID NO: 680295 - DNA, 1979 bp, Homo sapiens
tactatgggcagggtgtcttctcaaggctttatgtttgctagctcctggaattctcagaacaactcttataagatagacattacgattgtccttattttacatatgagaagataggttatttaggaaagttaatcactttgcctgggacctcagaaatgtcaagtgggagaacgggggcttgattgtaggtggtaaccacaccttgggagtcgggtgaaagcacactttattctctgaaggcagaaaaggaggctgttcaaccctttaatgccatggggtaaaatgccttttactagacattgagaaagtaggagtatggccattccagttgtgttatcctgaacactcccattttcygatcctccctttttctcctttgaaaattttaataataggatgagatgacatttcatagcattatggcctttaagttataattttgttatctgacagatgcccagaaacattaggtaaggccacacctcagatagatgacagtttatcctacaaacgtagataaacaaatacacacctggacctccaacaaatacagggcttcccaagccagatctagtgatgtaatatttaacaaatatttgtatttaatacaaatagaatttggtaaatgtcagaattactaggtgtattattctttctcttcttcagaaacagctcttatttaagaggctgcaaaaatatttatatccttccctcagaaatatgtcatctgcattcatctgcattcatgtacatatgcattcatttttcatagaaccacagactcacccaaacagtttaagctaaaaacttctgctttgtgtgtttttgagaagttatgtattttatttctgggatgatataattttggattttaattcctttcctctttaccaaatgttcacattcacccttatacccacatgtgtttctatgtgcaataagtataacaacacatatactgaaaaatgttgctttgttaggttgttatccaaaataaaataatattaaaaaggaaaacctatggcaatgcttattctcaaccctactaaaatagtgacttgttttaggatgatgatttttactaatacttatgttcgtcttctccctacatttaacatgtcagtgtttctatttctgatataaccattgcattattatttctcatcacaatattaatactttgccatgaatcaagttttgacacatatatttcatccctatgcttttaatttattcaaaaattctataaatgtttcataaatgttagtcctatatattagtactgtctgtaacaaaatataatgtaacatttgtcgatcaaaatacaaagaacaacagagctgaaaagtataaaacaacaacaaagagttgagtttattgcttgcctggtatattagttttgtagggctcctaaacaaagtaccatagactgggtggctgaaacaccagaattttattttctcacattcaggaggctgggagtccaagattcaggtaggatcagtttcttctcgtgtctctcttcttagcttgtagatagctatcttatccgtgtatcttcacatggtcttccctctgtgcctcattctcacttagttgtctctttaaagatcctctctccaaatacagtcacattctgggatatggggggttaggatttcaacacatggttttatctgggggtaggggagagtacaattcagcctgtaacacctggaaatggagagagtgttcactctagagtaaggtcagtgagtcactctgattaaaagtggaagggctagacacagggtaaacaaaggaagtttccctccaataaggcagcattctgaagggcattattcaattggtcaaggagaggaccctgggtctcctttgggatgggcttgcaattgatctggttcacgccacaaaatcacaggcacaggtcgggttaggcttctagggtgtagtgtcttgactcaggcactttcatatg

SEQ ID NO: 680296 - DNA, 657 bp, Homo sapiens
tgttgattgagcataaggaattttatcttcagccttgaccctccttctttgttctttcctcatttcctaaactctggggtcaatgttgcaacggggaagaatagggtctctgttgtactgtttttgcagaatctttgagccaaaagtgtaagtactttttaggaaaatttaggtggtaaataagatgcatccttacaataggaaaagattgagattcctcacatctctatccccagctgcctacctagcatcagtcttatgcatagtaagtgatgagcaaatatttgtagattgatagaattctagactttgctaacacttgtccagtggtctcttctcttgggtctcaatgaaacttgcaactcaaggggaaagaggagatgcagaaataaacgtgcatggtattctgagcaaatacagatttatcctgcagtggatggccatttctgctaattagcccatcagttaacaaggaaaactagaggaagagtcctataattattgatgttttaaatttaagttctttattttttcataaacatttttgratcaaataagccagtatagtcaccagctacactttcccatttggaaatgtttagcatacatgtgacttaaaagctcaaacttctgaatcaaattatctgtgttttcatt

SEQ ID NO: 680297 - DNA, 577 bp, Homo sapiens
aaacaccgcatgttctcactcataggtgagaattgaacaatgagaacacttggacacagagcggggaacatcacaccctggggcctgtcattgggttgtgggagggcaggggaagggatagcattaggagaagtacctaatgtaaatgatgagttaatgggtgcagcaaaccaacatggcacatgtatacctatgcaacaaacctgcactttgtgcacatataccctaggacttaaaagyataattaaaaaaaaaagaaaaaaaaagaaaattaatgcacagcttcaatagcaatgtttcctaagccagatacctctgttttctgctgtgtttgctatattcaccactgttcatgcagttcttgatacaatgcctgctgtgcaaaactcaagaatatttattaatgaaagaatgactcagccgggcatggtggctcatgcctataatcccagcactttgggaggccgaggcaggtggaccgcttgaggtcaggagttcaagaccagcctggccaacatggtgaaatcccatctctactaaaaatacaaaaaattaaccaggggtggtggtgcatgtc

SEQ ID NO: 680298 - DNA, 635 bp, Homo sapiens
tatttgttgaatagggtgtcctttcccctctttatgtttttgtttgctttgttgaaggtcagttggctctaagtatttggatttatttctgtgttctctattctgttccattcgtctatgtracagaactagaaaaaacaatcctaaaattcatatggaaccaaaaaagagcctgcatagccaaagtaagactaggcaaaaagaacaaatctggaggcatcacactacctgatctcaaactatactataagaccatagtcaccaaaacagcatgatactggtataaaaaccggcccctttaattcttaacagcatttggaactcatttgggtttttgtgtaagtaaagtatggactgaagtttatctctctcccccattttctaaccagatagtacaccaccattaataaaatagtttaagtttccatatagtattacattcttacataacaaactttctcggctgggcacagtggctcacacgtgtaatcccagcactttgggaggccgaggtgggcagaccacttaggtcaggagtttgagacaagcctggccaacatagtgaagcctcatctctactaaaaatacaaaaattatccaggcatggtggcatgtgcctgtaatcctagctactc

SEQ ID NO: 680299 - DNA, 1525 bp, Homo sapiens
tggcgaaacgccgtctctactaaaaatacaaaaaattagccaggcatggtggtgcatgcctgtaatcccagctatttgggaggttgaggcagaagaattgcttgaacccgggaggcagaggttgcagtgagccgagatcgcgccactgcactccagcctgggtgacagagcaagactccgtctcaaacaarcaaaacaaacaaatccttcaaacaacacagaagtgaaaagtagatacgacatgcagtctcctcccgcctgggactgtgtctctcagtttaatttgcatctgtcattgccaaggagctggacagatcaatgcagatgaggacgacaaagcgctctgtcacgatgaccgtctccacggggccccagtgtgtttacaaagcacgttacattgctgcacgaaggcaggagataggtgttagatcagctgcctctttctgccgaggaaatggaggctcagagaggttaagggagggcctcaaggtcacacagcaagagacacagttggggtgcaagcctctgccctcctgccgagcctcctgttcatcatttgcggggcccccaagggtctctcccctcctcttcctgatgcccgctgggctcaccttgatgcgctcaatcccggcttctatgcgtagctgttccaccagcttccgggcctgggctatgttgttagtggctgacattgtctgccatcagctctgggccccgttgttcagagagctgtgggggaagcagaggggtgtgggtcaaagttcaggtcaggcctctgggtggcagcaggggcgcccggccttggctcaaccttcccgactctaggcacggccactttgcctctgggtggggaccaggggcctccgtgtacaaagagctggcactcgtttaactctcagcatagagcctggcacgcggtcagccgtcacaatcctctgtgggagtttgcagaacgagagaatgaaagggcgaaggcaggctgggcgtggtggctcacgcctgtaatcccagcactttgggaggctgaggcaggtggatcatgaggtcaggagatcgagaccatcctggctaacacggtgaaacctcatcgttactaaaaaaaaaaaaaaaaatacaaaaattagccaggcatggtggtgggtgcctatagtcccagctactctggaggctgaggcaggagaatgacgtgaacccgggaggtggagcttgcagtgagccgagatggtgcccctgcactccagcctggacgacagagcaagactccgtctcaaaaaaaaaaataaagaaaaaataaagaaagggcaaaggcaataggccaggccctctggagaagggaggacccacgcaggctcccgggtggcctgcctcagtccatggcaggggttcttgccctccaggggacactgggtgatatctggggacatctgtggctgtggggggtgctcctggcatggagtgggttgggtggaggccagggacattgctcagctccctgcagtgccccggacggccccacgccagggaa

SEQ ID NO: 680300 - DNA, 1525 bp, Homo sapiens
tggcgaaacgccgtctctactaaaaatacaaaaaattagccaggcatggtggtgcatgcctgtaatcccagctatttgggaggttgaggcagaagaattgcttgaacccgggaggcagaggttgcagtgagccgagatcgcgccactgcactccagcctgggtgacagagcaagactccgtctcaaacaaacaaaacaaacaaatccttcaaacaacacagaagtgaaaagtagatasgacatgcagtctcctcccgcctgggactgtgtctctcagtttaatttgcatctgtcattgccaaggagctggacagatcaatgcagatgaggacgacaaagcgctctgtcacgatgaccgtctccacggggccccagtgtgtttacaaagcacgttacattgctgcacgaaggcaggagataggtgttagatcagctgcctctttctgccgaggaaatggaggctcagagaggttaagggagggcctcaaggtcacacagcaagagacacagttggggtgcaagcctctgccctcctgccgagcctcctgttcatcatttgcggggcccccaagggtctctcccctcctcttcctgatgcccgctgggctcaccttgatgcgctcaatcccggcttctatgcgtagctgttccaccagcttccgggcctgggctatgttgttagtggctgacattgtctgccatcagctctgggccccgttgttcagagagctgtgggggaagcagaggggtgtgggtcaaagttcaggtcaggcctctgggtggcagcaggggcgcccggccttggctcaaccttcccgactctaggcacggccactttgcctctgggtggggaccaggggcctccgtgtacaaagagctggcactcgtttaactctcagcatagagcctggcacgcggtcagccgtcacaatcctctgtgggagtttgcagaacgagagaatgaaagggcgaaggcaggctgggcgtggtggctcacgcctgtaatcccagcactttgggaggctgaggcaggtggatcatgaggtcaggagatcgagaccatcctggctaacacggtgaaacctcatcgttactaaaaaaaaaaaaaaaaatacaaaaattagccaggcatggtggtgggtgcctatagtcccagctactctggaggctgaggcaggagaatgacgtgaacccgggaggtggagcttgcagtgagccgagatggtgcccctgcactccagcctggacgacagagcaagactccgtctcaaaaaaaaaaataaagaaaaaataaagaaagggcaaaggcaataggccaggccctctggagaagggaggacccacgcaggctcccgggtggcctgcctcagtccatggcaggggttcttgccctccaggggacactgggtgatatctggggacatctgtggctgtggggggtgctcctggcatggagtgggttgggtggaggccagggacattgctcagctccctgcagtgccccggacggccccacgccagggaa

SEQ ID NO: 680301 - DNA, 1525 bp, Homo sapiens
tggcgaaacgccgtctctactaaaaatacaaaaaattagccaggcatggtggtgcatgcctgtaatcccagctatttgggaggttgaggcagaagaattgcttgaacccgggaggcagaggttgcagtgagccgagatcgcgccactgcactccagcctgggtgacagagcaagactccgtctcaaacaaacaaaacaaacaaatccttcaaacaacacagaagtgaaaagtagatacgacatgcagtctcctcccgcctgggactgtgtctctcagtttaatttgcatctgtcattgccaaggagctggacagatcaatgcagatgaggacgacaaagcgctctgtcacgatgaccgtctccacggggccccagtgtgtttacaaagcacgttacattgctgcacgaaggcaggagataggtgttagatcagctgcctctttctgccgaggaaatggaggctcagagaggttaagggagggcctcaaggtcacacagcaagagacacagttggggtgcaagcctctgccctcctgccgagcctcctgttcatcatttgcggggcccccaagggtctctcccctcctcttcctgatgcccgctgggctcaccttgatgcgctcaatcccggcttctatgcgtagctgttccaccagcttccgggcctgggctatgttgttagtggctgacattgtctgccatcagctctgggccccgttgttcagagagctgtgggggaagcagaggggtgtgggtcaaagttcaggtcaggcctctgggtggcagcaggggcgcccggccttggctcaaccttcccgactctaggcacggccactttgcctctgggtggggaccaggggcctccgtgtacaaagagctggcactcgtttaactctcagcatagagcctggcacgcggtcagccgtcacaatcctctgtgggagtttgcagaacgagagaatgaaagggcgaaggcaggctgggcgtggtggctcacgcctgtaatcccagcactttgggaggctgaggcaggtggatcatgaggtcaggagatcragaccatcctggctaacacggtgaaacctcatcgttactaaaaaaaaaaaaaaaaatacaaaaattagccaggcatggtggtgggtgcctatagtcccagctactctggaggctgaggcaggagaatgacgtgaacccgggaggtggagcttgcagtgagccgagatggtgcccctgcactccagcctggacgacagagcaagactccgtctcaaaaaaaaaaataaagaaaaaataaagaaagggcaaaggcaataggccaggccctctggagaagggaggacccacgcaggctcccgggtggcctgcctcagtccatggcaggggttcttgccctccaggggacactgggtgatatctggggacatctgtggctgtggggggtgctcctggcatggagtgggttgggtggaggccagggacattgctcagctccctgcagtgccccggacggccccacgccagggaa

SEQ ID NO: 680302 - DNA, 585 bp, Homo sapiens
gagctcaggagtttgagaccagcctgggcaacatagtgagaccttgtctatacaaaaaatgaacaaaattagccaggcgtggtggtgtgtacctgtagtcccagctacttgggaggctgatgtaggagactcgcttgagcccaggaggtcaaggctgcagttagctgtgatcaccccactgcactccagcctggaygacacagtgagaccctgtctcaaaagaaaaaaaaggaggcgggggaagaaagaaagaaaagaaagaaaaagaaggaaggaaggaaggaaggaaggaggaaaggagggagggagggagggaggggaaaaaagaaaagaaaaagaaagaaagggaaagtattagataagcagttgagaaaggagctgagatcaggaattcagttctgcatcttctctgtgacttctcattcatctctgggtcagtcatagagtctctcttgtcttaattttctcatctgtgaaatggctacccctttatttaccaccagtggtattgagaaccttaatcaacatttaggaaataatatgtcatccttataacatgagacccataattgaaagactatacca

SEQ ID NO: 680303 - DNA, 573 bp, Homo sapiens
tatggtgcctgcgctgctacagttgctgaaatccttgtcttagttgcctggggcagacacagtccccacataccaagcatatatgtacacacagtacctcacctcttactgtaaagaacagcacaaaatccagctcaaggcatgttgcatcattggaacacctgaaagcctgctgctttttcttcctggattgactttattaaagtcagcctccctgggctacctttaattcwgcagcttgtttagacccagaggtctgacaagactttccgtaaatccagctgctttggtgcttcccaggggtcagcctgtgtgggcctggtatacaggtggccatgcttgtgagatcgattgaacttatcttttttttttttttgagacggagtctcgctctgtcgcccaggctggagtgcagtggcgggatctcggctcactgcaagctccgcctcccgggttcacgccattctcctgcctcagcctcccaagtagctgggacgacaggcgcccgccactacgcccggctaatttttttgtatttttagtagagacggggtttcaccgttttagccggga

SEQ ID NO: 680304 - DNA, 1461 bp, Homo sapiens
attcagtgttccataaggcaattgtatatctgatgagcacaatttgttatatcagaagaccaccatctctgcaaatcaggaggctttattcactcattcattcattcatttattcaccagatatgtatgaagtgacagacactttaataggcaataggaaatctgaagctggaaacacagtctgtgcccttgaggggttcatggcagggagacagatctaaatagaawctggtgtgatatggcctgaaggtagccatgacttcttcgtccacccttcttcctctttttttttttttttttttgattgagtcggagtcttgctctgttgcccaggctggagtgtaatggcacgatctcggcccactgcaccctctgcctcctgggttcaagcaattctcctgcctcagcctcccaagtagctgggattacaggcgcccgccaccatgctcagctaatttttatatttttagtagagaccgggtttcaccatgttggccagggtggtctcgaactcctgacctcgtgatccgcctgcctcggcctcccaaagtgctgggattacaggcatgagccactgcacctggcatggttttttttttttttgagatggagtcttgctctgtcgcccaggctggagtgcggtggcaggatcttggctcactgcaacctctgcctcacaggttcaagtgattctcctgcctcagcctcccgggtagctgaaactacaggcctgtgccactatgcccagctaatttttgtatttttagtagagacagggtttcatcatgttagctaggctggtctcgaactcttgacctcaagtgatccacttaccttggcctcccaaagcgctaggattacaggcgtgagccaccacactcagccttcaaccacacttctaagccctgtagatccagcccagcatccaaattacccgctccaaaggcatgagcaggaaaaggaggggcagacatcacacatcaccaacaaaacttcccaatcatcgccttttaaaaacatctctgcttccttccccaaagtgccctctcccattgcagttgctgcacctcagctctcatctcatcccatcccaaaaactaagatcttagctttttctcccctcctcacatcacccctccacttgtaacctggtttagtgaaacaagacttggccccaagcatctctcaagattgcctctaaggggcctcaattcaaagtggtttggtgttgctgcactatgacgtgaaagcccaggggaagcctggagtcagaggaagggcgattctcagaagccagactaatttttgtagtggctgcacctacccttgatttactgaatcagaatctaaaccaaattccgtctctttttctctctctctttttctacgtgttgaaaaagttgactggtctgttctgcaggacaaagtttctcacagtctgaatgttgctgatcacaatat

SEQ ID NO: 680305 - DNA, 1461 bp, Homo sapiens
attcagtgttccataaggcaattgtatatctgatgagcacaatttgttatatcagaagaccaccatctctgcaaatcaggaggctttattcactcattcattcattcatttattcaccagatatgtatgaagtgacagacactttaataggcaataggaaatctgaagctggaaacacagtctgtgcccttgaggggttcatggcagggagacagatctaaatagaatctggtgtgatatggcctgaaggtagccatgacttcttcgtccacccttcttcytctttttttttttttttttttgattgagtcggagtcttgctctgttgcccaggctggagtgtaatggcacgatctcggcccactgcaccctctgcctcctgggttcaagcaattctcctgcctcagcctcccaagtagctgggattacaggcgcccgccaccatgctcagctaatttttatatttttagtagagaccgggtttcaccatgttggccagggtggtctcgaactcctgacctcgtgatccgcctgcctcggcctcccaaagtgctgggattacaggcatgagccactgcacctggcatggttttttttttttttgagatggagtcttgctctgtcgcccaggctggagtgcggtggcaggatcttggctcactgcaacctctgcctcacaggttcaagtgattctcctgcctcagcctcccgggtagctgaaactacaggcctgtgccactatgcccagctaatttttgtatttttagtagagacagggtttcatcatgttagctaggctggtctcgaactcttgacctcaagtgatccacttaccttggcctcccaaagcgctaggattacaggcgtgagccaccacactcagccttcaaccacacttctaagccctgtagatccagcccagcatccaaattacccgctccaaaggcatgagcaggaaaaggaggggcagacatcacacatcaccaacaaaacttcccaatcatcgccttttaaaaacatctctgcttccttccccaaagtgccctctcccattgcagttgctgcacctcagctctcatctcatcccatcccaaaaactaagatcttagctttttctcccctcctcacatcacccctccacttgtaacctggtttagtgaaacaagacttggccccaagcatctctcaagattgcctctaaggggcctcaattcaaagtggtttggtgttgctgcactatgacgtgaaagcccaggggaagcctggagtcagaggaagggcgattctcagaagccagactaatttttgtagtggctgcacctacccttgatttactgaatcagaatctaaaccaaattccgtctctttttctctctctctttttctacgtgttgaaaaagttgactggtctgttctgcaggacaaagtttctcacagtctgaatgttgctgatcacaatat

SEQ ID NO: 680306 - DNA, 2010 bp, Homo sapiens
ataaaatcacttcattacatgttagtgcaagggtgtccaatcttttggcttccctgagccacactgaaagaagaaatgtcttggaccacacataaaatatactaatactaatgacagctggtgagctttaaaagcaaacaaacaaaaaaatctcataatgttttaagaaagtttacgaatttgtgttgggctgcattcaaaggtatcctgggccacacgtgcccacaggccgtatgttggacaagcttgtgttagtgggtgaaagcaatattgatatatttcatatgatttaaaatgtatatgtgggaccacgcacggtggctcacgcatgtaatcccagcactgcgggaggcagaggcaggcagatcaccttgggtcaggagtttgagaccagccatggccaacacggtgaaaccctgtgtctactagaaatacaaaaattagctgggcatggtggcatgcacatgtagtcccagctactcgggaggctgaggcagagaatcacttgagcccaggaggcagagtttgcagtgagccgagattgcgccgctgcactccagcctgggcgacagactgagactcggtctcaaaaaaaaaaaaaaaattaaaatgtgtatgtataaccaaaatcataaagcttccaaatagcaacctataatgttaattttatctacatgcttaaaagtttacataactaagttagaaaaaaataaaaggcttttagggtattatcttgttggaaaataaaagattgtcttatatttggggtgattttttttttttttgggagaccaagtttcgctcttgttgcccaggctggagtgcagtggtgcgatctccactcactgcaacctccacctcccgggttcaagcagttctgtctcagccttcctgagtagctgggattacatgcatgcgccaccacgcccagctaattttgtatttttagtagagacgggatttctccacgttggtcaggctggtctcgaattcctgacctcagatgatctgcctgcctcggcctcccaaagtgcagggattacaggcatgagccacaatgcccagcctatttggggtgattttatattcaggcatacaaagtagttgttaagatagtaaggcaacatactttgagagtaagaaaaacatccacacaatgctttgctgattataacatttcccagatagaatgttacataatctccataacaagccagtcaggaaagctgcctgatctctatgttcagatcgtaagaaaattgaagctaagggaggttaaactgcccaaggcagggaaccagtaaatgatggtgccaggcctggatcccagggctcccagattctaaattgcaagctcccctccctacgctgcttctcattggcaaatatgacactatttcttcaatgtaagaggaaatgctgaaggtttcagcatctggagattggcacatatatctcaggaagaatctgaactttaagggtcccaccaaaatgttaaaatgaaccattctaagtagcactatggtagtcataaacagaactaagtattttgaaaacaaayagtttagagtttggctggggatggttgctcacacctaaaatcccagcacttagggagccagaggcaggaggagaccctgagtccaggagtttgagacctgtctggcaacagagcaaaacctcattctccataaaaagggaaaaaaaaagaccaaaaaaaaaaaagatttaatgtttcaaaatattcatagggaactctagttctctatgagaaattttaactttttattttcatttgaatggtaatcaaaaaataataataagcatatactagataatctgcataaactccaaacaactgtgtactaagtgcttaagcttagtttgtgataatgatagcattaaaccatgttgtattgagttgtgtcacatgttaatgagaaaacacagaggcagacctaaaaaagtatccatgacatgctacataagcaaagattctgcagtggtctg

SEQ ID NO: 680307 - DNA, 2208 bp, Homo sapiens
gaatttatgtttttgcatatttaagagacattacaataaaaacaattcaaaccccaggatgtatattattttttctttaaaaggggctctgtacattatttaaagttgagaattcagaatactagttggttttgaacacaaatctggcatgaccaagttattttatagaaaataaaatttaaacaatttacagatttctagccttctgctctcatcaatagaataatttaaattatatacaactcaaaccagccactgcattaccaaaatctctttgcacagaatagtggcaaggaaaatgccgacgggcctcaccattgctgctggtttttgcattctttgccagttgtgcacgagtagcagcaatcaaactgtcatgggccaactcctgaacccggaggaaccatggaatgctactgtctgtgctctcactggagaggaaatcattccctgaatcttctgcctcatcctgtacaaacactaagtgctcagctgaagagcccagacctggaagaaacaaaatatatgaaaagttagaaaccaagcaagctttttatttgccctggctcagagactctccatgtccctttttttttttttttttttgagacggcgtctcgctctgtcacccaggctggagtgcagtggcgcaatctcggcttactgcaacctccgcttcccaggttcaagtgattctcctgcctcagcctcctgagtagctgggattacaggcatgcaccaccacgcccggctaatttttgtatttttagtagagacggggtttcaccatgttggtcaggctggtcttgaactcctgacctcgtgattcgcccacgtcggcctcccaaagtactgggattacaggcgtgagccactgcgcctggcccagaaactctccatstcctaaataagctattcctgaccttcgccttttacctcaaacttctcactgaagagcaggctatcatctttctacctttagtctacaggcttgtcattaccttgcctcctctggtttcaaggcaaagctgtctttcttggtcaaccagactaatccccacctactgtatttcattctcattcttcaattatccccccatatatacttgtgttatctcctctctcctatctgcaactagttcctctctatcggccagcatttccttatgtctttaaatatgtcctaactcaagtctctcacccttatttttaaaaagaattagaaaaccccaagtacttctctagctatttaccttcttccctgttcctttaaagtcaagcttcttgaacaagtgtaccttctaacttgtgtatctattgtcttacctcccatccactccccatctctttaaccctggcctctacctcagctaccacagtaacaattgctcttgctagggtcaccagacacacacttcttctcactaataagcccatcatgtagtatttggcatgatttagtatcttttctgccttaaaacttcttcctcccttggcttccctgctaccactctctcccagttctcttcatccccttccagctgctccttcctgttctgttgtcctcttaaatgttttttcccagggtcccagacttgccttcttttctgtttatgcttgagacttctctagaatccatgttcattgtttcatacgtttcctgaatgctgataagcaccaaaacagacctttctagaactctggattcatgtttctaactctctaaaggacatgtcctcctgaatatacctccaaaatctcaacataaataggtgcaaattggaactaatcatcctcccccaagccttgctcttcctgtgcgatctcagtaaatggcactacataatttcccaaacaagatatgagtcatactagagtcctccctctccctctacatattcaaatggtcaccagacacaccaattctccaaaataataaaataataaaggttctttctattttaagtatgactaagttaaatatgccccacccctaatttttttcttaggcataagcagagcccaaaaaaaaggaaagaatacctgctcttgttaggttaagaagaataaaagaagtgctatcacttggctgtagatcttgcaacaagctagaagactctgaagtggacaaaaactccggggatttctgtacagtctgagctctcgtctcctctccgtctggacccacattcacccgaaggcttctca

SEQ ID NO: 680308 - DNA, 2724 bp, Homo sapiens
gaaaaaaaaaatgtgtttttctctggagtcctgttcacaagttcattagtaaaagcttgtacggatactcataattgcatgtcacagttcctctaagtttatttttctaaaaccatacttatccttcttctttcttattgattaaaaaaatactaatgtatttttcacgtttcaacactgcaaacacacaaattctccatttactcttcattggttttcataatactgcatttcccactacatctccttaagtataatggaatcacataataaaaataaataactaatgttttagaaaatctacttctttctagaacaagtatattgaaatgtttgaagtcatagaaaaaatatatatgaaagcctggactgaaaagtcaagttttatttttatatatttatttgccaagtgaccataaaatatacatgtaccctctctctccagaaaaggcacgttaagaaaagcaatacttactaaacttagtttacctgttaaaattaattacatctagcttaccagataatgcaatcaaaatcattaggataagcttttccagcatatgagattgaaagttcatcagaaatcttcctttttttttttggagataaacgtagccatcttcccattcattctttagacaaggacttttcccagataactgtatgtaacaaagttcaaatacttgaatgtggacctacaaatattttaaaattcagatttcttacagatatgtaacattaaccaccacccacctggcacaacattacatattgaatagcttaccttttcagttcaaagtgtaagttagaagagatatacgtagtaaaaccttttccagggaatctacaatatctgagaaaatgtatacattaatatacctggttaacttatcccatgatgtgatgtacctagaagctgtctttacaatctcatattggctggtagagaatatacaaaactatagctaattataggtgagtcttcaacatttctgaaccagttatctctattctagtggaagctgctataaaagattgtcaaagattattaatgagaaatgaaagttggacatgaaggaacagtgtccacaaacatccttctcatatgtaggggggaatttccatttttgaaactgatagggcagaatcccttatgagaaaatttagatatwtatccaaattcctacaggaattaagtgtattataaagttggtgcttcaagtcagtgtgtggcaggggaaagggatggattatccaataagtaatattggaactagtaaattctagtagaatctaatttgaaaaaattaaaattggatttgtatctcccatactacaataggaaatatccctaataaatatgtatgtacatttagtaaatgaaaatttgtaaatctagaagaaatcataactgaactttttatataattctctagatttcacagcctttctaactgtaataaaaagcttaggaaacatttgtaaatgattgatatatttgaatatataatatatttttaaaatcttgatggcaaagtcaacaagtacagagtaaaagagaaagctgacaaacagtaataatatttgcagaaatatgggtgctctcctaatagaaaaagtttctacaaatcaataagaaaagggccagagactcaaaaatataagcaatgaataaatgattaacataaaaacaaagaataaaacaatagaaacaacagattcacataaatgaaaataaaagtgagtctcaaaagtattaaaagatattcaacctcactgataacttgagaaatgcaaatcaaaactatactgcattgaaatggtaaagatgaaaaaatttgatggagcacatgtgtagcatactggcctgcaggaaattaacccagaccattgatacagagatacaaactaaatcattgtttcttcattttgtacaccctcacataatttcttcattgaaagtgcatgggagcataatatcaagaaatcaaaagaagaaataaataaaaagaagaaataaagatactaaattgttgctgaactccttcaaaatgtattgttgaaaaattagtattctttttcaaataacttttagaggaaacaaaggcaacttacccttcctaaattaaatcactcctcaaaaatcatttagatggctgaattatatataagttgggttagatagacatatgatgatagatgatacagatgatgataatgaagatagatgatacagagagatagatagatagatagatagatagatagatagatagatagatagatagatgatagttttatttttctcattttctccttgccaataaaaatctgcttgcagaatttcagctaataaatcatttggttgcctacagaacctacttcctttttaacaagtgtaagattccacagagatgtaacaaaatccttgtgctttagctgaaaattgtgcccacattacttgcttcaaaaccttttccatctttgcaataggtgcaatagatattatatagataaattattcacgtatttgtgttcttttctgccatgaaatgataaaaaagttcttttgagattctttgttatgatcctttagctgtaaggaattccttcagccttttaaagtgatttcctcttttcttgctactgtaatattcttaaatttacattgggtatatggcctttatttttccctctcggcatcatttatatcttatggcctaa

SEQ ID NO: 680309 - DNA, 1656 bp, Homo sapiens
ggaccgcatggatgcggttcctctttctctccctggtgtctgggcggcgcctttcccattcactcagcaggtctcccggttttccacctccccagcccccccagaatcttccccactgtctgtcccgacacatccctgagaatcttcccagaaacattgtatagggtctcttgaaaacctgagctccgtggtgcaaaatcgaaaccaccttgctcacgtttttcttaacaaaaggctcttctttctccattcgcccaaagcaagtcctccggcttttaggaagggagaacgtttgtctcgctagcgttttcattgatcattctcaacatgtcatctccattttattccctaatgtttttgtattgaaaagggtaggtattgcctgtaaaattaaaaggtggtgaatgtagctgactggttcgattcgtgtgacatatgccgtttcttttttgaatacaggcacgcgtctgttgaaattcctataagttgggggaaaaaatattctgtctgatctgatagtgcaaacaaagccgtggtgagaggcagtatcaagtcattccagaagattctgcatttgtcatattgcagagagcctagactgggtggaggctgggaggagttattttaaaggggaaaaagtctttttaaaaatttttggttgttagatgcatctgaggcttttttttgtttaagcgagtacatcttcatgctgatgaaaagagaataccgatcgccagttgtcgcattttgtctgggttgcagattcatccctgtattgcaccattttgtcagtaacaccacatttatctaatgggctgtcaaccagtttgatattagaggagggggaagtattgagcattatgaaatgaaaggtagaaaattaatctaatgatttcgggcccccactatcttaatatttaatttcctgccttatgtaacaaagattttcaaattcatctccattgtgaagtggatgctggagtgtaccttgcgtgttacatcttttaaatgaagcattattgatattacagatcaattcttgaataaatttactggttctcaaaagaggacaatgctgatacctttatatttaaagcagctatgttaacaaagaaaggtttttgtcttattgaagagaactgattctgaaattcggaatactgctgtggccacagttgctgtcttacaaggttttaatgcttaaatgatgtaagttgcacttctaataggtatcagtattggaaatatcttcagttcgtgttatttagactcttataatttttccatatttcttttccatatttctagttccacaggaaagcgagtgacctcgcacctatatccatagcaaccaagtgatgtcacacacaatgacacagaggctgcaatgcacctaagggctggtagggagtgtgcaaatggcatttatccaaggtaatgcagaaattagccgataagccaggtggaatcgagcacttcatattccactagatgagaattagtccaaaaaataaggatatcatttacccttagacatgcaaatctgtgacctctagctaggscttgttcaccctattgctagctttctcacaaaagtttataagatgcttttttatatttttaaacattcatctcatttatttaaaatactgggca

SEQ ID NO: 680310 - DNA, 973 bp, Homo sapiens
gcagcccaccacaacagaaagccaccaagagctgagcgccgttttgcagggccactgagccattcagcacagagcaaaacgcccacaggcttcacctcgctgagctgtgacagactgctggtcataaccaccaccccaagccatccaagtgctaagcagtgtcacactctctccattaagggagacaagagcatgcatgacacatttaggaaagatttccatccaacatcattaaaacacaagttttggtgcttaaagggatcaacttcagctaccaggaaatctactgccacccagcagctcagccccagatgacacgctttcttgtatcacggcctgttcccagggggcacgtggaagctgtgcacgtgagttccaggaaatttttcaatttcacgcgctcacatggtatttccagtggctgccagtaaaaagtcggttctcgggcttccccagcccatggcgctggctctagacgggccctgcctgccctgcctgcctcctcacatccaaggtaactttcacctgatgctgttgacatgcacttggctgtgagaaccttgccgcctgctaggttaagaggtcaggtatttactaagccccatctggctctacatccrtcagaggagggttaactgcagggggcctcactacgaatcaggcaggggaaaagcctgtttttcagcgcgtagataggctcgtgcaggtgaattacacctctcccagctccaagaaaaccaaaggaatcaggatgcacctacacctaccccaggaggcaggcccctttgaggctgtttccactaacagagcctgctggcctggttccctcctgacttacaacgtggggcaagccacagcatgcccaccccagcaccaagggaagacagactggcccatccaccttcttttctgtaacttgcctggcccacaccggtaggacccacatcagcacttctgggggccctcaggccag

SEQ ID NO: 680311 - DNA, 973 bp, Homo sapiens
gcagcccaccacaacagaaagccaccaagagctgagcgccgttttgcagggccactgagccattcagcacagagcaaaacgcccacaggcttcacctcgctgagctgtgacagactgctggtcataaccaccaccccaagccatccaagtgctaagcagtgtcacactctctccattaagggagacaagagcatgcatgacacatttaggaaagatttccatccaacatcattaaaacacaagttttggtgcttaaagggatcaacttcagctaccaggaaatctactgccacccagcagctcagccccagatgacacgctttcttgtatcacggcctgttcccagggggcacgtggaagctgtgcacgtgagttccaggaaatttttcaatttcacgcgctcacatggtatttccagtggctgccagtaaaaagtcggttctcgggcttccccagcccatggcgctggctctagacgggccctgcctgccctgcctgcctcctcacatccaaggtaactttcacctgatgctgttgacatgcacttggctgtgagaaccttgccgcctgctaggttaagaggtcaggtatttactaagccccatctggctctacatccgtcagaggagggttaactgcagggggcctcactacgaatcaggcaggggaaaagcctgtttttcagcgcrtagataggctcgtgcaggtgaattacacctctcccagctccaagaaaaccaaaggaatcaggatgcacctacacctaccccaggaggcaggcccctttgaggctgtttccactaacagagcctgctggcctggttccctcctgacttacaacgtggggcaagccacagcatgcccaccccagcaccaagggaagacagactggcccatccaccttcttttctgtaacttgcctggcccacaccggtaggacccacatcagcacttctgggggccctcaggccag

SEQ ID NO: 680312 - DNA, 554 bp, Homo sapiens
ggctcatgacatgaggctgcctcctggaatggcttggagtgccacagtcacctttgttacagcattgacagatgtcagccgagccttccactgggaaccagctgagatgaaagagaagcagcttagatttttgttgcctgcaggaagcagtttgctgataatatattgggggaaatagacaaggggtcgccgattcagtttctactccagtcacggagcacctgtcctcctcacctgttggaaggcttgctgaaggaacaggccttgttgagttcatctgggtcctgctcagctagggtgaccttcaggtggcaggtgatgtatatctgcaaggaataamagctatttccaggccgagttccaggctgtgcctgggagtttaacacaccagttctcttataaccctcaaccctttaaagagtgagaaggggccgggtgcattggcacacacctataatcccagcactttgggagcccaaggcgggtagatcacctgaggtcaggagttcgagaccaacctggccaacatggtgaaaccccatcgctactaaaaa

SEQ ID NO: 680313 - DNA, 554 bp, Homo sapiens
ggctcatgacatgaggctgcctcctggaatggcttggagtgccacagtcacctttgttacagcattgacagatgtcagccgagccttccactgggaaccagctgagatgaaagagaagcagcttagatttttgttgcctgcaggaagcagtttgctgataatatattgggggaaatagacaaggggtcgccgattcagtttctactccagtcacggagcacctgtcctcctcacctgttggaaggcttgctgaaggaacaggccttgttgagttcatctgggtcctgctcagctagggtgaccttcaggtggcaggtgatgtatatctgcaaggaataacagctatttccaggccgagttccaggctgtgcctgggagtttaacacaccagttctcttataaccctcaaccctttaaagagtgagaaggggccgggtgcrttggcacacacctataatcccagcactttgggagcccaaggcgggtagatcacctgaggtcaggagttcgagaccaacctggccaacatggtgaaaccccatcgctactaaaaa

SEQ ID NO: 680314 - DNA, 609 bp, Homo sapiens
gtatttaataaactcattgttatagatattgatagtgagaatatagtgatcagaggatgctaaacagagacccaggatgtggactattgaagaaggactcccttaattgtcttcatgcattcagatgaagacatgtgatagagatggaccttcaggaatgcctgtgctgtaaataaggaaataaaaagagtctccyggaaacagggaagcaagagaccccaggatcttcacatcagccagaggtgcaggatgctctggaccccagaaagaataggagaaagatcccaggtatgacacatacccagagacaccatgctcatgttctgcagatggttcagagcctgcagttggaaagtccctgtgttttgcaatttcccttcctttggttttggttttaatgtggatttcaaaaaccttagcgtgaaaaactaaaatgaaacttaagactgcccaattcctgcagttgtttgttccagcagccagaatgcattccctggggaggtggccattctgccctttctctctctcctccttttctctaactccttcctagttagccattatctaaagcggatgcaaaaacgtgctcataatttaggaggtggtgaa

SEQ ID NO: 680315 - DNA, 1541 bp, Homo sapiens
tggcagctcagattcttccagcgtcacctaaagtgagggtggcacgaaggggatccatctgctgttctttcgcattgctggccccacagaggcttgtacaagttcgagcttcttagaaaagacaccatcatgcctataatcccagcactttgggaggccaaggtgggcagatcacctgaggttaggagttcaagatcaacctggccaacatggcgggactccgtctctactaaaagtacaaaaattagccaggtgtggtggcaggcacctgtaatcccagctactcaggaggctgaggcaggagaattgcttgaaccccagaggtggaggttgcattgagctgagatcacaccacagcactccagcctggacaacaagagcaagaccccgtctaaaaaaaaaaaagacaccaatgtgatactgggcgctattcttgttcatgtaccaggacgaagctgtataaaacaagtgtaaccccttaggtttctatgtaccagttctgtagatctacataaaaattaggggtctgaatgcttagggggttctgtgtaggtaagtcagtttctttagagcaatgaagttgtcaggctgcagtcaggccaacagcaggatcccaagccccagtgaaggggtttaagtaaacaatgctggcttaatgatgctgagttctctttaatgggccagggctaccatagcacaccaggtttctccatacaaagctggattctgtgaattcagatttctgtaaaattaccaaggctttggcacaatgaagcacagttctgaagaaaaaggcaggattctgtgtagccgggtaaatttctgtgtaacaaatccgggttatgtagaataaagatgatctctggatatcaatattggagtctgttgaaaaatcctgaagcagagtggagttctggagaaccagtggagttctgcctggagagcaggcaggtgtgtccacaaagagtgttctgggtcaagtgcagggttttgtataacaatggcatggttctgtgtttggggataaaaaagcagatttccagaaggcaaagaggggctctgtgtactgaatgagatctggatacagtaggggcctacataacaaagcagatttttctaagagcttgaagagattacaattctcaatgacaaagcaatcatgcacatgggttctgtataatacggcagggtcctgtgtgacaaaacgaggcacagcacaccttgtgtgatctggcccaggtcaggtgcctctcctagctgcaagggaggctggaaagtgatcaactggtrctcttcatctggacgatgggaagctagccctgacacaagagtggggattcctttaacatgggaaggggattcagatgttggacagccaaaaagaatgacacctccagcccccaagtctctctgcacctgggacatctctatctggaggccatgcacacacccaactctatgtgtcccatactgagcttgtcacctttccccaccagattggcttatctctccagtgatgacatgggactaggtatagcacc

SEQ ID NO: 680316 - DNA, 1438 bp, Homo sapiens
aaccccagggaggggtctgaggggcgtccttgtgaggcagggggctccagcagccctggcaggagtccccattgcttgctcctcactaggtcccgggcacgaaagggcgccacactgccaggtcccgggcacgtgtgcgggcctcccaggctctgtgctcctggcacaagagggcaccacactgaggcatgccctgctcggaccccagacgctgtcatggccggagctttgtcataactggggctgggacggccctgggagcacagagccttttgttttcaggctgactgggaagacggtcacagggtgtggggtgcagagcagggaccagaggtgtggggttcatcrgtcggggagaagggggtctgttggttctctcacctgtggggtcttgccagcctggctctgtccttggggccgcacggggaccccaggagttcttttgaggttcagacttgactgggacagttttgctttttcactgtgccgtggttgggcccctggagaaccctgggtccttggaggcgtcctgcagagctggtacgcggctcacctgcctgctgtggttgcagggtggactccgacgaccagtggggagagtactcctgcgtcttcctccccgagcccatgggcacggccaacatccagctccacggtgagtcctgcagccaggggtaccgggcaccaccgactgtcgggagaagttgttggcctgaggcacccggcacatcccagagccctggccccctgctccctggaggggaacagccctcctgcgggaggccggggatgggggcgggcctgcggttccaggctcctctctctcaccctcctgtcagggcctcccagagtgaaggctgtgaagtcgtcagaacacatcaacgagggggagacggccatgctggtctgcaagtcagagtccgtgccacctgtcactgactgggcctggtacaagatcactgactctgaggacaaggtgagaagccaaggaggctgggggtcctggacccagccctcaggactgggtgagaggcctagactgggggtcccggacccagccctcaggactgggtgaggggcctagactgggggtcccggacccagccctcaggactgggtgaggggcctagactgggggtcccggacccagccctccggactgggtgaggggcctagactgggggtcccggacccagccctccggactgggtgaggggcctagactgggggtcccggacccagccctctggactgcagccctccagactgggtgaggggcctagactgggggtcccggacccagccctcaggactgggtgaggggcctagactgggggtcccggacccagccctccggactgggtgaggggcctagactgggggtcccggactcagccctccggactgggtgaggggcctagactgggggtcccggact

SEQ ID NO: 680317 - DNA, 599 bp, Homo sapiens
ggtttcttttggggtgatcgacatgttctgggattaaacagtgctgatgactgcactcctttgtgaatatactaaaaaccactggattgaacactttaaaagaattttatgatatatgaactacattttaataaaaagaaaataagggcagaacatatatggtaggaggtggttaacctacttgacaaatttatctcatcatcataaacaatacagtaatcattaataagatatmtatttaataaatcatgcccaatttagcaacaccttgaagtagatggtttgaggttaagtattatggccctgaaaatggtaaaaatattacttttgaaacattttgtagtatcaaacttttaataaattctatctggcttccaatagctatgtacattaggcaggtattatgggctgaactgtctcccccacaaaattcttatgttgaagttataactcccagtaccttagaatgtgactgtgtttggagatagggcctttaataaagaggtaactacgtaaaatgaggtcctgtggttgggccctaatctgatacgagtggtgcccttctaagaagagattaggatgcaaacaggaacagggga

SEQ ID NO: 680318 - DNA, 1446 bp, Homo sapiens
tgcagagctaccaaaaaatatatacaattacaggaatacagagatagctgcctgtttacacagttaaagaaaggcttccctcagggtgcagcaacattgttctttaattttctctggccacagctgcctgctgttttactctgtatatagtcaagaatagatkatttcatttctggaaaaagtaggatgatagactaagcaggggttccaccttgggaccctgggttcaagtcctggctctgcctctaactggcaagtcaccgaatctcatggagttttgaaatatctgataaactacatatggacagcttttattcaaataaatatgaccaggaaaaatctccctactaaatgcatctctccttagaaatcttatcacggttgtcattttataggtttttctgggttaatctttgatgaatgttggtccctatggcagacgttgttagtgcctcccctacagcctctcattttagggggttcaaccagtttctgtgtctctggttctgagaccttttattggaatcccggaaggcgattgtcttgcaggctataaatgctaaagaattaacagccagtggcagcagcagtagaccagttattctctggagttgatgtataaacaccccaatctcttaccctttgggaggaatgattctgaagtatgtatttttaaatatttttagcttcccatgggtttaagcttcagtagttcactgtggcatctggcttaatagcaccccctttattgactaccttctctttcctgtgtcactacaccacttctctaccagtgtcacctgaacctacaaagtaaactacttgcactggaatccttgcctcaggatctgcttctgaggcatcccagcctaatataggctttttcataagactttaagcctcaaaatcactgtgtatgacttattcaccatcatccaaagcctaccacagcatatggtaataggacctcagaaataattgaggaaaaatggaggaaatgtttattattgctgctgttgctgctgctgttattcagtgtgtaacacacaatcaacccttcactgagcagagtcaacaattcatctctgattcttggaaaaaatcaggtttagggattcctgtttttcattagtgaaaatgagaacagggttgggaatccaggtctttggggaaaggctgtcaggcaaaaggtcagaatcccagaggcagaggggatttgatctttagtgtgagagcctctgctgacagatacttaccgtctaaaggaggtaatccagaattaaagtcaaattgacaagccattcctgtaattgaggctaaaagcaagataagcgagaagctgtagatatagttagtggcatgaaggacaggcatgtcacctctggaaaaagtacgagttaagccggcacaccacctcctagtgccagtgactcagaggtttcagtg

SEQ ID NO: 680319 - DNA, 631 bp, Homo sapiens
aataggtaaatagtcattatcctaaaccccctaaataacctccccaccatcctggctcctgtggtctgcccaagaacctgtcagactgctccatcattcagcaactaaagggcaaacaactaaccaaaggatcccctcaagaatcctgtttcataaatcaacaagcaagaggaaaatccattaaaaagtgggaaaagaacatgaacagacacttctcaagagaagacatacaagcagccaacaagcatattttaaraaagcacatcattactaatcatcacagaaatgcaaatcagaaccataattagataccatttcacaccagttaaaatggctattaaaagtcaaaaaataaatattgatgagattgtggagaaaagaaaattcttatacattattgatggcaatgtaaattagtacagtctctatggaaaagagtatggagatttttcaaagagttaaaatagaactaccataaatcattctaccaaaaagacacctgtactattatgtgtattgcaacaccattaacaatagcaaagacacggaatcaacccaggtgcccatcaatggtagactgactaaagaaaatgtgatatatatatgtatattatatatatattatatatat

SEQ ID NO: 680320 - DNA, 631 bp, Homo sapiens
aataggtaaatagtcattatcctaaaccccctaaataacctccccaccatcctggctcctgtggtctgcccaagaacctgtcagactgctccatcattcagcaactaaagggcaaacaactaaccaaaggatcccctcaagaatcctgtttcataaatcaacaagcaagaggaaaatccattaaaaagtgggaaaagaacatgaacagacacttctcaagagaagacatacaagcagccaacaagcatattttaagaaagcacatcattactaatcatcacagaaatgcaaatcagaaccataattagataccatttcacaccagttaaaatggctattaaaagtcaaaaaataaatattgatgagattgtggagaaaagaaaattcttatacattattgatggcaatgtaaattagtacagtctctatggaaaagagtatggagatttttcaaagagttaaaatagaactaccataaatcattctaccaaaaagacacctgtactattatgtgtattgcaacaccattaacaatagcaaagacacggaatcaacccaggtgcccatcaatggtagactgactaaagaaaatgtgatatatatatrtatattatatatatattatatatat

SEQ ID NO: 680321 - DNA, 631 bp, Homo sapiens
aataggtaaatagtcattatcctaaaccccctaaataacctccccaccatcctggctcctgtggtctgcccaagaacctgtcagactgctccatcattcagcaactaaagggcaaacaactaaccaaaggatcccctcaagaatcctgtttcataaatcaacaagcaagaggaaaatccattaaaaagtgggaaaagaacatgaacagacacttctcaagagaagacatacaagcagccaacaagcatattttaagaaagcacatcattactaatcatcacagaaatgcaaatcagaaccataattagataccatttcacaccagttaaaatggctattaaaagtcaaaaaataaatattgatgagattgtggagaaaagaaaattcttatacattattgatggcaatgtaaattagtacagtctctatggaaaagagtatggagatttttcaaagagttaaaatagaactaccataaatcattctaccaaaaagacacctgtactattatgtgtattgcaacaccattaacaatagcaaagacacggaatcaacccaggtgcccatcaatggtagactgactaaagaaaatgtgatatatatatgtatattatatatatwttatatatat

SEQ ID NO: 680322 - DNA, 631 bp, Homo sapiens
aataggtaaatagtcattatcctaaaccccctaaataacctccccaccatcctggctcctgtggtctgcccaagaacctgtcagactgctccatcattcagcaactaaagggcaaacaactaaccaaaggatcccctcaagaatcctgtttcataaatcaacaagcaagaggaaaatccattaaaaagtgggaaaagaacatgaacagacacttctcaagagaagacatacaagcagccaacaagcatattttaagaaagcacatcattactaatcatcacagaaatgcaaatcagaaccataattagataccatttcacaccagttaaaatggctattaaaagtcaaaaaataaatattgatgagattgtggagaaaagaaaattcttatacattattgatggcaatgtaaattagtacagtctctatggaaaagagtatggagatttttcaaagagttaaaatagaactaccataaatcattctaccaaaaagacacctgtactattatgtgtattgcaacaccattaacaatagcaaagacacggaatcaacccaggtgcccatcaatggtagactgactaaagaaaatgtgatatatatatgtatattatatatatawtatatatat

SEQ ID NO: 680323 - DNA, 570 bp, Homo sapiens
tgaaggtgaaagaaacaatattttttaaaaaaatcaatggagatcaaacagcagattttagtttaaaaaaaagaatcagaaaacttgaagatgcattaattgagattgttcagtcaagaaagagaaaaaagaactatgaaacatgaacagagcttcagagacctgtagggcaccatcgtgcaagccaaataaacatgagtcacaggaggagaggagacaagagaaagaagctaaaatagctttgcaaaaagaatggtcaaaaacctcccatatttggtggaaatcattaagcactgtgaaattcaaaaaactcctaatagaataaattcaaaatgggccaaacccagacacattatagtcaaactggcaaaatatggagtgcagaaataggcaatcagagctggtcatttagtatatagtataagcggcatttcaattcactgaggaaaactgcattgttgttaatacagttgkgccatcaggttagtaatttagaaaacctaatatgtatctccctaggttcatctgcatcatcacaaatgacataatttccttctttttaaggctgta

SEQ ID NO: 680324 - DNA, 570 bp, Homo sapiens
tgaaggtgaaagaaacaatattttttaaaaaaatcaatggagatcaaacagcagattttagtttaaaaaaaagaatcagaaaacttgaagatgcattaattgagattgttcagtcaagaaagagaaaaaagaactatgaaacatgaacagagcttcagagacctgtagggcaccatcgtgcaagccaaataaacatgagtcacaggaggagaggagacaagagaaagaagctaaaatagctttgcaaaaagaatggtcaaaaacctcccatatttggtggaaatcattaagcactgtgaaattcaaaaaactcctaatagaataaattcaaaatgggccaaacccagacacattatagtcaaactggcaaaatatggagtgcagaaataggcaatcagagctggtcatttagtatatagtataagcggcatttcaattcactgaggaaaactgcattgttgttaatacagttgggccatcaggttagtaatttagaaaacctaatatgtatctccctaggttcatctgcawcatcacaaatgacataatttccttctttttaaggctgta

SEQ ID NO: 680325 - DNA, 437 bp, Homo sapiens
gggaactattattaaaaaacaaacagagcgggtgcrgtggctcacacctgtaatcccagcactttgggaggccagcgtggtggatcacttacggccaggagttcaagacaagcctggccaacgtggcgaaaccccatctctactaaaatactaaaaatacaaaaattagctgggtgtgtggtgcacacctgtaatcccagctactccggaggttgaggcataacaatcacttgaacccgggaggcagaggttgcaaaaacaaaacgaaacaatttggtcaaatacattgggggagcagaggccggggctgtttctgtctccttactgcagcctgacagcttccctagtgattagcagtgacaaggtccccacctccccttattccaggaccccaacaggatcccacccaacaggcagacctcctaagggctagagct

SEQ ID NO: 680326 - DNA, 621 bp, Homo sapiens
gtgtgtgtgtgtgtgtgtgtgttgttattgttgttttgagacggagtcttgctctgtcgcccaggctggagtgcagtggcgcaatctcgactcactgcaacctccgcctcccgggttcaagctattctcctgcctcagcctcctgagtagctgggactacaggtgtgcgccaccacgsccagctaattttttttttttttttttttttttttttttttagcagagacggggtttcaccatgttggccaggatggtctcgatctcctgacctcatgatccacccacctcagcctcccaaagtgtagggattacaggcgtgagccaccgtgcctggccaacaaatgtgtgtgttgagtgattcatgagcttggtgacctcagacactctgaatttcattaagtgttgtcagcagtgaaaagggaatatgctcctctaccttgatatcaggtgggtaaagcatagtaagaacttgataaagagcattccctctctggcctggtaccagctctagatcttcctcaaagcccagcacagggctgagcacagatctgcttgatgatggcattttataacattacaattctaatattcaattaacttaactgaatgtctgttataaca

SEQ ID NO: 680327 - DNA, 594 bp, Homo sapiens
ttttaaatatcaatttgccccaatgctacacacccaccaaccatcacttctgacaccttgcattcatttttcttaccttcccgatagtaaggattgmctttcagccttgtttatgcacgaatcagcattctcccaagaacagaaccaagaggatatatgcatttagaaagacgaagaaatttattttaaggtattggttcacatgatcgtggaggcttggctagtccaaaattgcatgggagagaccaacaggttggagtcacaggaaagaggtgcatcaagtccaaaggccgtctgctggagaattccctcttaactggggcggtcagtcttttgctctatttgggccttcaactgattggatgaggcccacccacatgatggagggtaacctgctttatttgaagttcactgatgtaaatttaatctctcttccaaaaatactcacacaaaacacccagaataatgtttgaacacacatcaaggcaccaaggcctacccaagtggatgcataaaattacccatcacagtttgattccattttcatgaggtgccaatctggtaaaccgtctccaaaaattatgaatatctgta

SEQ ID NO: 680328 - DNA, 594 bp, Homo sapiens
ttttaaatatcaatttgccccaatgctacacacccaccaaccatcacttctgacaccttgcattcatttttcttaccttcccgatagtaaggattgcctttcagccttgtttatgcacgaatcagcattctcccaagaacagaaccaagaggatatatgcatttagaaagacgaagaaatttattttaaggtattggttcacatgatcgtggaggcttggctagtccaaaattgcatgggagagaccaacaggttggagtcacaggaaagaggtgcatcaagtccaaaggccgtctgctggagaattccctcttaactggggcggtcagtcttttgctctatttgggccttcaactgattggatgaggcccacccacatgatggagggtaacctgctttatttgaagttcactgatgtaaatttaatctctcttmcaaaaatactcacacaaaacacccagaataatgtttgaacacacatcaaggcaccaaggcctacccaagtggatgcataaaattacccatcacagtttgattccattttcatgaggtgccaatctggtaaaccgtctccaaaaattatgaatatctgta

SEQ ID NO: 680329 - DNA, 774 bp, Homo sapiens
aggtctgttaacggaagaagcttcagggacaaggggccacggggcctatgctaccaggcgctactgccacatctccttctcagagtaaaggatccagtgctcttacagtgaatctctgtggctgcacttagctgcacttccagacatccatcagtgtgggcaacaccaggcaacactcactccactgcagtgcggctcatgccgatgctccgggcagagaccaccccagctgcctgcaggaggagtctcaggaccgcactgtgtcataaacgaatgaatgattttggagcaattcagtcgtctattaatctgttttatatatatccattttgcttttctcttaaaaatacagcaaaattaactgtgagcttttaaagagtagagaccacacrtcttttgtttcatattctttcccaattttgcttgaagtaatgtcaatccttaaatgtgaatcagaataacttcttcagtcatctttacctgtgcctgtttatttcatgcctgtttaatatctcgtatgggccaggcttgattactgcttgaaggaaataaagttcctcctcgcagttactgttctcggggagggtgttttgaagggaaggtagtctatattatagaggacaggtaagtgggacctttgtttaagttgtattatattttgttcatttttgaataagtctacatattttatctcatctgatcctaaaaaaaataaaaataaaaaaacagtgaggaaggtagagaagaaaatgtctctgggccacaattatctca

SEQ ID NO: 680330 - DNA, 774 bp, Homo sapiens
aggtctgttaacggaagaagcttcagggacaaggggccacggggcctatgctaccaggcgctactgccacatctccttctcagagtaaaggatccagtgctcttacagtgaatctctgtggctgcacttagctgcacttccagacatccatcagtgtgggcaacaccaggcaacactcactccactgcagtgcggctcatgccgatgctccgggcagagaccaccccagctgcctgcaggaggagtctcaggaccgcactgtgtcataaacgaatgaatgattttggagcaattcagtcgtctattaatctgttttatatatatccattttgcttttctcttaaaaatacagcaaaattaactgtgagcttttaaagagtagagaccacacgtcttttgtttcatattctttcccaattttgcttgaagtaatgtcaatccttaaatgtgaatcagaataacttcttcagtcatctttacctgtgcctgtttatttcatgcctgtttaatatctcgtatgggccaggcttgattactgcttgaaggaaataaagttcctcctcgcagttaytgttctcggggagggtgttttgaagggaaggtagtctatattatagaggacaggtaagtgggacctttgtttaagttgtattatattttgttcatttttgaataagtctacatattttatctcatctgatcctaaaaaaaataaaaataaaaaaacagtgaggaaggtagagaagaaaatgtctctgggccacaattatctca

SEQ ID NO: 680331 - DNA, 774 bp, Homo sapiens
aggtctgttaacggaagaagcttcagggacaaggggccacggggcctatgctaccaggcgctactgccacatctccttctcagagtaaaggatccagtgctcttacagtgaatctctgtggctgcacttagctgcacttccagacatccatcagtgtgggcaacaccaggcaacactcactccactgcagtgcggctcatgccgatgctccgggcagagaccaccccagctgcctgcaggaggagtctcaggaccgcactgtgtcataaacgaatgaatgattttggagcaattcagtcgtctattaatctgttttatatatatccattttgcttttctcttaaaaatacagcaaaattaactgtgagcttttaaagagtagagaccacacgtcttttgtttcatattctttcccaattttgcttgaagtaatgtcaatccttaaatgtgaatcagaataacttcttcagtcatctttacctgtgcctgtttatttcatgcctgtttaatatctcgtatgggccaggcttgattactgcttgaaggaaataaagttcctcctcgcagttactgttctcggggagggtgttttgaagggaaggtagtctatattatagaggacaggtaagtgggacctttgtttaagttgtattatattttgttcatttttgaataagtctacatattttatctcatctgatcctaaaaaaaataaaaataaaaaaacagtraggaaggtagagaagaaaatgtctctgggccacaattatctca

SEQ ID NO: 680332 - DNA, 1384 bp, Homo sapiens
gcagtttacaggcatggctgaactggatttgacatttccgtgaccatttgggcagtgcaaagtgtctttctcttttttaaatatcaaacctcaaatgcgagtccagacagctcagagatctttgagtcccctgaactgagatctggtctctgtgtgtatgtgggytcactgttactgcaaagtagaaaacattctgccactttttgtagctgtcagatgtgcggcagctcagctgtcagtaataggagtaaatcattcagtcctcatcttgaatgtaaaatatcacctgaatttcaatcaagttgtgagtgcaaagaatttgccagtcatctaatccaagagaggctgtgattagcaagagtcttccaaagcaacttgagagattaggcatgggtaagtcctaaatgatcactcaactgaagccacgtggatttccttggaacatgaaaattcaaataagttacacagcaggctgtggagccataattatcaattcaagaattgataagaacattcaaagtttgagtaagtgtgcatctcattgttttcttgggcccacaaataactctgaaaatatgggttgctgtagaattctctaggctcaggttcaccttgctccgatgacacttcttaacattagacacaggggaagggatgcaatgagtatcacatggaatatccttattcagagcagaagagagaaatgtaattagcaatcctttcattctttattttctgaagtaaaacgcagagaggggttagggggagggcaaagaccataaggtttctaataaaggtgtaatatgaagatttggctctttcatgccatgcaagttataagtagaaacttatttggcggtagattgatgtaatgagtcaataatgttgccttatcagtataattaacctcaatccttaacttcagcctcagccctaaatatacaggtttccctagcacatgatggcatcacgtaagttaggaatgatggatgtggttgggcatttaatgaaaaagcattactccatacacgtttctatcctgtttatgcaagaaattatgctgaacaacacaatggctaaaaaagaaaaagagtgggaaaaatgagggaagcagatgcattttcataaacaagcaattaggtcagtcagagaacccacggaccgaggactgcgaaccgcccctagatgggggcttgtcgtctcgggagtggggagggtcctgaagagtaagcccctccatgcggcgattacttccctgcgaggtgtcttgaacccagagactcacacctccgtccagagtcaagttctgaacccacggcgcttctctctgccaggcaacaggtgtctgccgtgggtgtggttaagccagctgggtatttgttca

SEQ ID NO: 680333 - DNA, 633 bp, Homo sapiens
tgattgtgcccctgcactccagtctgggcaacggagtaaacctgctccaaaacgaaacaagagatttttacacttccttaactgcacgatattcagatttcggccttagttatgccaaaaatggagaactacttaaatatattcgcaaaatcggttcrttcgatgagacctgtacccgattttacacggctgagattgtgtctgctttagagtacttgcacggcaagggcatcattcacaggtaaccgcgggggtggctgggtgggtttgcaggacgtcagtttgatgatcagggccagtgaccgtttggctcacaggccacggctgatgcccagatggcccccgcccttgaggtcagccaggttggagtgctccctggatgggtgggactgagatgcctgcctgtgccacagcctgagtgccaaggcgaggccacacgtccacggagcgctgacgtggagaggctctcctgccaataccacatgcaatggttgcgtgtctttcctggcgagctaatgattcttttcaccatcttgactgatgctttttatctttttcagttgtagcttctgtgtgtacttctttctggtctcgtttttcatgactttctgataaagtcagctcagaagtgtg

SEQ ID NO: 680334 - DNA, 1452 bp, Homo sapiens
ggttttgttgttttaacttttttcaaccagcagatactgagttgtcttttcattattattgaattcttttttaaaacagagatggggtcttgctgtgttgcccggtctcatcttgaactcctaggctcaggcgatcctcccatctcggcttcccaaagtgctgggattacaggcgtgagacatggcggccggccagatactgagttcttagcatggccagacactgctttaggtcagagcttcccaactggagtgattctgctccccaggggacacttggccctgtctggacagttttagttgtcacagctggagcaggggtacggctggcatccagcgggggaggcgaggatgagctgctcagcatcccgagacccagaggacagtccctcccacaggtggggggtgggcggggggggggcgcgacgtacccggctttcaaagtgcttgtcgtcgccacctaagagctagcgtttcctcgtttgtagattttactttcagggcggagggccactttagcattggtgcagaaagatctccaagctctacgaatatacgcataggatcctgccctcttcgaaaaaggaggaatgtgtattcacgttttctcgtttgcgcgtttcaggttctctggagggatagacactgaacggatgatggtagttgtctatggggtgagggaacaggtttatgaggaaggcatttctgcatctctttttatgcttttgaattttttaatcatgtgatattaaacatagttaagaacttttattataaagaattgaaagaggccgggcgtggtggctcacgtctgtaatcccattactttgggaggttgaggctggcagattgcttgaggccaggagttcgagaccagcatggccaacgtggcgagaccctgtctctactaaaagtaacaaaaattagctgggcctggtggcgagcgcctgtaggcccagttactcgggaggctgaggcggacgcagaggttgcagtgagccgagattgtgccactgcattccagcctaggtgacagagtaagaccctgtctcaaaaaagaaaaagaaaaaagaaaaaaaagaaaagagaaattaattatgaagaggtcttagaaaataaatctccaaacccacttatagtcacagataataattgggcgtacaggtatatgtctttccagtcattytttctgtgcattttatagctgtttgcgtggcttttatgccattcgagtcacgttggacaagcagttttgagccctgcatgattatataatgggcgcttccccaggtcattggaatgacttgtgggtgtcttgatcagtgtgtggttttctgtcgcatgaacagattgtggttcatgggcctgtttctgtactgttgtgcgttgaaggggtttccatggattcacacactggcgtgtgtctgatgcgccacccaacctgcatgggca

SEQ ID NO: 680335 - DNA, 1452 bp, Homo sapiens
ggttttgttgttttaacttttttcaaccagcagatactgagttgtcttttcattattattgaattcttttttaaaacagagatggggtcttgctgtgttgcccggtctcatcttgaactcctaggctcaggcgatcctcccatctcggcttcccaaagtgctgggattacaggcgtgagacatggcggccggccagatactgagttcttagcatggccagacactgctttaggtcagagcttcccaactggagtgattctgctccccaggggacacttggccctgtctggacagttttagttgtcacagctggagcaggggtacggctggcatccagcgggggaggcgaggatgagctgctcagcatcccgagacccagaggacagtccctcccacaggtggggggtgggcggggggggggcgcgacgtacccggctttcaaagtgcttgtcgtcgccacctaagagctagcgtttcctcgtttgtagattttactttcagggcggagggccactttagcattggtgcagaaagatctccaagctctacgaatatacgcataggatcctgccctcttcgaaaaaggaggaatgtgtattcacgttttctcgtttgcgcgtttcaggttctctggagggatagacactgaacggatgatggtagttgtctatggggtgagggaacaggtttatgaggaaggcatttctgcatctctttttatgcttttgaattttttaatcatgtgatattaaacatagttaagaacttttattataaagaattgaaagaggccgggcgtggtggctcacgtctgtaatcccattactttgggaggttgaggctggcagattgcttgaggccaggagttcgagaccagcatggccaacgtggcgagaccctgtctctactaaaagtaacaaaaattagctgggcctggtggcgagcgcctgtaggcccagttactcgggaggctgaggcggacgcagaggttgcagtgagccgagattgtgccactgcattccagcctaggtgacagagtaagaccctgtctcaaaaaagaaaaagaaaaaagaaaaaaaagaaaagagaaattaattatgaagaggtcttagaaaataaatctccaaacccacttatagtcacagataataattgggcgtacaggtatatgtctttccagtcattctttctgtgcattttatagctgtttgcrtggcttttatgccattcgagtcacgttggacaagcagttttgagccctgcatgattatataatgggcgcttccccaggtcattggaatgacttgtgggtgtcttgatcagtgtgtggttttctgtcgcatgaacagattgtggttcatgggcctgtttctgtactgttgtgcgttgaaggggtttccatggattcacacactggcgtgtgtctgatgcgccacccaacctgcatgggca

SEQ ID NO: 680336 - DNA, 2787 bp, Homo sapiens
ggctctgctttaaataatgccttccactttgatcaaacctaattcaaagggatttcttggatgcctcacatgtgatttgctgttcttcacagctttaggatatgtatccaatgttttcttcaggttttcttacaccagaggcatagaaagtacacattgttggccaggcgcggtggctcacacctgtaatcccagcactttgggaggccgaggcgggtggatcaccaggtcaggagatcgagaccatcttggctaacacggtgaaaccccgtctctactaaaaatacaaaaaattagccgggcgtggtggaggacgcctgtagtcccagctactcaggaggctgaggcaggagaatggcgtgaacccaggaggcggagcttgcagtgagctgagatcgtgccactgcactccagcctgggtgacagagcgagactccatctcaaaaaaaaaaaaaaaaagaaagtacacattgttaattgtgttggttattttttctagaatgaaaccattacagtgtaaagacagatttgatggctatcttgtgggaagggaggacacaaggtatgtgatcttgctgcttcatgtaataattttggaaatattatctgtttcttgccagagcactctataccaaagcgtcaagatacttcaacgcacagggaatggattgttggtaagggtttactttgttttctgtcatggggttttgttataaaataccacacaaagaatgctagaaatgtggatttttgtaggtactttaagttgaaaaaaaaagcctcagttatctacctattttaaatagcaaattgggctttcctactatttcctttctacaagtacttctctaagtgcagacctcatcttagcaggctattagatacataggtgaaatctatgttttgatgtgtaggatgcaagcttggaaggtacattggtccctttcacagagataatgctgcctaacacacaatcccaaacctcagtgccttctaagtataaatgttcattttccctgctggtttgacagcaggcttctctacacatcttcccattgagagacccggcctgaaggagcagctcctgtctggggcacctcatgtcctcatagtggaggacaggagttcaggggatgagtggaggcacaggttgtcctttaagctcagaatgggcaccctgccccttcaccagcgttccattggccaaagcaagtcacatggtcacacacatcgtcgtctggctggggaagtatactccacgctctgggaagccatccaaggagcatatcaataatcctgaacagctaatgcaatctacctaccacaggggccatgtgtgggctgcaagcattccctcagcagacacagagctgcaaggctgggttgtattcatcttgtatctacagtaccaatgggcaactcagaagatattttttcattgaacggaatagtctgtacatgasaggttttgggtatcagccccacaggataaaactaaatgttcctccttccacttttctcagtgagaccaacatcatggctcagctcctttgaagatgtttagatttactctgctccaggaccctcgctatgcctctgatcacagttgccatttcataggtgtgtgtctcatgccaggggaacctggaaacacaccagtgactacgtgcaggtgctttgctacctctgtgaacagggcgagggtgtgcagtggtgcaaggcctttcatgaggggcccagccaagggggttagtcgagggcagaaactggccattgactgagttgccaggctctgtgccctgaggtccctgggcagaaaaggccccatttccaatttgcaccaagctgccatgtgggttggcagaggactcgtctttgcttgtgttgtagtgcaaagactatgggttttgtagtgaaaaaaaaaaaagttcggtgcaaatcccagcattgtcgtatgtttccccagcatggtgaccgtgaagaggctgagctgcctcatttgtgaagggaacctaacaaacagtaccttccttcctgcctcgttgtgagtttccagcaagtccagcaaggccattcctatcaaggactagcccagtgtctgggctagagtaaatgctcactttcagctcatctccttccctgccctcaggggcctgggtgggttctgtcttcctcttaactagcaggtccaggtcgtggtgttgcagagctgagttacagtacttgaatcaatatgcaaattgtctaattaaaactttctatgacttgataccctgataactgtggctgtgtctttcaggagagagtaactaggattctagcttctctggattttgctcagaacttcatcacaaacaatacttcctctgttattattgaggtgagccttcttttttaaagtaagcgtgtccataagtgggcacttgaatgttacagattaaatatttataatgtttaagtatgctgtcatcattttaatgcttctactcatcttttgtttctttccaggaaactaagaagtatgggagaacaataataggatattttgaacattatctgcagtggatcgagttctctgtaagtagtttatcttttatgaatgttaaggggggtcaagtttcaggatagccattttctagggtaaaatctggaagaaataaaattaaatttcccataatttggtaggaagtaagtgaaaggacattgatgtgcaggaccaagacttctggggcttcccaccaggtcagaggacagccacctcctggtcccctttgctcacctttgcca

SEQ ID NO: 680337 - DNA, 2787 bp, Homo sapiens
ggctctgctttaaataatgccttccactttgatcaaacctaattcaaagggatttcttggatgcctcacatgtgatttgctgttcttcacagctttaggatatgtatccaatgttttcttcaggttttcttacaccagaggcatagaaagtacacattgttggccaggcgcggtggctcacacctgtaatcccagcactttgggaggccgaggcgggtggatcaccaggtcaggagatcgagaccatcttggctaacacggtgaaaccccgtctctactaaaaatacaaaaaattagccgggcgtggtggaggacgcctgtagtcccagctactcaggaggctgaggcaggagaatggcgtgaacccaggaggcggagcttgcagtgagctgagatcgtgccactgcactccagcctgggtgacagagcgagactccatctcaaaaaaaaaaaaaaaaagaaagtacacattgttaattgtgttggttattttttctagaatgaaaccattacagtgtaaagacagatttgatggctatcttgtgggaagggaggacacaaggtatgtgatcttgctgcttcatgtaataattttggaaatattatctgtttcttgccagagcactctataccaaagcgtcaagatacttcaacgcacagggaatggattgttggtaagggtttactttgttttctgtcatggggttttgttataaaataccacacaaagaatgctagaaatgtggatttttgtaggtactttaagttgaaaaaaaaagcctcagttatctacctattttaaatagcaaattgggctttcctactatttcctttctacaagtacttctctaagtgcagacctcatcttagcaggctattagatacataggtgaaatctatgttttgatgtgtaggatgcaagcttggaaggtacattggtccctttcacagagataatgctgcctaacacacaatcccaaacctcagtgccttctaagtataaatgttcattttccctgctggtttgacagcaggcttctctacacatcttcccattgagagacccggcctgaaggagcagctcctgtctggggcacctcatgtcctcatagtggaggacaggagttcaggggatgagtggaggcacaggttgtcctttaagctcagaatgggcaccctgccccttcaccagcgttccattggccaaagcaagtcacatggtcacacacatcgtcgtctggctggggaagtatactccacgctctgggaagccatccaaggagcatatcaataatcctgaacagctaatgcaatctacctaccacaggggccatgtgtgggctgcaagcattccctcagcagacacagagctgcaaggctgggttgtattcatcttgtatctacagtaccaatgggcaactcagaagatattttttcattgaacggaatagtctgtacatgacaggttttgggtatcagccccacaggataaaactaaatgttcctccttccacttttctcagtgagaccaacatcatggctcagctcctttgaagatgtttagatttactctgctccaggaccctcgctatgcctctgatcacagttgccatttcataggtgtgtgtctcatgccaggggaacctggaaacacaccagtgactacgtgcaggtgctttgctacctctgtgaacagggcgagggtgtgcagtggtgcaaggcctttcatgaggggcccagccaagggggttagtcgagggcagaaactggccattgactgagttgccaggctctgtgccctgaggtccctgggcagaaaaggccccatttccaatttgcaccaagctgccatgtgggttggcagaggactcgtctttgcttgtgttgtagtgcaaagactatgggttttgtagtgaaaaaaaaaaaagttcggtgcaaatcccagcattgtcgtatgtttccccagcatggtgaccgtgaagaggctgagctgcctcatttgtgaagggaacctaacaaacagtaccttccttcctgcctcgttgtgagtttccagcaagtccagcaaggccattcctatcaaggactagcccagtgtctgggctagagtaaatgctcactttcagctcatctccttccctgccctcaggggcctgggtgggttctgtcttcctcttaactagcaggtccaggtcgtggtgttgcagagctgagttacagtacttgaatcaatatgcaaattgtctaattaaaactttctatgacttgataccctgataactgtggctgtgtctttcaggagagagtaactaggattctagcttctctggattttgctcagaacttcatcacaaacaatacttcctctgttattattgaggtgagccttcttttttaaagtaagcgtgtccataagtgggcacttgaatgttacagattaaatatttwtaatgtttaagtatgctgtcatcattttaatgcttctactcatcttttgtttctttccaggaaactaagaagtatgggagaacaataataggatattttgaacattatctgcagtggatcgagttctctgtaagtagtttatcttttatgaatgttaaggggggtcaagtttcaggatagccattttctagggtaaaatctggaagaaataaaattaaatttcccataatttggtaggaagtaagtgaaaggacattgatgtgcaggaccaagacttctggggcttcccaccaggtcagaggacagccacctcctggtcccctttgctcacctttgcca

SEQ ID NO: 680338 - DNA, 642 bp, Homo sapiens
aaaagaagggaaaacaaggtaggggagggaaatgagaagacagagtgaggcccaatgatgtgctgctcctgggggtggctcctgccttctgtcctctgagaatctccagcaccctctccccttcctttcctccacttcttacttcctccaatccattcactgtgttgcagccaggatcctcattgtaaaatctggcattcctaatgcctgtagtcacagtccatctttggaacatgactcaccggccctccatggtctggtccctgacaatccactctctccctacagccccgattctgcccccaaagagcagccatcatgaacaattggccaaatctctgtctgtaaacagtaaacrctgcatgtcacagccagtattcccacaatgtctacaatgaaaaggtgcataggtgaacatgggattcatgctttcttgttccagacccatctctcatttgatcctctcagtaaccaagtgttgagagagctgaagaaacctacccacatctctcagcgaaaaaaatgacatttattttatttccatattcccagctcttagaatggggccccgcccacaggaagagttcaatacagattggtgtgaagtgacagaaatgagcttttgtacaaggtctgcccaac

SEQ ID NO: 680339 - DNA, 642 bp, Homo sapiens
aaaagaagggaaaacaaggtaggggagggaaatgagaagacagagtgaggcccaatgatgtgctgctcctgggggtggctcctgccttctgtcctctgagaatctccagcaccctctccccttcctttcctccacttcttacttcctccaatccattcactgtgttgcagccaggatcctcattgtaaaatctggcattcctaatgcctgtagtcacagtccatctttggaacatgactcaccggccctccatggtctggtccctgacaatccactctctccctacagccccgattctgcccccaaagagcagccatcatgaacaattggccaaatctctgtctgtaaacagtaaacgcwgcatgtcacagccagtattcccacaatgtctacaatgaaaaggtgcataggtgaacatgggattcatgctttcttgttccagacccatctctcatttgatcctctcagtaaccaagtgttgagagagctgaagaaacctacccacatctctcagcgaaaaaaatgacatttattttatttccatattcccagctcttagaatggggccccgcccacaggaagagttcaatacagattggtgtgaagtgacagaaatgagcttttgtacaaggtctgcccaac

SEQ ID NO: 680340 - DNA, 597 bp, Homo sapiens
aacaaagcagaaaaggatctctatccatggaacagagaaggacaacaataacagtaaacagaatgaatcaggaatgggtatagcatgttagcaggtgataaggtgctctggaaggactgtagagcaggtgggggaatcagagtgctgggtggggtgggcaggtgggtatgaatagtccttggggtggtcaaggtgagccttgctggaaagatgggaacagggaaaaggcactgggcacatcagctgtgggataactgmaggaaaagttcaaaggcaggaatgtggctaagtagttgaatcaaggtaatgaggtccacgtggctgaactggaatgcctgcagggatggatggggaagatggtccaagagccttttgggagaatcaaggcagatgtgacaataccctgtctgtagtcattgagaggcactagacttaggccatggctatgaagccatgtcagggtctcagacacaggaacacaaagataacaattatgactcaataggatctctctgtcttctggctagagaataggtatgtcattgagggataaagtggaagcagagagaccctttgggaagctattgccacaacccc

SEQ ID NO: 680341 - DNA, 597 bp, Homo sapiens
aacaaagcagaaaaggatctctatccatggaacagagaaggacaacaataacagtaaacagaatgaatcaggaatgggtatagcatgttagcaggtgataaggtgctctggaaggactgtagagcaggtgggggaatcagagtgctgggtggggtgggcaggtgggtatgaatagtccttggggtggtcaaggtgagccttgctggaaagatgggaacagggaaaaggcactgggcacatcagctgtgggataactgaaggaaaagttcaaaggcaggaatgtggctaagtagttgaatcaaggtaatgaggtccacrtggctgaactggaatgcctgcagggatggatggggaagatggtccaagagccttttgggagaatcaaggcagatgtgacaataccctgtctgtagtcattgagaggcactagacttaggccatggctatgaagccatgtcagggtctcagacacaggaacacaaagataacaattatgactcaataggatctctctgtcttctggctagagaataggtatgtcattgagggataaagtggaagcagagagaccctttgggaagctattgccacaacccc

SEQ ID NO: 680342 - DNA, 625 bp, Homo sapiens
ctctcctaacatggagaatggagggtcaaggaaatgaagccacaagacaaggagaggaacattgggactagcatagtggaggtgcacaataaatttgagggagagtagcctaatagaaaaggcatgggttgaaaaaccaaactgatatcaataattactaatatttaaaattcttatgcattatagattaagctcttagcacagtgtctgatcatataaccactccatcaagactagctgttgagtgttgctaatattgctagagaaacacagttctagacctccctgttktaacttaaaataaagcattttattttaagcaggtagtcaataaatatttattagaaaaatttaatttacccttatacacaatttaaaacataattttataggaaaaagagccatctattttaaagcaaaaagaaagcattggtgaacaaacactaaaaatgaaaacagatgatctacaatcccagacttagagaataacgttgttactactttggaatataaccaaaactggggcctcttccaacatgtcaaaatatttttttctctcctgagatccacttgcttgggatcctaatagtttaacttgaatgcatttatcaaagaattgagccaa

SEQ ID NO: 680343 - DNA, 1281 bp, Homo sapiens
aaaacaactgttggagaggatggggaacaatggggactcacacactgttggtgagactaattaatgtctacttcggaaaacacatctagggcagttgaagagatgtgcatatcctaagacagagcaatttcagtcttatgaagggaaatgatcacattttatacatgggacaacatctatactagtgttgatagcataataatattcacaagaggaaaaactagaaaccacctaagtgatcatatttaatcatggaataaaattattgtcatagtaacgcaatggaaatgagctaattacatctgtacacatcagctcagtggctctggggttcacaacagctaagtcacagtgccacaatatcacagtatcgtgacttacctgtttattttataattctgaaagtgctcttacctctgttttgcacactgtggttgcttgtcgtgaatgaagaactataagaaaatatgttaaaattcaaagaatgttagtatttccccttggtggtaaaattccactcagaggcaaggtcaatgataatagcctgaagtcacagttataaagcactttatattttactggatatgctagaagaatcatttgttttgaaaagcactaggaggcatgttatcctcctttctcaagctggctatattagacgtggaacaaactgaccatataagttcttctcatgtcttttcagtgagcacgtatcattattctttactttttgaagccatgagtttaaacttgctttgtagctacagtcactatggaaaagaacattttgctggtgggggctcataatctatagaaactatttaccaattgaaagtcaaccataaagtggaagaagaatatagaaattattgtattccttctagaaatttgtgctgagtaagaaaacttagtggattatgataagaaaaaccccaaagaaaaagagattataaaactataagacaaacaaaataacaatatgcatttctaaatacaaaaatgatattatcaagactgttcatcagtggcttttcttagcactctacttaatacttagctctaattttctggttcattttgtattgtggtyagtatcatcaacataagctccaggtgctaccacagttaaatctaattacatgagtgatgctctattccaaggactgtgctattgactaaagcctctgggttaattaaatgaaacctgatccatttctagtgccaatgaaatcacctgagcatatatctggtttatgttgtcaccataaaagcctgaggtca

SEQ ID NO: 680344 - DNA, 1281 bp, Homo sapiens
aaaacaactgttggagaggatggggaacaatggggactcacacactgttggtgagactaattaatgtctacttcggaaaacacatctagggcagttgaagagatgtgcatatcctaagacagagcaatttcagtcttatgaagggaaatgatcacattttatacatgggacaacatctatactagtgttgatagcataataatattcacaagaggaaaaactagaaaccacctaagtgatcatatttaatcatggaataaaattattgtcatagtaacgcaatggaaatgagctaattacatctgtacacatcagctcagtggctctggggttcacaacagctaagtcacagtgccacaatatcacagtatcgtgacttacctgtttattttataattctgaaagtgctcttacctctgttttgcacactgtggttgcttgtcgtgaatgaagaactataagaaaatatgttaaaattcaaagaatgttagtatttccccttggtggtaaaattccactcagaggcaaggtcaatgataatagcctgaagtcacagttataaagcactttatattttactggatatgctagaagaatcatttgttttgaaaagcactaggaggcatgttatcctcctttctcaagctggctatattagacgtggaacaaactgaccatataagttcttctcatgtcttttcagtgagcacgtatcattattctttactttttgaagccatgagtttaaacttgctttgtagctacagtcactatggaaaagaacattttgctggtgggggctcataatctatagaaactatttaccaattgaaagtcaaccataaagtggaagaagaatatagaaattattgtattccttctagaaatttgtgctgagtaagaaaacttagtggattatgataagaaaaaccccaaagaaaaagagattataaaactataagacaaacaaaataacaatatgcatttctaaatacaaaaatgatattatcaagactgttcatcagtggcttttcttagcactctacttaatacttagctctaattttctggttcattttgtattgtggtcagyatcatcaacataagctccaggtgctaccacagttaaatctaattacatgagtgatgctctattccaaggactgtgctattgactaaagcctctgggttaattaaatgaaacctgatccatttctagtgccaatgaaatcacctgagcatatatctggtttatgttgtcaccataaaagcctgaggtca

SEQ ID NO: 680345 - DNA, 690 bp, Homo sapiens
aggaggctgaggcaggagaatctcttgaacccaggagacggaggttgcagtgagccgagattgtgccactgcactccagcctgggcgacagagcaagactccatctcaaaaaaaataaaaaaattaaaataaataaatttttgaaagatgtagaggccttgagaaacaagacgaatggtgcagaatctccaggctaggaacatktgggagccgtgagcatcagagactgaaggggttcagggagacagtggccacgggaacttctcctcccactctccaatgtcctataagaattgtttgttggtcaaacccagctggaaaccagagagcaaggaaaccccacgggtcagcctccctgggcacagagcagggccctggggagaaaatggaatttaaccagctcagtgtttatcaatacaagaatggttacattctcaacagagcatcagcatgtgcacatggggtatataaagccattaacagtccaggcatcaaggctcacacctgcaattccagcacttgaggaggctgaggtgggaggatcccttgtgtcaggagttagagacgagcctgggcaacacagtaagaccctgtctctacaaaaagtacaaaaattacctgggcatggtagtgtgtgcctataatcccagatagtctaaggaggctgagttgggaggatggcttgagccc

SEQ ID NO: 680346 - DNA, 690 bp, Homo sapiens
aggaggctgaggcaggagaatctcttgaacccaggagacggaggttgcagtgagccgagattgtgccactgcactccagcctgggcgacagagcaagactccatctcaaaaaaaataaaaaaattaaaataaataaatttttgaaagatgtagaggccttgagaaacaagacgaatggtgcagaatctccaggctaggaacatgtgggagccgtgagcatcagagactgaaggggttcagggagacagtggccacgggaacttctcctcccactctccaatgtcctataagaattgtttgttggtcaaacccagctggaaaccagagagcaaggaaaccccacgggtcagcctccctgggcacagagcagggccctggggagaaaatggaatttaaccagctcagtgtttatcaatacaagaatggttacattctcaacagagcatcagcatgtgcacatggggtatataaagccattaacagtccaggcatcaaggctcacacctgcaattccagcacttgaggaggctgaggtgggaggatcccttgtgtcaggagttagagacgagcctgggcaacacagtaagaccctgtctctacaaaaagtacaaaaattacctgggcatggtagtgtgtgcstataatcccagatagtctaaggaggctgagttgggaggatggcttgagccc

SEQ ID NO: 680347 - DNA, 652 bp, Homo sapiens
gcatcagaatgcaaatgaaaattaacttaatgaatattttacttgagccgggcacacttcccacaacagtataggatggctgtccttgtcctgttttgtagaggacggtgctaagcagcctattcattctcacaaggtctccaggaaaccacacttttttaaggagtagaattttggggtagggccgggcgcagtggctcacgcctgtaatcccagcactttgggaggccgaggcgggtggttcgcctgaggtcaggagtcgagaccagcctggccaacatgatgaaaccccgtttctactaaaaatacaaaaaataaattagccaggcgtggtggcgggagcctataatcccagctactcgggaggctgaggcaggagaatcgcttgaatccggggcaggggcgcggaggtttcagtgagccgaaatcgcgccacttcacactccagcctgggagaaagagcgaaactccgtctcaaaaaaawatatatatatatatatttgggtaggaagcacaagtagggaccgtgcttgctgccagaacaaccaatagaaactccttgaaggccttcctggcacaaacgtagtctccagcaccctctgccgaccaggccccgcgccctcagtgctgagacagcctccagccctcggtg

SEQ ID NO: 680348 - DNA, 605 bp, Homo sapiens
cgttggtcaggctgatcttgaactcctgacctcaggtgatccgcctgcctcagcctcccaaagtactgggattacaggcacaygccaccatgcccggttaatttttgtatttttttttctagtagagacggggtttcaccatgttggccaggctggttaacatagcatgtattgaatgaaagaatgaacaaatgaataaatcaattcgtggcaggcatttattgatatctgaatgggggtattaatgaatgaataaaacaatggagaaacaaattcatatataggggctcagtaagtttcattcaatgaaaggaaaaaaatgaagccatgagcaaatgaaggcagtgaatgaacgaacaacttgcacctagtcagaatttaacctgctttattttttatttttatttatttttttgagacagagtcttgctccgtcacccaggctggagtgcagtagtacaatctcagctcactgcaacctctgcctcttgggttcaagtaattctcccaactcagcctcctgtgtagctgggattacaggtgcatgccaccatgccccgctaatttttgtattttttgtagagacggggtttcaccatattggt

SEQ ID NO: 680349 - DNA, 627 bp, Homo sapiens
ggatgaatcttagaaatatcattttaaatgggggaaaacagcaagtaacagaagaccttacagaatatgatacagcttttatgaagctcaaaaaataagcaatatgttatttagggatacatatgtaaacaatcaaaataaagttttgttttgttttgttttgttttaaaaaaaaacaggaaaggatagaggtgtttcaagatcatggttacttcttgggtagagcaggggactggaagacagaggcccatccaaggcctagttcttaggttggaagtaagttctcagggcttcatcacttacttgcatgttgcagktcttgatacatgtgttatagttccttaaaaaaatttaaatgttaaggcccagcacggtggctcatgcctataatcccagcactttgggaggccaaggtgaacggatcacttgaggttacgggttcgagaccagcctggccaacatgatgaaaccccgtctctattaaaaatacaaaaattagccaggtgtggtggcacatgccaataatcccagctactcaggaggctgaggtggaagaatcgcttgaacccagggaacagtggttgcagtgagctgagattgtgccaatacactccagcctgggcaaca

SEQ ID NO: 680350 - DNA, 627 bp, Homo sapiens
ggatgaatcttagaaatatcattttaaatgggggaaaacagcaagtaacagaagaccttacagaatatgatacagcttttatgaagctcaaaaaataagcaatatgttatttagggatacatatgtaaacaatcaaaataaagttttgttttgttttgttttgttttaaaaaaaaacaggaaaggatagaggtgtttcaagatcatggttacttcttgggtagagcaggggactggaagacagaggcccatccaaggcctagttcttaggttggaagtaagttctcagggcttcatcacttacttgcatgttgcagttcttgatacatgtgttatagttccttaaaaaaatttaaatgttaaggcccagcacggtggctcatgcctataatcccagcactttgggaggccaaggtraacggatcacttgaggttacgggttcgagaccagcctggccaacatgatgaaaccccgtctctattaaaaatacaaaaattagccaggtgtggtggcacatgccaataatcccagctactcaggaggctgaggtggaagaatcgcttgaacccagggaacagtggttgcagtgagctgagattgtgccaatacactccagcctgggcaaca

SEQ ID NO: 680351 - DNA, 614 bp, Homo sapiens
gctctttttctgctgcacggtgttcagcaccgtgggtaagtgcaaagccacagtccccctcacggtggccctgtgaagggtgggtttctgggtggcaaaggacactggaattggggtgtggagatggccctcctctccctctcttcttccctcccttcctcaaatctatattgcacacctacaaatagcagcagctgcgctggccgacacctttgcactgaagatgcaccaggccctgttctaagacctttatgctgattagctcatctaatcctcaccaagaggtgggtgctgttattgttcccactccagcaggtccgtcagtttcaaaaagtcgcacagttcatgtgcgtttgaacccagccacttgggtctagacccagcaccctgctgcctctatgtataactttctatgcacctggcacatagaaactgggagggagatgcttcctcgtgcttatgagcaaaacgttggtttactggcccctttaaggacatgaccattgtggctggagggcagagaatgatcaggagagtggtaggggatgctgcaggagagttaggcctcctgggctgggggygtgatgccactgggtcagcagtaactaaggtcc

SEQ ID NO: 680352 - DNA, 633 bp, Homo sapiens
acaatgtgagactctgtctcaaaaaaaaaaaaaattgcactaaaatattacttattttgactactgagtttttttggtgctcccttcaattttgtatccaaggagtctatctcctgagctcaccttaacctagtcctggccccgaataatgatagttcaagagaagtcaagaggcagaggaggtgagctgaagtagtttaccctacaacacaggcaaaaagagctccaaatcaggaacagagtcaggtttcttgaggcaaccttgtacttttagactgaattgtctggaagactgcccccattttctcttctaaggcctttaactaaaatgttttgaaagagactgaaacttgtgtttgcctaacaaaatgaagtaaaaataaacaaacaaaaccctaaaaacaactcaagagaaaataacaacaaataaccctatcaaaaaataggcaaagagccaggcatggtggcttgcacctgtagtcccagctacttgggaggatggggcaggaagatcacttgagcctaggacttcaagttcagcctgggcaacataaagcccatctctaatttatatatatatatatatatatatatatatatatatakagagagagagagagagagagagagaga

SEQ ID NO: 680353 - DNA, 2346 bp, Homo sapiens
gcagactccaatgatggtagatgcagctggcccccaggatgggagcttcaccttgacttctgtctgttaaatttactgctgcatcctcagctccaaggccagtgcctggcaaagagatagtgctcagtaaatacttgctgcattttgtctgaatttgcatcgaggtgtggaaggtaagaagagttgctaggacraaagaaaccggggcatcttttgggaaaggggccaggatagaggagcagatgggggctgaaatacagggtggaaaagttgttttgtctgaagaagagcaggctcggggtcaggaccatgcctttccacctctgaatgccaccctggagcaggactggccccatcctgggtggcctgcagggagaggaggctgttgctggtaggcacattttgaggtggggggaaaggaaaaagtttgtaagagagctgtccagagaaggcatgactttcccttaagagttagcgagtctccaggtgtcaggagaggcttgactttgggagaatgttggagtggaaagtgtaacagagggatgtctggtcttttggcttccctgggtcacactgtaagaagaatcattttgggctgcacatgtcgtatattaacactgacgatagctgatgagctaaaaaaaatcacacaaaaaagaaatcacaaaaaaaatctcataatgggcctgatgcagtggctcatgcctgtaatctcagcactttgggaggccaaggtgggcggatcacgaggtcaggagtttgagaccagcctggccaacatgatgaaacggcatctctgtattttgtaaaaatacaaaaaattagctgggcatggtggcgggcgcctgtaatcccagctacttgggaggctgaggcaggagaatcgcttgaacccgggaggcggaggttgcagtgagctgagatcacagcactgcactccagcctgggcaacagtgtgagactctgtctcaaaaaaaaaaaaatctcatgatgttttaagagacttaacaaatgtgtgttgggtcacattcaaagccatctggactgcaggcctcaggttgggcaagcttaatatagcataagatagaaggtagaagtaggggacctttgaggtcccatgagtgtctgcaacttatagtccatatttgattgatttgcttctgctgaatcagagaaagatgaatctattcccctggattaaggagggatgttgaattggaccttgaagacactgagatggaggtaactgtggtcagaagagttgctatggatgggaccatgtgtgaataatcccatgttgtatggcttggtagagtaacatgtgccataggcacacgacagatgagggagaggagatcagagctactgcagtctgaagacccctggagaagggcaggaggccagagaaatcagggagacctccctgaaagaggtcaggtggacatattggagtgctcaggaagccctggggaggtgagactgaaggaattgtgagtaactagccaaagttgtggaatgagggatccggctcttactagcagagagtggttaaagacagaccagggaccaggcacggtggctcacacctatattcccagcactttgggaggccgaggcaggtggatcatgaggtcaggagttcgagactagcttggccaagatggcaaaacgccgtctctactaaaaatacaaaaattatctgggcgtggtggcaggtgcctgtaatcccagctactcaggaggctgaggcaggagaattgcttgaacccgggaggcggaggttgcagtgagccgagatcacgccgctgcactccagcctgggtgacatagcaagactccatctcaaaaaaaaaaaacaggagacaatgaagccgcaggtgagccaggtagttacaaaagaatgcgatctctcagcaaggggaagacccaaggctggggagaaagtagcacctggctggcttcttgaggaagcgttgccagcaaggagctctcacatcttagcagcgaccaaggtagtaggccatgaactgtaatagaggcagagggtttgttaagattttagaagcagacagtcctggtttgaagtcctgactcgactatgttccgaatgtgtgatcttggacaaatggcttaacctctgagccttagtttcctcatctgtaaaataagtcttaaaaaaaatctctccaaccctccaagagctggtgtgaagattagatggggtcatggatgtcagcatgatatgtaaactctgaagtgccctgtgcttatggaggtggccactaatggcatagtatggcagaatctctgaattagagagtgacgggaactgcctggggctccgag

SEQ ID NO: 680354 - DNA, 2346 bp, Homo sapiens
gcagactccaatgatggtagatgcagctggcccccaggatgggagcttcaccttgacttctgtctgttaaatttactgctgcatcctcagctccaaggccagtgcctggcaaagagatagtgctcagtaaatacttgctgcattttgtctgaatttgcatcgaggtgtggaaggtaagaagagttgctaggacgaaagaaaccggggcatcttttgggaaaggggccaggatagaggagcagatgggggctgaaatacagggtggaaaagttgttttgtctgaagaagagcaggctcggggtcaggaccatgccttyccacctctgaatgccaccctggagcaggactggccccatcctgggtggcctgcagggagaggaggctgttgctggtaggcacattttgaggtggggggaaaggaaaaagtttgtaagagagctgtccagagaaggcatgactttcccttaagagttagcgagtctccaggtgtcaggagaggcttgactttgggagaatgttggagtggaaagtgtaacagagggatgtctggtcttttggcttccctgggtcacactgtaagaagaatcattttgggctgcacatgtcgtatattaacactgacgatagctgatgagctaaaaaaaatcacacaaaaaagaaatcacaaaaaaaatctcataatgggcctgatgcagtggctcatgcctgtaatctcagcactttgggaggccaaggtgggcggatcacgaggtcaggagtttgagaccagcctggccaacatgatgaaacggcatctctgtattttgtaaaaatacaaaaaattagctgggcatggtggcgggcgcctgtaatcccagctacttgggaggctgaggcaggagaatcgcttgaacccgggaggcggaggttgcagtgagctgagatcacagcactgcactccagcctgggcaacagtgtgagactctgtctcaaaaaaaaaaaaatctcatgatgttttaagagacttaacaaatgtgtgttgggtcacattcaaagccatctggactgcaggcctcaggttgggcaagcttaatatagcataagatagaaggtagaagtaggggacctttgaggtcccatgagtgtctgcaacttatagtccatatttgattgatttgcttctgctgaatcagagaaagatgaatctattcccctggattaaggagggatgttgaattggaccttgaagacactgagatggaggtaactgtggtcagaagagttgctatggatgggaccatgtgtgaataatcccatgttgtatggcttggtagagtaacatgtgccataggcacacgacagatgagggagaggagatcagagctactgcagtctgaagacccctggagaagggcaggaggccagagaaatcagggagacctccctgaaagaggtcaggtggacatattggagtgctcaggaagccctggggaggtgagactgaaggaattgtgagtaactagccaaagttgtggaatgagggatccggctcttactagcagagagtggttaaagacagaccagggaccaggcacggtggctcacacctatattcccagcactttgggaggccgaggcaggtggatcatgaggtcaggagttcgagactagcttggccaagatggcaaaacgccgtctctactaaaaatacaaaaattatctgggcgtggtggcaggtgcctgtaatcccagctactcaggaggctgaggcaggagaattgcttgaacccgggaggcggaggttgcagtgagccgagatcacgccgctgcactccagcctgggtgacatagcaagactccatctcaaaaaaaaaaaacaggagacaatgaagccgcaggtgagccaggtagttacaaaagaatgcgatctctcagcaaggggaagacccaaggctggggagaaagtagcacctggctggcttcttgaggaagcgttgccagcaaggagctctcacatcttagcagcgaccaaggtagtaggccatgaactgtaatagaggcagagggtttgttaagattttagaagcagacagtcctggtttgaagtcctgactcgactatgttccgaatgtgtgatcttggacaaatggcttaacctctgagccttagtttcctcatctgtaaaataagtcttaaaaaaaatctctccaaccctccaagagctggtgtgaagattagatggggtcatggatgtcagcatgatatgtaaactctgaagtgccctgtgcttatggaggtggccactaatggcatagtatggcagaatctctgaattagagagtgacgggaactgcctggggctccgag

SEQ ID NO: 680355 - DNA, 623 bp, Homo sapiens
ggaagcctgtaatcccagcacttggggaggctgaggtgggcagatcatttgaggtcaggaatttgagatcagcctggccaaatggtgaaacctcgtctctactaaaaaatacaaaaattagctgggcatggtggcgcatgcctgtagtcccagctattttggaggctgaggtgggagaatctcttgaacctgggatgcggaggttgcagtgagccaagatagtgccactgcactccagcctgggcgacacagcaagaccctatctcaaaaagaaaggaaraagaagaaagaagaagaagaagaagaagaagagaaagaggaagaggaagaagaagaggaggaggcggagaatggggaggaggaggaggagaagaagcagcaggagggaggcgggaggatggaagagggagaagggagaaggaagaaggaagaagaaggaagaagaatactaggttgagtggaggttttgccctcttcactttgggtagacaagagagcaagggagtcatagcactgatcctcccagccccagcccagtgccattgagatactaataccttaacacttccataaagatatgcacacatctgccttagagttcattgtctggggttttcagagaa

SEQ ID NO: 680356 - DNA, 623 bp, Homo sapiens
ggaagcctgtaatcccagcacttggggaggctgaggtgggcagatcatttgaggtcaggaatttgagatcagcctggccaaatggtgaaacctcgtctctactaaaaaatacaaaaattagctgggcatggtggcgcatgcctgtagtcccagctattttggaggctgaggtgggagaatctcttgaacctgggatgcggaggttgcagtgagccaagatagtgccactgcactccagcctgggcgacacagcaagaccctatctcaaaaagaaaggaaaaagaagaaagaagaagaagaagaagaagaagagaaagaggaagaggaagaagaagaggaggaggcggagaatggggaggaggaggaggagaagaagcagcaggagggaggcgggaggatggaagagggagaagggagaaggaagaaggargaagaaggaagaagaatactaggttgagtggaggttttgccctcttcactttgggtagacaagagagcaagggagtcatagcactgatcctcccagccccagcccagtgccattgagatactaataccttaacacttccataaagatatgcacacatctgccttagagttcattgtctggggttttcagagaa

SEQ ID NO: 680357 - DNA, 623 bp, Homo sapiens
ggaagcctgtaatcccagcacttggggaggctgaggtgggcagatcatttgaggtcaggaatttgagatcagcctggccaaatggtgaaacctcgtctctactaaaaaatacaaaaattagctgggcatggtggcgcatgcctgtagtcccagctattttggaggctgaggtgggagaatctcttgaacctgggatgcggaggttgcagtgagccaagatagtgccactgcactccagcctgggcgacacagcaagaccctatctcaaaaagaaaggaaaaagaagaaagaagaagaagaagaagaagaagagaaagaggaagaggaagaagaagaggaggaggcggagaatggggaggaggaggaggagaagaagcagcaggagggaggcgggaggatggaagagggagaagggagaaggaagaaggaagragaaggaagaagaatactaggttgagtggaggttttgccctcttcactttgggtagacaagagagcaagggagtcatagcactgatcctcccagccccagcccagtgccattgagatactaataccttaacacttccataaagatatgcacacatctgccttagagttcattgtctggggttttcagagaa

SEQ ID NO: 680358 - DNA, 1299 bp, Homo sapiens
ttttgcttatctgtattttttagatgttctacaatgaacatggtatcttataataaatgcaaaaaataaagttgtcaatagcttaaaaagccatgtactttttgttttaggcaaaactacaaagaggagcatctaatcaaacaacacatccccaggtcactcrtgtgtgcagcatgccttcaggcatgcatcccaacagaggcagatcccaggctcatgggacaacaggttttccttggtgaggaagtcaggcactgcagcctccaagcctcaggctcctcaactgttaaaaagggatcagtctgcctacccccaggatttaaggcaggcatgcatagtgtctggcacataggaggtgctcaacaaaagttgcttatttctccataagcagcttttagcgtcacagcctgcagccaatcagcttcttgctgttcttgccaaaggaggattggctttgccaaagctgggcctgcccaagttcatccgcagccactggtctctgatgctgtccaccttggcttggaatctctgttgctcttggaatttttctgtgttccctagaaggactgtgacctctcatcaacacaacctgtatcccctactcccagaatgggttccatctgcgtagagaaagtgagggcttcaagtcttcgtggggctgctcactcttaataaaaacaacagtggctgccatgtatcagaattgccctacatgtgcccgggctgacatcctctatctctcagccccaactctgcaggaatgtgagagtgttcccatttcccagatgaggctcagagagttgaaggaactccttgaaggtcacacagctggtccatggcaggtgccacactgccttcttagctatgttggttccatcttctacttcaaaagacagacattccccagtggattctaatgtgcagccaggtttgagaagcattgttatgaaagtagtggttctcaacattgactataccgtggaatcacctgcactgatttacaaaaatgctggtgggggctgggcgtggtggctcatgcccataatcccgggactttgggaggccgaggtaggtggatcacctgaggtcaggagtttgagaccagcctggccaacatagtgaaaccccgtctctactaaaaatacaataattagccaggtgtggtggggggcgcctgtaatcccagctactcaggaggctgaggcagaagaatcacttgagccccggaggcgaacgttgtagtgagctgagatcatgccattacactccagcctgggcaactacagtgaaactccatct

SEQ ID NO: 680359 - DNA, 654 bp, Homo sapiens
ttgctttcctggagtgaggtctgctkcttgcctcccactccctgcttcccacttacccctgtgcccttggcttctgccctgggcctgccagagtggctgctctctggatatcccaatgccaccagtatcttccccaggagcagcccattcctgacatacaggaacaacggctccttcattcattgactcatttaagcagatatttaccaagcatctgttatcagcattgagaacaccacaggaaataagatcaggtcgaatggtgggcctagtgcaagcacttacaagtacaggctttagagtgagaacatcaggcccaaccagccaagacactgaaacccatctcaaggaattttcaggagtttcctttaaggatatgcccatgacctgggttatgtgtccaagtctggatgagtcactacacctcccagtcctcagctgtcccatctgcacatggtgaggctgaactgcatgctcttgatgactctgtgcaggtctgacttcctgtgaaggtaggaaagggcccaggggcccctaggcctggttttgccacccatgggctgctgctggatttagggccttaaaacaaccactttattattaatttctttagagacagggtctcactctgttgcccaggctggagtgtagtgg

SEQ ID NO: 680360 - DNA, 606 bp, Homo sapiens
cctgctactgtcatctctttgatacyttctcttgtcttagaagttttctaagatgagcagcatgtttatcaaacagaattttgtagcttaatagagaaatataaaatccttccacagaaaagttataaataagttgggaccacattagccaactttccgtgaaactcatgcccctttctgatgcaccaaactgtcaaaaacatgctttgtgaaaaaatggctgttcttcactctggcctagaaatccacaatttatgttttctcaagcagaagtcacatcttttttctcacctgctctcctggttcatccagttctctctctaaatcctccagcacagtcaccacctcctccccactctctggatgctgctcctgcacccaggcctggagctcctcaggtaggatggtcaggaactgctccagcaccagcagctccagaatctgttctttggtgtgggtctctggcctcagccactgatggcaaagttctcggagtcggctcaaagcctcacggggaccagatgtctcctggtagcagaactgtctgaagtactgacggaagacctctctgctatgggtgttgtttttacgcaggtcccaatcctg

SEQ ID NO: 680361 - DNA, 1446 bp, Homo sapiens
taacttctattaaggagttttaaggtgagggagtggaatggggcaaatgagacatacaygttcaaaaataaccataaaatatcgtgatattgttgataattggcattctaattggcaatgtcataaagctttttaaaataacatatatgaaggagaaattacttccaacttgagaaattgaacaacgtctcacgtagcatttgaactatatcctgaaggttttcaaatgagaaggatgttaatagagaagacttttaggaaagaaggtttttggtagaggaaacagaaattactaaggaccagagacttgaaagtgaatggtgcagtgtaaaaatggatcttagttttggtatggttggttagtctatgggttgtgtccattgcatgtgtttgatggaggtaggtgtgaagagtttggggagaaatcatgtaattatgtgtcagatcgtaaagggaaatgaagatattatgagagttttcgaaacacactaagagacttcacacgtttctgaacagagtcacttgaattttgtgtttttaaaaaacaaaacctgaggttctatgttcaatatattagaagaagaaaaattgggaatttggcaatcacaaaccagatgtgaaggtctgaaaaagtgaattgccattagaaatgaaaataagaaaacagatgtatgacacattttatatttaaaattaaacagccttcatgaacaaatggttatgatcaagtggatgaaaaacaagaactcaaatcaccttaagactctagcttgagtatctggtgaaggaattggatgatttagaaacagaattatcaaattagagttcatataccattatagaggcctggaggttatttgaattagatatgtccagtctgccttggattttcaaacttagataatgatctctgaaactcgtgttcaaagagtatatatctaaattcatacactctaacactggtacgtgcctaccctcacaaaattccaaatctttccctgccattgaaacaacttcaaataatcccccaaatgataactttttggaaaaggaactttaatgcacttcagggtaaaaatttggtaccacttcttaatattaaaaagaatctcaggcttatataactatatggtatttttttaatggaaaaatttaaacaacaagataaacccactctcaaaactggggctacagttttaatataaatgagcttttgatggttttcatttaaagactttcctggtttactgtttgcctgtaggggcagaaaaagttgggaattgttaaataagcaagaggtaactcttcttctttaccaggagagattccagcagggcagacagttcaaagtaatggatctgaaattatggggctgtgaattttacacgtagatgtagaaattatttccaccaaatagcagttgaaaccatggaatggtattagaca

SEQ ID NO: 680362 - DNA, 1446 bp, Homo sapiens
taacttctattaaggagttttaaggtgagggagtggaatggggcaaatgagacatacatgttcaaaaataaccataaaatatcgtgatattgttgataattggcattctaattggcaatgtcataaagctttttaaaataacatatatgaaggagaaattacttccaacttgagaaattgaacaacgtctcacgtagcatttgaactatatcctgaaggttttcaaatgagaaggatgttaatagagaagacttttaggaaagaaggtttttggtagaggaaacagaaattactaaggaccagagacttgaaagtgaatggtgcagtgtaaaaatggatcttagttttggtatggttggttagtctatgggttgtgtccattgcatgtgtttgatggaggtaggtgtgaagagtttggggagaaatcatgtaattatgtgtcagatcgtaaagggaaatgaagatattatgagagttttcgaaacacactaagagacttcacacgtttctgaacagagtcacttgaattttgtgtttttaaaaaacaaaacctgaggttctatgttcaatatattagaagaagaaaaattgggaatttggcaatcacaaaccagatgtgaaggtctgaaaaagtgaattgccattagaaatgaaaataagaaaacagatgtatgacacattttatatttaaaattaaacagccttcatgaacaaatggttatgatcaagtggatgaaaaacaagaactcaaatcaccttaagactctagcttgagtatctggtgaaggaattggatgatttagaaacagaattatcaaattagagttcatataccattatagaggcctggaggttatttgaattagatatgtccagtctgccttggattttcaaacttagataatgatctctgaaactcgtgttcaaagagtatatatctaaattcatacactctaacactggtacgtgcctaccctcacaaaattccaaatctttccctgccattgaaacaacttcaaataatcccccaaatgataactttttggaaaaggaactttaatgcacttcagggtaaaaatttggtaccacttcttaatattaaaaagaatctcaggcttatataactatatggtattttttyaatggaaaaatttaaacaacaagataaacccactctcaaaactggggctacagttttaatataaatgagcttttgatggttttcatttaaagactttcctggtttactgtttgcctgtaggggcagaaaaagttgggaattgttaaataagcaagaggtaactcttcttctttaccaggagagattccagcagggcagacagttcaaagtaatggatctgaaattatggggctgtgaattttacacgtagatgtagaaattatttccaccaaatagcagttgaaaccatggaatggtattagaca

SEQ ID NO: 680363 - DNA, 1446 bp, Homo sapiens
taacttctattaaggagttttaaggtgagggagtggaatggggcaaatgagacatacatgttcaaaaataaccataaaatatcgtgatattgttgataattggcattctaattggcaatgtcataaagctttttaaaataacatatatgaaggagaaattacttccaacttgagaaattgaacaacgtctcacgtagcatttgaactatatcctgaaggttttcaaatgagaaggatgttaatagagaagacttttaggaaagaaggtttttggtagaggaaacagaaattactaaggaccagagacttgaaagtgaatggtgcagtgtaaaaatggatcttagttttggtatggttggttagtctatgggttgtgtccattgcatgtgtttgatggaggtaggtgtgaagagtttggggagaaatcatgtaattatgtgtcagatcgtaaagggaaatgaagatattatgagagttttcgaaacacactaagagacttcacacgtttctgaacagagtcacttgaattttgtgtttttaaaaaacaaaacctgaggttctatgttcaatatattagaagaagaaaaattgggaatttggcaatcacaaaccagatgtgaaggtctgaaaaagtgaattgccattagaaatgaaaataagaaaacagatgtatgacacattttatatttaaaattaaacagccttcatgaacaaatggttatgatcaagtggatgaaaaacaagaactcaaatcaccttaagactctagcttgagtatctggtgaaggaattggatgatttagaaacagaattatcaaattagagttcatataccattatagaggcctggaggttatttgaattagatatgtccagtctgccttggattttcaaacttagataatgatctctgaaactcgtgttcaaagagtatatatctaaattcatacactctaacactggtacgtgcctaccctcacaaaattccaaatctttccctgccattgaaacaacttcaaataatcccccaaatgataactttttggaaaaggaactttaatgcacttcagggtaaaaatttggtaccacttcttaatattaaaaagaatctcaggcttatataactatatggtatttttttaatggaaaaatttaaacaacaagataaacccactctcaaaactggggctacagttttaatataaatgagcttttgatggttttcatttaaagactttcctggtttactgtttgcctgtaggggcagaaaaagttgggaattgttaaataagcaagaggtaactcttcttctttaccaggagagattccarcagggcagacagttcaaagtaatggatctgaaattatggggctgtgaattttacacgtagatgtagaaattatttccaccaaatagcagttgaaaccatggaatggtattagaca

SEQ ID NO: 680364 - DNA, 2372 bp, Homo sapiens
aatgaatacacacatacacagagacatagatgatgtgaaggagaaacaataaaattcactgcagttctctcaatagagtgagatttttattattaccttctatatttctttatattgtccagcatagctatttcaataaaatgtgcatctttatgattcaaatatatttaatgtaaatattctaaattgaaatttcctttatgtggaaaaatactaacttctctacattcataaagcaaagtgaaaaggaaatgctaaactaccacagattgtacccacaagacttctgacaaattgcttaattagaaaaatcagagaccactgttaccatctttatatactgcctgtttctgaattcagctttcctatctttaagcaaattttctcatccacctcacacaccaatttgtgtgcctcctctccacccaaaccccacactccaggatgatgaatgcttctgttcactgttttactagtggaaaggatggggctgtggtgggagggagcaggggagttcattagagaagatgccagagaaggctagagaaagaacaggcaggaaagatggcgtggtagttgggagtgatatttacattttgaaaataggctggaaaaaataaatcaatgtttaatttgcatttatgaaactccagataaaactataattaaactataagtgttcctcctttaattatataatactttttagcttttgtgatatgaaatcatagaaaatgccaactatttaatgaaaaaaagtaaagttaatctgacatttctttagtattttaaatagtatagactagtatttttgggagaggttatttttaaaaatcagccactcacctgacattgcattaacaaaagaatttcaaaggattggacacagaaaataagactaaaaatgtccaagtaccttcttcattagtggataggcctgaagatctgcttattttgtgatagaagattaactttcaaagttttctttgagagccaataatcaaacatatgctttgaaagaagctcaagaaagaccaaagtaatcatttttgaacatgaattttagtaacagaagagagataagaagtgagttcttaatgaagtacaaggaatgaatattgacaatgtttattccacttgtcctyccatttttgacagcaattcctctaacaacaccttttttaatgtgtttgttttatttaaaaaaaaaaaaggggggatacaggaagaataaggtccttttttttgcctccagcactgaataataagaaacagttgtctctgctctattaagggttgaaaggaaaattgtggtggaatgagtttggctgctggaggcaagggaccactgacagtgcctcagcttgttcgtccatgacagcgctgcagctgagagcttgctatttcccaggaggaaggaacagtggaaatgacaaaaggaaatctgagaatggagataataaaatgatggttgcatttgaggctgttatcagtacttctctcatgccaacatataaaggagaagtaaagattttaatattatgagaactgtaagtatccataattcagatttcagcagtctggtagtacggtaagtcgcatcttggtgggatccacaaaaacttttgcaaaagtgtttaattgtatgatagcatttcaaaatcatttcccttgatcagataaggaccttcatgtgaatctattttatcaattaatggtcagtttcatgtagctaggttacatagtataaattacttttaaaacccccttccaaagaattcatgttttaataaactatagtgaatgacactgtgtctaaaacagtgtagcaactagttctgtgattggcacagttaatataccattaatgtctcactgaaagctaacttctgtttttcagtgaacctgcctacacacaaatactctactgaaatgtggttgtgatgtgaatattttacattaataggattaatgtattaatcaactttccacaattgctatatcacctacattttaaacgtgtttttatcttctgcttttcttacctcattttcttctaaagagaagaattgtcttgcttcctcttatctctttattgctgttaatcttgaggacatataaaaggattaccttattcacaggggggaaaaaaggtcattagaaatcctcactcctttattttctccttcctgcctttcactgatttcatggaagaaatcttagactgtttttccattgctagtagaagagtggttattaacacacaggaaagcaagcacacacattctatcaataaacattgctcaagccatgggttcacaattcactaattcatttattcagtcagttagcccacaaacatttattaggta

SEQ ID NO: 680365 - DNA, 2372 bp, Homo sapiens
aatgaatacacacatacacagagacatagatgatgtgaaggagaaacaataaaattcactgcagttctctcaatagagtgagatttttattattaccttctatatttctttatattgtccagcatagctatttcaataaaatgtgcatctttatgattcaaatatatttaatgtaaatattctaaattgaaatttcctttatgtggaaaaatactaacttctctacattcataaagcaaagtgaaaaggaaatgctaaactaccacagattgtacccacaagacttctgacaaattgcttaattagaaaaatcagagaccactgttaccatctttatatactgcctgtttctgaattcagctttcctatctttaagcaaattttctcatccacctcacacaccaatttgtgtgcctcctctccacccaaaccccacactccaggatgatgaatgcttctgttcactgttttactagtggaaaggatggggctgtggtgggagggagcaggggagttcattagagaagatgccagagaaggctagagaaagaacaggcaggaaagatggcgtggtagttgggagtgatatttacattttgaaaataggctggaaaaaataaatcaatgtttaatttgcatttatgaaactccagataaaactataattaaactataagtgttcctcctttaattatataatactttttagcttttgtgatatgaaatcatagaaaatgccaactatttaatgaaaaaaagtaaagttaatctgacatttctttagtattttaaatagtatagactagtatttttgggagaggttatttttaaaaatcagccactcacctgacattgcattaacaaaagaatttcaaaggattggacacagaaaataagactaaaaatgtccaagtaccttcttcattagtggataggcctgaagatctgcttattttgtgatagaagattaactttcaaagttttctttgagagccaataatcaaacatatgctttgaaagaagctcaagaaagaccaaagtaatcatttttgaacatgaattttagtaacagaagagagataagaagtgagttcttaatgaagtacaaggaatgaatattgacaatgtttattccacttgtcctcccatttttgacagcaattcctctaacaacaccttttttaatgtgtttgttttatttaaaaaaaaaaaaggggggatacaggaagaataaggtccttttttttgcctccagcactgaataataagaaacagttgtctctgctctattaagggttgaaaggaaaattgtggtggaatgagtttggctgctggaggcaagggaccactgacagtgcctcagcttgttcgtccatgacagcgctgcagctgagagcttgctatttcccaggaggaaggaacagtggaaatgacaaaaggaaatctgagaatggagataataaaatgatggttgcatttgaggctgttatcagtacttctctcatgccaacatataaaggagaagtaaagattttaatattatgagaactgtaagtatccataattcagatttcagcagtctggtagtacggtaagtcgcatcttggtgggatccacaaaaacttttgcaaaagtgtttaattgtatgatagcatttcaaaatcatttcccttgatcagataaggaccttcatgtgaatctattttatcaattaatggtcagtttcatgtagctaggttacatagtataaattacttttaaaacccccttccaaagaattcatgttttaataaactatagtgaatgacactgtgtctaaaacagtgtagcaactagttctgtgattggcacagttaatataccattaatgtctcactgaaagctaacttctgtttttcagtgaacctgcctacacacaaatactctactgaaatgtggttgtgatgtgaatattttacattaataggattaatgtattaatcaactttccacaattgctatatcacctacattttaaacgtgtttttatcttctgcttttcttacctcattttcttctaaagagaagaattgtcttgcttcctcttatctctttattgctgttaatcttgaggacatataaaaggattaccttattcacaggggggaaaaaaggtcattagaaatcctcactcctttattttctccttcctgcctttcactgatttcatggaagaaatcttagactgtttttccattgctagtagaagagtrgttattaacacacaggaaagcaagcacacacattctatcaataaacattgctcaagccatgggttcacaattcactaattcatttattcagtcagttagcccacaaacatttattaggta

SEQ ID NO: 680366 - DNA, 1546 bp, Homo sapiens
aatatatgcatggttcagtctgtccttagctcaggtggaaaggaagacactagagtgaattttcattctgttaatgccttgtaactttcatgaggtgttttactaggttacaagtagactatgaaattctggcataagcaattatacttggacaataaaatggaacaaatgacctacagcatagacaccccattatatttcttccttttgcatttattcaacttgacataagcactcatcactgccttccagatcttttccctttaaataaaattgtacacaaaattgtatacaacattgtgatcattaacaactgggtggtccttgaacaaactcaaagggcaagaaagaaatgagaggatgaaagggaggaggctttgaggaatggctcaattccaacatcagttcagttcatggacaaacactcatgagatctctcacttttttcccccaaaaaatcttttttctaggacagaaawtctctaactacctcaagtggcataacatgtggaagtcatgattttttatttttttttttttttgagacagagtctcactgtcacccaggctggagtgcagtggcgcgatctcagctcattgtaacctccacctcccaggttcaaatgattctcctgctcagcctccctagtagctgggattataggcgcccgccaccacagccagctaatttttttatttttagtagagacagggtttcaccccatgttggccaggctggtctcgaactcctgacctcaggtgatccgcctgcctcgacctcccgaagtgctgggattacaggcatgagccactgcacccagccatgatgttctttttgtatgacccaatgggatacatattttatgaaacatttttggttccctacttataaaaaataatatatactccttagagaaaaatggaaaaaagctgtctaggaaagcagagagctgaagaaaaaataaatcagctctaggctcaccagccagacaataggctgagagctcaatatttaattttgtgctaaattaaatccattttttcactttactatagtgaagacaaactaatataagccaaaagtttgagaaaactgcatgggggtttatcctttctcctctaaattccaccactagcaactcatttatttaggtaagcattatccttcccaatatgtcttttctcttttttcgggggtgggaaggaacagctttattgagatagaattcacatgtcaaacaattcacttaaagtgtacagtgtagctgggcatggtggctcacgcctgtaatcccagcattttgggaggccaaggccggaagatagcttgagctcatgagttcaagcccagcctggacaacatagcaaaaccccatctctacaaaaaatacaaaaaaattagctgggtatggtggtgcacgcctatagtctcagctactcaagaggctgaggtgggaggatggtttgacccaggaggtggaggttgcagtgagtggaaatcacacagtgcactccggcctaggcagaagagccagaccttgtctca

SEQ ID NO: 680367 - DNA, 637 bp, Homo sapiens
attactgtgaatgctcagaattaatagctacttagtgctagcccacccatgaaattgacgctgataagatgtagattctgccagggaccttatagtttgttgcagctacatcaacaagatgtaagcatgcctgactgaggttgaaggaggtgctggacatacctctattcaagaagaattcatcccttttcagagtttatgaatgtgcctcttcttactattcatttatctctcagtgataaatgaattttatcctgcaaagtgaaaggcctaggggttgtagtccagaatttattgttcaggataagctgcatctgtcctgggagatagagcaactagatccaggacaatctgagacttatccagtaacatcatctctcacgcagtaaaccttgtcctaaccaggccaacccctggtcttaagaacagttataatacctgtgggttctgctatgtggacactttatctctaacmtgaaagaggagggaagtgatgatgaattgcagctcaattactgacatgggttggcctggatttttgattcattaataagtactaaaggggaaaaattctaagagaaatgaaataggaatttaatatttgaaatagttaaaagataggttattcattagagca

SEQ ID NO: 680368 - DNA, 619 bp, Homo sapiens
caaagtgacttgcccaaggtcatacagttatttgatgtcggatgagaagaggtggcaaagagaagctgaaagagaaaggaaggctggaaaaggtgggggtgagcctgggcagtctgggtaacagaaaaagtggaatttggctgtatttgccaaagccaactttagagttttggggtgtttcttcctgctttagggtttcttgagtatttgacttcttgggagttttcytccttctactgtgactaggtcagtggctggggctcagtctagcctttggatagaaattagcaacatctttggcagcatttgtagagatgtggtgctcagagcaaaggaggtgataacccactctgtgcaggacaccagggttcagtcctaggcactgcactttgagatggcctttgacacactagaggtgggtgatggagagtctgaactttgagccatctggaacaaagttgaaggagctggacatagagacgaaaagactggagagtttctgcactgttttgacgtattaaaagtaacttagacttcctccagaggcctcagcgggcagaactgatatcagggtggaaggtaccaatggaaaattttattgcaacaggggaagaactgg

SEQ ID NO: 680369 - DNA, 1355 bp, Homo sapiens
tggggagcaggagagacccagcatgtttgcctgacctcaccccctcctaaagagcctgtcctggggcctctggggagagtggggtgcccattcctggcagtagcaatgagatcatgtgctgaggttacagaatgttgatgtccaacttcactttatcaagagtgacatcatctggagacaataaatattcatgcccatctacataccactgtgagttgtataaaagaacagccagtcatcctgcctgttgtcaaagccatatccattaatggcagacaaagggagccaagggtcatgactctctaagcttcatggagacccagaatggaggctgcacaggtggcagaggagcactctgccacagtcctgcatgccctggttcccatccccccacgcctctctgacctcaacccctactaccttctgcttccctcctaggctgcagacacactagtcttctccagacacactgtttcttctcatgctgtttgtattcttgcattgagatatttccccctttctgtttctgtagccccaaattttctagcactaggtatttgttttgtggaatctgttgctcaagcagcactgttttggagaggcctttcctaaccttctctgttaccatctccggctttacttttctcagagcacttacatcatctaacatcatacatttgtcggttcatgtgtttattatctgtcaccatcagaatttaagccccaggtacacaagggttttatcttcctatcattgtggtatcctaggaccaagaacatcacttggaaaatcctagttgctcaagagctgtttgttcagggaatgatgaaagatgacatagtcctttacttggatgggcgtaggatccaagcacagatgctggttatgcagctgctgcatgctgaagaactcccttcaagactgcatcccatgtagtagccctctctgtaaagtaagtatggtgtccgtcacttgcataaaccataggctggtcaccagccagctggttgagccagaaggtcctggtatccggtgcccagttttttttgtttgtytgttttgttttttttttttaatggagtcttgccctgtcgcccaggctggagtgcagtggcgcgatctcagcccattgcaacctccacctcctgggttcaagtgattctcctgcctcagcctcccaagtagctgggactacaggagcccgccaccagatccagttaatctttgcatttttagtagagacgaagtttcaccatgttggccaggatggtcttgatctcttgacctcgtgacccacccaccgtggcctcccaaagtgctgggattacaggcgtgaaccactgtgcttggcctg

SEQ ID NO: 680370 - DNA, 659 bp, Homo sapiens
ttcgattttgttttttttaaactttgtttttgttttgcttacttacttgggtgcctgtctgcctgtttttcttcctttcttccctccctcygttctttccttcttttgcttttatttttgtttctattttggtagtcttctttccgttttaaaaacagattgaatatttggttggcaaattctatgagtgtttatatttctgaaaaaattctttattttattattctagatataattattttaattctttttgttaactttttttattatagcaaaattttagacaaatacaaatatatgggggtggtaaggtaaaccctttttacttatccctcagccattcttggcttatctaacctgtccctgccactcattccacctggattattacacttctgcattggattattttgcagcaaatcacagacatcacataatttaatccataaatagtaaattttttttatgtatttctgaaagacaaaaagacaaaggcactttttgaaaatataatcacagtgccattatcacaggaaaaaatggagcattacttccttagcacattgaaattagattcaaattatctgaacttcaacactttgaaatcatcgttccattgttttatgacacctagttttgcagctgagaagtataatact

SEQ ID NO: 680371 - DNA, 659 bp, Homo sapiens
ttcgattttgttttttttaaactttgtttttgttttgcttacttacttgggtgcctgtctgcctgtttttcttcctttcttccctccctccgttctttccttcttttgcttttatttttgtytctattttggtagtcttctttccgttttaaaaacagattgaatatttggttggcaaattctatgagtgtttatatttctgaaaaaattctttattttattattctagatataattattttaattctttttgttaactttttttattatagcaaaattttagacaaatacaaatatatgggggtggtaaggtaaaccctttttacttatccctcagccattcttggcttatctaacctgtccctgccactcattccacctggattattacacttctgcattggattattttgcagcaaatcacagacatcacataatttaatccataaatagtaaattttttttatgtatttctgaaagacaaaaagacaaaggcactttttgaaaatataatcacagtgccattatcacaggaaaaaatggagcattacttccttagcacattgaaattagattcaaattatctgaacttcaacactttgaaatcatcgttccattgttttatgacacctagttttgcagctgagaagtataatact

SEQ ID NO: 680372 - DNA, 1902 bp, Homo sapiens
tcaagacaattcttcttcttccattgtggcccaggaaagccaaaagattggacacccttcttctataggcttttaaagtaatttaaaacttaagttgtttaagtttaaacaactctttttgtggttgctctagggattatgtctctttaatttatcagtatctaccattactatgagttaacattattttcatgtgcaatgtaaggttttttcagcagtattatcctacttatatcccttccatcctttgtctattggtgacataagttttactcttacatatgttytaagccccactctacattgtttcaccttttttttcagtcaaagaacgtaaaaaagaaaaaaagagttttttgtatttatctatatatttaccatttccaggacttgttttcctcacctagatattcaggtttccccttggctctatttccatttagtagaaagaaatttctttacaatttcttatagagtgaatctgctggtgataaattctcttaacttgtatttatctgaaaacatctcttttgccttgcccttaatttttaaattttatctatatctttgagttgctatgatttttctcttaaaataatcttaacttagaacagtatgagatttacagaaaagttgcgaaggacatgctgaggacttgagatactggcatacaattcctatttagttatactagaatcaaaaacctaacttgtattaattaatttgcaaaaaatcattctcctcttaggggtaccaattcagtatatttgatccctgttggagaatttcttatgtgcatacatgggttgatctgaatgtgaaatgctgaatttctatttgagtgcatttatcaagtatctaacctaaagattttcaggctcctacaaaagaaatgtggaactacatccattctttaaaggctacattgggtgggggatggaagagtgggtatcagtagggtgcttagttgaggagaaaattttgagatttttctttagaagttaagggttcccaaaggtttgaagtttgagagaaagaggcagaaagagttaaactaggggaagaaaggagtgattcactctgacattggtgttcttgaaaaattcttttcgggtcaggttaaccagtcttcccatcctatgcccacaggaccaaatgtttcacaagtccttcagcaagcaagttcacaaaagaacttggaattccattctgttccttaatctatcactgagaacagggtgagttctttaaatctcaaaccgttctaattttatctaaacttcattagcttgtcttaaaataattcccaaaccaaagaataatagaaagctggctctcatctcatccaacttcctttatgatacaaataaggaacctgagacagagagaaaggatttttcaaggtcattgtcctcataacaatcaaatacatataataataacacatgagccgggcacggtggctcacacctgtaatcccagtactttgggaggccgaggcgggtggatcacctgaggtcgggagttcgagcccagcctgaccaacatggagaaaccccgtctctactaaaaatacaaaattaaccggacgtggtggcgcatgcctgtaatcccagctactcaggaggctgaggcaggagaatctcttgaacccgggaggcagaggttgcagtgagccgagatcgcgccattgcactccatcctgggcaacagagtgagactgtgtctcaaaaataaataaataaaataataataataataataataataataatacatgatactttgtggtcgagctgggacttcaacctgtaggctttgctctcccagtccaggttgcagcacgccaatgacccctttccttcccttacgctccaggggcctcagcatgggtatagtacc

SEQ ID NO: 680373 - DNA, 1351 bp, Homo sapiens
gaaattaattagaaactcaaagagctctgttatttcctcacaggccacataactgcagtggcagggccccttcgctggctgatttagtgagttctcttcctaggctcctgggcaacaaattgtcaagtcactgcgttttttgaagcactgtgagctcactataatgaattgatctaaatagagagtcgacttatttttctacttcaaatatagaaggaaagaaacaaaaaagcatcttgccttggactgaaagttttagccttgcctttatttcttttttctttgagttaaaaaaaaaatgcttcgccgggtgcggtggctcacgcctgtaatcccagcactttgggaggccagagtgggtggatcattaggtcaggagattgagaccatcctggctaacacggtgaaatcccgtctctacgaaaaacacaaaaagttagccgggtgtggtggcatgcgcctgtagtcycagctactcgggaggctgaggcaggagaatcccttgaacctgggaagcagaggttgtagtgagccaagatcgcaccactgcactccaacctgggggccagagcgagactcagtctcaaaaaataaaaagaaaaaataaatgcttgtagggaaagaggaaaattgtggaagaactggagaagtcttatggaggaagggctaggggaaggatgctgggaaggcagaaagaagcaaaaatagcgaaaggaggaaagcaatccagtgagaggttgattattcccactgaagggacaaagtgacgttgccctgccttcatgtgccacaggcttggtttgtcctgactcttgcagacacacgcagacattcacttaacaaatgagccctgctcaccttccctgggcaagatgtgtttcatactacaccatataagcttataagacacatgttgcctttgatatatgaggttagcagggttccttcttgctttagcagggcaaccatgcaaatacttttcaaattccctacactgtgcaattctccttggtcacattgctcactgtcttcatgtcccttcctgcccctccccaagctcagaaggccttcacacccatccctttctcccctcttaccctacccgaggtggggagcacattcatttctgggaatcgactgctaaggtaccaagtttacccactgttctaggctgccaagacacagctagagaaaaaagcctaattcattgtattcaactggttttaatgagagatcggattgaccgtgcagtggattcaaatcaattgtgcaggaaacagtggttaagacagctgagaaagtgatctgattgaaagaggctaattcactagctccagacggacagtcctac

SEQ ID NO: 680374 - DNA, 626 bp, Homo sapiens
ctgggttggccccctgcatagaatatagctctgcaagccacggaagctcattcatagacgccagttttgccctttctcagctctgggcccagatactgcaggctaatcaagctggaaatctgggcttaatcattatgtgaaaataacctctgtggcatgcagtttgggggttttccctgtaatgtgcttgatacttcctttgaaagaacctggttgtacataccttaatgtgtcacccttccaagcagtcaccttgggaggccgcatgctgatttttctgcagaaaatgtttccacggtccctctcttgaaagtacattgagagcccatggcatgtcattttgactttatataagggtaacatattttaattttcctagggttgatttgattcttgtaagcaatggtaagtcatggggctgagtctgatgaatgarataggtgatcagaaatcaagagtgcctccagtaatgagacttgctctcctaggagccgtgtcagctgtctctgaaggcaggagcccagaagaggcatttcagaaaggagtgaatggcagctctgcacaggagtgcctggcaatccacgatgatcattttgaagaggacactcctcatgaggaacgacaat

SEQ ID NO: 680375 - DNA, 827 bp, Homo sapiens
tataatctacaaccactccagagaaagtgtctaaagagcattgaacaaaatccaatgtgtaacagcttgaactagatgaagaaagagagggctattaatcttttttttttttgagacrgagtcttgctctgtcacccaggctggagtacagtggtgtgatctcggctcactgcaacctccgtcacccgggttcatgcaattctcctgcctcagcctcccaagtagctgggattacaggcacgtgccaccacacccagctaattttgaattttttggtagaaatggggtttctacaaaaaaactccattttttagtagaccagtggccaggctggtcttgaactcctgacctcaagtattccatctgcctcagcctccaaagtgctgggattacaggtgtgagccacagtgtccagcagggctattaatctccataatctttagctcattttcaaaatatcaaaaaccatttcactttgtgaatatattaaaaattactaaattgtatactttaaatgaaacttaaattctttgtatactttaaaagaaatttaatttcttatatttaaaatacatcttaattaaaatattcaacatttatatataaataacaccataataaaagtgccctacatatgaaataacaaatttactaccaacaagaatttttaagaagttgaagttggcaaacaattagacaagctctaggtttacataccatcagtcatttcaaattaattagaacaaaacagaaacacctcgtagtctacttttattctcagaaaagaatgccttctccatccctcattgactgtggggcacgaacac

SEQ ID NO: 680376 - DNA, 1683 bp, Homo sapiens
agatgcaaaatcatccttgactgtaaaggggtgcaggtgggatatgagcttgtctgggtatgagaatatcatgttctatgcattttttatttcctaaactgcttaaattataaatcattaatggtaattattaaaagactttgttttccctacaattagaaaaacttatttgaagacctcaaatcccaaaagtgaaagaggaaaaaaaaaattattgccacggtttttcccttaacccatttaattaaagaattaattaaattctatgttgcagtttttcaccaaaagtgcaacatagagttagttcagtcaccacaaaaagattcagagattggattttgctgacttagtgaagctactaagatacaaattcacaaagtaaatgtttgcacacattagctacagtggcaaagtgtttgggaggttgcagtccacctcccggtgagggagatccatccttttggtcagcaaatgccctgaattgaccctctcccgagggtcagctgcaggctgtgctgatctcggaacttctctgggggtccagttctgtttaggacagaccataaaatacatctctctggggtgggtagagctaccccagtacttaccctggaaatggactcagctgtccctggagggtgactcagttgaggcagaattgtcttaatttggtaactctcctaatttgaagcagaagtcctgggtttgacccagacccatcttggtctggagtggagttgtggtgtgtctaatgctgccagatcatgttcactgttagaagcctggggaagggaaggaacttgctcagccaactcagaagcaggcatagcgcaagagggaggattttaagaattagtattttactatccttgtgagctggtgttattgacaaacattatttcaatctgtttaacgattttaagaattagtattttactacccttgtgagctggtgttgtttctaaatattatttcaatctgtttaacaattccattttttaaaaaccctgcactttgggcaggagttcgtatttctaatttaggatgaattttttctcatctccccccattctgtgattctaattttttttaagttatttcagttcttaaaactctttcatagagctgggcatcagccgcaattttctctaaatctgtctcagatgagcacttgcagtctaattgtataaaagatcaggaaatttagtattgaagttgcacttgctttgatgtaatgatgaatgtttccttcatctgaagagcatttgaaatttatggaaaagtaaatctttttgaattatatgtaaatgaaaacgttgggatgaaccaggttatgtttaactgggcagttttgaaattctaatwgctcctacaagcgggaatcttttaaagctaattttgtgatatgaattgtttattattctaaagaataatattcacttttttttcatggatctcatgtaaatgttactggacaatatgacccatctctttaaaaagtgaaattgttagtgggaagctgtggctcacacttataattccagcactttgggaggctgaggcgggaggatcacctgagcccaggcatttgagaccagcctgggcaacagcgagacctcatttctacaaataataaaaacattagctgggtgtggtgacatgcatctttggtccaagctactc

SEQ ID NO: 680377 - DNA, 2287 bp, Homo sapiens
cactctcttgctatgtttctctgaaaatagatcagccttctctgttgggatctatgaagctccagagataaaactgatatacattaaagtggctcgtggttaaaggaagtatgtttgttaatattaaaccgaggtttctctggtaactagattttaaatgatttgattccataggtttataatggagaaatccagatctccaaaatgtaagttttactatatgggaagcctttttttgatttcctttgctgtgtttggtaaatagcctggaagaaaatggctccgtcctatcacagaattttattatttacttcataaacctagtgttttagaattttttttttgtttttttgtttttttgttttttttgagatggagtctcactctgttgctcaggatggagtgcagtggtgcgatctcagcccactgcaacctccgcctcctgggttcaagcgattctcctgcttcagcctccggagtagctgggattacaggcacacaccaccacacctggctaatttttgtatttttagtagagatggggttgcaccatgttggctagactggtgtcgaactcctgatctcaggtgatccgcccacctgggtctcccaaagtgctgggattacaggcatgagccaccgtgcctggcctagaattttaaaaagattctttgtagtttagatggttctagttaagctatttcatttttttaaaaaggaagaaactagcattcaatgtctgcctagaaaacaaaaataaaaaaacaacaaaaaaggaagaaactgaggtctgtggcacttaagtgccccactcaaggttgcagagttcctagtgatgttattttttaatgaacttttcttctccttctcttttttgttaaattttggcagactgttttaccaaagcctaactgtacttttcttaattaactttggaatgaattctggatatactcattccagcaatgcacagaaaattctaggcaaagaataaaagactccacattgtttattattattatttttgagatgtagtcttgctctgttgctcaggttggaatgcagtggcggaatcttggttcactgcaacctctgcctctcatgttcaagtgagtctcctgcctcggcctcccaagtagatgagattacgggcagctgagattacaggcacgtgccaccatgcctggctaatttttgtatttttagtagagatggggtttcaccatgttggccaggctggtctcgaactcctgacctcaagtgatcctcctgcctcggcttcccaaagtgctgggattataggtgtgagccaccgcgccgggccagactccacattgtgaaaaaacgagggaaccgcttctgattttgctccagtggtgtattcctctgtcttgttataatgctttatgtttacatataacacattatacgatttttaaagcaaccccacagggaagagttttaattttttgtttgtttgtttttgagacagagtcttgctctgtcgcccaggctggagtgcagtggcgccatctgggctcactgcaagctccgcctcccgggttcacgccattctcctgcctcagcctcccaagtagctgggacttcagtcgcccgccaccacgcccggctaattttttgtatttttagtagagatgaggtttcagcatgttagtcaggatggtctcgatctcctgacctcgtgatctgcccgcctcggcctcccaaagtgctgggattacaggcgtgagccactgcgcccggccgagttttaatatttttagtcctgttttacaaaggggagaaacgaagcacagagaagtttaggaacttgcccaaatcatacagttgataagttagcagaccaaaaccggaatcgtccaaacggagtggcagccagaaagcattttataggtaaagtcacatcctacactgtaaataaaaacctcttggaacacagagttcgccaggtggctgttggattttcatgtcagcgctggtctagctccgttttgcaggattttttgttgttgttatcacagtatattctaaaaataactatatgttcatttccactctytcagataattaatatttataaatcctagtcactaggaaatatagttcaaccaacaattgaatggaatgcaggtcctctgggaacttatctaaaattaaatcctattttaacagaattagctagattaaggtcatggtgtaaaaactgatttttcagaaggaaataaaaatgcaaaatatcctaagaattcattttgtaaataattga

SEQ ID NO: 680378 - DNA, 696 bp, Homo sapiens
cgggagggaacacttgcagatcaggcctcggacaaggtctaacatctagaatggataaagagcacacatagcctgataataaaaagacagctcattttaaaggggacagaggctccgartagaccacaggtgcgtcttgggaaagctgggccctcgggaccagcctggctccctgagggggctcgcagcggctctgtattcctgagcaggaaggtggccctgtgtggtccccgtcctgggcaccacaagccccttgggtggtcctgtcaccctcaacaggatggctgccggcctagcagagtcccactagcaacggtgccccggagctgggcttcaaacagacatggggaggcagccctgaccttgagcgtctgctgcccttatccaacatcccagggcagaaatgaatggctttgagtctggcgtgaggcgccggaatgctggcttctcccatctggggtgggcaggctgggattcctgccccctccttcccacctgcactgtacccaggaccctttcagcttcctccgaggccgccatgggccatgctgtctgtggcgtgtgctcagtgtttcccagaactccctgtgggctcatgccccatcacccccagcgagcagccctcttcctggcacagcctcccctcctgcctcagtgccctcctgtgcttctggggacccctcccaaaggagccgt

SEQ ID NO: 680379 - DNA, 696 bp, Homo sapiens
cgggagggaacacttgcagatcaggcctcggacaaggtctaacatctagaatggataaagagcacacatagcctgataataaaaagacagctcattttaaaggggacagaggctccgaatagaccacaggtgcgtcttgggaaagctgggccctcgggaccagcctggctccctgagggggctcgcagcggctctgtattcctgagcaggmaggtggccctgtgtggtccccgtcctgggcaccacaagccccttgggtggtcctgtcaccctcaacaggatggctgccggcctagcagagtcccactagcaacggtgccccggagctgggcttcaaacagacatggggaggcagccctgaccttgagcgtctgctgcccttatccaacatcccagggcagaaatgaatggctttgagtctggcgtgaggcgccggaatgctggcttctcccatctggggtgggcaggctgggattcctgccccctccttcccacctgcactgtacccaggaccctttcagcttcctccgaggccgccatgggccatgctgtctgtggcgtgtgctcagtgtttcccagaactccctgtgggctcatgccccatcacccccagcgagcagccctcttcctggcacagcctcccctcctgcctcagtgccctcctgtgcttctggggacccctcccaaaggagccgt

SEQ ID NO: 680380 - DNA, 1583 bp, Homo sapiens
gaagccttcgaaaaatagtaatgtgcaggtcttacccaagagattctgacttccttgccaatgcccaggtttaaccccagagcatttgtaacctcccttaggtgagaaccactgcttttgattggctgttgtgatggtcaatactgagtgtcaacttgattggattgaggcatacaaagtattagtcctgggtgtgtctctgtgggtgtcgccaaaagagatgaacatttgagtcagtgggctgggaacgcagatccaccctgaatctggtgggtacagtttaatcagcttccagtgcatataaagcaggcagaaaaacctgaaaaggagagatgggcctagcttccaagcccacatctttctcccatgctggatgcctcctgcccttgaacatcagactccaagttctttagttctgggacttggactgtctctccttgctcctcagcttacacacggcctattgtggtcttgtgatcatgtaagttaatacttaataaagtcccctttacgtgtatgtgtgtgtatatataatatataatatatatactgtattatttatattatatgttttatatattatatayaacatataatttaatgtatattatatgtaaattatgtattacatacagatacctatatgtatgtaaaattgcctaaggtcttcccctaaatccgtcagcccaatatgagcttgagtgccttacttgattttgacatattatcccaaggtattctctgatggtcaagtggctcattcattcagttatcacagcgtaggagaatgcagatgcattattagcttttaaaaagatgtaactggtgattaaaaaaattaaattgaactttataggttttctcacataaagtaacccatttcttttttgtgtgaaaaggtgagctcttggctcaagctaaggccatctcatcctatatctaaaaaggatatccctggaggtggggagaggatggcgccctcttcgagggctgacaggattgtaggttggtatgctctctttgcagaacaagttggcagacagaatctaacagatttgaactaataggatatatatctatatcctatgagttctgtccctgtaagagaaccctgactaatacagctgtggaattcaaaggtcatgagatggatgtctctgcttcaccagacatgacctagttgggacaaatgagtgacgccacaatgctctgcaactcccacgtggcaccagctctcctctgtagagccactgactgttccttgtgtaggtttgtgtgtgtgtctgttttctaggattagcctcacacaaacacctacatttctcttggttccctcaagctttccaaggacggacacttgtttataaaatgaccccacggttaataaagtaacttcttgatgcgttttaaatgggacccaaagtttggaatgattcagccttttcatcagcttctccctcagcagggagccgttgaagctatcaaacgatattgcaaatacatcaccgcctactgtaatgaagtgcatccaaataaatgcttggctggtatatctggagccctgtcctgagctgtgtatctct

SEQ ID NO: 680381 - DNA, 1368 bp, Homo sapiens
cagttgcattattagcttttaaaatgatgcaactgttgattaaagaaaattaaattgaactttgtaggttctttcatataagttaatccatttcttttttgtgtgaaaaggtgagctgttggctcaagctgaggccatctcatcctatatctaaaaaggatatctcaggaggtgaggagagggtggtgcctccttcatgggctgacaggattgtaggttggtatgccctctttgcagaacaagttggcagacagaacctaacagatctgaagatgtatgctcctagtacatagcaatttcacctttaattatgtgacttggacaaaatcttttacatatgcagaaagagatgttcattgcagcaatgtttgtcatgctggacatttgtaaataacctagatgccacttaatggggacatgaatgaagcaaaggtggtgtatttcgtgatagactactgtgcatcagtcagaaggaatacaagtaggtctctttttaatttgatactgcatgtgggttccctgcattaatatggacaggctcagaaacgatattgagtgatgaaaagaagatggagactggtatctacgttggatgttacttgtgtgaatttttactcaatgtaccaagcaacatggaatgtagaaatgtatcaagaggaagatacacacagagtttggcagctgcctggggaaggggaacaggttggggtaaatggaactgggcactgtggggttatggaggatgtttagtaatatccgtgatgttctgtttgtttaaggtctagaaatcattgtgacaaaatataatttgtagttttgggtggtttgaatattagtattttctccattattttttgagaatagaagaaagacttcctgggaataggaggtagaatatagtcagagtcaaacccaaagcctgcagtgaaggtagctgtttcctgtgcctccactgagagatcctggctttgtctattcaggtggccactgagggatttctacttaatcgtgggtcttctttcttgacttctgattattcactaagatatttggtctggtgtttkactactgcctcccctagaggccatatgaattgatttctctctatatattgatttgaccctcagtacttagtattgagggtaatatgggaaaaaaatgcctaactctcatagtggaaattgccgaaatatagaatagatgtttaaataacaaatgaaagtattttttccagtagaaattccatttggctatcaattagtcagcaaaactgcttctagttctgacagaagtcataaattgttgactttcatctggggctgagaataactactgttgaaaaaggaggagtccaggatttaatgagcc

SEQ ID NO: 680382 - DNA, 1282 bp, Homo sapiens
tatggggaatgtggccactaacgccaggggcacagccctcacagctctacctaccaaatgtgaacccatctcttctcttggttaaaaaaagaaacaaaatcaaggcaggattttatwttgacatcttgtgtcacttacctaactttgaaccaataagccaaggtcgggaggcttggttatgtaacacaaacatggcacttggagattaaactctggatgtcaaggtcacgtccagagaactggaattgtggggagggcagccacacaggtggtgctcagtatggcactcattaaggattgcttatcagctccatcacttatgattttgaggctttgagcaaatcatttacaagttacctgctggtaatgtgggtatcataatggttacctatcaagggttgttacacagagttagataacatatatgcagggcatagtacagtgcctgggttacaggaagcaattggtaaatggtaactatgattgtgggagttgtaaatttggtgatgagggtggggaaagcggaggataggactagttgcctgctcaaatttctgtggaatcctaaagaaagattgtctggtatgtgggaaatattacactgaactgaataggaggtcttatgtggcacaccaggaaagactttttgggaccttagaatatttctctttgtcctctgcagagactggagacctatcaggacaaagcatttcttagggaatttctgcgttatggtcacattcacttattcagtcattcgtacatcagatatatatttttgaactgtatgtcccaggaaccttttaggaacaaggaatacaatagagaacaacagggacaagatctttggtcttagaccaatcattttaataagaaatacagaccaaaaaaaaaaagaaggaacacatttgtaaataagttatgtattatggtaatcacaaggaagggaatgaactgtttgacaggggaatgatggaacaggatagtctaggaaggtctctctgaagtattgacctggagacgtagagcatggccatgcagagagacagcaggggagtgctgcttgcacatggaacagcaattgcgtaaactttgcagaggaaaagacctgagtgtgctggtgaagctgaaggagagctggacagtggtcagggagagaggagtacggcctgagaggccagcgaggtcatcctggttaagacgccccggttggttttattttccctgaaaaggagtcttggttttcatgtaatggtatcgcatacttatccaatgaaagggc

SEQ ID NO: 680383 - DNA, 593 bp, Homo sapiens
tgctttgaacagtttagatataagatgtctgttaagtagtgtttagttagtaatggttgtggaatttagaaaggaggttggattaaaggtgagggtctggaagctacagaatatggatgacatttaaaaccatgcgacttgagattaccaagacactgacagtaatatatgtttttattgataaattggsaaatacaacagtgtgtaaatgtcacctgtagtcctacaaccttgacataaattagggtgagatatttagtgtatttcctttcagttttttcactaagcatttcaatttttatttcactttgtttttaattttttactctaatattgaaattttcaaacattcaaaagtggagtggataatttaagaagtccctgggtactcatcatccaactcaataatcattacatttctatatatcagggcaaatattttataaggaaaagttttctatgaaagagccacagcaataagagcaagcaggatggtaaatcgcttagaaatcactgagaatctctaaaaaaccactcttttgtaggtcctaattaaataatgaagctaggcaatcaggatccatagctatgaa

SEQ ID NO: 680384 - DNA, 593 bp, Homo sapiens
tgctttgaacagtttagatataagatgtctgttaagtagtgtttagttagtaatggttgtggaatttagaaaggaggttggattaaaggtgagggtctggaagctacagaatatggatgacatttaaaaccatgcgacttgagattaccaagacactgacagtaatatatgtttttattgataaattggcaaatacaacagtgtgtaaatgtcacctgtagtcctacaaccttgacataaattagggtgagatatttagtgtatttcctttcagttttttcactaagcatttcaatttttatttcactttgtttttaattttttactctawtattgaaattttcaaacattcaaaagtggagtggataatttaagaagtccctgggtactcatcatccaactcaataatcattacatttctatatatcagggcaaatattttataaggaaaagttttctatgaaagagccacagcaataagagcaagcaggatggtaaatcgcttagaaatcactgagaatctctaaaaaaccactcttttgtaggtcctaattaaataatgaagctaggcaatcaggatccatagctatgaa

SEQ ID NO: 680385 - DNA, 593 bp, Homo sapiens
tgctttgaacagtttagatataagatgtctgttaagtagtgtttagttagtaatggttgtggaatttagaaaggaggttggattaaaggtgagggtctggaagctacagaatatggatgacatttaaaaccatgcgacttgagattaccaagacactgacagtaatatatgtttttattgataaattggcaaatacaacagtgtgtaaatgtcacctgtagtcctacaaccttgacataaattagggtgagatatttagtgtatttcctttcagttttttcactaagcatttcaatttttatttcactttgtttttaattttttactctaakattgaaattttcaaacattcaaaagtggagtggataatttaagaagtccctgggtactcatcatccaactcaataatcattacatttctatatatcagggcaaatattttataaggaaaagttttctatgaaagagccacagcaataagagcaagcaggatggtaaatcgcttagaaatcactgagaatctctaaaaaaccactcttttgtaggtcctaattaaataatgaagctaggcaatcaggatccatagctatgaa

SEQ ID NO: 680386 - DNA, 660 bp, Homo sapiens
gttgttaggaacttttggaaacatggggtaatttgaattaggaatgagacttatcgggcttcttacatcatggggatttaactaccctccttcaaccaaaaagtcatatgggaatgaggcagtgggaaaacctgctcatctccaarggcacatgtgtagatcatctcttccaccaggaatctctccctccagcccatttttgacccactggtatccattttgcaaaatcaaatatgtaaccacacattgtatgtcattgaggagtaggcgaaattattattagtaaagatagggtaaaataaatcatttggttcctgcaacctttgatctttgtccttgaaggctatcttcctatcttccatcatgcttcatattctttccatcagcaccaaaaccagcaccatccatgtgctaatggatctcttaggtttgtttttatttttttagttttagacagggtcttgctgtcttgtccaggctagggtgcagtggcatgatccttgatcactgcaacctcgaacttctgggctaaagctatcttcccacctcagcctcctgagtagctgggactacaggcatgcaccaccatgtacagataattttttaattttttgcggagaaggggttctcactatattgcccaggctggtttcaaactca

SEQ ID NO: 680387 - DNA, 660 bp, Homo sapiens
gttgttaggaacttttggaaacatggggtaatttgaattaggaatgagacttatcgggcttcttacatcatggggatttaactaccctccttcaaccaaaaagtcatatgggaatgaggcagtgggaaaacctgctcatctccaagggcacatgtgtagatcatctcttccaccaggaatctctccctccagcccatttttgacccactggtrtccattttgcaaaatcaaatatgtaaccacacattgtatgtcattgaggagtaggcgaaattattattagtaaagatagggtaaaataaatcatttggttcctgcaacctttgatctttgtccttgaaggctatcttcctatcttccatcatgcttcatattctttccatcagcaccaaaaccagcaccatccatgtgctaatggatctcttaggtttgtttttatttttttagttttagacagggtcttgctgtcttgtccaggctagggtgcagtggcatgatccttgatcactgcaacctcgaacttctgggctaaagctatcttcccacctcagcctcctgagtagctgggactacaggcatgcaccaccatgtacagataattttttaattttttgcggagaaggggttctcactatattgcccaggctggtttcaaactca

SEQ ID NO: 680388 - DNA, 660 bp, Homo sapiens
gttgttaggaacttttggaaacatggggtaatttgaattaggaatgagacttatcgggcttcttacatcatggggatttaactaccctccttcaaccaaaaagtcatatgggaatgaggcagtgggaaaacctgctcatctccaagggcacatgtgtagatcatctcttccaccaggaatctctccctccagcccatttttgacccactggtatccattttgcaaaatcaaatatgtaaccacacattgtatgtcattgaggagtaggcgaaattattattagtaaagatagggtaaaataaatcatttggttcctgcaacctttgatctttgtccttgaaggctatcttcctatcttccatcatgcttcatattctttccatcagcaccaaaaccagcaccatccatgtgctaatggatctcttaggtttgtttttatttttttagttttagacagggtcttgctgwcttgtccaggctagggtgcagtggcatgatccttgatcactgcaacctcgaacttctgggctaaagctatcttcccacctcagcctcctgagtagctgggactacaggcatgcaccaccatgtacagataattttttaattttttgcggagaaggggttctcactatattgcccaggctggtttcaaactca

SEQ ID NO: 680389 - DNA, 2583 bp, Homo sapiens
acccctgtgacatataatttacctatataacaaacctgcacatgtacccctgaaagtaaaaatttaaaaaaaaaaataatgcttgtaggcatatttctattgaatttaaaggagatgatactgtgagtcccattgtatattcttgtttaacatatgtttacttttaaatatttggaatggaatattttcagtatttcttaataaagcaagcctacaataatttatttagttcctaaaacttgccaagtaaaaatatagtctgattttataatcatacattttataaatcattttataaattcattatagtgtttataacacaaaagtaggtaaataaaaagcattttagatatgatgttgacaattgcatgctacgatccaatgagaagcctttttatcttgatgttttcataattttgaacagtactggtgattagcaaaatagctatatttaataataaaattttggtttaatatgaatgttagggaccacaaagagatcctacttcactctcactaggatggctataatcaaagcgacagatgctaagaagtgttgacaagcctgtggagaaactggaaccctcatacattgctggcaggaatgtaaaatggcacagccactttgaaaaccaatttgttatttcttcaaatatttaaacataagattctcttatggcctagcaacatcactcctaggtatgtacccaagaaaaatgaaaacataatgtccacacaaaaacttagcagcagtattcacaatagccaaaaagtggaaacaacccaaatgttcatcagctgatgaatggataaacaaaatcaacatatgggatatattcacacaatgggatattactgatacatgctatataacatgaataaaccttgaaaacattaaactaagcaaaagaaaccagacataaaaggcaataatattgtatgactacatttataccagatgtccatagagacagaaagtagaagtagattcgtagttgctaggggctaaaatggggagtggctgccacttggtacagggttcctttttggggtgataaaagtgtcctaaaattgattgtggttctgattgtacaattctgtgcatatacagaaaaccatggaattgtacaaattcatgctatgtgaattgtatctcagtaaagctattaaaatatgcatactatgtatgtaaaaaataattttatagacagtagcatctggtaaatgtttaacacttggctctaaatgtagttctgccaagaatacagttcatatttttgtttacattagctaataaaacaatggaggtgcatatcagaactttactcactcatcagtgatgtaaatgagttctttgcggaatcawattttagtaggagaatattttcttgatgtttgtgctattcccaatatggcagctatagacacgacatacttttaatttaacctgcattattaacattttccctgtcacattttaagtacagtcagtcaacaaaacaataaatcatagcctgatttgtagcatttgccaatgtatggagtaaatactccccctatcgtctttttcaagctaccaacataatgtcattaaacatatagttgagaagagatgtgcagtagtacactattgtatagtatttccaccatacggatactatagctgtaaacaatctcaaaagatgagtgaatgaatggtaaaatgtagcaaaataatttggaagttttgagtatctattatttttgtttttaattttttttgtatttctataatttaattttcaatgactgtgcttaacagcctgctcacagaatttctgaaaatgtggtaactgacttttgcaagctggtgtggaataataccactgaaataatacctgaatgaggaggctctgtacttacttacaatgtgaagcctagtttacacgataaatttgggctgtggagacatgtagacatgtagcctttaattaatgaagctttaaaaaaagggaaacaaggtaaaatgaaagttcaaaggatattaagcaggttattcattaatttgagattatgtattgagttcttaatatattcaagatgctgtaatgggtcctggtaatacgaaggtaaataaagatataatttctgcctttggggaatgcatagtcaagttgctgggctagatatgtgagcaaagcagatactgaaaggactatattatgataaaacagaaatatgttccaaagtctatggagaaaggagaagagaaggaggaagaaaaattaaatgagtattttttgaaagcgcaggcctgcattttggaagaagtttcatttgaattggatttaatggatgaagcgtgtattaggtgaaaatgagaatttaaagcaaagaatataggcttaaataaaatcaagagactataaaatggaatatgaatgggtgactcccaaaattcagatgctaaaaacctgttgtgtaattggcatatcctagttcattggccaaaggtacaaacacagtcccatcatttattactttcataactactatttatcctttttaatccttatttgcccttatttggtggacatacatcac

SEQ ID NO: 680390 - DNA, 1704 bp, Homo sapiens
ctgccttaacaggattcctacttaatgtctggtttaagaggttccctattatcacattgataaaaagcagagtgttctgtaattactgctaccacctatgctttatcactttaagaaattatgtggaaataatctgatctttgcagtgcttattccttatgtgatcccagagtattgtaacattctcaatccttgattctgtctgatccaatctcaggtttgaaaatacagtaagattgttctctttagaatagagatgtgattgcgtcagtctcctatttgaaatcttccctcaacttcccattgccctgaaatggaagtctcacattttccacatgccatacatagaacagcgctgctcctgctcttgcgtcatcagggtccattcgtctcctaatcttccctctacttgcccctcgtctacactttagcttcagccccttcaaaactattttattttccccaaagctcccaggctttttctcactcatgctctttcctctctgtccagagtgtttttctattcttctctccaccgtcttctattccttccttgaatttcactgtcttacccacagcaagcccatctcaagactggttagagttctcctaggtgtccccatagcactgtagatacactcagtactggagccccaggcagggtggggtagtcaaagaacaggtgagccaagatggctgagaaagcagattgcttcttacatgggtgcaggagccattttttaggtgtggcagcacaaggcctgcaggtaaaagaaaagaaatgaattataaaattatgaaaaataaaagtgaataaaaatgaatttcacagttgatgtcggaaagaaaggagggtgaygtgagacagtaattcaggttccaatgaggaggtcaatcggcctctctgctaaggaatgtcagattccttatttatgatttttaaggtcccatatttactaaaattgtaatggaaaattaggcaacacctggagatttctatttatgagttccaggcattaagtcccacctaaaaacttaaacttggtcttataaaagacagtataaattattaatatatacatttttaaaactgtaatacatcttgattccattggcatataatgttaatcatcatactaggtagtattttgagacttattattgaattcgtgactaccttggcactataacagatagtcctggtacaaaaaaaaacaaaaacaaaaacaaaaacagtgctcttataaaaatgtaaacacaaagaatatttgatttgaaactgttttgtaatgttggttgacacttgccgtagaaatctgcaattgatttccaatcaatggaattgacatttattcattttgtaatgtaaatattctctaaaggagagggaattttatactaaaatatttctgtacaaagattaataataaagaaacctccttggagcctcagtttgcctcttaaaagtttgtagatattttctggacttgccttatctggtcatcagtgatgactatcacataaaaaatccggctggacgtggtggctcacgcctgtaatcctagcactttgggaggccaaggcgggcagatcacgaggtcagtagttcaagaccggcctggccaacatggtgaaaccccgtctctactaaaaacacaaaaataaattagtcgggcgtggtggcacgtgcctgtaatcccagct

SEQ ID NO: 680391 - DNA, 586 bp, Homo sapiens
cccacacgggagaaagaatctgtcacaagttatgctctccccacctctcagatttagagtgcagcttgatcctcgccttctaagaaagccctcctttcacaggtcaaattccatgtcccaagcactcagtcagcaacagcctgcagttctcttaacacaactgcagttttacgtttatttttattgttattattttgagacagagtcttgttttattgcccaggttggaatgcagtggcacaatctcaggtcactgcaacctctgcctcccaggttcaagtgattctcctgcctcagcctcccgagtagctgggactacaggcagctgccaccatgcctggctaatttttgtatttttagtacagacggggtttcaccatgttggccaggctggtctcgaacttctgacctcaggtgatccactcgccttcgcctcccaaagtgctgggattataggcgagagcaaccacgcccagccagttttacctttttccaccaacaccggtgtgtgtgcaacttgacatcccagascatgcacctagttccgtatcgtaagtcaccagcacctgacagatagtaagggtta

SEQ ID NO: 680392 - DNA, 632 bp, Homo sapiens
taaaatgtaaaatggagtagcaagatttaacagcaaaaacatatcatttagaagtattgaggtaattctagaagaagccactcaatagaaggrgactggaaattaaagaaaatattgttctgttcttttcttttctttctttctttttttttttttttttttttttttgagacggagtatcgctctgtcacccaggctggagtgcagtggcaagatcttggctcactgcaacctctgcctcctgggttcaagtgattctcctgtctcagcctcctgagtagctgggattataggcacgcaccaccacacccagctacttcttgtattttttagtgtagatggggtttcactgtgttggccaggctggtcttgaactcccaacctcaggtgacccgcccgcctcagccttccaaagtgctgagattacaggtgtgatctaacccacccagccaagccactgaggcaggccttgtttttctttcaacctttagttcatcttgatttttacatttgaaaataatgaaataaatttacaaaataaaaggaaaagtgaatatctttccaacagtccaccaatatcctcatcccaaaattatcaaaatgttttaatattcctatttattttcatgcag

SEQ ID NO: 680393 - DNA, 649 bp, Homo sapiens
tggcgccatttcggctcactgcaacctctgcctcctgggttcaagygattctcctgcctcagcctcccaagtagctgggattacatgtgcacgccaccatgcccagctaattttttttgtatttttagtagagacggggtttcgccatgttggccagactggtctcaaactcctgacctcaggtgatctgcccacctcagcctcctaaaatgctgagattacaggcatgagccaccatgcccagcatattcataaaagtcagaattacagaaataacacatatcctcagatttaaaaaaataaaaatactacagatctgaaaagccaaatccacctcttatctcttgccccaaggccccctcctcgggaacccccgttgttggccactcggcatttcctggccttttctgtgcgttggcaaggtggctattgaggggtacctgctggttttccatttggtcgctctcccaccctgccggtcccccagccccctccctcggcacctctcctgtgggccccggcctggcgcctagtcagtgaagcaccgctcgttccgagggttccagggttgcctgtcctcgggctgttgtaccctcagctgtgctggaagcaaccacgctccttgtccatcagtgttcactggagttag

SEQ ID NO: 680394 - DNA, 731 bp, Homo sapiens
ggtgtgtgtctggctaggggttgagagcccttgggtcatgggcaggtcgggggctccctagagctgggtctgaggacctgcctggggttagcggcttctggagctgagctcagccagggcaggggctgggcctggtggggggtgggaggttgggggcagagggcccttccagccatgcaaaggtgcactgtcttagacatgcgcacggctgctgtctccccccaggtgagaagcttgactacaagacctgtgaggccctggaagaggtcttcaagaggctgcagttcaaggtcgtggacctggagcagacaaacctggatgaagatgtgagcggccctgccaccgcccactyggctccctgagctcccgggccccttcgaggtttgggtggggagaggacactgcaggaggagggggtcccctagacaaaggctgaggggtggcgcaagggcggggcctcttgcagggcaagagggagacatccaatatgaccagagtggatgtggagggcgcgttggggcacctatggcccaccctcataagcaaggagagccttagggagctgggctgaggggcaggcgtgtggcccccaggagccctttcaggaaccacgctggagggtccagctcctacagggtgggcttgggaagcattctgagagcagcctcccatcaaggcccaagggccctcacctcctcagccttgggagtccccaggcaccccaggtgtcg

SEQ ID NO: 680395 - DNA, 731 bp, Homo sapiens
ggtgtgtgtctggctaggggttgagagcccttgggtcatgggcaggtcgggggctccctagagctgggtctgaggacctgcctggggttagcggcttctggagctgagctcagccagggcaggggctgggcctggtggggggtgggaggttgggggcagagggcccttccagccatgcaaaggtgcactgtcttagacatgcgcacggctgctgtctccccccaggtgagaagcttgactacaagacctgtgaggccctggaagaggtcttcaagaggctgcagttcaaggtcgtggacctggagcagacaaacctggatgaagatgtgagcggccctgccaccgcccacttggctccctgagctcccgggccccttcgaggtttgggtggggagaggacactgcaggaggagggkgtcccctagacaaaggctgaggggtggcgcaagggcggggcctcttgcagggcaagagggagacatccaatatgaccagagtggatgtggagggcgcgttggggcacctatggcccaccctcataagcaaggagagccttagggagctgggctgaggggcaggcgtgtggcccccaggagccctttcaggaaccacgctggagggtccagctcctacagggtgggcttgggaagcattctgagagcagcctcccatcaaggcccaagggccctcacctcctcagccttgggagtccccaggcaccccaggtgtcg

SEQ ID NO: 680396 - DNA, 462 bp, Homo sapiens
ccccatcacagtttgatcactcaatattttatttttagaggtggggtcttgctctgtggcccgctgctggagtgccacggcatgatcagagctcactgcagcctcaaactcccaggctcaagcgatgttcccgcttcagcctcccgagtagctgtgatcacccaatattataactgggctgtgggcaggtcacttaggccatcaacaaatgcaaacagagcacttcgtacgtggtaggcactatgcttagcaccgtccatgctcagygaaccccgcagtgcaggtgctgatgctgcctcctctttacagaaggggcaactgaggctcacagtggctgaatggtggagtgaagccacatggcctggagtctggtgcacagaagggcccgggaaaagctcatttccatccccagggacagtgagctcactcaccactgaaggaggcctaagctggaggtgtggg

SEQ ID NO: 680397 - DNA, 1262 bp, Homo sapiens
catgaattatttttcttaactttggaaagaccgttaatttcagcattcacaggaaaaatctttggatcatctccaagcatattagagttcagtggggtcacacttccagaaatagtagtataggtcacaagtgtcatttctaacaataaaagggtaattcttgttcttaaataatgaaatatattatgtgcccactagtagtgctcaagaggaacaaagcaggataaaaatatgtcttcaccaccyctttattcctcctttacctgccagtattctttcagctgtctaaattccccaaagttgctttgaatgttgtgctgctcccaactgtgaaggaatcagcagagcaaaacatactggggtgaatgagactttctccaaacatttccctcctttggactctacagtcccatcttatgggtccattcattgacagttttttctctgccaaggcccagatgaatgccttgcagacataatgtgtattaagtaaattctgaaagaaaagagaacttttcagcttatttcctatattgagagatttttttaaaaataagagtacacaacaaaggtagggtaacatgcactccaggtgcccttctcagcctgagatagatcatatgcttcatgaagaaacagactcatatctcagatttatttaggatattatctgagcccaaatgatattccctgcccagttatacttgccgtgctcacttttcataagagacaatttgttcaggtccatttgtccaacgcaatgccgagttttaggctgtgccattgcagaggtagttgtgctaccacatgcccgacctatttatcctttctgtggcttgagcatcattccctggacaaatcaatggcagctacgctagcagggtttattttctcacagcactcatggcatgagtcagagctgctttgtacataaagaacctcttggggctgctttccgcagaagaggccaattagaattttatggactctccagtacaagtgttaatgtttgataaaacctaactgtgttgctccttgcacttaactgcatttaaccattgtttcagtgcctattactgaaagagctaagcttgcattacggtcacagtgctcatatttgcttcaaatcatactgcatgttcttctttagcaaaagtccaagtttgctcatcaaccattggctccaggccctggactaatcattgcactttttgttactgaagtgaactttatcttcggatcttgtcatggactttaacttc

SEQ ID NO: 680398 - DNA, 1105 bp, Homo sapiens
tagattagtagcattccaacaagtaaataaataacttgcacagatttgaattaaaaaggaagtaggttagtgttgtaactttcattcagggattttgtgtcataaaagcagcccatctggaggacatgcacttggagtctgaatcttcacaatgatgcaataatgaccttaatcttccagcaaaggccaggtgaataattaccttgcaagtctgcattccagtcaaaaatctcctgtcaggaaagacttcagcctagtgagatggaatctaacattttaaaaatgatataaacatttgtataaatgatcaatctcttaattctgaaaatgctgagcagatctataaatatgcaaagtaaattgcacccatgatactaatccattttgtggaacaacctgtactggtattcacaggttttgtaatgtttaaagaaaatatgacttttaagataatgtaatagagtagccttggcattccaatttaaactaaataattgagtaactgatgtttgcactagaatattttatggattctttttatttcttctatatattagtaagttagaacatatgcaaacatttatttactgaagttgattttttaattggttcacaaatgaaagatagttacaaggattatggggaaaatatmcatgctaattctccatttcaaggtgaggaacaagaaaaaggccacagttgctgagacagtggaaatccgatgtttagaaactaacctaacctagcaaactttagtcaaaattggagacttggtatttctaaaagtgttgtggttcctgacattctaactaattcaggcttaacaaagtacagaaaagcccttgatcccttatagtgtgaaaattagttgtttcctggtaaattcagttactatattcttttttattaaaatgatttatttgtaaagaaatcagattgagttatatttacaaaacatatttcaaaactatatgaaaatactttcatactaacatgtttctttttaaggtatggtaatgctgtatattgcaaaatcacagtttatacttgaatcactagaatttttgactcattttggtgaacttgattcactaaggttggaaaa

SEQ ID NO: 680399 - DNA, 612 bp, Homo sapiens
tactaaagaatctcagggaggagcagccttcatcaatccacaaaaggtttggttacatcgtatgttgggctagagccagctcacagagtgtacaagctcctgagaaccgattgtgattggtggtgtgcagcttttcccaactctgccttcggtgactcagattacattcttttgttttgtttttgagacagagtctcactctatcacccaggagtgcaatagtacaatcatagctcactgcagccttgaacgtcttggctcaagcaattctcttacctcagcctctcgactagttgggactacaggtacacaccaccacgcttagctaattttttttatttcttgtaaaaaattaaaactatgttgcccatgctggtctcaattcctgggctcaacaaatcctctcttctcagcctcccaaagtgctgggattgcgggcctgagccacctcatccaacctaggcrgttttgaccacagtgggagtatttgcaccacaagaataggcaattgctacaaatcagagttgttttttgtccttggagaatcccttgttgaacacttaccagcacaccactgaatacatccagcctcctcatctataggtgcctgct

SEQ ID NO: 680400 - DNA, 989 bp, Homo sapiens
aaaaagaaaaaaggaatgcactacttgactgacagaaatcaaagtccacgttttgtcttggccattcgaactggttgattagaatatggtgaaaggggagaggagaaaacatgtaaaacattaatgtttgaagcatgaccctgtaggctttcaaagccagtttttccagaaacctaactgattggcacagtctcaaacctctgtaggtaatttaaagttctggtctacatctgtcactttgccaaggagcgatacatgcaaatcttatcattattaataatagacttgaaacttttcctgcctaaaaccccagtgacgtgcttagagaaacacccattcaatgagtaggactcctcatttctctggaggaaggacagcaccgaaggtagggcacatcggacagtcatcccttccttcctgcttgaaagccccagtttctcacatcactatggtgctacagtttgggagatccgctctgcactgcagtgctggttctgtacatcagcatgcaactggatcatctggagagaagggatgacaagagccatggttgatattttgattcagcctcttgascacagctgttttgaagcctgagtttgatcaatccggaaaacaaaccatcaaaacaaaacagatcctcagctcaccgctggtctcacctttcctgttagcctcagcccatccttgaaattcataacacccctctgctgtcattcctaaagtgatggaatgagtattattgtaaggagtaaggctgtagaggacctaatggtaaccatcaccacggttgttctagaaagaagaattttgcagtaatatctctgtccctcagtgtagccaccctctaggaatccaagaccaagccaactcagatgtcagatatctgagatacaaaagcagcacttttttcttgataaactgagcgacaagtactttcagagaagaccttgctggagaggctgcctgtgttctgttttgtttggttt

SEQ ID NO: 680401 - DNA, 610 bp, Homo sapiens
taacagagattttggaggaaattataaagatgatttttattgaaatcatctctcaaattggtgtgctctatttattatcaactcaactcccccatttaaaaaaaaatcatcattcactcacttatcttctctccagccatcacccttttgttctcctcttctttctattccaacttctcataatgttgcctactttctatctccagctcctaatttttcaagccattctcaatggcttctgtccccrccacttcctaaaacagcccttcctaaggtcatcaaaaaactatttgtcactataagcaataaactttttttaatcctcaattttacttaatttctcattggtatttgataatgttaatcacttctttcttctttcttcttgaaatgctgttttcacttcctggatatccctctggttccctggttcttctctggctccattgcaggatcatgctcctttattcaaccaatatttgttggatttcttcaagactggttctaggtcttctttactcactgtatcctctattccaaagcaccatcagccatgcctctggcttctattatcacctgttagtagatgactaacacatttacatcttta

SEQ ID NO: 680402 - DNA, 612 bp, Homo sapiens
cactcaatgtatagatctcggtttctaaataccgttctttaataaaaggaacatgggatccttggggaagtaaatttttcttgggwtcggacagagaaaacagaaaagaaattttcttacagaaaaattccgaatagtatatttagacaaagcccctctgggaagtggagcttactgccgttccccctcccttaagtgtacgctggacttaagagactctcttcgaaagaacagagtatggaaagaaaaaacaactaacttcatggcggagaaacctgataaccaatactttaaccaggagatcaaggttaatatcaccagtgggaaatcatgttgatatcatgcactgcctgatgcaatgggatgaaaatgtccctcattccacctctgcagtattctccatcaaaagccaatagccctaatctaatcacaaggaaaacatgagaaaagcccaaattgaaggtcattcaaaacaccaagtactcctcaaaaactccaaggtcttggaagacaaggaaaaagactgagaaactgactgactaagggagactcaggggatgtgaggactaaagtcaatgtggtcccctgcattgaatcttggaacaaaaaagg

SEQ ID NO: 680403 - DNA, 612 bp, Homo sapiens
cactcaatgtatagatctcggtttctaaataccgttctttaataaaaggaacatgggatccttggggaagtaaatttttcttgggatcggacagagaaaacagaaaagaaattttcttacagaaaaattccgaatagtatatttagacaaagcccctcygggaagtggagcttactgccgttccccctcccttaagtgtacgctggacttaagagactctcttcgaaagaacagagtatggaaagaaaaaacaactaacttcatggcggagaaacctgataaccaatactttaaccaggagatcaaggttaatatcaccagtgggaaatcatgttgatatcatgcactgcctgatgcaatgggatgaaaatgtccctcattccacctctgcagtattctccatcaaaagccaatagccctaatctaatcacaaggaaaacatgagaaaagcccaaattgaaggtcattcaaaacaccaagtactcctcaaaaactccaaggtcttggaagacaaggaaaaagactgagaaactgactgactaagggagactcaggggatgtgaggactaaagtcaatgtggtcccctgcattgaatcttggaacaaaaaagg

SEQ ID NO: 680404 - DNA, 612 bp, Homo sapiens
cactcaatgtatagatctcggtttctaaataccgttctttaataaaaggaacatgggatccttggggaagtaaatttttcttgggatcggacagagaaaacagaaaagaaattttcttacagaaaaattccgaatagtatatttagacaaagcccctctgggaagtggagcttactgccgttccccctcccttaagtgtacgctggacttaagagactctcttcgaaagaacagagtatggaaagaaaaaacaactaacttcatggcrgagaaacctgataaccaatactttaaccaggagatcaaggttaatatcaccagtgggaaatcatgttgatatcatgcactgcctgatgcaatgggatgaaaatgtccctcattccacctctgcagtattctccatcaaaagccaatagccctaatctaatcacaaggaaaacatgagaaaagcccaaattgaaggtcattcaaaacaccaagtactcctcaaaaactccaaggtcttggaagacaaggaaaaagactgagaaactgactgactaagggagactcaggggatgtgaggactaaagtcaatgtggtcccctgcattgaatcttggaacaaaaaagg

SEQ ID NO: 680405 - DNA, 460 bp, Homo sapiens
aatgaggaggttgaagcagtttggagattaaaaaaaaattcctgcctgtcattctattgcatggagctatattcgaattttatctggtggatgtgattctctttgatcaggttggccgtttgaagggatttggcacagaatagataatcccaactttgagcataaatcaggggctgtgggctgatggaygcctggcactttcttatgataatgtatgattgtggaatagcagggaaaataccacagccttatctcagtgcagcagcagctgggggaaagaacctcgagcccaaagggaagagggggcaggggcataagaacttagtgatttttttttttttaaaggaattgtgaaactgagctaaaagtgttctgggatgtggctggaaatgcagcattttagaatctgccggtggcaaagtaccgggcaaaaggaaatatgactggcaacccgtccccc

SEQ ID NO: 680406 - DNA, 657 bp, Homo sapiens
ttactttcactatagagtcaggtttcctgggccaccatatggcatacttataccttgtgacatgatagcagggcttcctatattgtattgagcttcctcagggacaagatattttgtcaagggagaaggactgatatccccaagcttcctgtggtggtaattctagaggaatccctgtttgctgctgccatacctttttgggccattacagattccatctcaaagaagaattctaccctaagtgtgtggaagacccagatttccatagctttctgggacatgctgaataaattgtataatatcttgcaggcaattacttttcatagaaagtcttgggccagaaaaaaatagcataaatctggctgaagcatttcaaaatctgtaagcagaataaattccagaccagggccatggaacagtaattctcttcagacacaatggttctcaccagcaaaatatgctccccttcctacgtagaaaaatggaatcacttgaaggaaagagcctggagggtctttgaagatcatccaacacaaccccttcattttctttatgatttgaagaggcaaagcatttggtgtgaggctacagcatgaactagytgcaaagcagaaactggaatgcaaaggtcctgatgccaggcctaacatattctca

SEQ ID NO: 680407 - DNA, 2551 bp, Homo sapiens
atggattttgatctaagtcctggcttcagccattactaattgtatgacctgagataattatttaactttgttctgactttcttttcttacctataaaaggggaatactttgacaatacttagtttataagtgtaatattatgagaattcaatgatagaattatataattaacattatggtaatacgatacaattaacacagcatgatataatagaattttggagcattaaagcatttaaactgttagaaaacaatataactaattagcaaaaacattttacactaatggatttgatcagatgtcaaactaaatgatatattactacagcacaagaggtcagcgagggaaattagtatagaagagatagctcagtctctgattctgggctttgcatttgaatacccatttacatatttctttaagaaaaagtgatttccaccaagatgcattggcctgtgtaaaggtctctaggcagcatagagctcttggcaagaatattctcacccaaatattttatatgtaagatagtgaaataaaaagtttaaaatatgcctataaaagttgaaagttaatgttttaaaattctctcttggatttttttttttcttaccagaatccttttcttagcccagcaaggagatggaaagggagtaggtggaacactgagaaagtttcaccatggtttgcttcttaggtcataagtacatgacttggggctggctcagacctcacctttaagttttgttggttcattaagacttatttccacatcatagaaacttagaacttggaacacagaatttatgtgagaaaatatcaaagtagatttttttttttttctgagatgtagtctcactctgtcgcccaggctggagtgcagtggcgcgatcttggctcactgcaacctccacctcccaggctcaagtgattcccctgcctcagcctcccgagtagctgggattacaggcccatgccaccacgcctggctaatttttgaattttagtagagacgggtttcaccatgttggccaggctggtcttgaactcctgacctcaagtgatccatccgcttcagcctcccaaagtgctaagattataggcatgagccaccgtgtccagccccaaagtagatgttatctaatatattgtttttcccaaaatagtcctcagaaatatcccaagagaatcccccttttccactctctgatctcatacatttcctgtgttcaaataaatcccctcttgaaacttcatcgtgcacattaatatcttaaaagttctgaggagtcctaaaataaagaaaccagtatgattcactttctttaactcaatgagtatttcccaaacttctgtgtccatggcacccttttttttttccagtgacagctgacattcatggcatcagtgtttcatgcagtagatttcaggctaccccggggtaattcatcatgcctgcagaaccatgtccgttctggtccagtgtccattatccctggtctcggcggcctaggcacatacgcatagcaatttcaggaacccagtgatgcaacctgccatttgtaagtcacaacttttagattcaggcccctgtgaactcaaagcttcagcaggtgtttgagatgcaaagaaacatgagatcatggctgtattagggttctctagagggacagaagtagttggaygaatgtatatatgaaggggagtttattaggagaattgactcacatgatcacaagctgaagtcctatgataggctgtctgcaagctgagggacaaggaagccagtttgagtcccaaacctcaaaagtagggaagctgacagtgcagccttcagtctgtggccaaaggcctgagagcccctgggaaatcactagtgtaagtccacaagtccaaaagctgaagaacttggagtttgatgttcaagggcaggaagcatccagcacgggagaaagacggaggccgaaagactcagcaagtctgttcttccatcttctcctgcttgctttatactagctgcactggcagctgattagagggtgctcacccagactgagggtggttctggctctcccagtccactggctcaaatgttaatctcctttggcaacaccctcacagacacacccaggaatcatactttgcatccttcagtccagtcaagttgatactcaatattaaccatcacagtgaccttcacctgggctggggggtcagggtggctaagttgagcctttgtaaagaggtgactgtggaagagcccagtagaattcatgcacttgtcccagctgctacattttcttctacagaggctagggaaattagcaccactggtattttctatctctaaaatttgtttccatgtataaaaagaaaaaaacaccaataattaaaagagaatgataagatgtttgtgtttgtgagaaaggaaaaaaaatgggctactcaggtattaataaaagtgaatcttctccaaatactctacctatttctcaagggactgtttccttgcaaatattgaaaatgagaaatacaagaaaaatctatttattc

SEQ ID NO: 680408 - DNA, 596 bp, Homo sapiens
ggtaaagatctgggcctgggaatcaactggacccaggggttctttctcttttatttctgcttgccattctctaaattgtgttctacttgtttacaaatgtaataggttgtctcaccaactaggtttgtgattctaaggcaggggatttgtatcagttttccattgctgctctaacacaaactaagagacttgacgcaacacatttcttacagtttgggagatcaaaagctgaaacaagctttacagagcaaaaggtgttggcagggctaagtttattctggaagctctaacggataatctgttttctgatttttrgcttctagaggctgtctacattctttggcttttgtaactccttaaccatcttcaaagccttctgagtagcatcctcaaatcttagccttctctcttacaaagactcctgtaatacattgggtttatttgtataatctgagataatctcatctcaaattagtcatatctgcaaagtatattttttgtcatagatggtggtaagatattcagatggatcttcaggaggaagtgggggaaaggaatagagaggtggcagagtttaacctagtacaggcattatt

SEQ ID NO: 680409 - DNA, 596 bp, Homo sapiens
ggtaaagatctgggcctgggaatcaactggacccaggggttctttctcttttatttctgcttgccattctctaaattgtgttctacttgtttacaaatgtaataggttgtctcaccaactaggtttgtgattctaaggcaggggatttgtatcagttttccattgctgctctaacacaaactaagagacttgacgcaacacatttcttacagtttgggagatcaaaagctgaaacaagctttacagagcaaaaggtgttggcagggctaagtttattctggaagctctaacggataatctgttttctgatttttggcttctagaggctgtctacattctttggcttttgtaactccttaaccatcttcaaagccytctgagtagcatcctcaaatcttagccttctctcttacaaagactcctgtaatacattgggtttatttgtataatctgagataatctcatctcaaattagtcatatctgcaaagtatattttttgtcatagatggtggtaagatattcagatggatcttcaggaggaagtgggggaaaggaatagagaggtggcagagtttaacctagtacaggcattatt

SEQ ID NO: 680410 - DNA, 640 bp, Homo sapiens
tttcaccatgttggccaggctgatctcaaactcctgacctcaggtgaccacccgccttggcctcccaaagtgctgggattacaggcatgagccaccgtgcccaacctacatcaatgtttttaattctattaaacctaatgtccttcatcattaaaaataagatctagttccccttttgcaatcctaagctgaaattcgtaaaatagatacctaygttattttggaagcaataaaatctctacatatgaaatttataatactttgtattccaatgtcaattatctgccacaggtacattataaaatagcaaattccctcacaattgcaaaatgctggcagaagctactactacactcaatagcacttctgttgataatcaggtcctggtatatacttaatgaatgactaacatttacccttctccggagctacttaatttccattatataaaactatatttcatggacttattcctacctgaaactattttgtgtggctatttgacacttttattcactctttatttgaacaccagttccatgatagcaggaatttgacgtcttttcagtgcctagcacatggaagttcaatatatatttgaacaaaggaatgaataaagtgttatcttttgataagccaa

SEQ ID NO: 680411 - DNA, 640 bp, Homo sapiens
tttcaccatgttggccaggctgatctcaaactcctgacctcaggtgaccacccgccttggcctcccaaagtgctgggattacaggcatgagccaccgtgcccaacctacatcaatgtttttaattctattaaacctaatgtccttcatcattaaaaataagatctagttccccttttgcaatcctaagctgaaattcgtaaaatagatacctacgttattttggaagcaataaaatctctacatatgaaatttataatactttgtattccaatgtcaattatctgccacaggtacattataaaatagcaaattccctcacaattgcaaaatgctggcagaagctactactacactcaatagcacttctgttgataatcaggtcctggtatatacttaatgaatgactaacatttacccttctccggagctacttaatttccattatataaaactatatttcatggacttattcctacctgaaactattttgtgtggctatttgacacttttattcactctttatttgaacaccagtyccatgatagcaggaatttgacgtcttttcagtgcctagcacatggaagttcaatatatatttgaacaaaggaatgaataaagtgttatcttttgataagccaa

SEQ ID NO: 680412 - DNA, 591 bp, Homo sapiens
tgccttgtgtatttttctgtcaccctcgctaggctgaaatgccaagagagcagcgactgtatctgtcttggttgccctggccagtcccaacactgtgcacacagtaggcacttaataagtgtctgttgaatgaaggagcgaatggggccttggatacagacctttccagggacacaatggattctgatatgttttgttgattcattcattcatccacccatttattcattctgtttgtgggctggaagctgagctgggcatgagtaggacagaaagctgccacagctgacagtcctgggggaggtggacgtggcacacggtgkccgagacacaaggagaaggtgaggcctgccctcaagaggggagttgactgtgttttgggagtttgagtggatgagggttacttccaagtaggggaaggaaaggtgtggcttttcagttgggcctcaaaggatgagtgagttaggaacacagggaaatggaggggaaggacatcccaggggacaagaagagccagagcaaagacagaggcaggacgcagggaactcactcatgtgtagcacagaagctgtttaggggcttgggggcagg

SEQ ID NO: 680413 - DNA, 607 bp, Homo sapiens
ttgatgtttatgatttaaaaaaaaaaaagaaaacaaaacctgttcatttaaacaatcattattatttccaggtattttatgaggaaggggcttacacagacatttctgtaactaataaattatttttctgcttctttagagttaattattcacagttactttgcgtagttacatgagttagctcttcccaacattagtagtatttgttttgttttgttttgtttttggaaaattttcatctaaatcaccgtgggatataatcaccattccacatgttgctttgttcagttgtacagtacctaccttagcctctgtaaaatttggtaaatatcactgctttctggttaagttctgtggaagaaggcagaaaaaaaaattacacctcccatgtcccttgttgaattaagagtacacagacttctctttccccttttttaaaataagtatcgtggcagttgaaaacaggtgctaattcagttcattcacgatatgagaaagatcaatgtacatttgaaactctcttcagagcagaaaatkgttaagagttgcgcaaaacagaaagcaggtccttttctaaatatagcaacgtcatatgaccccactggtc

SEQ ID NO: 680414 - DNA, 1315 bp, Homo sapiens
tggctttcgtcccccaaaggaatagcagtgtgctgttgcctccacctccaagtgacatttcaacttggggacacatgaggaaggaatgaaaattgtaattatttttcaaaattacaagaggaaaagatgcaatttaaaaatcaactttaaaattaaaattttaattattattgtttgattatctctaatgttgtcaaatatttgccattagagctttactgtctcaaaaaccattgcaccatattttcttaaaactagataaatttcaactggccatttataagattgtcatactattatagattatattccctggagaagaaaccaagagtctggtgtggaactaacccacgtctccattcataccacccttttggaataggtgaaatccaataggatttttcactggggactttgactttagtttcaaccataggtagtaaatgttcagtagttagctagttaattttataaatggctgaacatgaattaatggctaattataaaagccaatacttgcatggcgcttgctgggttacatgtatatggtgctgttctaagtgctatgcgtacatatatatattatgtaatcctcacaaaaccaccaaaaggtagatactattgttcacaaatgaaatctgagatccagagaaatgaactaacycaatgtcacacaattactatgtgcaagagctgggattcactcccgtggagctgggctccagggccttaagtaccacactttagtgccaggatgatttactacaacttctcccactcaaggacgatcctccctgcgtgatacgatggggtttcatgaaagaggataggccgggcgtggtggcttacgcctgtaatcccagcactttaggaggccaaggcgggcggcttgcctgagctcaggggttcgagaccagcctgggcaacatggtgaaaccccatctctactaaaatacagaaaattagccaggcatggtgcgtgtgcctgtagtcccagctactcaggaggctgaggccggagaattgcttgaaccggggaggtcgaggttgcagtgaaccgagatcgcgctattgcactccagcctgggtgacagagcaagactctgtctccagaaaaaagaaagaaagaggatagatgggaatggctgagaacgtaagaagacagaataaagaccaaaaggtggacgtgatttatttaagatttctcaatgaggcaagcaggaaaaaagtccattaacacatttgtaagtattacacttcttgccattgtaccttcggtttacaactgataaaacaccaacttctagctgcaatt

SEQ ID NO: 680415 - DNA, 665 bp, Homo sapiens
tgttgcccaggctggagtgcagtggcaccatctcggctcactgcaagctccgcctcccaggttcaagcaattctcctgcctcagcctccgggactacaggcatgcgccaccatgcccagctaatttttgtatttttgtagagatggggtttcaccatgttggccakgctggtctcaaactcctgacctcaggtgatcctatgaaggaggcatgattatttccatgtagcaggtagggaaactgaggcttggagaggtgaagtgattttcccaagctcacatggttacatgaaaccagatttcaaatccagctcttctgtgacctcctgggtcccttctcttgactgcccttccacctaaccccacccccaaacattgctgggccctttgaacgttctttatatggaagacattttcctgtaaacaaaataattattgaaaagactttgcatctttcagcagaccaagcaccaatggttttattaagaaagaggaagccaaacctgaggagatttacagtcagcccagaatcgcacagcccgagagcatctggggacagaagcagacagaaacagcagtggcctgcaaaggtgccggttcccaggggagcaggtaaggacccggggctcccgaacctttgtccttggagaggaggactgatttttg

SEQ ID NO: 680416 - DNA, 626 bp, Homo sapiens
atggaaagcatcacctcacagtcaacctggccatagacccattctttctcttaggaaaccactgagcatcccattatgtcatgaccaatgaacacagttgcctttatttttttattgtatttatttattttgaggtagagtctccctctgttgcccaggctggagtgcagtggcaccagctcgactcactgcaacctccacctcccggattcaagcaattcacatgcctcagcctcccaagtagctgggaccacaggcgcgcaccaccatgcccggctaattttttgtatcttggtagagacagggtttcaccatgttggcccgtctcaaactcctggcctcaagtgatctgcttgccttggcctcccaaagtgctgggattacaggcgtgagccatggcacccggyctgcctttgtttttaaatgtgatatagatggtggtggacatatatacatattgaagaatgtgttagtattttgatggcttggaatctgcatatatgagtctgcagcaaggagatgtccacagggtcccagtgatcaatgccttctgccgggaagggcatgagctttaaggcagccttcagctccaatgccagctcttcctcccagcaatggcatcttgg

SEQ ID NO: 680417 - DNA, 655 bp, Homo sapiens
ttgactgttgaggtgaattatgggaaagatccccccagagcttcccaatcggaaggaaagagacagtgcaaaggccctgaggcaggaaccagcccggatgaaaccaaagttagccagaggggctggaacacatgaacccagggaaagtacggaagtgtcacactgggtctcacagaacatagcttggcatttaggttttattcttttttttttttttttgagacagagttgtgctcttgttgcccaggctggagtgcagtggcacgatcttggctcatcgcaacctctgcctcctgggttcaagcgattctcctgcctccgcgtcccaagtagctgggattcaggcatgcgccaacacacctggctaattttgtatttttagtagagacggggtttctscatgttggtcaggctggtctcaaactcccgacctcaggtgatctgcccgcctcggcctcccaaagtgctgggatcacatgcataagccactgtgtctggcccaattttattcttatcactgtgagaattattggatggtttaagtgggggaatagtatgatctgatttatgttgtattaagggtcactctggctgcggtatatggaaaggactagaaggggcaagagaagaagcgggaaaacttgtaaggaaacta

SEQ ID NO: 680418 - DNA, 1465 bp, Homo sapiens
aagactatttaaacagttctcaaaattctcttgactactttatttctggcagaccaatatctccaagatcatcagtgaattcatcctataaccctcctgcatcattcatgcattctgctctgagagatgatattccagtagacttgtcaatgtcatcgacttcagttcacagctcagactcagagggaaactcagggtttcatgtttgccaaccactgtctcccattagaaataggactccatttgccagtgccgaaaaccataattatttcccagtaaayagtgcacacgaatttgctgtcagggaagcagaagatactactttaacaagccagcctcagggggctccactatatacagatctcttactaaatccacagggcaatttgtccttagtggattcttccagctcctctccatcaagaatgaactcagaaggccatttgcatgtgtctgggtctctgcaagaaaatacaccatttactttctttgcagtgtctcatttcccaaatcaaaatgataatgggagcaggatggcagcctctggtttcacagatgaaaaggaaaccagtaagataaaggcagaccctgagaaactcaagaaattgcaagaaaggtgaggacttttcataattatatattttttccactttcccaaggccaaaattagcattgctttcgttagagagccatgggaattttaagtcataaatgggtccttccttgacattttagtggttgcttattttgagaaaattgtctctgttttgttgctcttaaaatatacgtatttataaagaaaagtctggtgttcctgatcagtttcttctctatttcccaaagtgtttttttccttgaataccacacccttaagtctgctgggtataaggatctctgactgcttcacagggcttgttcttctctccagcaatgaagaaccaagattttttaggaaaaggttgctatctccctagagaatgaaccagtccacacttgaagttcgcagctctcccttatgggacttaccccaaatccaaccaacagttctagaattcgaaccttgcgaactaaaagaccgttcttagttaccatagttacctcggttctctgaagggccacgctggggtaaccactgcttctattttatgtgctctttttcatgcaagagagagagagaaataagatcttttctgaattgcccttttctttgatctttccttttttgtgagatgatttggggatagttcacagctatgaaatgtgatactttgtaaagccatcattaaacaccatgtcaggattctaccatttcatttatgataggtgtttaccatgctctgatcttggcttactgatctggaaattgattcttggaatttgagccctctttgtgtatattagcatgactcatgtgggctgtgaattagaaaggtaaaaacgagaggaaaatggaacatagaatgca

SEQ ID NO: 680419 - DNA, 654 bp, Homo sapiens
tttcaacaaatatttactaaataataccaaatgccagcctcatagttgctcaygcctgtaatcccaacaccttgggaggctggggcaggaggagaccttgagcccaggagttcgagaccagcttgggcaacataggaagaccctcccactactaaaaataggagcaacaaaatagagtggtggcgccgcctgtcgtccagctacttgggaagctaaggcagaagaatcgcctgagcccaggaggtcgaggctcccgtgagtgccattgcactccagcctgggtgacagagcaagaccctgtttcaaacaaacaaacaaaaacaaatgccaccgtggacaaggtactgtgctggaacctgtgtagtgacaaaaaggccttgctctggaggtgtttgagggacgacagcagtaaaatgctagagcagccgtggagagaaaggcttcttccagctgagggtaatcagaaggtcacaggtgtgagttgggactcagaaacagccccctgggaagctggtgctcctggcagggaaaaaaagcctgagcagagtccgggttgggcagtactgggagctatgggaacggtaaggagctcagcttgacctgcacaagcactgagaaggccgggaattctttctttttcttttcttttttttt

SEQ ID NO: 680420 - DNA, 654 bp, Homo sapiens
tttcaacaaatatttactaaataataccaaatgccagcctcatagttgctcatgcctgtaatcccaacaccttgggaggctggggcaggaggagmccttgagcccaggagttcgagaccagcttgggcaacataggaagaccctcccactactaaaaataggagcaacaaaatagagtggtggcgccgcctgtcgtccagctacttgggaagctaaggcagaagaatcgcctgagcccaggaggtcgaggctcccgtgagtgccattgcactccagcctgggtgacagagcaagaccctgtttcaaacaaacaaacaaaaacaaatgccaccgtggacaaggtactgtgctggaacctgtgtagtgacaaaaaggccttgctctggaggtgtttgagggacgacagcagtaaaatgctagagcagccgtggagagaaaggcttcttccagctgagggtaatcagaaggtcacaggtgtgagttgggactcagaaacagccccctgggaagctggtgctcctggcagggaaaaaaagcctgagcagagtccgggttgggcagtactgggagctatgggaacggtaaggagctcagcttgacctgcacaagcactgagaaggccgggaattctttctttttcttttcttttttttt

SEQ ID NO: 680421 - DNA, 608 bp, Homo sapiens
gtgagtggagatcgtgccactgcactccagcctgggcaacagagcgagactccgtctcagaaaaaaaaaaaaaaattctagacacagggtcttgttatgttgccccagctggtctcaaactcctggcctcaagcagtctctcctcccgtggcctccaaacgcactggagtaacaggcatgagccaccatgcctggcccattcttacaattgaggccaatgaacagcatgcatgctgcaaggtgaggcctaagaaaggtcacttaatttagtaattagggagcctcatcagtatgacccttgggaggcagtccctcagacagtaggctaaaggcaactagaggcaaaaaggggagaggtatgcccaaccatcccagtgttccctagtctgtcttggttttattccagagtcccaggaagctccttatccttccctaaatgaaggttaaatagagaagtgtaaggatgaagaggaaggtgakaaagaggatggtgataaattgaggggctttagggggtaggaccattgagggtgggattttttttctttggtatttcttttactttcagaaaaactatgattactttttggcacttacagtagttagca

SEQ ID NO: 680422 - DNA, 1081 bp, Homo sapiens
attctcctgcctcagcctcccgagtagctgggattataggcatgcgccaccacgcccggctaattttgtatttttagtagagatggggtttctccatgttggtcaggctggtctcgaacttccaacctcagatgatccacctgcctcggcctcccaaagtgctcggtggcctcccaaaggtgtgagccaccgagactggcagacctgccaacttctgttaagccttctgacacctgcagccctgaccaatgtcttgagagacccaaagctaaactacctacttaagcggcccctgcaaacctgacctacagagactataacaataaatgtctgttgttttaagccactaagttttggggtagtttgctatatggcaatggataatgcagcgtggctctggaccaggtgttctcaccctgcctctggcaatacagcttgtcctcctgtgaaacaacttcctactactgctgtctttggatgtctcaatgtcccctgttgacttcctttatcctgtcctcaaccctttactaaactctcttcaaacttcacaatggaatatgttgcctgcttcctgcctggtgcaggttggaattatgaacaagacagacacccttcccttcagagtttatattctagtggggaaaacagacaataaattagccaacaaataaataagcaaggtaatttcagagaccagtaagtaaaacagagaaaygaatggaaaaataaatggggctcgagacaggctgatcaggagcctacactaggcaggcttgtcaacgaaggcctctcagaggccgtaggctcagtctgaactcaggagaaggcaactcagacagaagaggctggagcagtcaaagggagcagcgacgtccctaagataggagagggtgtggaggtgtcaggaacagaggagggaggcccacgtgctagagcagagctcgcagggtggcaagtgggagaggggagctcaagagactcaggcaaagccagatgaggagtttgggttttgtttaaactacagcacagcccctcactaaaggatgttcagtgaggtccgtgtagtatccaatttaccttt

SEQ ID NO: 680423 - DNA, 656 bp, Homo sapiens
gcatgatgccatagcagggatatggtgtggactggggcatagtacttcgtctctccatgctcagtatagtaggaatgggagatagaaaagacaatgattgaagagtaaacatagggtgccattgacataccccattcaggtctcagagagcttctgaacctgtgtaaaccactgacctcactttactgctttataatttgcattgtgtaactctgtctccaggagacctcaggcttctttagagcagagggcatttcttttcgcttttgtctctcccgcccttagaaggtgcttggcacattcttggctctttcctggatctgtcacattctctttgctaagcaccaagaggcaatttgtgctgatagaggcaatctctatcagtaggatagctgaccccatcttcatcagtaggatagctgcctccaagtaggtctctactggaaactctctgacagaggtgggggctgtcccactccccwgaaccttgagtgtcagaggcagaatcccaaaggcctggtcatgccaccttgggacagtctggggtgggcctctctctgggagccagctcacagttcccatgctgtctccagcaactgttctttgacacacatatgaggacaacatttctcctatctgttggaacacagtcaaca

SEQ ID NO: 680424 - DNA, 656 bp, Homo sapiens
gcatgatgccatagcagggatatggtgtggactggggcatagtacttcgtctctccatgctcagtatagtaggaatgggagatagaaaagacaatgattgaagagtaaacatagggtgccattgacataccccattcaggtctcagagagcttctgaacctgtgtaaaccactgacctcactttactgctttataatttgcattgtgtaactctgtctccaggagacctcaggcttctttagagcagagggcatttcttttcgcttttgtctctcccgcccttagaaggtgcttggcacattcttggctctttcctggatctgtcacattctctttgctaagcaccaagaggcaatttgtgctgatagaggcaatctctatcagtaggatagctgaccccatcttcatcagtaggatagctgcctccaagtaggtctctactggaaactctctgacagaggtgggggctgtcccactccccagaaccttgagtgtcagaggcagaatcccaaaggcctggtcatgccaccttgggacagtctggggtgggcctctctctgggagccrgctcacagttcccatgctgtctccagcaactgttctttgacacacatatgaggacaacatttctcctatctgttggaacacagtcaaca

SEQ ID NO: 680425 - DNA, 1061 bp, Homo sapiens
catttttctgcctgcttatattctagccttgctggcagctgattagcttgtgcccacccagattaagggtgggtctgcctttctcagcccgctgactcaaatgttaatctcctttgggaacaccctcacggacacacccaagatcaatattttgtatccttcaatccaatcaagttggcactcagtattaaccatcacactgagcctggccaaagctggactacttgtaagcttttgtctggaaccgtgatttgggagccagtggcccgaggacgatgaaaactatcagaggtggctgggcacagtggttcatgcctataatcccagcactttgggaggcggaggtggatggatcacttgaggtcaggagtttgagaccaacctggccaacatggcaaaaccagtctctactaaatatacaaaaactggccaggcatggtggctcacgcctgtaatcccagcactttgggaggccgaggcaagtggatcgcctggggtcaggagtttgagacgaacatggtgaaaccccatctctattaaaaatataaagaactagtcgggcatggtggcaggctcctgtagtcccagttactcgggaggctgaggcaggagaattgcttgaacccgggaggtggaggttgcagtgagccgagatcatgccactgcactccagcctgggcracagagcgagactccatctcaaaaacaaacaatcagaggcgctgactgcagtgacagccatctggctctgacagttcctgtgcttccagcttcttgctatttcaggggctctggtcttgattcttgcaggttcccaaacctggtcctacagctccccacctcctgtctctttagtggtttagtgggcgccccctcccctgtatctttctagtgagttttaatgtgctttgcttaggtagggctggtttgtttccattgttggcaacaagaaggaattggtcaaggagtctaagaagttgtctggagaaccaagaaaaagatttcctggaagcatagaaagagtgtgtttccggaagaaagatttatcaagaatttcaaac

SEQ ID NO: 680426 - DNA, 1772 bp, Homo sapiens
tcctgggccgaggacctgatcgtgtctgccctgcttctgattcaatatcacctggcccagggaggaagaagggatgcacggagcttcgttgaagctgctggcaccaccaactttcctgccaatgaacctcctgtagctcccgatgaatcttgccttaagtctgctcccattgtaggtgaccaagaacaagcagaaaagaaggacctaaggagtgttttctttaatttcatccggaacttacttagtgagaccattttcaagcgtgaccagagccctgaacccaaggtgccggaacagccagttaaggaagataggaagttgtgtgaaagaccgttggcgtcttctccccccaggctatatgaggatgatgagacccctggtgccctttctgggctgaccaagatggctgtcagccagatagatggccacatgagtgggcagatggtagaacatctgatgaactcagtgatgaagctgtgtgtcatcattgctaagtcctgtgatgcttcgttggcagagctgggagatgacaagyctggagatgccagtaggctaacttcggccttcccagatagtttatatgagtgcttaccagccaagggcacagggtcagcagaagctgtcctgcagaatgcctatcaagctatccataatgaaatgagaggcacatcaggacagccccctgaagggtgtgcagcacccacggtgattgtcagcaatcacaacctaacggacacagttcagaacaagcaactccaagccgtccttcaatgggtagctgcctctgagctcaatgtccctattttgtattttgctggtgatgatgaagggatccaggagaaggtaagaaacaaaggcagaggaatttggaagctttattaagatttaactagggctttaagttctggtttctttctgaatgggaagatagccacagagaaggtaaaatgggaacagtgggatttgaagatcatgcctcctggcagagataatggataaagtaaaattagattttgcccaatccaaggcgtatcaaaggggaacagggggataaatgatatgtttctgttttctgcgtttaggagtaggagtgtacagatgaggaacctccaagagacctagtgaaagaatcagattaaggtctgggctctaggctgagttttggataggacagcattgctcaaaggatgagatgaagctggaaagtagccctgggatgtgttagggaagaggcagagtctgaatttatgaccttttcaaacatgccattactgtcttagctggttgtctaggtggcgttggggatttgaaaggattcagtggataacacccctcttccccctaccctaagctctgaatcagttgacaagtaagactaaagcataaggtagatgggaaatcaacttatcactgttattactgataaaggtaaacgtgcctgataagttcttgtcctccacccaaggtgcccagtaagcatcagaactgcgcgccaaagggagggtttgagtctggagaacacgcacacttaccccagatgcttcacactgaagtgcgggaattaaaaagaccatccctacaaccttctcttctctctcctctctgccttctcgctcgcttgctctctctctctctctctctctctcattttctcttcctcagtgcttttgattgtctcctcttgattgagaaaagtggaccaactgctgttaatcattaagtagcaaagggtggcacaagaggctagaattatttagaaaatttcatcatca

SEQ ID NO: 680427 - DNA, 1772 bp, Homo sapiens
tcctgggccgaggacctgatcgtgtctgccctgcttctgattcaatatcacctggcccagggaggaagaagggatgcacggagcttcgttgaagctgctggcaccaccaactttcctgccaatgaacctcctgtagctcccgatgaatcttgccttaagtctgctcccattgtaggtgaccaagaacaagcagaaaagaaggacctaaggagtgttttctttaatttcatccggaacttacttagtgagaccattttcaagcgtgaccagagccctgaacccaaggtgccggaacagccagttaaggaagataggaagttgtgtgaaagaccgttggcgtcttctccccccaggctatatgaggatgatgagacccctggtgccctttctgggctgaccaagatggctgtcagccagatagatggccacatgagtgggcagatggtagaacatctgatgaactcagtgatgaagctgtgtgtcatcattgctaagtcctgtgatgcttcgttggcagagctgggagatgacaagtytggagatgccagtaggctaacttcggccttcccagatagtttatatgagtgcttaccagccaagggcacagggtcagcagaagctgtcctgcagaatgcctatcaagctatccataatgaaatgagaggcacatcaggacagccccctgaagggtgtgcagcacccacggtgattgtcagcaatcacaacctaacggacacagttcagaacaagcaactccaagccgtccttcaatgggtagctgcctctgagctcaatgtccctattttgtattttgctggtgatgatgaagggatccaggagaaggtaagaaacaaaggcagaggaatttggaagctttattaagatttaactagggctttaagttctggtttctttctgaatgggaagatagccacagagaaggtaaaatgggaacagtgggatttgaagatcatgcctcctggcagagataatggataaagtaaaattagattttgcccaatccaaggcgtatcaaaggggaacagggggataaatgatatgtttctgttttctgcgtttaggagtaggagtgtacagatgaggaacctccaagagacctagtgaaagaatcagattaaggtctgggctctaggctgagttttggataggacagcattgctcaaaggatgagatgaagctggaaagtagccctgggatgtgttagggaagaggcagagtctgaatttatgaccttttcaaacatgccattactgtcttagctggttgtctaggtggcgttggggatttgaaaggattcagtggataacacccctcttccccctaccctaagctctgaatcagttgacaagtaagactaaagcataaggtagatgggaaatcaacttatcactgttattactgataaaggtaaacgtgcctgataagttcttgtcctccacccaaggtgcccagtaagcatcagaactgcgcgccaaagggagggtttgagtctggagaacacgcacacttaccccagatgcttcacactgaagtgcgggaattaaaaagaccatccctacaaccttctcttctctctcctctctgccttctcgctcgcttgctctctctctctctctctctctctcattttctcttcctcagtgcttttgattgtctcctcttgattgagaaaagtggaccaactgctgttaatcattaagtagcaaagggtggcacaagaggctagaattatttagaaaatttcatcatca

SEQ ID NO: 680428 - DNA, 1772 bp, Homo sapiens
tcctgggccgaggacctgatcgtgtctgccctgcttctgattcaatatcacctggcccagggaggaagaagggatgcacggagcttcgttgaagctgctggcaccaccaactttcctgccaatgaacctcctgtagctcccgatgaatcttgccttaagtctgctcccattgtaggtgaccaagaacaagcagaaaagaaggacctaaggagtgttttctttaatttcatccggaacttacttagtgagaccattttcaagcgtgaccagagccctgaacccaaggtgccggaacagccagttaaggaagataggaagttgtgtgaaagaccgttggcgtcttctccccccaggctatatgaggatgatgagacccctggtgccctttctgggctgaccaagatggctgtcagccagatagatggccacatgagtgggcagatggtagaacatctgatgaactcagtgatgaagctgtgtgtcatcattgctaagtcctgtgatgcttcgttggcagagctgggagatgacaagtckggagatgccagtaggctaacttcggccttcccagatagtttatatgagtgcttaccagccaagggcacagggtcagcagaagctgtcctgcagaatgcctatcaagctatccataatgaaatgagaggcacatcaggacagccccctgaagggtgtgcagcacccacggtgattgtcagcaatcacaacctaacggacacagttcagaacaagcaactccaagccgtccttcaatgggtagctgcctctgagctcaatgtccctattttgtattttgctggtgatgatgaagggatccaggagaaggtaagaaacaaaggcagaggaatttggaagctttattaagatttaactagggctttaagttctggtttctttctgaatgggaagatagccacagagaaggtaaaatgggaacagtgggatttgaagatcatgcctcctggcagagataatggataaagtaaaattagattttgcccaatccaaggcgtatcaaaggggaacagggggataaatgatatgtttctgttttctgcgtttaggagtaggagtgtacagatgaggaacctccaagagacctagtgaaagaatcagattaaggtctgggctctaggctgagttttggataggacagcattgctcaaaggatgagatgaagctggaaagtagccctgggatgtgttagggaagaggcagagtctgaatttatgaccttttcaaacatgccattactgtcttagctggttgtctaggtggcgttggggatttgaaaggattcagtggataacacccctcttccccctaccctaagctctgaatcagttgacaagtaagactaaagcataaggtagatgggaaatcaacttatcactgttattactgataaaggtaaacgtgcctgataagttcttgtcctccacccaaggtgcccagtaagcatcagaactgcgcgccaaagggagggtttgagtctggagaacacgcacacttaccccagatgcttcacactgaagtgcgggaattaaaaagaccatccctacaaccttctcttctctctcctctctgccttctcgctcgcttgctctctctctctctctctctctctcattttctcttcctcagtgcttttgattgtctcctcttgattgagaaaagtggaccaactgctgttaatcattaagtagcaaagggtggcacaagaggctagaattatttagaaaatttcatcatca

SEQ ID NO: 680429 - DNA, 1512 bp, Homo sapiens
tggggtgtggtgacgtggatagagtgctgtcatcatgttatgatacattttatgataaattggccaaaactgtctgttcaaagctaccctggccacccacctctcctcattctctcctagagaaaaggagctgaccatcactccctaccttatgaaagacttgggtcattctggagttcttgatattggaaggtggcttctggatctgaaccgaaagtttacttccaacctggatcaagtggaagaaaataggaacaatgcttggcatggctttatcccacactgtatatttttgttacattacaataaacaaactatgcttgaggccagctctcctgamtccttagctgggaagagccaagagaggctccaataagtactcaatgaatgtatgaatggatgattatccaaacaaatgatctttcccaaagtgttcatcctggatgggcttggcctatggttttcatgctttaaaaaaaatcaatatggccttttcttccaacaaaatcttaactagagaccctgcttacggtaaggagtaacagctgagctgctcttgctctttagaaaagaaaatggccattgccttgcctggaagtcttttcgccctgagtgtggctctgaaggtggcatagtggaacccacccagtggaacacaggcacccagcctggacaccagtgccctgatcagaagagacttcacgcctagaagggtgaggagaagaagaccaaaatactagagcagtgtgtcccagagggcggcaagcaccccgcagaggaagaggacgtaatgtgtacagtacgcagataaagagctatctaatgggtatggatttactgtaatatccatttgaaaaactgtaacaagcacattgaacttgtaacgttgtggttgttattatgtaggatgagattaaaatttaagttaaaaaaaaaagtaaggccaggcatggtgtctcacacctgtaatcccagtgctttgagaggctgaggtgggacgatcacttgaggccaagatttccaggttacagtgagctatgatcgtgccactgcactccagcctgagcaacagatagagaccttgtctctacaaaaaacaataataaaacaaaacagagtgtgaggactatgtaggcgtaggcatggcaaaaactgtaaagctggccctcaaatgactgaagtttagcaaacaacaggctagagcttgaatcgaagttctggtctttgaagccaaaccagggttcctccttcttccagacctcccctatggagttgaaggatgtttatccaaagctgacacacagctggtatcagacccacttctgtaaacatttggccacactgaaataacaactgggtacaacacttaatatcatccagcacagctaagtcctgcacagcacagtaatgatgaggactatttgggacagtcaatcttgacctcctgcaatagggaggtagtctgagggagagagggttgcatagaacatggggcatggtctcagaccacgt

SEQ ID NO: 680430 - DNA, 1512 bp, Homo sapiens
tggggtgtggtgacgtggatagagtgctgtcatcatgttatgatacattttatgataaattggccaaaactgtctgttcaaagctaccctggccacccacctctcctcattctctcctagagaaaaggagctgaccatcactccctaccttatgaaagacttgggtcattctggagttcttgatattggaaggtggcttctggatctgaaccgaaagtttacttccaacctggatcaagtggaagaaaataggaacaatgcttggcatggctttatcccacactgtatatttttgttacattacaataaacaaactatgcttgaggccagctctcctgaayccttagctgggaagagccaagagaggctccaataagtactcaatgaatgtatgaatggatgattatccaaacaaatgatctttcccaaagtgttcatcctggatgggcttggcctatggttttcatgctttaaaaaaaatcaatatggccttttcttccaacaaaatcttaactagagaccctgcttacggtaaggagtaacagctgagctgctcttgctctttagaaaagaaaatggccattgccttgcctggaagtcttttcgccctgagtgtggctctgaaggtggcatagtggaacccacccagtggaacacaggcacccagcctggacaccagtgccctgatcagaagagacttcacgcctagaagggtgaggagaagaagaccaaaatactagagcagtgtgtcccagagggcggcaagcaccccgcagaggaagaggacgtaatgtgtacagtacgcagataaagagctatctaatgggtatggatttactgtaatatccatttgaaaaactgtaacaagcacattgaacttgtaacgttgtggttgttattatgtaggatgagattaaaatttaagttaaaaaaaaaagtaaggccaggcatggtgtctcacacctgtaatcccagtgctttgagaggctgaggtgggacgatcacttgaggccaagatttccaggttacagtgagctatgatcgtgccactgcactccagcctgagcaacagatagagaccttgtctctacaaaaaacaataataaaacaaaacagagtgtgaggactatgtaggcgtaggcatggcaaaaactgtaaagctggccctcaaatgactgaagtttagcaaacaacaggctagagcttgaatcgaagttctggtctttgaagccaaaccagggttcctccttcttccagacctcccctatggagttgaaggatgtttatccaaagctgacacacagctggtatcagacccacttctgtaaacatttggccacactgaaataacaactgggtacaacacttaatatcatccagcacagctaagtcctgcacagcacagtaatgatgaggactatttgggacagtcaatcttgacctcctgcaatagggaggtagtctgagggagagagggttgcatagaacatggggcatggtctcagaccacgt

SEQ ID NO: 680431 - DNA, 1512 bp, Homo sapiens
tggggtgtggtgacgtggatagagtgctgtcatcatgttatgatacattttatgataaattggccaaaactgtctgttcaaagctaccctggccacccacctctcctcattctctcctagagaaaaggagctgaccatcactccctaccttatgaaagacttgggtcattctggagttcttgatattggaaggtggcttctggatctgaaccgaaagtttacttccaacctggatcaagtggaagaaaataggaacaatgcttggcatggctttatcccacactgtatatttttgttacattacaataaacaaactatgcttgaggccagctctcctgaatcctwagctgggaagagccaagagaggctccaataagtactcaatgaatgtatgaatggatgattatccaaacaaatgatctttcccaaagtgttcatcctggatgggcttggcctatggttttcatgctttaaaaaaaatcaatatggccttttcttccaacaaaatcttaactagagaccctgcttacggtaaggagtaacagctgagctgctcttgctctttagaaaagaaaatggccattgccttgcctggaagtcttttcgccctgagtgtggctctgaaggtggcatagtggaacccacccagtggaacacaggcacccagcctggacaccagtgccctgatcagaagagacttcacgcctagaagggtgaggagaagaagaccaaaatactagagcagtgtgtcccagagggcggcaagcaccccgcagaggaagaggacgtaatgtgtacagtacgcagataaagagctatctaatgggtatggatttactgtaatatccatttgaaaaactgtaacaagcacattgaacttgtaacgttgtggttgttattatgtaggatgagattaaaatttaagttaaaaaaaaaagtaaggccaggcatggtgtctcacacctgtaatcccagtgctttgagaggctgaggtgggacgatcacttgaggccaagatttccaggttacagtgagctatgatcgtgccactgcactccagcctgagcaacagatagagaccttgtctctacaaaaaacaataataaaacaaaacagagtgtgaggactatgtaggcgtaggcatggcaaaaactgtaaagctggccctcaaatgactgaagtttagcaaacaacaggctagagcttgaatcgaagttctggtctttgaagccaaaccagggttcctccttcttccagacctcccctatggagttgaaggatgtttatccaaagctgacacacagctggtatcagacccacttctgtaaacatttggccacactgaaataacaactgggtacaacacttaatatcatccagcacagctaagtcctgcacagcacagtaatgatgaggactatttgggacagtcaatcttgacctcctgcaatagggaggtagtctgagggagagagggttgcatagaacatggggcatggtctcagaccacgt

SEQ ID NO: 680432 - DNA, 693 bp, Homo sapiens
tgatcatgaattattaactttcttatgtttattggtcattatacttcttataaagattatttgcatattttcttattgagatgatcatctttctttaactggcatgtgacattttacatagcaagactattaatcctatgacatattgaatgtggaaaaatttagactgctttcacaccacaacaatcaacacataagacctctgtgattaaatttgtgtgtgtgtgtgtgtgtgtktgtgtgtgtgtgtgtgtgtgtgtgtgtcggggttggggacattctgcggtggacaccagctgggtgtccttcaatttaattctgacaccatccacctgagatagcgtaagatcccacagattgaggactcagtcccataagactgccccccacttccaatgtccatcccaagccctaagtttttctatctgtgctcctgaccgattggctacaaatcgaggatcccacgaccttctccatgagttcgtttaatttgctagagcagctcaaagaactcagggaaacacttttaccagtttattataaaagaaactacaaaggatacagatggagatgcatagggtaaggtatgggggaagagatgcgcagtgtccatgctgtctctggatgtgccgccctccaggaacctccacatgttcagcaatccaatatgaaaagaaaataaaatctcaggcc

SEQ ID NO: 680433 - DNA, 642 bp, Homo sapiens
ggaacactacgttgacctgaaggaccgtccattctttgccggcctggtgaaatacatgcactcagggccggtagttgccatggtgagtgtgcctgtgtgggatactccaagtatgcattgcttgtcatctgtgctaggctctcttctagacactggggatacagccatgaatgagaccaaatagatacctgttttcatataycagctaatggttagtgataggcttcagaaatgaaatatgcccagaaatgaataggagtagcaaatgatcactttagattgggtgatcaaagaacgcaatttttaagctgtgatctgaatgacaagaagcagcgatctgaatgacaagaagcagccagccatgtacagaatcacagtgaaaaacatttccagccaagcaaacagcatgtgcaaaggtcccagggtgggaatgagcttggctttttgaagtacgggaggagagttgaaatgcccgaagcctgatgggtgggagggaagttgggaggtgaagagttcagaggcatgggcaggggccttctctcttaggggtgtgttgaccatatacttcctgagtgctgggaagctatgggacacttcacacttggcatttctttttttttttttttttgagacggagtcttg

SEQ ID NO: 680434 - DNA, 643 bp, Homo sapiens
caggatgggggagaagagggtagttggggtgggctgcctttacagacagatgatggcgagatgaatttttttttttaatttagtttttttttttttttttttttttgagacagagtcttgctctgtcacccaggcgggaatgcagtggtgcaatctcggctcactgcaagctctgcctcccgggttcacgccattctcctgcctcagcctcctgagtagctgggactacaggtgcccgccaccatgcccagctaatttttttgtatttttagtagacattgggtttcactgtgttagccaggatggtctcgatctcctgacctcgtgatctgcctgccttggcctcccaaagtgctgggattacaggtgtgagccaccgcacctggccccctttttttttttttttaatttttgagatggaatctcaatctgttgcccaggctggagtgcagtggcacgatctcagctcactgcaacctctgcttccsgggttcaagcgattctcctgcctcagcctcctgagtagctgggattacaggcatgcgccactacgcccggctaatttttgtatttttcttggggacggggtttcaccacgttggtcaggcttgtctcgaactcctgacctcgtgatccacccgcc

SEQ ID NO: 680435 - DNA, 1672 bp, Homo sapiens
aaaagagaaaacaaaacaaaacacccccaaacaactataatgacaataataacaaaattggggggtgtaaatataaggtgggccaggcacagtggctcacgcctgtaacccagcactttgggaggctgaggagggtggatcatgaggtcaggagattgagatcatcctggccaacatggtgaaacccaatctctactaaaaaaaaaaaaaaaaaatacaaaaattagctgagtgtggtggcacgtgcctgtaatcctagctacttgggaggctgaggcaggagaatggcttgaacccgggagacagcggtacagtgagccgagattgtgccactgcactccagcctggcaacagagccaggctctgtctcaaaaaaaaaaaaaagaaaaagaaaaacaaaccaaacaaaaataaggtggaacgatctaaaacgctgcatggcgataacacatgtgatgggttacaatgtctaaattccgtctattatttgtgaagagagcagtaacattaactttagactttaggtcaaatgtgcttgacaaaagtttagggctcaccactaaaacactggaaatagagtgtgtaatttccaaattaatagagggaaaaggggaaaataaagaaaacttgatgaaaccgaaagaaggcaggaaaggaggaagaaaaggcattagaaagcatagtaaatagaaactacaaaaagaaatggtggaaataaatccaaatatattaggaaacaataaatgtaagtgaattagactcactagttaaaaaatgattgccaggttcaattttttttaataaaaagaaaacttgcttatgctgttttaaaaatacatacctaagacaaaaggacacaacaaaaaggctgaaagcaaaaggataaaaagagatataccaggcaagtaagagtcaaaacaaagtgtagctataataactgtagcagaaaaaaagtctgaggcaaaaagtgatcattatataatgatgaaaggatcaatttataagaaagatataacaaatgcaaattgtatttatctattatagactttaaaaatgtataagacaaaatttgaatgaattacaaggagaaaattttgaatctttataggagatttaaaaacacacctttctggtatgttcaaatcgcataaaaattggcatgaatttacaagatttgaatgacacaatgaacaarattgatcaatcttgtattcaacaattgaagactgtacatttttctcaaatgcacaagaaatatttgaaaaattaacaagttactaaaccacaaagcaagtcttaacaaacaccaaaaaataaataccatatagttcaccttctctgatcaaaatctaattaagatagacatgaacaacaaccaaaaaagtgactttaaaagaaaacaacaccaaatgtttagaatttaaaacatttctaattaactcgtggatcacaaaaaaaagtataatagcaataaataaatattcagacagaacaaaatttaaaatcctacataaaactggaggaatataaggtacagagaacagtggttctgaatagggggacttttgctgctcaggggacatttggcaggtctaggggcatttttggttgtcacaactacgggcagctgttactaccatctagcaggtaaaggccagaaatgctgccatcc

SEQ ID NO: 680436 - DNA, 1766 bp, Homo sapiens
acgtatacttctgttttctaaaggtccttggccaagagctactttttttttttttttgagacaaagtctcattctgttacataggttggagtgcaatgcgcaatctcggctcactgcaacctccgctctggggctcaagcactcctcccacctcagcctcccaagcagctgggactacaggtgtacaccaccacgcccagctaatttttgtattttttgcagagatggggtttcaccatgttgcccaggctggtctcgaactcctgagctcaagcagtccgcccaccttggcctgtcaaagtgctgggattacaggcatgagccaccacacccaccaaagagctgcttttaaaaaaacaataaaaattttaaaaaaattttagagctgaggtcttggtatgttgcctaggctggactcacacttctgggcttaagcaccatccttccactstagccagccttccaagtagctggaactacaggggtgcaccactgtgccccaagctgtttttgtttttgtttttaatcatatattactaaatagccctgcaattttgtttatttatttatatttatttatttatttttcaagatggagtttcgctcttgtacaccaggctggagtgtaatggtgcaatctcggctcaccacaacctccgcctcccaggttcaagtgattctcctgcctcagcctcctgagtagctgggattacaggcatgtgccaccacgcctggctaattttgtattttttatagagatggggtttctccatgttggttaggctggtcttgaactcccgacctcaggtgatccgcccaccttggcctcccaaagtgctgagattataggcatgagccaccgcacctggccttatttttatttttttagaaacaaagtctcattttgttgcccaggttggagtgcagtggagtgatcataactcactgcagccttaagctcctaagcttaagcaatcctcccaccttagcctcctgagtagcggggaccacaggcacatgccaccacacctggcctacctttttaagtttatattgtcaacacagggttttatccagtttgctactttgcctgtgtggtctgtcatgtgcatgacatccttatatgatcatatcagttttgactaatttaacttctagtgttcaatctgcagaactaaggctgaaaagtaaaatattacgtttataggaaggctacttcaataccagtttttgcttcttcaggtcaccattctccaaaagactatccaggctgtaggtgaatgtgagcagagtgaatcttcagctttcaaagcaggtaacaaccatataacctattagaaattctcatcaatgcagaattgaaaatcacagtgcaggctgggcgcggtggctcacgcctgtaatcccagcactttgggaggctgaggttggtggatcacctgaggtcaggagttcgagaccagcctggccaacatggcaaaaccccatctctacataaaatacaaaaaactagccgggtgtggtggcaggcgcctgtaatcctagctatttgggaggctgaggcaggaggatttcttgaacctgggaggcggaggttgcagtgagctgagatcgtgccattgcgtgacagagcaagactatctccaaaaaaaaaaaaaaaaaaacagaacacacaattggaaatgttttcctactgtacagtgataattgatgttcataatgatgcctttggtggtctaatgtcttaatgagcttcttgaatcatc

SEQ ID NO: 680437 - DNA, 1425 bp, Homo sapiens
ggtgaaaacatggtgctagactctgcaacagccatactacaactgggaggaaatttatcacccacacaccgaagaaagcaaggcagaaagatggaaagagcctgggcccttcaccaatcctagagctacttacctctgaaaatcttatgtaaaaatgtgtgcttatgtgaaaaatttgttattaatgtttaagctactaatacttgtttaatgtttaagttctaatacttgaaagtgagagcatcctgacagattctggtattcaatcttgaattaagattaaccatattctctgaatatagactaatagccaaaatttattttaaatgtgtaaataaagaataagcatgaaaataacccaggataaaatacagactactttataagtctgtggttacataacaaatgatgtatgcaatctagactaataaaagatcatataagtacaaaacctaaatgccatttcaatatttatctttaaacttttgtagactgatttggttacactaaccaacttctactgttagtcgaacaataaatataacactacacattctttaccattattaaagcagagtatataacaataaagctgatatatgttgagtaaatagtatatgccatatctaagtactttaatcaattagtccttacaacaaccttttcagaaaagcaataaaggtccaaaaagtagaataaaacagcattctttgatctaaaactcaaaataacaaaattaaaaaggaccttccacctgaacattttaactctctacttaaaaaataacaaaggccaggcatgatgactcacacttgtaaatcccagcactttgggaggctgaggcgggtggatcacaaggtccgtaattcaagaccagcctggacaatatggtgaaaccctgcttctactaaaaatacaaaaattagccacacatggtggcaggtgcctataaycccagctactcacaaggctgaggcagggaactgcttgaacccggaaggcagacattgcagtgagctgagatcatgccactgcactccagcctgggcgacagagcaagactccatctcaaaaaaataaataaataataaaaaataaaaaaaaacaataaaaagactacatattagatctctagaacaaattaaagcagtgatcacaggaaattttacagtcttaaacacttcaataaaaacaaaagaataaaattaaactcccaactcagaacactaggaaaaaactagaagataaaccaaaagaactgtggtgctggattagagctggattagagtgtgaatgcaaaatatcaagtcatcactttttaaaaatttattttctagccctgaccatttaaaagagcctagaagcaatgacatcccagtgggaacaagcacaccgtgtgctcacatcatggtttctaaataccat

SEQ ID NO: 680438 - DNA, 642 bp, Homo sapiens
tgcactccagcctgggcaacagagcgagacactgcactccagcctgggcaacaaagcgagactctatctcaaaaaaaaaaaaatagatatagatatagatatagatagatatcttacatttcataaaacagataataaaataataaaccataaactaaattgaaggagatgaaggaagcaagggagaagagacaccaagacagaagctaatattttaatcaatgcattaatacttcattttgtagatttcactctggaatcattaagtatcttataggttttttttaagaaacaagctcggggccaagtgtgggggctcacacttgtaatcccagcactttgggaggccaaggcgggaggattgagcccaggagttcaagaccagcctgggcaacatactgagaccccatctctacaaaaattttaaaaattagccaggtgtggccgggcgcggtggctcatgcctgtaatcccagcactttgggaggccgaggcgggtggatcacgaggtcaggagatcaagaccatcctggctaacacggtgaaaccccgtttctactaaaaatacaacaacaacaamaaaaaatagccaggcgtggtggtgggcgcctgtagtcccagctactagggaggctgagacag

SEQ ID NO: 680439 - DNA, 1900 bp, Homo sapiens
gcccctggcatccttggaccctttctgatcccaactctgattttgcttactactgactgctacctgtcataattaacttacgtgtttgtttttgcccatctcctgaccattagtaataccccaaggggacctttggtgcctggcacatagtgagtgcttagcagctgggcaggaggtatggcatagtctggaagaggttaatgcaagtggcccctggtcactgcactgcctcttgcctgctgtgtgcttttgggcaactttacttaacctttcttagtttcagttccccctcagtaaaacctacctggaaggttttttaggaggattcgaggtaatacatttaaagtacctgagacatgatcagtgctcagacgggggctacacaggccacttagctgccctctaggcctgtttccaagaacttactagtgctgcctccatctacccccaggatagagggctgccacagtagatgaaggtaacactatagaagcggttactgactctattctccatgtcataccctgaccctgggtcccctgggcattgtttctggctccagccagttctcctccatcccccagcaccatcagtttcttttttctttcttttttttttttttttttttgagatggagtcttgctcagtcgcccaggctggagtgcagtggcgcgatctcggctcactgcaagctccgcctcccgggttcacgccattctcctgcctcagcctcccaagtagctgggactacaggtgcccgccaccaggcctggctaagtttttttgtatttttagtagagacggggtttcactatgttagccaggatggtctcgatctcctgacctcctgatccacctccctcggcctcccaaagtgctgggattacgggcgtgagccactgcgcccaacctttatgtggtattttgttattttttgagacgggtctctccctgttcccccaggctggagtgcagtgatgcggtctcagctcactgccagctctgcctcccgggttcacgccattctcctgcctcagcctcctgagtagctgggactacacctggctaattttttgtatttttagtagagatggggtttcaccatgttagccaggatggtctcgatctcttgacctcgtgatccgccctccttggcctcccaaagtgctgggattacaggtgtgagccaccgcgcccrgccatcagtttcttaccaaagcccctcagatgatggtcatgtctgagcaggtcctgcaagttgagaccctcgccagccctgctttggatcaaggtggcccccgatgtgggaagccagaggtgcttgctgggaatgtatagatatgtttggacttcatgagctatggaccccaggggtccttctctggcaaagcacccatgtttgtgaggtgggcaccgcttagcaaggcaggtggctggctagtcaggtaggttttccctggctgctccagaaggtgagtcatgagtagtttccctgtgggccaccagggggcaccagaggtcgctcagctcttccgaggacttgatccgtctcaagatgactgtctcctccctcttcggcctaggactttcttgaaggaaaagagctgtagtggtgcctctctcatctcctaacttgctagggactgccagtcaaagcagggccacagtaaaggactgaaggtcaggattccaggctcaatattctttattgataagcattagtgaaccccttgccctgggagctcagccagtcctgctctcagattcctggccttaggtgggagagcatcttttcctcatggatcaactgtccatgtctgactgtgcctaacttgccagatcatgggtcagggagacaggcagcaggtattggaaggtgatggccaggtccttttcccca

SEQ ID NO: 680440 - DNA, 1325 bp, Homo sapiens
gttagtagctcctgcacctacactctgacctctcccttttctagtgattcttgcacttgctggcagttctgtgtctgcatcgcacagatatgcctgtggcccttattatttcaggtacattgatcttttcttcccaagtagattagaagctccataagggcaggagccaaattaggttttaggcttcttttggcttttctacaccacaggcaggtaattagatcttgaaaatatttgtcaactgattgacattgccatcatttcttactttcttcacttaaggcattatctccaggaggcccttataaaatatccatgtaggatgtgaggatgatctggctgtgacatctgtcaccccattgatcaccagggttgattcggctgatctggctgtctaggcgggtgtccctgtcctccctcacagctcctcgtgcatccctcccgaagctgtgtgctctgttgaggacgaccatccctgatagaggaggatcagtcttccgtcaagggtatatgagtagcctcgctcccatgctagaacttccaaacaagctctcaagrtccataaaatatccatgtattacctgggagctattcattcattgacttacccagtggttcctaactaaagtgtcatgacatgctgctagagcctaagtaatctgtaatgactacagctgctgctgctacagccaagcatctgccctttgttgttcctgttatcctttccagcagtcttagatgggtatttaattatccccactttactgatggggaaactggtcactcaaaatttgtgagtctgagatttgagcttagggcatcccttgaatagcatctatcccattctctcacaatttgaatttttctcttttcctgaatatgctatcttacattggagagagaggagtagcatttacagctgaggattgtgacttgttcacagtctgtttccctcctgaagagaggaagggtgttgaagtgagggtcactgctcctgaagccccagtggacagagacaggcaggagtcctggggaagctggggagtgaagcccaggggctgactgctcagggtagagcaccagaagcacagatgaatagctttgctcatcataaggaggctgggccagagggcagaaatagaaattcaaggtgggaagacagacctgtgagaccattaatgcaatccaggaaggtgaggctggccaggcgaggtggctcacgcctgtaatcccagcactttgggaggctgaggtaggtggatcacctgaggtcaggggtttgagaccagcctggccaacatggtgaaaccccgtctctactaaaa

SEQ ID NO: 680441 - DNA, 674 bp, Homo sapiens
tccaagtattagtgcccagcatgctgggcaagtcacacagccattttgaaacttaggtttctcatctgtaaaataagcacaaaaatcgtattttccacacaggtttatggaagttaaaagtgataatggctgtaagtagagtcctggaacacagcatgcccccaataaattattatccatagtgccaaatgggcctaatactcctatttacataggagttaatggggcgttagtaggcaccagtttaaggaatccacaagagaaaggattatctgtagaatgggcgggtgattacaggattatgcagactgccttgccccttctcttttggccaagtagaaagtacttatcccrtttttctctctaaagtctgctttgtcaggcttctagcattcacttttgttctaatcacattttgtctaattaacatcaaattccaatttataattagtacagagaaaaacatccaccaagcaaaacttctcctgatacccagtggtgtgtgattgaggcgggtatttgctgagcctgggacgtgtcctgccagcccaaggtttaatcaaggaatgtggaatctcatatatatgcaaccaagttaccatgattaagagaattttccttcaaaggctgttggtcccctgaaggaaacataccaagcactaccatagaaggaa

SEQ ID NO: 680442 - DNA, 2231 bp, Homo sapiens
tgaaaacgctatgctctgtggtaatgaaattgggacaactgctttaaattaaatgcaacaagtgggccttgtaacatgatcaaaatccatcccaggccttttctaaattccaaatgtaaccagaatacctctttaacaatatttgataagaaatatttaacacttttcacatatttcctgtaattatacatttataacaaaatgtggatgtacttggcagccaaaccaaaatgtttcatattactctcagattgcaactcttgctgctgaaatacagtatactaaaaatgaaataacttttccattttaatgtggttataagcttcctgctaggcagcaacctaattgagacttttatgttagcttttttcagacatgctatccttcatcatctgcagagtattttaactatagatctcttgtagtcgtcccaaagttgacacagggaagggggatgggatgggaagaggaaggccactttatcaaagtcagtggaaatacaaggcattaattatgttaaatgaagaaatatgggcatttggttacatttgtgggtcagaaatattttaatctgtcgctgccagccagctgcctctccctgacaccccctccctgcatttatatcagctgcaggaacacatcaaagctccaaaatgtggaggaaagctgccacaagtagggccttccttacccaacccccgcttcaaggtcacagttttaactagagtgaccatagtgtggtccactataatcagtagtaagaccatgaccttttttatattttggaggcatagatggtaaaaaagttggtaaaccatcagccctaggcatttttttcttaaaaggccctagtaaatggaaaatacaatttttgtgatatttagaaaaaacaaatggtgtactcaattgctcccagtcaaagcaaagttggatcacacagatgcagctgacttttaagctttgctaagcttgccaagcataccatgcaggagcgcagtcacagggaggggagacatacttgtctgccatgatgccccagcaagttctattagatcagtgctcggaaattccgtatattaaccatccagcacggcaatggcaattacctaaatgtgacatattcactatatgactagtggagggacttttacaaggttatccagtaaattaaaaaaaaaattaactcagactatttttataaagtttttctgatcaaggaatcagataatatgttaggaagtcaggtcaccataacatgcaaaaattctgcaaaaaaaaaaaccaccctgctttaaatgataaaaagcaactttttagtgaatggcatttccttgtagttaatttatatctttgaatctagtagcatataaagattttggacaaatgtatttatagatggttctattttcaatatatatttttatttaaatcaaagataccagcgagactgtcactacaaaaaaaaaaaaatcaaagatgccaaccacatattttttcttttacttcaattgcagaaaattctcaaaggtattaacttgtgtgtataaatttaaagaaactaatcttttgcatagaatacacaggcaaacacaacttatctgttctaggaytggattttgaaagttcttatggtagattttgaaaataggaattaatcaggatgaggcacagataaaccagatttttcttgaatgttacattacaggtagagaggaacatcttttaggcaaaaacaaaacaaaacacaaaaacaaagaaggcaggactcaagtgaaaagacaaagggtctgcctctccaggcctctgaaaagatgaaggcaagggtgttttcactactgttgagtcattccaaccttaatcaaatgtctgcacttcaacatagttctcccacctcctcaaggatgttaaaaatgcacaagattactgtctgaagatatgtgtgaagatagctgcctgtagtttttgtaatcttaataattcaataaaaatccatacatcttgggtcagacttaccaaatggttttaagtcatgaataaaaggatttagaaagatgttcacctgaaatcatctcacaagtttcttcttcatttcactcactacttcttggggaaaaaaaaaatgaacattttacttttactgatagttaattgttgtcagaggtaatatccacacacacaaggaattttaaactaaaaccaaacaaaatctctcaaagctgatactgggtata

SEQ ID NO: 680443 - DNA, 1151 bp, Homo sapiens
agtcctgcagcacatgacttcagctggctggccagagctagtcctgagctccaacctggggagcacatggaatattgaatgagcacctcatgaggtcatccctacatccagatgacttgttttactttcagaagtgttacaaccttttgataaatgagaggttctatcaagggggaatttgatcagatgttttagatytgtccccatttcagttgcttcctatgtcccaaatgttcagatttggggagagaagtctatgcttgtccaatgttggaagctgagatgggttctctcatggatcatataggccccatatgagtttttcaggtctgaatgaagagggaagtgaagcctctagtttgatttctgttttcttcaactaggtcagagcttcagcagctttccaggggtgaatatgtagcccaaatatgaaagatgccaatgtccaagctaactgcaatagggagattcaattatctccagaaaattcacagaagaaacgctcacgatcaacacacacattaaaaatcgtttctaccccactttcacctgggtggctactttgtctctaactggccgttttgtccaggagagctggcagaactaaatggcaggagaaaatccacccagcaggatgtatgaatcccaatgtcaggtccatttcctaggtcactggtcatcactcactgtctgcctcccccagagccctcactaccagccactgctcttgggaaatgttaaggagaacttgtccagtgttttttttttccccccttacttcccaggagagttttttcttcatatgtggtgaatcgccagttggccaaatctttccttggcttggtcttattcataatatagagagcagaaatacttttgaatttctacatatggatagaactcttccatagtttctaattctgatagaaaacttatatttcttggcttatatattatttttaatatttatttttctgattagaaaaaatcagaaaaaaagagtaaaatggttgttgcaaacaatccaaacatttccaaaatgtgtaacctagaaaatggatgtcgagttgaaagggtcagagataaataaagacttaaatgtttattgtgtgaccttacattgcttaaattttataaaatctttatacttg

SEQ ID NO: 680444 - DNA, 1934 bp, Homo sapiens
ctatgttgacttcttccctttcctttttcattcccctactccccttattggttttccttaaattctaaataaaatacagtcatcctcagtatccaagggggattggttccaggcttctcagagaataccaaaatctgtggatgctcaagtctcagttataaaatggcgtagtatttgcatataatctacacacgtcttcccatatactttaaatcatttccatgttacttacaatacctaaaaaaacgctacataaatagttgtcattgtcaattactttttatttttgtatcgttatttattatttttttcaaattttttttactgcctgtttggttgaatcatggatgtagggttcatggatattgagggctgactaatcgcacttgacttttgactccgtgttggcttttgggtaaacccagactacattttgaaagtaaagccaataaaattttctaatgcattgtatttgggatatgagcaaaacagaggagtcaaggatgcttccaatgtttttggcctaaaccatggggaaaatttcatctttataatattaagtttcttagttttaatactgaatatgatgcctccttccaatttccctgtagagccctttgcatctttcattgaatttattcctaagcatttaatagttttgatgccattgtaaatgatatattttttctttttcttttttttaaaaatagggtctcactttgttatgcaggctggagtgcagtggcacgatcttggctcactgcagcctcgaactcctgggttcaagtgatcctcctgcctcagtcccccaagtagctgggactacagacatgcaccaccaggcctggctaatttttttgtattttttgtagagatggggttttgccatgttgcctaggctagtcttgaactcctgagctcaagtgatccaccggccgtggcctcccaaagtgctgggattataggcgtgagccaccacatccagcttgtaaatggtatatttttaaatgtcagtttctaaaatgttttgttagcataaagaaatacaattgactttttaataccaagccatcttgctaatttaataatttagttctagatctgatttagactttatagttgtgcaattgtactatctgtggaaaatgacaatttttctcttcctttataatctttagcttttttttcttttccttggctttttgcaagataatgggatgtccagtgtggtgttatatacaagtggtaattgtaagtgtccctgttctgttctttttgtttgttgttctcaagctcaaagaaaaacaactttgctatttcgtcattgagtatgataacacttaaactttacttactgtaggattattgtacataatctttattgtattaaagatgttcctattttgctaagaattcaaattttgctaagaatgtttttatctcagaggtaatgatgaattttaccatatactttttctgtctctgttgagaggataattagatttctcttctttgttaattctctcctcaaggtcatgctgaataccaaatttccatataaaccctaggaagtgatgaattctctagactaggatctttgcaaaattatctagggcttctatcatttgcctcccctttctatccctgccccctctctcctagaccctttaaatgccatattcttttgggaggacaattggacaattggcatattggaggacawattctttttttttttttttttttttttgagttttttgagacagaggcttgctctgtcccccaggctggagagcagtggtgtgatctcggctcactgcaagctccgcctcccaggttcacaccattctcctgcctcagcctcccgagtagctgggactacaggcgcctgccaccaggcccggctatttttatttttttattttcttattttt

SEQ ID NO: 680445 - DNA, 617 bp, Homo sapiens
tggaattgtactgttgtaaatatattacatttgtaaagtaacaatgaaaagcaaaaagtagggagtatctggtctgaactgagaataaaaaagaataaagcaggaggtgtgaagaatcaggaataaagtgtgaaaacatacaatattcattctaagtagactgtaagataacaatgcctagctaaaagacaacaaagaggcgtgccaaggaggcaataaargaattgtaatttaacactaacacttattcaattaattcaacagaaaacgggaaaagagaaaaccaacaaaaacaagaaattacaacagaagatacaaaaaaatacatagcaagataacagacttaaacctaaccacatcagttactacattaagtataaatgtactaaatgcccatagttaaaaggcagatattgactaagtggataaaaaggaaacaccaaactagaatctgtctacaaactagaaactgcagattttagttataaagatacagataaactgaaaagaaaaggcatgtaaaagatatgctttgaaataattaagcccaataattctaaatatatcatatataattagaaaaatgaaatatacatttagaattatgctaaatatat

SEQ ID NO: 680446 - DNA, 640 bp, Homo sapiens
ctgaaggaatgaataggtctttggcaagtttgaaaatgttttcagataatcttttcttttgtaatttgaaaatcactcatcatcaaaaattcttatcaatgctagaagttttccatatgggattaagtgttgctcacggcctaaggacatttttttttaacattaaaagacattgaggcagagattttgaaagaattcaccaatacaaattatttttgagcattataaaatgaatctcatgacattttaatacaataataaatacctggccccatcccaaaatattacttacgtaaaagtagcaaaagaattttgttaacattggagatcattgcatatagcttgctaatcattaaaacagcatatgatgtcatttagattgacataaaatgaatcaaagcctactcctgaataaaatatgcaaaaaataagtaaaatgcaagaagtgacaaaaaataaatcttgtgaagttttcaaaaggaaaaaaaaaaacctaaaatgcttcttgtttgaatctattygcttcattttactattgctactgtgacaataccaaataaaaattattttgaaaatgaagccaaatcttacgttttagtcccttcaatgtatggcactatctgtatttaaatgatataca

SEQ ID NO: 680447 - DNA, 903 bp, Homo sapiens
tataaaatctctcaaataatgtgagctgcaaatgcaaacaagccaaggcaaaatggccacatgaaggtatgaaattcaactaaatacacgaggagtagaaaagctttttggaggttggtagtaatattcttccacctgccttcccatgttttccttcctgatgttctcaaaaaccaaagaaaggatatagctcaagtcctttttcagaccctcctaaaaaacagaccacatattctgaagggttacgttcagagtctatcgttactgtttcaggaagcagtttttcattttggaaaaggcagtaataacaaccaactcggtaacctggaattctagaaaagaaagaaaatgtaaaatgcattattttggttactcatgcatctataattttgtggactgctctgaattctggtcatcttgatctggcaacaccattaaactgcccactaactcagagcttcccagacttctcgttggtgtacttgcagcagcaaagaaaaatgaatgtataccctggagggctttagttaaagcagccactaacatacatgaaatttctttgaattctcctgtcttatgtgaaaaattcacacaaatttcactctagttcatacccatgtttatattaaaaaaaagyatgttctcccctctcccaaagcttcacaaattgatgtttaaggcagatgtgcctgaaggtggccttatccttgggaagtggcctcaaactcctgaggacctgtatgctaacttcacggtctgagttgaactagaataaagaggtgtaatggaggccgggcacagtggctcacacctgtaatcccagcactttgggaggccaaggcgggtgaatcacctgaggtcaggagttcgagaccagcctggccaacatggtgaaaccccatc

SEQ ID NO: 680448 - DNA, 642 bp, Homo sapiens
taccaggctttcagacttaaagatttttgcattccctaaatctcctcttcctaaggttgaatgtcccttgtttctttaattgctcttcatgagacatcatttccagacccttgattattcgggtctctccccatgggatacaatttctcctgtcaatatccttcgttcactgtggtacttgagactccacatggtagtgtcctaggctgggctctcccagaagcgaccctcggaagaggattaaaatggggatgggtatttggaaggtgatcccaggaagcatgtgtaggaagtgaggaagtagaacagggaaggggaagacactaatacaggctgtgttactgagcatgtactgctatgagcaaggggggctggggcttgtcattcatgctttggatcactgggacactatatagagcttactctcagagttgtctcacctatgggtgaaggagctgggatatttgtccagtctcctatcctttattagtattctgtacaatctgataagcacaaacaatcataaacattcacgacctttttagtataatctaggattctttaatttgtttttcatacagctgaaccatatcctggaatcctcccagatacatcatcaaygaaaacccctggatttccttg

SEQ ID NO: 680449 - DNA, 1275 bp, Homo sapiens
cgctcacccggaaaggcttccagccgacaggggttggggggcactggcggtctccaaaggggagggctggccaggagctgctccatcctccctcgacccagccccggccggcgtggaagctgcacgtggtgcccgggccagagctggggaggggagccccacagcggcagcggctccccgggcattgctaggttaccgacgtgtgcacagccggcgacgggagcgggaacgcacgctccacccgaacccctttccccgataccgaggccgggcctcccccgcgaggggatgggtgtgcttcacccaccggcgcggagggcgaaaccgggcaatcctagaattttccggatgccaccagggaccttcttcctagtcaacgagggggcgggggaggagtggaaggcgagaagaggctggcaagggggctccggctgaagacttgcggccctcctgccatcgctcgggggcgttgaaggaaagttgagcccgaggacactgaacccgaatcaccccgactcgccgcccctccggctgcaccgcgctccacacactccacggccgcccccaccccacaaatgcagaattaactctgacattcagggcctggaggggagcgcggagtggctgtcacgcatgtcccctctctgtgtagacgacaccgagctggcagcaccctctccaaccccctcaacccatccagcgccgcggggaagggggagggggctggaggaccatgacaggatcggatttggcagcgggtgcccgggctctggctgctcaccgttcgcgtggtccgcttgctgctgccgttgatgctgcatttttttcatcatcatcatcatcatcatccacgaacatttattgagcgactactgtgtgcagggcactgtgctgggcgttgrggcgggggcggaatggggaaggggatcaccaagaggtaggagccgcggtccctgcccttattctcgcttcagcaggggggtggggagggacggggacaaataacagaaaataaggataattgatttaaaaaaaaaaccgctcgccacccaagctctctctttttcaaaaatggagcaaaataaactttttaaaaaaataaaatccaatgtatatattatcttaataatatatacatgtaattttttgctgcaaaggagaactggcttgtcccctcctctagcggagagacgccgcggtgatgccggcccggccgccggggccgctcggcgctccccccatgcccgcccgtctgcccgcccgccgcggtgcccg

SEQ ID NO: 680450 - DNA, 1275 bp, Homo sapiens
cgctcacccggaaaggcttccagccgacaggggttggggggcactggcggtctccaaaggggagggctggccaggagctgctccatcctccctcgacccagccccggccggcgtggaagctgcacgtggtgcccgggccagagctggggaggggagccccacagcggcagcggctccccgggcattgctaggttaccgacgtgtgcacagccggcgacgggagcgggaacgcacgctccacccgaacccctttccccgataccgaggccgggcctcccccgcgaggggatgggtgtgcttcacccaccggcgcggagggcgaaaccgggcaatcctagaattttccggatgccaccagggaccttcttcctagtcaacgagggggcgggggaggagtggaaggcgagaagaggctggcaagggggctccggctgaagacttgcggccctcctgccatcgctcgggggcgttgaaggaaagttgagcccgaggacactgaacccgaatcaccccgactcgccgcccctccggctgcaccgcgctccacacactccacggccgcccccaccccacaaatgcagaattaactctgacattcagggcctggaggggagcgcggagtggctgtcacgcatgtcccctctctgtgtagacgacaccgagctggcagcaccctctccaaccccctcaacccatccagcgccgcggggaagggggagggggctggaggaccatgacaggatcggatttggcagcgggtgcccgggctctggctgctcaccgttcgcgtggtccgcttgctgctgccgttgatgctgcatttttttcatcatcatcatcatcatcatccacgaacatttattgagcgactactgtgtgcagggcactgtgctgggcgttgaggcgggggcggaatggggaaggggatcaccaagaggtaggagccgcggtccctgcccttattctcgcttcagcaggggggtggggagggacggggacaaataacagaaaataaggataattgatttwaaaaaaaaaccgctcgccacccaagctctctctttttcaaaaatggagcaaaataaactttttaaaaaaataaaatccaatgtatatattatcttaataatatatacatgtaattttttgctgcaaaggagaactggcttgtcccctcctctagcggagagacgccgcggtgatgccggcccggccgccggggccgctcggcgctccccccatgcccgcccgtctgcccgcccgccgcggtgcccg

SEQ ID NO: 680451 - DNA, 635 bp, Homo sapiens
ttctttctaacatttctcctattggctagatgatctaattagctccaaattctgaatgacccttccctctatccctgttctaatttgcaaaggaaggttctgaggcattccagagtattgcagtgtggaatggcagcttttctccaagagcaggaccgccaacgtgcccaatgagatatttgttcatttatgaccaatactcactccctcatttccaaatcctgtcatcctacctgactaatcacttgtccagaattaatattttttcaagcatgaattcctatgctcaactttgtaaattttacagtattgcataaatgtaattcggtatttctgaaactactactgttattattctcatggtatattagatgaaagaagaaagacatatgccattaggaactgatgctttgagctacaaggaagagacatttacaaaggagtaaaacctgctttagtgactcctgtgagtaattgtagatatatttgctatatcattggtcatatttctccagtcatttcctgagtgcctctttgattctgcttctccatctagaaaataggggaaaacacccactggtcgaattcttttttgtttgtttgtttttgtttttgtttttkttttttttgagaca

SEQ ID NO: 680452 - DNA, 615 bp, Homo sapiens
ttccgtagggtcacgcaccgaagattctggcgcaaaataaataaacaaactgttttgctttcctcacaagtgacttgtttttggtttccctccaccaagctaagcccacctctcacctgtagcccctgatggcctccatgggaatcacctgcaggctgggatctgtgacctggacttagggcttttcctgagggcacgctggagcttgctcaggcattgggaggggagctgacatctttcagctgcaggtatgtccactcctgtactcctcactgcaaatatgtgagcaggggtgagcattcctatttgccaaaactacatctcagagaaataaggaaaatatttaaggtcatctggttggtaagtgaggggctgagtccycagcccaggttgttctggtgccagtccccttcccagtatgtctccttgcctccaaaagtattgctttctgtttaactttcagtttcagactaaaagagtcaggcatctcccccaacatcaggatcccatagaaaagtcattgtgacgatggaaagtggaggtgttgtcatcacggctacccaaaacctctggccctcaggaaaaagcaggccctcactgtgtagttgaagggca

SEQ ID NO: 680453 - DNA, 647 bp, Homo sapiens
tctattgatatttctccttaaactttcatattaataattctacttggcctgaaatataaaccaggtgcggtaggaagtattagagattgcataagacaattctaccatccataacctccctgacctgtgacttgaggatagtctggtagccttccattgtcaaggtggcgtaattcattacgttagataatgtcagaaatacctgtattcatactctttttaattagaggactcccatgtaagaataagttctcacagtgtaagcacaaattatagtcatatacaagtaagtgaaacatctaaatatcctccatgcgtatgcaaagttagtctcatttttgagatctgcacaatcatattagatgtacatgatctattggtygtgttttcttaaacacttgaagatctttattgctacccttagagtgcaagtcacatgtttttgggagggaggaaaggtagtaactggcttccacacagtaaatattcttgggggtgcacatgatatccctggggaaaaatggctatctattattgttgggacccctaagagggacctacatcagttgaggtgggggacagatattgactgtctccgacgtgacatcttggccaattggtaggctttagaatctcagttcagttta

SEQ ID NO: 680454 - DNA, 681 bp, Homo sapiens
ttgaaagctcagcttgcatttgtggaaattcccttaccccctactgagtgacttccttcttaagcacwtattggcatttcatggctctaacaacattctcatacactttttttttttaagagatggagggtggtgtcttgctgtgttgcccagactgaactaaaacacttgaggtcaagggatccttcctcctcagcctcccaggcagctggaactacaggtgcacactaccatgccagcttctcgtacgttatttaacaccagaatgtatacatctgatccaaagagattttttaattttaaaatattcctttgaaactcctaggcatgtaaaaaaaactcctataaaattttatgtctctaaattcactgactcaaaaaaaaaaaaaaaaaaaaaaaaaaaaaaaaaaaaaaaaaaaggctgggcgcagtggctcacgcctgtaatcccagcactttgggaggctaaggcgggcggatcatgaggtcaggagttcgagaccatcctggctaacacagtgaaaccccatctctagtaaaaattaaaaaaaaataaaaaataaattagcctggcgtggtggcaggcgcctgtagtcctagctacttgggaggctgaggcaggagaatggcgtgaacccgggagttggagcttgcagtgaggcaagattgcgccactgcact

SEQ ID NO: 680455 - DNA, 681 bp, Homo sapiens
ttgaaagctcagcttgcatttgtggaaattcccttaccccctactgagtgacttccttcttaagcacttattggcatttcatggctctaacaacattctcatacactttttttttttaagagatggagggtggtgtcttgctgtgttgcccagactgaactaaaacacttgaggtcaagggatccttcctcctcagcctcccaggcagctggaactacaggtgcacactaccatgccagcttctcgtacrttatttaacaccagaatgtatacatctgatccaaagagattttttaattttaaaatattcctttgaaactcctaggcatgtaaaaaaaactcctataaaattttatgtctctaaattcactgactcaaaaaaaaaaaaaaaaaaaaaaaaaaaaaaaaaaaaaaaaaaaggctgggcgcagtggctcacgcctgtaatcccagcactttgggaggctaaggcgggcggatcatgaggtcaggagttcgagaccatcctggctaacacagtgaaaccccatctctagtaaaaattaaaaaaaaataaaaaataaattagcctggcgtggtggcaggcgcctgtagtcctagctacttgggaggctgaggcaggagaatggcgtgaacccgggagttggagcttgcagtgaggcaagattgcgccactgcact

SEQ ID NO: 680456 - DNA, 606 bp, Homo sapiens
tgaagaataaagtgagcattaatcagaatcaaaattaatttctgaaaattagcagcagagggcagcagagagcacactaaggaggcttttaaaagacctttctaaagctatgcagagtaataatacataaaatttataaacaaaaatacatatattaacacatttaatcttcataattaatttcctagtttaggccctttgcttcaattcatcttccactttaatgcacttaaaagggcccattcaaggccgggtgcagtggytcacacctataatcccagcactttgggaggccgaggtgggtggatcacctgaggtcgggagttcgagaccagcctgaccaacatggagaaaccccatttctactaaaaatacaaaattagtctggcgtggtggcacatgcctgtaatcccagctactcgggaggctgaggcaggagaatcgcttgaacccgggaggtggaggttgtggtgagctgagattgcgccactgcattccagcctgaacaacaagagcaaaatttagtctcagaaaaagaaagaaagaaggaaagaaagaaggaaagaaggaaagaaggaaggaaggaaggaaaaagagaaagaaaga

SEQ ID NO: 680457 - DNA, 606 bp, Homo sapiens
tgaagaataaagtgagcattaatcagaatcaaaattaatttctgaaaattagcagcagagggcagcagagagcacactaaggaggcttttaaaagacctttctaaagctatgcagagtaataatacataaaatttataaacaaaaatacatatattaacacatttaatcttcataattaatttcctagtttaggccctttgcttcaattcatcttccactttaatgcacttaaaagggcccattcaaggccgggtgcagtggttcacacctrtaatcccagcactttgggaggccgaggtgggtggatcacctgaggtcgggagttcgagaccagcctgaccaacatggagaaaccccatttctactaaaaatacaaaattagtctggcgtggtggcacatgcctgtaatcccagctactcgggaggctgaggcaggagaatcgcttgaacccgggaggtggaggttgtggtgagctgagattgcgccactgcattccagcctgaacaacaagagcaaaatttagtctcagaaaaagaaagaaagaaggaaagaaagaaggaaagaaggaaagaaggaaggaaggaaggaaaaagagaaagaaaga

SEQ ID NO: 680458 - DNA, 595 bp, Homo sapiens
agggagggagggaggctttgctgtttcctctgcctggaactctcttcaggggtctagatcttcacctygtggcttgcgttcatcattcaagcctcttccttagcctctgcggcccctattgctgcacccaactttgatcactttctgtctcttctatcccgtgtcgtttccttcctagcattcctcctcttcacctgaaaatatcctgttcattgactacaactgagttactatctgtcttgttcactcccggattcccagaacacagggcagtgcctggcacctggtatgctctgaagtaggtaagaatttgcctgaatgaaaagacgaacaatcgaacacaggcctcctcttagaggaaaaaaaaagtatgggatttgaggtcattcagccatgtattagatgaggcacctggtgtacctgggcctcgttcttatctagaaaatgaaaatgacatctgccttatagagttatcaggaaggcttggcatagaatattcagaactcagagcaaggggcctggaattttggaaacacagaagatattatttatttttatttttatattttatattttattttttattttcgagaca

SEQ ID NO: 680459 - DNA, 373 bp, Homo sapiens
tcaggaattcaagaccagcctggccaacatggtgaaaccccatctctactaaaaaatacaaaacttagctgggcatggtggcaggtgcctgtaatcccagctactcgggaggctgaggcaggagaatcgcttgaacccaggcagcagaggttgcagtgagctgacatcgcaccactgcactccagcttgggcgatagagtgagactccatctcaaaaaaaaaaaaaaaaaaagaataattartggtgcaagccagacttatgaagagctttattacgtgtagggcccaccgtaaatggaaactctggtgcccctggttcaaatttgtgaagggttttaagacatcagtattgaagcattaaaccaagcatggg

SEQ ID NO: 680460 - DNA, 558 bp, Homo sapiens
taagaaaaaaagaaaatttaatcatcaggcaaagctattaagcttaataaggcagaccccagtttctgcctgtgttttacctagatctcatttgatccccataacatttttaagtgggccactatcattatcccgattttctggactgggaaactgagtctcaggaaagtgaaacaacctgtacacatccacatgatttgttaggggcagagttgagattcaaacacacacagtctagctccagagtttaaatgcttagaagcaaagctgggcatmttggctcacgcctgtaatcccagcactttgggaggccaaggtaggtggatcacttgagctcaggagtttgagaccagcccgaccaacatggtgaaaccctatctgtactaaaaatacaaaaattagctgggcgtgatggtacgtacctgtagtcccggctacttgggaggctgaggcacgagaatcacttgaatctgggaggcggaggttgcaatgagccaagatcatgccactgcattccagcctgggcgacagagcaagactccatctcaaaataataat

SEQ ID NO: 680461 - DNA, 884 bp, Homo sapiens
ggttgtgggggaatcactaacacttacctccaccaaaaataacctaagaattgctccatgccaatggcttagatcacaggaattgacatgcttctcaggaatcctcamctatgtcttccttgactaggagaatccctactggttcagcctttagtcagcaatatattcagaggagatgagtccaggagatgaaccatgattggtctaagccaagagtcagcaaactgcaactgcaaggaatctggcccaccatctgtttttataaataaagtttttggccgggtgcggtggctcacgcctgtaattccagcactttgggaggccaagtcgggcggatcacgaggttaggagatcgagaccatcctggctaacaagatgaaaccccgtctgtactaaaaatacaaaaaaattagccagacatgctggcgggcgcctgtagtcccagctactcgggaggctgaggcaggagaatggagtcaacctgggaggcggagcttgcagtgagctgtgattgcgccactgcactgcagcctgggccacagagcgagactccgtctcaacaaaaaataaaaaatacataaagttttattagaacacagccacatccatccatttacatgtttctgcctgctgcaatagcagaattgagtacttgtaacaaagatttcagggcctacaaaactgaaaatattaactatttggccctttatagagaaagtttgtcaacttctggtatagaatgatgctaatcaaagtgtgttctataaaacagaagcattggcatcccccaaaagctagttaaaaatgcagatcctcgtgtcccacccagacccacatggaatcggaataagtaaatataagcatgaacatgtagattctagaaa

SEQ ID NO: 680462 - DNA, 818 bp, Homo sapiens
tatcctgcatatagtagctgttctttaaatacctgttgaataaatgaatgcttgtaaagaaagcatgcttctaatcatatttttttcttatcttctaatgtgggatgcaacttcttatttgactatgtaaactcatgtggtgaaatattttccttcaaggacacataatatgctcctatggcctccttctctctgataaggttggtcttttaccagtggtttgtagcactaattataggagggaggaaagaaaattctggaaagtagattacagaagaggaaaaacaaacatgagaattctaagtaaaaatggaaaatagcatgtttacaaagaaggacatcttgaaaggcagcattcctctagggcagtgctaattttaagaggaatagaagaaaaagtaatgtatttttctaaaaggagaaactgaacttgtaagaactgtagaataatcaaattattgtgaaattgggccagactttccccagaattctgtagcccattggatttgacaagattagacaagagaggtaaaaatgatggttggactaaagaaaaggactaatggagacaaattataggtatggtcatggtttcaccccaaagatagatgaatggtgtttaaaagaccatcatatcctacagatgggagcttttcttgtccctcccaatctacccagcgcattgaaagagaaaaagagcaaatygaagcaatgcattttgatgcaaaatatagagacagggatggttaaaactcaagaatagaggcaggatttcatatggatacatttcatagtaatacaataaattaaatatttaa

SEQ ID NO: 680463 - DNA, 1526 bp, Homo sapiens
tcttaatctgtcaaacatctgttttagtatcttttttctatgttaaagaaatctggattttcttcagataataagcatccagagcttaagagccacatagatacttttactacttttgatcaaatggtatgagctaaatatatgaaaaacgaagtgactatatctgttttgaaatgatttctttttcattatttaattctacaagattttattgccaggtactgtgcttagcactggaaatacagagtgaacaaatcttacatcacataaatttgttaggcacattttatattttctcttctttaaattatcaacacacaaagtctgtagtaaaagtatgcaaatccctatttcttacctgccttttaagatcttctatgactgagaagtatctgctatagtcatgatcgtgttcccgggaagagccaggctcacatttctcgtaccagcccttgatcttctgctccaggtctgcgttggcctcctctagagcatgcacatggtccaggtaggatgccaggcggtcgttgagattctgcatggtcaccttttcattcccagagaggaggctgtgctcattgccaagaaaaccagcacaggcaccacttcccaaccctccaccgctattgcagaagcttcctccagaagagatgccctcaagagtacaagaaaagctgcttcttgctcccgatccaacacacacattcccagccacgaagcctgttcctccaccggacagcctaccagacccagttcgcgagcagatcctcctggatccaccagaaagtcgaaaagacatggtggcagcacagccgggcaaccccttcccagaaagaggagcaaagccagggttcaccttccacacttgttagctcccttggccttttatagtattcactgggtcatttcagtcttgactatgccagtctgtaataaaatttacttgcatcctaattgttgtttttcacaattgggtratttttaacagcgtccagtctgtaggtggaaaggtgccccaaggatattttttatatataaaaatggtgccaggtgaagtaaaactaaatcatagcctcaaaggccaaaattaaatatgactaaatgtgcatctttttggccactggaatattaatagaatctagattctccccctgccacatataacaaagaattaataattccaatgagaaatgtctcctacttttgtcctgttaacgctcatagagtatttctagtattcccacttcattgagtgcttcctttcttcctttcgtttctttttcttttttcctttttttaaagatatgtggtctcgctatgtttcccaggctggtctcgaactcctggcctccagtgatcctcagcctcagcacccagctcagcctcctgtggccagcattacaggtgtgagccactgccctgggtgtctgggtgtgtgttttccttcttatcaaaaccagaaaatctcagcatctattgatcttttggtagtgggagattttaaaagaaatctaccatttcttgaa

SEQ ID NO: 680464 - DNA, 1526 bp, Homo sapiens
tcttaatctgtcaaacatctgttttagtatcttttttctatgttaaagaaatctggattttcttcagataataagcatccagagcttaagagccacatagatacttttactacttttgatcaaatggtatgagctaaatatatgaaaaacgaagtgactatatctgttttgaaatgatttctttttcattatttaattctacaagattttattgccaggtactgtgcttagcactggaaatacagagtgaacaaatcttacatcacataaatttgttaggcacattttatattttctcttctttaaattatcaacacacaaagtctgtagtaaaagtatgcaaatccctatttcttacctgccttttaagatcttctatgactgagaagtatctgctatagtcatgatcgtgttcccgggaagagccaggctcacatttctcgtaccagcccttgatcttctgctccaggtctgcgttggcctcctctagagcatgcacatggtccaggtaggatgccaggcggtcgttgagattctgcatggtcaccttttcattcccagagaggaggctgtgctcattgccaagaaaaccagcacaggcaccacttcccaaccctccaccgctattgcagaagcttcctccagaagagatgccctcaagagtacaagaaaagctgcttcttgctcccgatccaacacacacattcccagccacgaagcctgttcctccaccggacagcctaccagacccagttcgcgagcagatcctcctggatccaccagaaagtcgaaaagacatggtggcagcacagccgggcaaccccttcccagaaagaggagcaaagccagggttcaccttccacacttgttagctcccttggccttttatagtattcactgggtcatttcagtcttgactatgccagtctgtaataaaatttacttgcatcctaattgttgtttttcacaattgggtaatttttaacagcgtccagtctgtaggtggaaaggtgccccaaggatattttttatatataaaaatggtgccaggtraagtaaaactaaatcatagcctcaaaggccaaaattaaatatgactaaatgtgcatctttttggccactggaatattaatagaatctagattctccccctgccacatataacaaagaattaataattccaatgagaaatgtctcctacttttgtcctgttaacgctcatagagtatttctagtattcccacttcattgagtgcttcctttcttcctttcgtttctttttcttttttcctttttttaaagatatgtggtctcgctatgtttcccaggctggtctcgaactcctggcctccagtgatcctcagcctcagcacccagctcagcctcctgtggccagcattacaggtgtgagccactgccctgggtgtctgggtgtgtgttttccttcttatcaaaaccagaaaatctcagcatctattgatcttttggtagtgggagattttaaaagaaatctaccatttcttgaa

SEQ ID NO: 680465 - DNA, 868 bp, Homo sapiens
tttaaggctaatacctggaataaaatcatagtgttataacaaggaaaacattttggtacaattttcttatctatcagactactcgattccaagtaagagaatattaaggaatgaaaaaaattttaagggaaagtaatatgcaaatgcttacatttaaggatgctggtgtccacaaaagtagctaatatcttgcttaggatggcaaaaaaaaaaaaaaaacccactttttttacaatatgtgatgctattaaaataatattgatataaagaacacaaattagtaaacagacactgggaaagaagtcataaaagaccattggttaaaaataatagatggcatttgagaaagccattcactaaaatgagacacaacaaagaaattaatgtgaaacttctgaagaaaccatatccttatgtgctgatctcttccattttaaaaggaattaacagaataaagatcactttcaatttaattaatttaataccaagaaaagtttcttctttcggtatatttagttgaaagaatgttaaaatactttctcctttgactgttactggtatcattacttggtataatcatctattataacagcagcaaattaatacaaatgtaaaaaattagaatactttttgagtcttagataaggaatcatatgacagacaagctgaatawgaaagtaaaaacttcaagaatataaagtacataaactgccaagaacttctaatgtcctatttgattcttgataatatatagtttcacttttaaaaagcctaaatttggaattaagacataaaatcaaaaggcctttgctagagatactaacatgatatgaataagaaaaaaatgaattttaaaaaacaagaaata

SEQ ID NO: 680466 - DNA, 1671 bp, Homo sapiens
cccctgttttaaatacaagagttacactattactagaggtgttggtgtacagttttatctgatttgttctgtttaagactaatttttatagactttctaatgttttaaataatggtgcttcaattttaggtggttatgaataaatttgaattttgcttttaatagcaaagatgtgcagtgaactagaatatatttttacatccctgagagattcatttagtagaaaattccaagtatcctgacaagcactctttagctggctagctatgggatgatgtagaaaagcattcaagagctagtttttgttaagtcctgtatcaagattaacccagctgtgtcagtttataaatgtatttgtgtatagggtgtgtagtatatatggcaagggttttttccccccacttaagtgattatttttgtgtcacatctaggaaaaccggcagcatgtttctatctatagccagcttcttcgactgtataaaagtattctctccagctacgtatatacacacatacatatatatcatagcaattccttgtggtttataacttgcaaatactgctatcagtttataggtaaagaaacagtgtgttaaatgacttatccagggagggtcctgtggcttcatgtttatggagttgctaggtctctgcctcatggtccagtgcctgttaagccactgtgttcattctaataggcataatgaattgttaaagaatttactaaaatctcttccaccaaactttgaaaaataatgaagccgcccccactttagaggctctgtatgaaaaaatgctgtggagacagagccctcctggctccctagctgatcctggagatgcagcaatagatgaatgggttatctctgaatttgtaagagataattcacatgaggattaagataaaatgggaagtaaaatctaacaaacacaaagatagctcccaggcactgctttgtgtagtttgacagcattgtggttgtagcagcaaaggacttaaagtgatagtttttaaaccatattctgtccctaagtaataaaaaatctaggaagttactaaaataccagatttgttctgctctgcctcatctagaatcaacgtctaactaacttaaatgaagtataataaatgagttcatatgaaaaggcttcctctatggacacttagatatattgtaactattgaagttacctgggatgtgggggyggtgggaggaggacctgcctccccaggacatctatgactaaggcctggctttagttatggagagagacgtagaagttgaattttacacccaaaattgatgtgactgaagaggaactgattgttgctaaccagctcacaagaatccagtattgagaccagttcactagaagaaacaaacatttctgccatgcagaccaaaaagttattagttggtgaatatgtattttctctttggaaggtctttaaggggagcaaaccagttttaatcaatcagattgcttggtaagtttggaatctgcaatcagttggtcttaaaaaaaaaaaaactttattttggaaatttaaagacatacacaaaagaggaacaatataattaacctctgttaactcatcaccaacaagactcatgaccacttttatacttcatgagtgattgtatttgtatccactgttttctattattt

SEQ ID NO: 680467 - DNA, 1331 bp, Homo sapiens
accatctccccactcctgtttgtggaaaaactgtcttccatgaaactggtccctggtgccaaaaaggttggggactgctgccttagatctctaaagcaatacaaatgttgccactttcataaagtagtatgtttataaatgagttgagcagatgaccatgcagacttggtgacttgaaactttccaaatttatttgacttaaagacagccttatcctgtagatgtttgccaatactcagggcgccagatgattacttggtcactagttaccatatatgggtgaacccaaatacacaaacacgtgaggtttccaatattcagtaaaatacatgtttcagataccttatgttaggaatggtgattgatttttgacccagtgttggatgagtcatcacttttatgacactgagcaaaaagaaaaccttttatgttctttaaacattgagatattttagctgaggccgtagagcactgtggtaagcctgggaggcaagaagccacgggttgtctccatctcagcattcagtagctaccatcttggaaaattacttaaactctttaaacttcagttttctcttctgtaaaacgtagataataatatgcacctctcattggtcctgagaattaaaagaaagaaatgtatctaaaatgttttacatggtggttaagaataaacactcaatattaagtgtcagttgatggagatatggggagctttatggccagagatgacagtagaggcaagttaggaaacaagggttgaattgtcaattaatggcaagatagtttcaagagtttagccaagtgatgcattagagacagatgcagtaaaagcctgagttctggagtcagaaagaaatggcttgaatcttgaatttgccctttacacactgtgatattatctccctgttaaataagatatgtagaatgcatataagggttctgggcgtatgctacataggctttcaaagaatattagacattactgagtagaaaaaaataaagtttatgtgattttctacacaagtgttcaatayaccgggtggagaagtggagaagatgaattacttctttggtttatgatgaaagtttttctctgatgtccttttctgtatcaaaattgagttaactcagtactaaaaaaatttggtcaagatagatagatagatagatagatagatagataatttctttctttttttttatttttttgagacagagtcttgctccgtcacccaggctggagtgcagtggcgtgatcttggctcactgcaacctccccctcccgggttcaagtgattcttctgcctcaacctccctagtagttgtga

SEQ ID NO: 680468 - DNA, 702 bp, Homo sapiens
tttgcttttgtgtgtgagtttgtttcagaggttttgtcttttcttattcctatcacaaaattataaataaacctttataaactgaatgacaatcatctatgcagaaattattttgaaaaatattgggctactttaaagattttatatctggtaattaatattagataaataaaaacattgagttagaatgttttttaaaaaattatgcaaacattatgttgttttaaacataactgagtgtagaaataagtttaaattggctaaaaattttttgtgaagagcttagagttttaagaattgggttggaagactgagttgtttttgaagttaaagttatctactttgattgcacaataatgtagggcattttggataagtgttcttctgactttaagactgtttaccaagagcacttacagaaatatttttattgttcctatcgctcactcttagtctataagaattttagaaatgtaagattctttctaggatcttttactcgttggatacagtgagttgaatcagaatgtgaaatatgtagcttctctttaccacaatgttatttaaaatgtacattggtaaaaagaattttcatactcctatagtgaatacatgttgttctgaattttacaacagtrtaagaggataaaaatgagtcattacaatttgagactatttgccatatgtataataaagtattca

SEQ ID NO: 680469 - DNA, 600 bp, Homo sapiens
gggagcaaggaccctgtgcactttggcttcctagaatcccacgggcacaaagacccacttcaaggaaacctcccccaagctgggaaaggaagggagggagggtgggaaggaagaagggagggaaggaaaaagagaaggaaataaagaagaagggaaggaggaggagaaagacagaggaagaatgaattttaaaaaaagagaaagaaagagaaaagaggaggagaaagggagggaaagagagaggaagaatgartgaaaaaaagagaaagaaagtgagaaagagagaaaagagggggaggaagggagagaagagagaaagaaagcaaggaaggagggagggaggaaggatggaggaaaacagaaagaagagcaagggaggagagagggaaggaagaagggaagaaaaaagagagaaaaaggaaagaaggaaggaggaagggattaaaggagggtagaaggaaggatagagggaaggagggagggaagcgggaaggaaggagaaaaaaagggagaggaagaaagagaggatggaaggaaggaaggaaaaagaaagaaagaagggagaatcctagatccattataaccatgaacagctcttcc

SEQ ID NO: 680470 - DNA, 240 bp, Homo sapiens
aaatttaattttaaatgagactagcrtagaaaacaaagaccaaaaaatgacaaaaataattatcaagagcatcataacattgttctaacattacaacattaaaaaaacctacatacaggtgaagaaataccttaaaagcaaacaggaaagagtgtaaggaacaaaatttctggcctcagatgtctttttttttaaaaaaaatagagaaggtctcactgtgtcacccaggctggtctcaaa

SEQ ID NO: 680471 - DNA, 608 bp, Homo sapiens
gatcatatcctttgcagggacatggatggagctagaggccattatacttagcaaactaacacaggaacagaaaaccaaatactgcacgttctcacttataagtgggagctgaatgatgagaacacatggacacatagaggggaacaacacaycctagggcctattgtggggtgggaggaggcagaggatcaggaaaaataactaatgggtactaggcttaatacctggataatgaaataatctgtacaaaaaccccccacaacaaaagtttacctatgtaactaatgtacacatgtacccctgaacttaaaataaaagttaaaaaaaaaaaaacagaatcactgtaaacaaatacaaaaggcaccccaggctgacaaaggaccataaaaatgagcaaagggcatcataattgcagtttacaaaaaaaaaccataactggtcgataaatatatggaaaaaagattaaaaatgcaatgccatttcacatttcttttcattggatgaaattaataagactggtgaaattaagttttggaaattatgtgaaaaaataaaaaaaaattgcttatgcattaatacaatcaattcagagtaattttaccacatcc

SEQ ID NO: 680472 - DNA, 1503 bp, Homo sapiens
attttctctggtattaggctggaatctatgatactattattctaaaaagaaagtaatcaacatgaaaaagagtttaattttttctacccatgcctccactaaaggatcacttggattttatatttctaaatagttatgagaaaagaaaagaaataaatatgttgggttggccgacataaccatcaaaargccagattcatatattcaggttggggacaaccacttgtcctgatcacaggaattctattcgtagaatttcagaaccagaagagatattttgaatataagagataaacaatccactctgcattgaagcaggaatagggcccagaagctggtccactcagcttccaactcattgcttttcagtaaaaatcatgacatctcaatggaaacatagcattcacttttaaaccgttgatctaggccaacccactaaccaagaatttaccagaaaggttaaatggtccactaccagtggtgagactgctaattggtggtgcctactaggcaatatctcagcccagtgcttcagttattactctcagttcatcatcaaaataaacattacctccaaattaccctcaggactgactacatattttgcaacaaatgttaaaaatgtttaaaaggtgacagaagagcattaaataaatcatgaggctcttgtaggcttggggattctgtgtgactgcagagattgcatatccttgacgccaatctattttgatcctaaagacggagacagaaaatgggtaactagttaaattttcaattccaagtgaaagtcatttacagcttcagtaactttttccatgttttccatctaagaaactcaggtagatcattcaggcagcaagtctctggagaggagtctgctggttttctgtagtaaattttacaacacagtccttgagacttgaatttttaccctccaggaaaaaaataaataaataaaggcaactgcccatcagtgacccatattctgcctcctttgctcctattaaacttttctgttctagatactattcttgattcttttatgtgaattgaagtcctaaagttggaaggtggggtaaaatattatagcagccaggggaggttagcctgattttcaggcgaaacagatgggcaatcaagggatttgagagttcagtctctcttactgcattttttgaagtttttctcaaagtgcagtgagtaaactagaccttggagaattcatttgatgtaggtcaacaaagttctgcccttttgccagctttttggacccatctaccctcaccaggcctcagagttggcaatccagcagaaaaatctccaacaccctttctgccaaagacatgcagccagaaaagggagcacttgacagtctgcttattctattttctctggtattaggctggaatctatgatgctattattctaaaaagaaagtaatcaacatgaaaagagtttaattttttctacccatgcctccactgaaggatcacttggatttta

SEQ ID NO: 680473 - DNA, 1503 bp, Homo sapiens
attttctctggtattaggctggaatctatgatactattattctaaaaagaaagtaatcaacatgaaaaagagtttaattttttctacccatgcctccactaaaggatcacttggattttatatttctaaatagttatgagaaaagaaaagaaataaatatgttgggttggccgacataaccatcaaaaagccagattcatataytcaggttggggacaaccacttgtcctgatcacaggaattctattcgtagaatttcagaaccagaagagatattttgaatataagagataaacaatccactctgcattgaagcaggaatagggcccagaagctggtccactcagcttccaactcattgcttttcagtaaaaatcatgacatctcaatggaaacatagcattcacttttaaaccgttgatctaggccaacccactaaccaagaatttaccagaaaggttaaatggtccactaccagtggtgagactgctaattggtggtgcctactaggcaatatctcagcccagtgcttcagttattactctcagttcatcatcaaaataaacattacctccaaattaccctcaggactgactacatattttgcaacaaatgttaaaaatgtttaaaaggtgacagaagagcattaaataaatcatgaggctcttgtaggcttggggattctgtgtgactgcagagattgcatatccttgacgccaatctattttgatcctaaagacggagacagaaaatgggtaactagttaaattttcaattccaagtgaaagtcatttacagcttcagtaactttttccatgttttccatctaagaaactcaggtagatcattcaggcagcaagtctctggagaggagtctgctggttttctgtagtaaattttacaacacagtccttgagacttgaatttttaccctccaggaaaaaaataaataaataaaggcaactgcccatcagtgacccatattctgcctcctttgctcctattaaacttttctgttctagatactattcttgattcttttatgtgaattgaagtcctaaagttggaaggtggggtaaaatattatagcagccaggggaggttagcctgattttcaggcgaaacagatgggcaatcaagggatttgagagttcagtctctcttactgcattttttgaagtttttctcaaagtgcagtgagtaaactagaccttggagaattcatttgatgtaggtcaacaaagttctgcccttttgccagctttttggacccatctaccctcaccaggcctcagagttggcaatccagcagaaaaatctccaacaccctttctgccaaagacatgcagccagaaaagggagcacttgacagtctgcttattctattttctctggtattaggctggaatctatgatgctattattctaaaaagaaagtaatcaacatgaaaagagtttaattttttctacccatgcctccactgaaggatcacttggatttta

SEQ ID NO: 680474 - DNA, 1503 bp, Homo sapiens
attttctctggtattaggctggaatctatgatactattattctaaaaagaaagtaatcaacatgaaaaagagtttaattttttctacccatgcctccactaaaggatcacttggattttatatttctaaatagttatgagaaaagaaaagaaataaatatgttgggttggccgacataaccatcaaaaagccagattcatatattcaggttggggacaaccacttgtcctgatcacaggaattctattcgtagaatttcagaaccagaagagatattttgaatataagagataaacaatccactctgcattgaagcaggaatagggcccagaagctggtccactcagcttccaactcattgyttttcagtaaaaatcatgacatctcaatggaaacatagcattcacttttaaaccgttgatctaggccaacccactaaccaagaatttaccagaaaggttaaatggtccactaccagtggtgagactgctaattggtggtgcctactaggcaatatctcagcccagtgcttcagttattactctcagttcatcatcaaaataaacattacctccaaattaccctcaggactgactacatattttgcaacaaatgttaaaaatgtttaaaaggtgacagaagagcattaaataaatcatgaggctcttgtaggcttggggattctgtgtgactgcagagattgcatatccttgacgccaatctattttgatcctaaagacggagacagaaaatgggtaactagttaaattttcaattccaagtgaaagtcatttacagcttcagtaactttttccatgttttccatctaagaaactcaggtagatcattcaggcagcaagtctctggagaggagtctgctggttttctgtagtaaattttacaacacagtccttgagacttgaatttttaccctccaggaaaaaaataaataaataaaggcaactgcccatcagtgacccatattctgcctcctttgctcctattaaacttttctgttctagatactattcttgattcttttatgtgaattgaagtcctaaagttggaaggtggggtaaaatattatagcagccaggggaggttagcctgattttcaggcgaaacagatgggcaatcaagggatttgagagttcagtctctcttactgcattttttgaagtttttctcaaagtgcagtgagtaaactagaccttggagaattcatttgatgtaggtcaacaaagttctgcccttttgccagctttttggacccatctaccctcaccaggcctcagagttggcaatccagcagaaaaatctccaacaccctttctgccaaagacatgcagccagaaaagggagcacttgacagtctgcttattctattttctctggtattaggctggaatctatgatgctattattctaaaaagaaagtaatcaacatgaaaagagtttaattttttctacccatgcctccactgaaggatcacttggatttta

SEQ ID NO: 680475 - DNA, 1503 bp, Homo sapiens
attttctctggtattaggctggaatctatgatactattattctaaaaagaaagtaatcaacatgaaaaagagtttaattttttctacccatgcctccactaaaggatcacttggattttatatttctaaatagttatgagaaaagaaaagaaataaatatgttgggttggccgacataaccatcaaaaagccagattcatatattcaggttggggacaaccacttgtcctgatcacaggaattctattcgtagaatttcagaaccagaagagatattttgaatataagagataaacaatccactctgcattgaagcaggaatagggcccagaagctggtccactcagcttccaactcattgcttttcagtaaaaatcatgacatctcaatggaaacatagcattcacttttaaaccgttgatctaggccaacccactaaccaagaatttaccagaaaggttaaatggtccactaccagtggtgagactgctaattggtggtgcctactaggcaatatctcagcccagtgcttcagttattactctcagttcatcrtcaaaataaacattacctccaaattaccctcaggactgactacatattttgcaacaaatgttaaaaatgtttaaaaggtgacagaagagcattaaataaatcatgaggctcttgtaggcttggggattctgtgtgactgcagagattgcatatccttgacgccaatctattttgatcctaaagacggagacagaaaatgggtaactagttaaattttcaattccaagtgaaagtcatttacagcttcagtaactttttccatgttttccatctaagaaactcaggtagatcattcaggcagcaagtctctggagaggagtctgctggttttctgtagtaaattttacaacacagtccttgagacttgaatttttaccctccaggaaaaaaataaataaataaaggcaactgcccatcagtgacccatattctgcctcctttgctcctattaaacttttctgttctagatactattcttgattcttttatgtgaattgaagtcctaaagttggaaggtggggtaaaatattatagcagccaggggaggttagcctgattttcaggcgaaacagatgggcaatcaagggatttgagagttcagtctctcttactgcattttttgaagtttttctcaaagtgcagtgagtaaactagaccttggagaattcatttgatgtaggtcaacaaagttctgcccttttgccagctttttggacccatctaccctcaccaggcctcagagttggcaatccagcagaaaaatctccaacaccctttctgccaaagacatgcagccagaaaagggagcacttgacagtctgcttattctattttctctggtattaggctggaatctatgatgctattattctaaaaagaaagtaatcaacatgaaaagagtttaattttttctacccatgcctccactgaaggatcacttggatttta

SEQ ID NO: 680476 - DNA, 625 bp, Homo sapiens
tttaaggttttctttatgtagcaccggcatataacttattaagtttatttccaatagtttaccattttgttactgtatagatattattttttaatgcattacattttccaactggctatttgtgtgtagctgtttattttttaatgttatttttgtgcacagccatttatctcaactcttgtactatttttatgttttttttttttcagctggttttgatctgggcatgcatatgtttacagtgttgcacaagtggtgatgatgcaccccagaaaatttcaaatcgctgatgtaagacattctgctttacataggaggtcttggaattttctggagtatcatcaatagtatagagctctcagtctagcaaatcatgtagctacagcaaacagagctgagcagagcccaggttccaaattctcagtagaaatagggactcttctgttatggagttgtttcaaattctctctgtctatgtagcaggacatttgttgtacctcaggcatcaggggtaaaaaaatgcctttaaaatctttcaamtcaagtctgacaaaatttcttttttttttttttgagacagagtctcgctctgtcacccaggctgcagtgtagtggcgcgatctca

SEQ ID NO: 680477 - DNA, 608 bp, Homo sapiens
acacacttacctggacagaaaatttttagggaaaaaaaaagatagctgcaatacacacacacacacacacacacacacacacacacacacaccccaaatgccaagcttctgaatgcagagcaggtgtgtcccaccgggaggacattgccatcaggaggctctggctgataattaagctacaaacatgtacagaggcatggctgtagccagagaacattgtagatcattaggaaatttcaccwtctctagctaaggagaagaaaaatgtggagaatctagcaatcgcctccaaaagctttcgcttagtgccagtacaatctaagaacaaggaaggggtcagagaagggccatgacagaaggagaggccaggagggggcaggccccgggcacagggtttgagcccctgtgtctgggactgtgggagaggactcgctgatagcaagttactgctggcagagttcccattttttcagctcttgcccctggatctgggaatgtgctgctcacttcctgtagtctttctgcctttgagaatgaatttctaaacagtaaagatccagctctatgaattcaccagccatgacttcaaaacaagtttcccgacttca

SEQ ID NO: 680478 - DNA, 607 bp, Homo sapiens
ctacagaacttgtgcaagttataggagttgctttctaacttccatttttccctctgttgttaccgggagctgccttgtagagtccaagcagacaccataggaagagaaaggccccagggactaaaagatcaagaggagagagaggaaggagggagcagatccagccagcccccagctgttcaagccatctcagctgaagagccagtgtcaaccaacaccctgtgaagcagagttgacctagctctgtcaagtcctgtccaattgctgaattatgagcaaakaaatgagtgctgttttaagctaccaaattcaggggtgaattttatacaggaatagaaaatggattctggagaacacatcaacaatgttatcttgccatacaaacattatttcatttaatcctcacagcaactgtcaaagtaggcattattgtcctcatcctgcagatgaggaaactagattctgggagcttaaattacatagctagggtcacacagcttgtgtgtgctcaagctgggattcgaactcagggttgtcaaactctaaaggctttgctttcagccccactgtccagcactgcagctttgaggtctgtgtgcagacaagc

SEQ ID NO: 680479 - DNA, 1918 bp, Homo sapiens
ggaaccaggtgacggaatggactagctcaaagatcagcttctcctggaagctttgccagatgttccccaattaggggtccttgtctgtgctcccgtggcatccccagcacacctccatcagccaacttgccccctgcactgccaacatcggtgccttcccagctaccccactagaccaggggatcaccaaagggatattactacctgcttgttgaatagcattcatgccatggtcactgaaatcaatgcccwgtgtctcctttgccctttggagatctgccttggcccaagaagattatgtcccccagtgctaatcacagacctccatggaggtcagttattaagaccttcaaggcaagtaccatccctggggtcttgtctccatccactctgggaggcagggagccacctgacccacaatgtgcagttgtaagaccttaaggacctgacctcctgcctcttggggctccaagaccaggtgatgtgtgaaagggcgtggccaacagaggcatgttctctaacatgaggggtagctgagagaggctggtgtttactgagccgttacttcatggcccactctgtgccaagcacttcacttccagtctcctttaatatcctcccccagcaacctccctgaccctcataattgcttatatgcatacactttgggtatgcgttttttaaatcgtggtgaatcatattctttgatataaatagatgcagtctttaggggtttttattgtggcacaatacatataacataaaatctaccatgttaaccattttaaagtgtgtgattcagtggcatttgatacattcaaatgttgtgcaactctcagcattctctagtttcagaatattttcatcacccgtgaagcagtcacttccattccctcttttcccaaggccctggcaacctctaatctgctttctgtccctctagatttgccttttatggacacatcacataaatggaattataatcatacaacaagtggcccctgtgtctggcttctttcacttcacataatgttttcaaggttcattcatgttgcagcatgcgtccgtgcttccttccattttatggctggataatattccattttgtggatgtaccacagtgtgtccattcatgaaatggaatattatctcgccataaaatgcatgctaccacacgaatggaaatttgggttatttccgtctttggacttatgaataatgctgtgatgaacattcatgtacaagtatttgtctgaacacctgctttcaattctcttgggtatatccctaggagtggggttactggatcatccggtaactctgtgtgcaacatactgaggcgccaccaaactcctttccacagtggctgcatcactttacgctcccacctgcaaagtatgagggttccaatttctccacatcctcgccaaaacttacaattttcctgaaaacctttcgaagtgtggttacccatgttttacagatacacacgtggaggcactgagcagtgaagcaaacttgtcaaaagctacacacctgcttggtggcagagccagagtttgtgctcagggactgtgcacacttagctaccaacctgttcacttcatggctcttgtgaggctgagaagtcagaggcttgaggcttgaaggagctccattctgttcttggctcctgtctgtgtacctggcaccctctgtctcccagagtgtcccttggacttctgtacctggacacaacttgccctctagaggccccactcatgggcagtaagtgttggtgtgccagaaagcaacagcttctgtattagtcccttttcatactgctgtgaagaaatacctgaggctggataatttataaagaaaaagagatttaatggactcagagttccacatagctggggagccctcacaatcatgg

SEQ ID NO: 680480 - DNA, 2170 bp, Homo sapiens
gccgtcccatgaagctggcttgggccatctcttcatctacatatagagcacatgattattatctcgttacactattcctgtaaggcaaaactacatgtaaaacattaacataaagtcaccatgaaaagccgtaaaatgccattgtactttatagaaaccacattacatttgtaattacctaataatccattatactaaataaactgcatttaattttaagaaacgattcatcatttattaaataaccccactgtagtctcagtggcatggtattccttctccatttaccatttctttttgctcaggataacagtttaagtagtttgtaaatcaaagcccacatccttggaagagctcggtgtgaaatgctcaccaaggttatactgtgacctgtgctcttgatctgcacaactgcctcataggagacaaaacaactcttgcatccttactcaagtattaggaggtggtgccatccattctgccagtctcagttcattcattattaagcagctcatatgagcatcctgttgaggctgacctgtgaagcctggaaaggaaaacctaaggtgtttgtaggaaggccgtatccatcttgctgaagattatgggcaattatccaatttttaaaacaaggaaggatctgtttttgggaggcctacctactggtggctaattgcttgaaaatgttagacaaaatacaatttctcaggcggtgagccacctcccagtagatttcctcttctaaagtggatccaacccatgacagttgcttccaaaaaactgcctgtagtgttttgttgtgaaggaatttcattgtattgtttgaaagagaagggcaattaggtgccattaaggtgaaaaacacagagactcttcactgaaatggtatgtattataatgagattcatgtgtaatgaagtcatgtgaaagctatttcagagaatgagctattatattaaaatctctactttgtaagaaatataaaaataacatttcatgacagacattctacatgcaaattaggactctgttaactgattagagctaaatctgctaggaagtgcttaaaaatagggaagagacacctaaggtgatttgtccaagcagatagaaagaaaagggggaaaaatacaaggaggtgctgggaagaagccagagaagacagtctgctaagtggatatccagatactaacagagttaaacatgcactttgtaagaatccctagagagtgctcagagagatcttaaggctgactgtataggactgtagcggtttgggttttgttgttttaatagctgcaaatcatctgatgcttctcccatcaaatgtggggtctctccctcctccccttgagggtgggtgggcctgtgattgcttcaaccaacaccatccatgtgacttctgaagcttttagcttccatttagttttgttaggatgtttgttctcagagaagccagttgccatgtaagaaatcaggataccacctgctggaccaccgtggctaagaccaccctgctggagaggccaagtgtaggtgcccttgtcaatagtcccagctgagctcctcgccaacagccagcatcaactgccagccatgggaggagccaccttgtttctgcagtccagggggaccttcagatgaccgtagctcccgcagacacctgacggcaactaagggagaggcacccagtgagaaccacccagtcgagcccttcccaaattcctggccctggggtaattgtgttatatcaatgctaaccagaacaaggaccaattcattgacctacaggagatctgggtgagaattttacaaactacaatattctatgaactgcattaagcaagctttaaaaaaattagactgggaaactgttggcaggttctggcaaacagtcttaataactgtggagccttttctttacagatctagagaaatacccctgtcccccagacatcacagagaactgaactaaatcaccccttcactctmgaatctgttttctcacatttcattttcccagaagtcccactgagtactaaaatgtttcctcaaaaagtgtcagtttgagatgtaaaaagaaaatgtttatttaaaagtactgcattctgctgtttttaatcccaagctgaatggagtccttcttagttgctcctgagctaaatccttt

SEQ ID NO: 680481 - DNA, 387 bp, Homo sapiens
tcacctggaaaaatctcatgatcagcactgatgattttgtaaccttagttcatcttttctaagactatatttaaaaggaaatcaagtctttccattgttgactttccatcactggtggaatataaytgaatccaagataattttaagcctagcttcgcctacaaaaaaacaaaacaaaacaaaaaatcctgctaagctccatctccccctgctgtcaacctgtcctttctaaaaagaaaaagtctagaaacaaggccatacaccaaagaaaatgctacagtataaaagaaataaaaggacatacaaaatggtataaaaataattcaccagcctggacaacatggcaaaaccttgtctctacaaaaaacataaattaggcaggtgtgg

SEQ ID NO: 680482 - DNA, 387 bp, Homo sapiens
tcacctggaaaaatctcatgatcagcactgatgattttgtaaccttagttcatcttttctaagactatatttaaaaggaaatcaagtctttccattgttgactttccatcactggtggaatataattgaatccaagataattttaagcctagcttcgcctacaaaaaaacaaaacaaaacaaaaaatcctgctaagctccatctccccctgctgtcaacctgtcctttctaaaaagaaaaagtctagaaacaaggccatacaccaaagaaaatgctacagtataaaagaaataaaaggacatacaaaatggtataaaaataattcaccagcctggacaacatggcraaaccttgtctctacaaaaaacataaattaggcaggtgtgg

SEQ ID NO: 680483 - DNA, 656 bp, Homo sapiens
ttttctgtttccaaaaatgaagtacaccttagaatggaaaatatattcattatggatgatttttgaaagaatatatttgtagacaaagcaaaacaaggcatgatttcaggcactgacagtaatattgaaaataaagatatatttttctttctttttttttttttttttttttgagacagagtctcactctgtctccaaggctggagtgcagtggtgccatcgcgactcactgcaacctctgtctcccgagttcaagtgattgtcttgcctcagccttctgagtagctgggactacaggtgtgcaccaccatacctggctaattttttgtatttttagtagagacagggttttgccatgttggttgggctggtcttgaactcctgacctcaggtgatccacctgcctcagcctcccaaagtgctgggattacrgatatctttaaaaaatgtgacatattcagagaattatgttcatttcacgtattgtgacttataacttgaatatacttagtataaactaggcttataaatttataattatataatctataagttaacatgctatgttgagagatatcattacagatttctcatgaacttgcctattaggtaaaagggatttattttttctaagagattatagcagagtatttaat

SEQ ID NO: 680484 - DNA, 2365 bp, Homo sapiens
ttggatcacctacccactcccttccagagtacagagtcaagctcactgcaagggagcagtttgcccagggagcccagtgccccttgaaaaatgaacagtgaagagatggctctacatatgcagactcttgctagtaactagcaggagaaaccatttgcagtggcatgtctttggaatgatcgtttgccaacagcaagagagaagtattttcaccttatagtataatttaccccaagacacagctccgtcctttcttaccaagggtgcatatgtgtacatgagtgtgtatatctgaagtttactcattgattaggaaatattgcaggttctctaaagcttgaatatcttgggctgttacaaattctatttgactgggaaaataatatttttaggaactcactcaaaaatggacacatgctttgaaatagaaatttaagtggtttctccaagtaacaacaatcatgtgttcctttcttcccacctctagagaaatacacaacagcgaaacaatgtagagatacatgagagtcaattggttatcactaagttgtattaagaccctacagaagctgcatccatgtggctgcaaaggacatggtttcatttttttatgacagtgtagtattccatggagtgtatgtaccacattttttttatccagtcctccatggatggacatctaggttgagtccatgtctttactattgtgaatagtgctgcaatgaacatatatgtacctgtgtcttcctggtagaacaatttatattcctttgggtatacacccagtaatgggactgctgggctgaatggtagttctgttttaagttctttgagaaatctccaaactgctttccacagcagctgaactaacttacattcccatcaacagtatataagcattccctttctctgcaacctcgccaatatctgttgttttttgactttcttataatagccattctaactgatgtgagatgttaacacaggaacagaaaaccaaataccgtgtattgtcacttataagtgggtgtgaaaccctgagtacgtgtggacacaaagatgggaccaatagacacagaagcctacttgaggaggtagggtgggagtaggatgaaggtccaaaaactacctgttgtctactatgctcactacctgcgtgacaaaatcatttgtacaccaaaccctagtgacacataatttatacatgaacaaaactgtgcatgtacccccaaacctaaaatgaaagttgtaaaaaaaaataaacacatgtgatgtgggagcataaagcaaaaacaaaattagttggcttaactgacacgtagagaacattccaccccaaaacagcaaaatacacaggcttctcaagtaaacatggttcattcaataagaataattatatcctaatatattaaaaaccttaataaactcaaaccatatggagtatattcttgaattgcaatgaaattaactacaaataactaaggaaaatgatatgattgtccctgaatatttggaaattaaagtaattctaaatacttatggagaaaactgggaatactcagaaaaatcaaaacatattttgtactaaaaatgagtatgtaacatatcaaaattatgaggtagctaaagcaggactttgaggaaaaattatagcattaaaaaaagaccctgcagaaggataatgagactgagggctgttgagtcgttaatgggtaaggctggaagccagagggcctctgtgctagtttacaaggaggctcatatctcctacagtggaagggaatgacatagctcagacaattaggaagacctaatttttagagctgcagagctccagggacatatgaatgcatggctgaggtcactgctcaggtgagaaaaggactgagaccagagaccgtggtacaaggacatatgtctggacagayatgtctcctttcctgccaggccaataccaagaaggaaatgctaatatagcccagttgggaacatgctggccctgatcagggaggagggactctatacacccaaagagttgaatgaattagctgttttgtatgagcaggaaccagaggagcactcctgggattagaaatgatgcaaccatgttcctagagcagcccttagaaacttgaaaacagcaatgcccaatactcagcagaatggaaatgcccaaattgccctgtcagaagccagaggatatgctgaaggaagcagagattgcatattatgtcagaccaaaagacccaagagaaggtcatagtccaagagaaggagcagaaagctcactcttcactaagaccataaagaatgtgctgggagaggggcaccatcatcaataataagtttggtggtggctcttctg

SEQ ID NO: 680485 - DNA, 2365 bp, Homo sapiens
ttggatcacctacccactcccttccagagtacagagtcaagctcactgcaagggagcagtttgcccagggagcccagtgccccttgaaaaatgaacagtgaagagatggctctacatatgcagactcttgctagtaactagcaggagaaaccatttgcagtggcatgtctttggaatgatcgtttgccaacagcaagagagaagtattttcaccttatagtataatttaccccaagacacagctccgtcctttcttaccaagggtgcatatgtgtacatgagtgtgtatatctgaagtttactcattgattaggaaatattgcaggttctctaaagcttgaatatcttgggctgttacaaattctatttgactgggaaaataatatttttaggaactcactcaaaaatggacacatgctttgaaatagaaatttaagtggtttctccaagtaacaacaatcatgtgttcctttcttcccacctctagagaaatacacaacagcgaaacaatgtagagatacatgagagtcaattggttatcactaagttgtattaagaccctacagaagctgcatccatgtggctgcaaaggacatggtttcatttttttatgacagtgtagtattccatggagtgtatgtaccacattttttttatccagtcctccatggatggacatctaggttgagtccatgtctttactattgtgaatagtgctgcaatgaacatatatgtacctgtgtcttcctggtagaacaatttatattcctttgggtatacacccagtaatgggactgctgggctgaatggtagttctgttttaagttctttgagaaatctccaaactgctttccacagcagctgaactaacttacattcccatcaacagtatataagcattccctttctctgcaacctcgccaatatctgttgttttttgactttcttataatagccattctaactgatgtgagatgttaacacaggaacagaaaaccaaataccgtgtattgtcacttataagtgggtgtgaaaccctgagtacgtgtggacacaaagatgggaccaatagacacagaagcctacttgaggaggtagggtgggagtaggatgaaggtccaaaaactacctgttgtctactatgctcactacctgcgtgacaaaatcatttgtacaccaaaccctagtgacacataatttatacatgaacaaaactgtgcatgtacccccaaacctaaaatgaaagttgtaaaaaaaaataaacacatgtgatgtgggagcataaagcaaaaacaaaattagttggcttaactgacacgtagagaacattccaccccaaaacagcaaaatacacaggcttctcaagtaaacatggttcattcaataagaataattatatcctaatatattaaaaaccttaataaactcaaaccatatggagtatattcttgaattgcaatgaaattaactacaaataactaaggaaaatgatatgattgtccctgaatatttggaaattaaagtaattctaaatacttatggagaaaactgggaatactcagaaaaatcaaaacatattttgtactaaaaatgagtatgtaacatatcaaaattatgaggtagctaaagcaggactttgaggaaaaattatagcattaaaaaaagaccctgcagaaggataatgagactgagggctgttgagtcgttaatgggtaaggctggaagccagagggcctctgtgctagtttacaaggaggctcatatctcctacagtggaagggaatgacatagctcagacaattaggaagacctaatttttagagctgcagagctccagggacatatgaatgcatggctgaggtcactgctcaggtgagaaaaggactgagaccagagaccgtggtacaaggacatatgtctggacagatatgtctcctttcctgccaggccaataccaagaaggaaatgctaatatagcccagttkggaacatgctggccctgatcagggaggagggactctatacacccaaagagttgaatgaattagctgttttgtatgagcaggaaccagaggagcactcctgggattagaaatgatgcaaccatgttcctagagcagcccttagaaacttgaaaacagcaatgcccaatactcagcagaatggaaatgcccaaattgccctgtcagaagccagaggatatgctgaaggaagcagagattgcatattatgtcagaccaaaagacccaagagaaggtcatagtccaagagaaggagcagaaagctcactcttcactaagaccataaagaatgtgctgggagaggggcaccatcatcaataataagtttggtggtggctcttctg

SEQ ID NO: 680486 - DNA, 2365 bp, Homo sapiens
ttggatcacctacccactcccttccagagtacagagtcaagctcactgcaagggagcagtttgcccagggagcccagtgccccttgaaaaatgaacagtgaagagatggctctacatatgcagactcttgctagtaactagcaggagaaaccatttgcagtggcatgtctttggaatgatcgtttgccaacagcaagagagaagtattttcaccttatagtataatttaccccaagacacagctccgtcctttcttaccaagggtgcatatgtgtacatgagtgtgtatatctgaagtttactcattgattaggaaatattgcaggttctctaaagcttgaatatcttgggctgttacaaattctatttgactgggaaaataatatttttaggaactcactcaaaaatggacacatgctttgaaatagaaatttaagtggtttctccaagtaacaacaatcatgtgttcctttcttcccacctctagagaaatacacaacagcgaaacaatgtagagatacatgagagtcaattggttatcactaagttgtattaagaccctacagaagctgcatccatgtggctgcaaaggacatggtttcatttttttatgacagtgtagtattccatggagtgtatgtaccacattttttttatccagtcctccatggatggacatctaggttgagtccatgtctttactattgtgaatagtgctgcaatgaacatatatgtacctgtgtcttcctggtagaacaatttatattcctttgggtatacacccagtaatgggactgctgggctgaatggtagttctgttttaagttctttgagaaatctccaaactgctttccacagcagctgaactaacttacattcccatcaacagtatataagcattccctttctctgcaacctcgccaatatctgttgttttttgactttcttataatagccattctaactgatgtgagatgttaacacaggaacagaaaaccaaataccgtgtattgtcacttataagtgggtgtgaaaccctgagtacgtgtggacacaaagatgggaccaatagacacagaagcctacttgaggaggtagggtgggagtaggatgaaggtccaaaaactacctgttgtctactatgctcactacctgcgtgacaaaatcatttgtacaccaaaccctagtgacacataatttatacatgaacaaaactgtgcatgtacccccaaacctaaaatgaaagttgtaaaaaaaaataaacacatgtgatgtgggagcataaagcaaaaacaaaattagttggcttaactgacacgtagagaacattccaccccaaaacagcaaaatacacaggcttctcaagtaaacatggttcattcaataagaataattatatcctaatatattaaaaaccttaataaactcaaaccatatggagtatattcttgaattgcaatgaaattaactacaaataactaaggaaaatgatatgattgtccctgaatatttggaaattaaagtaattctaaatacttatggagaaaactgggaatactcagaaaaatcaaaacatattttgtactaaaaatgagtatgtaacatatcaaaattatgaggtagctaaagcaggactttgaggaaaaattatagcattaaaaaaagaccctgcagaaggataatgagactgagggctgttgagtcgttaatgggtaaggctggaagccagagggcctctgtgctagtttacaaggaggctcatatctcctacagtggaagggaatgacatagctcagacaattaggaagacctaatttttagagctgcagagctccagggacatatgaatgcatggctgaggtcactgctcaggtgagaaaaggactgagaccagagaccgtggtacaaggacatatgtctggacagatatgtctcctttcctgccaggccaataccaagaaggaaatgctaatatagcccagttgggaacatgctggccctgatcagggaggagggactctatacacccaaagagttgaatgaattagctgttttgtatgagcaggaaccagaggagcactcctgggattagaaatgrtgcaaccatgttcctagagcagcccttagaaacttgaaaacagcaatgcccaatactcagcagaatggaaatgcccaaattgccctgtcagaagccagaggatatgctgaaggaagcagagattgcatattatgtcagaccaaaagacccaagagaaggtcatagtccaagagaaggagcagaaagctcactcttcactaagaccataaagaatgtgctgggagaggggcaccatcatcaataataagtttggtggtggctcttctg

SEQ ID NO: 680487 - DNA, 2365 bp, Homo sapiens
ttggatcacctacccactcccttccagagtacagagtcaagctcactgcaagggagcagtttgcccagggagcccagtgccccttgaaaaatgaacagtgaagagatggctctacatatgcagactcttgctagtaactagcaggagaaaccatttgcagtggcatgtctttggaatgatcgtttgccaacagcaagagagaagtattttcaccttatagtataatttaccccaagacacagctccgtcctttcttaccaagggtgcatatgtgtacatgagtgtgtatatctgaagtttactcattgattaggaaatattgcaggttctctaaagcttgaatatcttgggctgttacaaattctatttgactgggaaaataatatttttaggaactcactcaaaaatggacacatgctttgaaatagaaatttaagtggtttctccaagtaacaacaatcatgtgttcctttcttcccacctctagagaaatacacaacagcgaaacaatgtagagatacatgagagtcaattggttatcactaagttgtattaagaccctacagaagctgcatccatgtggctgcaaaggacatggtttcatttttttatgacagtgtagtattccatggagtgtatgtaccacattttttttatccagtcctccatggatggacatctaggttgagtccatgtctttactattgtgaatagtgctgcaatgaacatatatgtacctgtgtcttcctggtagaacaatttatattcctttgggtatacacccagtaatgggactgctgggctgaatggtagttctgttttaagttctttgagaaatctccaaactgctttccacagcagctgaactaacttacattcccatcaacagtatataagcattccctttctctgcaacctcgccaatatctgttgttttttgactttcttataatagccattctaactgatgtgagatgttaacacaggaacagaaaaccaaataccgtgtattgtcacttataagtgggtgtgaaaccctgagtacgtgtggacacaaagatgggaccaatagacacagaagcctacttgaggaggtagggtgggagtaggatgaaggtccaaaaactacctgttgtctactatgctcactacctgcgtgacaaaatcatttgtacaccaaaccctagtgacacataatttatacatgaacaaaactgtgcatgtacccccaaacctaaaatgaaagttgtaaaaaaaaataaacacatgtgatgtgggagcataaagcaaaaacaaaattagttggcttaactgacacgtagagaacattccaccccaaaacagcaaaatacacaggcttctcaagtaaacatggttcattcaataagaataattatatcctaatatattaaaaaccttaataaactcaaaccatatggagtatattcttgaattgcaatgaaattaactacaaataactaaggaaaatgatatgattgtccctgaatatttggaaattaaagtaattctaaatacttatggagaaaactgggaatactcagaaaaatcaaaacatattttgtactaaaaatgagtatgtaacatatcaaaattatgaggtagctaaagcaggactttgaggaaaaattatagcattaaaaaaagaccctgcagaaggataatgagactgagggctgttgagtcgttaatgggtaaggctggaagccagagggcctctgtgctagtttacaaggaggctcatatctcctacagtggaagggaatgacatagctcagacaattaggaagacctaatttttagagctgcagagctccagggacatatgaatgcatggctgaggtcactgctcaggtgagaaaaggactgagaccagagaccgtggtacaaggacatatgtctggacagatatgtctcctttcctgccaggccaataccaagaaggaaatgctaatatagcccagttgggaacatgctggccctgatcagggaggagggactctatacacccaaagagttgaatgaattagctgttttgtatgagcaggaaccagaggagcactcctgggattagaaatgatgcaaccatgttcctagagcagcccttagaaacttgaaaacagcaatgcccaatactcagcagaatggaaatgcccaaattgccctgtcagaagccagaggatatgctgaaggaagcagagattgyatattatgtcagaccaaaagacccaagagaaggtcatagtccaagagaaggagcagaaagctcactcttcactaagaccataaagaatgtgctgggagaggggcaccatcatcaataataagtttggtggtggctcttctg

SEQ ID NO: 680488 - DNA, 2477 bp, Homo sapiens
aaatatggggaaagtaacagcagtaaagaaaaaagaagcagctgggatttccagtctaagaaaagaagaatagagaacttgaggtgcagacacaaaagcctcgttcctgtcattttagggtttcttctctgagaatggtcatcctgtgtctaggcacagcaggccttgggaaggtagcctctatatctccaaagtttctgacctatactgttgtactccttatccgacttttaagagcaacatgcccagttaatttcagttacccctaaggatggttgtgtatcaagacattctcagacatccacagactggcatgaatgagcatacttgctgaggggaatcacacagagggtgtgcagctttcagcctcaggagagaggaaaggagcaggagaaaactcacgcacgcactgctctcgacatcagggagccatacatagccaccggggttacctcatatgcgataagctgtttatagatgtgttttccccattggattctgtcttgaaggagtcaagtatttttccaatctttgactacttgaggtatattacactcctggatcagaaaactgaagtcaagagtcagctccatctcctatgtggtggccctacattctcccctggctgtgaactgtgcttattcctgcctctgtggcttgctcacagaagccccagtgcctcaaatcttcacatttggttccaccttttcaaatgttatgtgattttcaaagccaacgttaaattccaccccttccatgcagccctccagctcagattccttccttttctgaaactggatgccatttacatgcaggtactgtgttatggtctccctccttggtttcctaagcttgagccttgggtacaagttgcagggcagggttcatgcttattaatttgcttgtatcatacacagggaaaatgctgctcaaatgatccactgttggattgatggagacacctacatgaatgacatcacttgtcttggattcttttagcttagaaatgcaatgattttatgacaaagtttctaaatttcacaaaggtgaattttgaaattgattttgaaataatttaattctagctatttcttaaactccaatatacctgctaagttatatggtaatatggtctttgtgaaaatagatagtctatttatgcatttctaccaggtcacagccattacaaacttcatgagaatatatttttttgtttttttttgttttgttttgagacaggctcttactctgttgcccaggctggagtgcagaggcaccatcagggctcactgcagcctctacctccatgggctcaggtgatcttcccatgtcagcctctccaggtagttgagactacaggtgcacgccaccatacccagctaatttttgtatttttggtagcaatggggttttgacattttgcccaggctggtcttgaactcctgggctcaaatgatcctgaccacctcagtgtcccaaagtgctgggaatataggcataagccaccatgcatggccaagagtagatttgtccctgttcttccaaacttcttatttagttttgtaattcatcatcatcatcaactttgaagtcccttctgtcaagtgatccaggcttattgaaatgaatacacaattggaaagagtggggaaaccgtttctcttctcataaaaagagtcatatttttctttttctcacaagaaataccttggggtagctgcatgagaaatgtggacatttttccataaagcaccaaaagataatacagaacaaaacacaatatgtcagttcagtgaatggaggaaagaaacagkaagaaaaatgtcttttagctgcagcctaatagggcttcacagatatctctatggtaaaatataaatgaacccgtcaagagttgttgacatgtggaacaataataacatcccaactaccttgaaatcttgtttaaaatgaagactcctggaggaacagaattgagagcatacttcagcaaaggagctctccataaatatgataaagtcatttcaatatccactgccttctcttagctgttcccaggtgcttatgtcctcatgtgtcccttgtgtccacagatacccaagcacttgttagcttacacatagctctagtcatgacctttgggttagcagcaaacagctggtccagaacccttcaccccagaaccagctgaatccacaccaacatctgtctgtctatctctatctatctatctctcaactatctatctatctatctaatctatgtattatctattataaatctgtctgtcatctatctagccatcacctatcagtctgtctacctatttttctatcaacctattagctatctattcattatttatcacctatttatcatctatctatccatctattatctgtttatctgtctatcatctgtctatctacctaatctatgtattattatctattatcaaactacctatcatctatcca

SEQ ID NO: 680489 - DNA, 663 bp, Homo sapiens
ttaacttacaaggaaacagccttttaagactttgcagagtgcttagcccagtaaataaatcacttctctgctgtttatatgtttgggacaatgaagactcttgtcaaggaacaagcatttccacctggcatttatgatcaatttctgtagctatttaacaaggccatagctttttgggaaaagtctacctacctttttgtcttatacaattcttggttactaaaagttcttttctagcattatgaataaaacatcaagaataacacactggtctctgtttcctatttatgaatcttggtttttctatagaataaatactcaccctttgtatgtgtctccactgtgcccggtctcttatgcagcccactgggaaggtagacacagggtctttgtgcccatcccataaagggccaaacagcactgcatgccaggaaaatgtgtagagatcagtgcaacgcaatcctcaccagaaaggagctttgtgcaaattttgaagacagaggcaaataggtttttccatatttcatcgcattaacttgttacagcaaacacgctggacttgtatctggatctccaagtatagccatcacaaatgaagtcatgttttaagaataaatattaagcgaaacragctgtaatgctgctcagctcattacggttttc

SEQ ID NO: 680490 - DNA, 597 bp, Homo sapiens
agcttggataactttcttaactgagccctcagtttcctcatctatgtagtgggaatgatgataatatatatacctcatagagtgattgtgaggattaaacaaggaaacacacatgcaatgttccaaatcaggcctggcacctggctagcgccactgatggctgtgatcaggattgctgttaggacacccccagcaccaccaggatccctgctacacccatctgcctgatggatcactgaacttatctcattccatcctccaattcaagatggaaaaggattattctaattgacttcaggtaagctgtgaaatccattcacattacttttgggggaatgcatagtcaagagagatctttcctcattccaaaatatattaagagggaaaaacaaacatgttgtattagtccattttcatactgctatgaagaaataccaagactgagtaacttataaagaaaaagaggtttaatggactcacagtttcacatggstgggaggcctcacaattatggtggaaagcaaaggaggagcaaaggcatgtcttacatggtggcaggcaagtgagtatatgtaggggaactgccgtttatagaac

SEQ ID NO: 680491 - DNA, 532 bp, Homo sapiens
attctgttccctctatgtaaagtaaatattctcctacatttcctaactttgtagcttacaatcctctgtccaaacttggtggttcccagagtacttgcatcttatttgattgtttggtcactgcacctgagaatttgccgtgtgtaattctgcataaagaaatactgtatggtaatatattcaacatacyatctcacatgcttacctgatacatctgcttgtatggctgtgaagtttaaataacttaaaatacaaaaaaattagggctattggatttgggaaatacaagagttgtaaaatgacttattaaataatacaacagtaaatgcttttatggcttctagttatttttcaagctggaaattatttggcatataagaaaatgcaggaattcaagcaagatatttgtcataaaataaaatgattaaggtggggatttcatgtggttcttttatttgctcctcttgcgtcagaacaattcaggaggtttgtgcttatgagccgtttatgacacttaattcgtctttaaatt

SEQ ID NO: 680492 - DNA, 532 bp, Homo sapiens
attctgttccctctatgtaaagtaaatattctcctacatttcctaactttgtagcttacaatcctctgtccaaacttggtggttcccagagtacttgcatcttatttgattgtttggtcactgcacctgagaatttgccgtgtgtaattctgcataaagaaatactgtatggtaatatattcaacatactatctcacatgcttacctgatacatctgcttgtatggctgtgaagtttaaataacttaaaatacaaaaaaattagggctattggatttgggaaatacaagagttgtaaaatgacttattaaataatacaacagtaaatgcttttatggcttctagttatttttcaagctggaaattatttggcatataagaaaatgcaggaattcaagcaagatatttgtcataaaataaaatgattaaggtggggatttcatgtggttcttttatttgctcctcttgcgtyagaacaattcaggaggtttgtgcttatgagccgtttatgacacttaattcgtctttaaatt

SEQ ID NO: 680493 - DNA, 896 bp, Homo sapiens
ctttactcatgtggttttatggcccgttgttcattccttgtcattgctgtgtaatattccatcgtgtgatttatgacgatgggtttatcgagatgaagcagctgtcctcttcaggagggttgatcagactgtactgtgcaatcactaagaatgtgggagttcttgcagaatcatcccactcctttgaagattcctgayttccaaccacagagttgatcatcatgtgacctggttcacagaaagaaaaaaattaaagggatttgggggtgggggtgggaaggagagacagcagcactgtccatttgttttctctgaggagcttaaatacccttcccatcatcccctagttttaaggaacaataaagaataactttctgggtcccttgggtgttttcattaagtagccacagaaagtgctagctagaaaagtctatagcgacttatatacagaagtgataacattctaaaatgggcagttttggcttaggggtggaaaatagttctcatatctcctaatccaatacctgcttttggtgaaactttgatttggagaacagctagggtctagctgtaccctcttttaagttattttatgcccaaagtccagcctagcccttgtggagtagacatctgtcaggacagctgcctgggggctgcatgctggagacggaaggaggcagaggtgcagagagggactaacatttacctctgaaatgctcccatgaaagattgtctggatttctgcttaaaagtactttatttataagatgaactagctgaacttgatataactgcatatattcattaccaaaatttaatgtcatctttccaagctcaccttttaatttgcaatcaaaacacaaagaaataggtgtacaaatgtaatataaacacaa

SEQ ID NO: 680494 - DNA, 1124 bp, Homo sapiens
taaaaaatatgagtcccagcctggtaattcacacctgtaatcccagcacttttgaaggccgaggtgggagaatcacttgaggccaggaattcgagagcctgggcaacagagtgcgaactcatctttctttcaaaaattaaaaattagccagatgtgatgtgtacatgtagtctcagctactcgggaggctgaggcaggaggatttttggggcccaagagtttgaggttacagtgaactatgattatgccattgtamcccagcctgggtgacagagcgagatttggtattgatttttttaaattgtaaaggtaatgttatggggcttataatacatataagaaaaataaaacaaaatatggaagttaaatataactacatgtgtcaagtttttctttgtaaaaaaacattttatgtgaagtgatacaatgttacttgttagaagactgtaagttaggaagacatattttaatccttaaaacaacccagaaaattaatttaaatgtaacaacaatgctaaaaatatgataaagaagttaaaaataaatattggagtatgtttgattaaaacaaaaattaaataggagaaacagaaaacaaataccaaaagactaaatcaagatgtatcaataattacactaaaagtgtgaatgtaataaacatttcaatgaaaaagtagagaattttagcaattacaaaaagtaagatgccactattttctctctgtaaaatatatgcactataaaaacaaaggtacaaagatgttacaggaaggcagggtaaacagaatagaattatcccagtagcagataataattatagatagataaatgcttctctggctctgcttaacaattcttaaaataaaagacacaaacgaaatatatatatatatagatagatagatagatagatagatagatagatagatagatagatagatgtaacttctctgtatctcaggagaaatcacaataatgtttatataaaagcaatcatctaccaaggaaaaaatttactatgactggcattggtatgaaagaataccagatatttacagaggcagaaaaataggaatcataatgaagagaaaaaacagttaatgaacagtggctcagaaccacag

SEQ ID NO: 680495 - DNA, 1124 bp, Homo sapiens
taaaaaatatgagtcccagcctggtaattcacacctgtaatcccagcacttttgaaggccgaggtgggagaatcacttgaggccaggaattcgagagcctgggcaacagagtgcgaactcatctttctttcaaaaattaaaaattagccagatgtgatgtgtacatgtagtctcagctactcgggaggctgaggcaggaggatttttggggcccaagagtttgaggttacagtgaactatgattatgccattgtaccccagcctgggtgacagagcgagatttggtattgatttttttaaattgtaaaggtaatgttatggggcttataatacatataagaaaaataaaacaaaatatggaagttaaatataactacatgtgtcaagtttttctttgtaaaaaaacattttatgtgaagtgatacaatgttacttgttagaagactgtaagttaggaagacatattttaatccttaaaacaacccagaaaattaatttaaatgtaacaacaatgctaaaaatatgataaagaagttaaaaataaatattggagtatgtttgattaaaacaaaaattaaataggagaaacagaaaacaaataccaaaagactaaatcaagatgtatcaataattacactaaaagtgtgaatgtaataaacatttcaatgaaaaagtagagaattttagcaattacaaaaagtaagatgccactattttctctctgtaaaatatatgcactataaaaacaaaggtacaaagatgttacaggaaggcagggtaaacagaatagaattatcccagtagcagataataattatagatagataaatgcttctctggctctgcttaacaattcttaaaataaaagacacaaacgaaawatatatatatatagatagatagatagatagatagatagatagatagatagatagatagatgtaacttctctgtatctcaggagaaatcacaataatgtttatataaaagcaatcatctaccaaggaaaaaatttactatgactggcattggtatgaaagaataccagatatttacagaggcagaaaaataggaatcataatgaagagaaaaaacagttaatgaacagtggctcagaaccacag

SEQ ID NO: 680496 - DNA, 1124 bp, Homo sapiens
taaaaaatatgagtcccagcctggtaattcacacctgtaatcccagcacttttgaaggccgaggtgggagaatcacttgaggccaggaattcgagagcctgggcaacagagtgcgaactcatctttctttcaaaaattaaaaattagccagatgtgatgtgtacatgtagtctcagctactcgggaggctgaggcaggaggatttttggggcccaagagtttgaggttacagtgaactatgattatgccattgtaccccagcctgggtgacagagcgagatttggtattgatttttttaaattgtaaaggtaatgttatggggcttataatacatataagaaaaataaaacaaaatatggaagttaaatataactacatgtgtcaagtttttctttgtaaaaaaacattttatgtgaagtgatacaatgttacttgttagaagactgtaagttaggaagacatattttaatccttaaaacaacccagaaaattaatttaaatgtaacaacaatgctaaaaatatgataaagaagttaaaaataaatattggagtatgtttgattaaaacaaaaattaaataggagaaacagaaaacaaataccaaaagactaaatcaagatgtatcaataattacactaaaagtgtgaatgtaataaacatttcaatgaaaaagtagagaattttagcaattacaaaaagtaagatgccactattttctctctgtaaaatatatgcactataaaaacaaaggtacaaagatgttacaggaaggcagggtaaacagaatagaattatcccagtagcagataataattatagatagataaatgcttctctggctctgcttaacaattcttaaaataaaagacacaaacgaaatayatatatatatagatagatagatagatagatagatagatagatagatagatagatagatgtaacttctctgtatctcaggagaaatcacaataatgtttatataaaagcaatcatctaccaaggaaaaaatttactatgactggcattggtatgaaagaataccagatatttacagaggcagaaaaataggaatcataatgaagagaaaaaacagttaatgaacagtggctcagaaccacag

SEQ ID NO: 680497 - DNA, 1124 bp, Homo sapiens
taaaaaatatgagtcccagcctggtaattcacacctgtaatcccagcacttttgaaggccgaggtgggagaatcacttgaggccaggaattcgagagcctgggcaacagagtgcgaactcatctttctttcaaaaattaaaaattagccagatgtgatgtgtacatgtagtctcagctactcgggaggctgaggcaggaggatttttggggcccaagagtttgaggttacagtgaactatgattatgccattgtaccccagcctgggtgacagagcgagatttggtattgatttttttaaattgtaaaggtaatgttatggggcttataatacatataagaaaaataaaacaaaatatggaagttaaatataactacatgtgtcaagtttttctttgtaaaaaaacattttatgtgaagtgatacaatgttacttgttagaagactgtaagttaggaagacatattttaatccttaaaacaacccagaaaattaatttaaatgtaacaacaatgctaaaaatatgataaagaagttaaaaataaatattggagtatgtttgattaaaacaaaaattaaataggagaaacagaaaacaaataccaaaagactaaatcaagatgtatcaataattacactaaaagtgtgaatgtaataaacatttcaatgaaaaagtagagaattttagcaattacaaaaagtaagatgccactattttctctctgtaaaatatatgcactataaaaacaaaggtacaaagatgttacaggaaggcagggtaaacagaatagaattatcccagtagcagataataattatagatagataaatgcttctctggctctgcttaacaattcttaaaataaaagacacaaacgaaatatawatatatatagatagatagatagatagatagatagatagatagatagatagatagatgtaacttctctgtatctcaggagaaatcacaataatgtttatataaaagcaatcatctaccaaggaaaaaatttactatgactggcattggtatgaaagaataccagatatttacagaggcagaaaaataggaatcataatgaagagaaaaaacagttaatgaacagtggctcagaaccacag

SEQ ID NO: 680498 - DNA, 1124 bp, Homo sapiens
taaaaaatatgagtcccagcctggtaattcacacctgtaatcccagcacttttgaaggccgaggtgggagaatcacttgaggccaggaattcgagagcctgggcaacagagtgcgaactcatctttctttcaaaaattaaaaattagccagatgtgatgtgtacatgtagtctcagctactcgggaggctgaggcaggaggatttttggggcccaagagtttgaggttacagtgaactatgattatgccattgtaccccagcctgggtgacagagcgagatttggtattgatttttttaaattgtaaaggtaatgttatggggcttataatacatataagaaaaataaaacaaaatatggaagttaaatataactacatgtgtcaagtttttctttgtaaaaaaacattttatgtgaagtgatacaatgttacttgttagaagactgtaagttaggaagacatattttaatccttaaaacaacccagaaaattaatttaaatgtaacaacaatgctaaaaatatgataaagaagttaaaaataaatattggagtatgtttgattaaaacaaaaattaaataggagaaacagaaaacaaataccaaaagactaaatcaagatgtatcaataattacactaaaagtgtgaatgtaataaacatttcaatgaaaaagtagagaattttagcaattacaaaaagtaagatgccactattttctctctgtaaaatatatgcactataaaaacaaaggtacaaagatgttacaggaaggcagggtaaacagaatagaattatcccagtagcagataataattatagatagataaatgcttctctggctctgcttaacaattcttaaaataaaagacacaaacgaaatatatawatatatagatagatagatagatagatagatagatagatagatagatagatagatgtaacttctctgtatctcaggagaaatcacaataatgtttatataaaagcaatcatctaccaaggaaaaaatttactatgactggcattggtatgaaagaataccagatatttacagaggcagaaaaataggaatcataatgaagagaaaaaacagttaatgaacagtggctcagaaccacag

SEQ ID NO: 680499 - DNA, 1789 bp, Homo sapiens
tactttgtttttagatggtttcctagtaaggaatagagtaaaaatacacttattctacccttttcagccagaggttccttattgtgaatgtcttgcttttgatagtgttttataactattatatattagggttttgaacttctatgctaacataggtacataatattctttttttctgtgaaaaagttctcagaaatgtgcagaagaatacttttacccatttgcttttactttatatgtcagacaaaaatctaaataaaaagagtctcacagtgttgcccaggccggatccagtgaagtgatgtgatcatagctcactgcagcctcaaattcctgggctcaaatgatcttcctgctttacccttccaagtaggtagggctacaggcacacaccaccatgtccaactaatttatgtatttttttttttttggtagagatggggtctccctatgttaccaagactggtcttgaactcctggcctcaagtaatcctcttgctttggctttccaaagtgttggcattacaggcatgagccattacacccagtctaaaattttttttttatagaaagaatttctaataattctgctgaggttccaatttattttacattagaagtaataacttgtttgtatccctgtaaatatttaatttttattctccatgtattgttttctcaggtgtaccttcagttgaatttttagaatctcccattacggcagtagacagcccattcctaaaagcatttcaagcatcatctagttcttctccagaaacgttaacagatggtaatgaaatgaagtttagaactgtttttggatgtagtaaattggaatatggagctttgatttgttttctaggcatctctctttttttcattattacgataatttaacttcaagttaagctatcattttactttcttttatgtaagccacacactgagaaaaagcaagcaacttcattttgtattgggaaaaatagctaactccgagaatgtcgaggattctgatactactataatttgaagttttaaaccttgttctggtacatgctgttgctctggtgtttgaataagagggccttctggcggcctaattgcctttgggttttcccaaagaggcgtaatccagtgataaccataggttagcagggttttatcatttataaattaagagcaagtagaattcatttttaagcaccagtattctgtattttccttactgaaaacaggaagaatgaatttgtatgacttattaggtatttaaaatttagtattttagaatattttaaaatgagaattttctttatctgtattttcatacacctrgacgttccccacaaggaattttaaggctgcttgccttaaaacatacaacttagtacataatgataaaatatatatacaagtaagaagccaagaaaaggacacagctgtggcagctttcaaggttgatgtaattgctttgtttaaacttcagttttgactgagtttagtggcagccaagacacagaggaaagtgcagtcaattaaatgctttctttattagacaggaggaagcccgagttcctcagtgctaatgaatgttacaccaatgctggaattttttttttttttttttttgagacaagttctctctctgttgtccaagctggtgtgcagtggtgtgatcatggctcactgttaccttgaactccagggctcaagtgatcttcctgcctcagccttccacatagctaggagtacaggtgtgcccccacacctgggtaattaaaaaaactttttt

SEQ ID NO: 680500 - DNA, 642 bp, Homo sapiens
ggcatggttgtgcatgcctgtggtcccagctactagggaggctgagatgggaggattgctttcgccctggaggtcgaggctgtggtgagctatgattgcatcactgcattccagcctggaagacagagcaagaccctgtctgtctgtctgtctgtctctctctctctctcacacacacacaaaaacacagccacctcctagtgcagactggagaatggtgtgacaggctccaagctaggaatgagaaygcttagctccctccatcccttaacacgggtacagctctcgggcatccagggcatgacgtctgcccacatactatttcctctcaagaagccttgtggccacattcgtcttcgtgggtcattcaggaaaaccccggtccccactgtcagctgccagctgagtccttccatcctgccaggtcatttctgcacaagaccactcctcacatagagccagagctgcatgtgagccctgggggtacccacggggagggagccgccttagtgggggtcagcttcgcagcaccctctggcactcaccaacccatccatgctccaaaaaggagacccccagatggaggtttctcgctgtcctttggaccctgtcacagtgtgtccccctcctctgctaactgca

SEQ ID NO: 680501 - DNA, 642 bp, Homo sapiens
ggcatggttgtgcatgcctgtggtcccagctactagggaggctgagatgggaggattgctttcgccctggaggtcgaggctgtggtgagctatgattgcatcactgcattccagcctggaagacagagcaagaccctgtctgtctgtctgtctgtctctctctctctctcacacacacacaaaaacacagccacctcctagtgcagactggagaatggtgtgacaggctccaagctaggaatgagaacgcttagctccctccatcccttracacgggtacagctctcgggcatccagggcatgacgtctgcccacatactatttcctctcaagaagccttgtggccacattcgtcttcgtgggtcattcaggaaaaccccggtccccactgtcagctgccagctgagtccttccatcctgccaggtcatttctgcacaagaccactcctcacatagagccagagctgcatgtgagccctgggggtacccacggggagggagccgccttagtgggggtcagcttcgcagcaccctctggcactcaccaacccatccatgctccaaaaaggagacccccagatggaggtttctcgctgtcctttggaccctgtcacagtgtgtccccctcctctgctaactgca

SEQ ID NO: 680502 - DNA, 1136 bp, Homo sapiens
aacattaggtgcaatgccaaaaggcgttacaaactcaggcatgacttaatcaaatatgtggtagtcagcacatagtggacataagacgtccattgagccatatggtaggattgctgtctaggttagaagatctgtcttatgtgaaaatgtcaaacagagaaaggcaagagtgcagagaggaatggggaaagggtagtgtgcaagatcctctcccatatttataaattagaatttaagttctagttcataaatataattttcaaaagttgagactttagttgataagaacagaatagacatcaatactatgtttagatatacaacatgccattactattatcattgcactcctctgcccctaaagacagtattgtgatattctgggaaggcaagttaaaacaatagaaataaaaattgaataggaaaaataatgaaacttcttctagtgtgctgtttatggtaactggctccagagtgtaagattttaacctgcactcttactgacttctgttatattgcactgaggtattttgtgttgtaaacacaccagggtagttggacgtaattcaaagaaagcaatcagatttgagaaggatttagaaaagtgtggggaagaataaaaagaaataaaaacaatgccatagacattgaagaataaaaaataaggtcagaagttagtcttcatcaaaaaggtatgggtgatgaaataaaatggaattgaagaaaatccaaggaaaaaagttatctgatgctgaagaagttaacaagcaatctagcttcctgagttatttaaaattaggctgaataaatcaccaaaactaatatatagtcaaagataaaaaagaaagaacaatcattttttcatatccaatttctccacatacttttatctgttgtaactagagttttgccttgtttacaatcagagaaggcctattactgtaaagtatatttttccactagtattaaataattcaccggtattgtgcattacattttgtggagaataataatactaatcagtttcttcaagcttatcatcagtgttcctaccgaacacctcctaaaccattaaccactgttaattttcttttaccatagatagtaacyaatcaataattagcttttaataatca

SEQ ID NO: 680503 - DNA, 1310 bp, Homo sapiens
aaaacaaacttccaagaaagagcattagaaatctactgtagaatgacattaagagaagtgtcctccttaacgtagctgccttgggaagctcatgaaagacattttacttttaggctgggcacagtggctgacgcccataatcccagcacttggaggccgaggtggatggatcacttgaggtcaggaatttgagaccagcctggccaacatggtgaaaccccatctctactaaaaacacaaaaattarccaggtgtggtggcaggcgcctgcaatcccagcctgtcgggaggctgaagtaagagaatcacttgaacccgggaggtggaggttgcagtgagctgagatcataccatagcacacctgcttgggcaacaagagtgaaactctgtcaaaaaaaaaaaaagactttttacttttagaatttagtgtaaaggaaaacacattataaaactgtaacttctctcctgtataatattcactgccttggaacttactatactttttattttgccctgatcactagaaaaatcagaacacttaagcacagtggtaagactaccctcaagctttgcacatttgcctcccctttgtgtctcagcaaaggaaatagaaaattggaactgtttttagataaacatcattctgtcaacaacagataaacatcattttgtcaacaatgaacccgttgtttttaggttaaactttgtgggtagcaagattgaggtgagtgactctcctgcttgggcagaacattcctgaaagacatatatatgttatttcctgatcaagtaaagtcatcaaaagaagggagaacactttttgagcgtttaccacgtgtcacgttgctagatgcttctgtgtatgttgtttctttaatccatctaacaaccctaaaaaccagcacgtgactttcttattttggataatggagctgaggctgacaaaccttcagtaactttttcaattttgttttctccaaaacctataccattttaattctatagaaaagtagcagggcatttatgctaccattaaatgtaacaatatttaagaaagatttatgtttgtttttcattaatactgaaaggaaaaaatgcagcattcactttcaaagaagtgttctgacagatgatatgcgtaaacacatacctgtctttattggaggaaagataatttcttgatcaactccgtttttattattctcatgtctgacgatacatctgtgttctttgtccagtgacttttctggcaccgttaaccagctaaatttcatgtatgtgtcgttagtcttcatggtgttcccctcctg

SEQ ID NO: 680504 - DNA, 632 bp, Homo sapiens
ggcctagtgttttagtggtatttataatattgcctatattgttatagacataaggagtaagcagcactctcagctgcgatctctggaccatgattggatacatgattcagtataaatacccttcccatttgctgtccaaaatatctcgcttcacagctggaccctaagaaacagagtgagtgggcctcccccatgtcctaggagagctgagaaaaccttgctctcagccaggctgcttagctgaggcttagctgagatggcagcttagtcttcaggaaagtcctgggggagggtggggaacagggtacagctgctgacaggagagtgtaatattaggggggagatcaggagttaagctgtttctctttgtacagaatacagtaaattcagggcaggaaatgagaggggacggctytctcttgtgtaccagaagcagccacaagacagatattcagtgtggtgtagagcaggtctgaatcactctgcctgtcctaggtggcacagtaatagaccccagaggcattttcatttagttttggaggtataaatttccagcttatccttctacttccataagtatcatgctttcctgactgactcctgattccaacatatccctggagttgcagatg

SEQ ID NO: 680505 - DNA, 1429 bp, Homo sapiens
agcaaatatatatatttttgatgatagtgtatttgttcaggttctggctggaaacaacattcatctcaaattgttcaaatgaagagacattgatgcagtggttctcagtcttggctgtacattggaaatgcttggggagctttgaaaagtatacatgcctgtgttctaccctcagaggttctgcattagttggtctggtttgtggcctggctgttgggatttcttaaaagcttcccagctgattctaatatgcagcttgagttgagaaaccaggctcaacctctgagttgaaaatgaaagtactgctttcagaagtatgggcagtgctgggaattaaaggatggtaagacacaagagactagctacacggggaaataatactacccttatgatcaaagaacaagagacactagattgacctagtgaaagctggaccagaggagaaggggctattttacctaagctatagtatgagaggggggtatgcttctatttcctgactctcagagctgaagcaggatgtatgagggttctccagagaaatagacctaatagaatatgtgtgtgcatgtgtgtgcgtatgtgtgtgcatgtgtgtgcgtgtgcgtgtgtgtgtgtgtgtgtgaattttttaaggaatttgctcatgcgatgatggaggctggcaagttcaaaatctgcagagtggcccgcaggctggagacctaggaagagctgatgctgtagttcatgcctgaaatgtgaaggcaatttgttgccagtattccctcctgctctggggcaagtcagtcttttactcttctcaggctttaaattgattggatgaaacccactcatattatggaggacaatctgtttcactcaaagttcggcaatgtaaatgttaaatctcatctgaaaacatcatcataggagcatccagaataatttttgaccacatatctgggcagtgcagcccagcaaagttgacatatgaaattaattgtcacataaggagggagaggagaagaaatagtccagcttctttttcttctctctccccttcctttggccagcttcccaggactggccaaaggactggccagaactgaatgaagaatgagtacaggatctgaggggcaaactgaagatgtcctgcacatacttctaactcatttatcacaggcttgattattattttgaaaatgccttttctattgttaaaattctcatttggtwaggttgagcaatattatgacagactcttgaatttattttttaaaattatgctaaagacttagtggtttctaaaatgattttctaatgatctttgctgagatggtttctcgttagactagaataacataacaatgtttgtgtcaccaatgcaaatgcagtttttactaaccaataagagcactgctaaaatttattttcggcttaaaagaaa

SEQ ID NO: 680506 - DNA, 1282 bp, Homo sapiens
tggaacagagtggaaaagattcaacattttagagtcatacaaacttagtaactatatgacattgggcaagctactgaatccctgtgaatttcagttgttaaactgcaaattagagagaataacagctctcacrcaatgttgttatgaggattgaaagaaaacatgtatggaaaatttctggcacacagtagaccctcaataaatgttgatttccttccttcttttaacttgggtatttcagttccaatatcacatcaagcctttggctccttaatttgggtaaaaaccacttgggaaagaaattatctagttttaccactattggctgttttgtaactttttttttttaaattggcatcaagtctgttttagagcataagatagcctgtatcttctttagggtaaaaatacaaactggaagagtgcttttaccttatgagcagtgaggagaaaactggtatttcccttgagaaaaaatttaagattatctgggagaaaaaaaaaaaaaaaaaggaaggacaggaggaaggaagttagttacgcagttaaaaggtctataaatttaaaaggaacaaagtaggagaaggtatttgctgtgttgccctcctgttaagatgggttaggtattatgcatagaatgacagtcgtctttctctctcccaaaatgaacaaatatatatatttttctatgagactgaatgagtttttggcaggaatgtcagttcagtaaatgattttgtgctctttgtaagaggaaatgtgtactttacaactttgacctttctatatttttcatattttgcctggatacgtattacaaccattcctttcagttagcaattaaaatctaatttgcagctgcctttataaaactctcccacaaatgaaaattgtgaagtcctcttgtttgatctcatatgattgatattattcagtgtcatacaattcagtatttgaaacacataaaatgccccaaatatgaagaaaatgcaataaaaagtcactggccattggcaccattgttttaatttgtcacacagtataaaacacaaattaagaaaaaaggaaaggaagaagtagtagtaatttacacctgtctagaaagtttggcactgcatccccaagtatagggaaccatttacaggggaaacaacataaccagagacgatgtaagtatagaagatgagatcatctaccaacagcaatctttcaaattcatagacacttctggattcatgagctgagaatgagccatgcagaggactgtaaaattcatttgcag

SEQ ID NO: 680507 - DNA, 1282 bp, Homo sapiens
tggaacagagtggaaaagattcaacattttagagtcatacaaacttagtaactatatgacattgggcaagctactgaatccctgtgaatttcagttgttaaactgcaaattagagagaataacagctctcacacaatgttgttatgaggattgaaagaaaacatgtatggaaaatttctggcacacagtagaccctcaataaatgttgatttccttccttcttttaacttgggtatttcagttccaatatcacatcaagcctttggctccttaatttgggtaaaaaccacttgggaaagaaattatctagttttaccactattggctgttttgtaactttttttttttaaattggcatcaagtctgttttagagcataagatagcctgtatcttctttagggtaaaaatacaaactggaagagtgcttttaccttatgagcagtgaggagaaaactggtatttcccttgagaaaaaatttaagattatctgggagaaaaaaaaaaaaaaaaaggaaggacaggaggaaggaagttagttacgcagttaaaaggtctataaatttaaaaggaacaaagtaggagaaggtatttgctgtgttgccctcctgttaagatgggttaggtattatgcatagaatgacagycgtctttctctctcccaaaatgaacaaatatatatatttttctatgagactgaatgagtttttggcaggaatgtcagttcagtaaatgattttgtgctctttgtaagaggaaatgtgtactttacaactttgacctttctatatttttcatattttgcctggatacgtattacaaccattcctttcagttagcaattaaaatctaatttgcagctgcctttataaaactctcccacaaatgaaaattgtgaagtcctcttgtttgatctcatatgattgatattattcagtgtcatacaattcagtatttgaaacacataaaatgccccaaatatgaagaaaatgcaataaaaagtcactggccattggcaccattgttttaatttgtcacacagtataaaacacaaattaagaaaaaaggaaaggaagaagtagtagtaatttacacctgtctagaaagtttggcactgcatccccaagtatagggaaccatttacaggggaaacaacataaccagagacgatgtaagtatagaagatgagatcatctaccaacagcaatctttcaaattcatagacacttctggattcatgagctgagaatgagccatgcagaggactgtaaaattcatttgcag

SEQ ID NO: 680508 - DNA, 663 bp, Homo sapiens
tctaccaagtcctatttcctatacttttgtcacatgaagtgacctaatttttttcaatatatcacatgaagcaggcaggtattacataaaatgtttcacattaacttaatatctcaaataatctcatgtcactgatatcatgaggtccattttacaaagaaggaaactaaacctctgtgagagtaacttttctttagaaaactaaactgttcacttttttttttcataagcagcattatctttctacctcttcccttgagataaactttaggaaaggcagaatcaagtgttgtattttaattttttaatgaaaataatttgttttgtgttttatgtagcagaccatagacatttaactacttaatccaaaactacaattacagactttcattagaaacaagtgtatcaggaaagcctttcattgaacaaattgtttgtaatggcttgtggctctcaggtcatctcgtatggtcaagtaaactactaataggcagtagtattaaataaataacytgacgttagcagcggttgtggcctgcctcccactccttgtaatgtggtaaacaaaaatgcagtttttgtttcaagaaatttaaatataaatacatttattgaacactgagtaagttttcaatttttgttatttcttcttaaaaaatggga

SEQ ID NO: 680509 - DNA, 936 bp, Homo sapiens
cttattcagtagaaagactactgaatgaatctaaacatttttaagggattttggtttcttataaaaagtagcactgttgaaagtctggacagaaaccaaaacaaagatgttacatacaaaggaaagaaaaggatattttaattgtaatcttgaaactacttttccaccttaaacaacaccataggatggcaaatgtatttaaaaaacaaacaaacaaaaaacatagacctgtcctcagggcgcccaattttctggaaaggatacacttcctattaagtcaaataagagggagggagttggtgggtacccacatctcatagtgattatatgagtagattgggcatttaagtcttttattgttattgttactgttattcgcattgaggaatgttccaattaaacaataaaattaatttttgtttttatttttgttttttgagacggagtttygctttgttgcccaggcgtgatctcggctcactgcaacctccgcctcctgggttcaagtgattctcgtgcctcagcctctcgagtacctgggattacaggcgcgtgccaccatacccagctgattttttattttcaatagacacggggtttcaccatgttggccaggctggtcttgatctccttcaggtgacccacctgccttggcttcccaaagtgcagggattacaggtgttaaccactgcgcctggccaacaataaaaataattttaataaaggtagatcatttattgtctatattttgaagataatattgtgccatggtcagacttgctagtgtaataatccaataagagatgatatgaggacctaagaaggaggaagaaaagagggaaaattataaagtaaaatccactgggttttgtgattttgtaagtgcagagagactacaccaaaacaagacttccagctttggtgaatggatggatg

SEQ ID NO: 680510 - DNA, 594 bp, Homo sapiens
ccattttaaatcaatgtttgcaaaataattggctatccacaaactggttttggggtgattttttaaacagccaatcacagagactcagtttcatgacattattataacccttggtgcattcagctgcctcactggtttgtgasaataacaagagatggttacatgtaaaattttttaagaaatataaaactccccaaatgttgagaacagtgttcttatcaactcttagaacgtcaatcagccaagctaaatatactgcatttctattggggtacagcatccaagggtgctatgggatatataaaagctgctctatttggttttagggaaattaacatactgcctgtgtcttgagaatcaaaaataatttttggcccaggatattctcatcttaagagtgtgtgtgtgtgtgtgtgtgtgtgtgtgtgtgtgtgttttaatttagaaatatataggcaggagtgttggcttacacctgtaatcccagcactttgggggccaaggtgggaggatggcatgaggctaggcgtttgagaccagcctgggcaacatgctgagatcccatctcagcaaagtataaaagttcagttacca

SEQ ID NO: 680511 - DNA, 594 bp, Homo sapiens
ccattttaaatcaatgtttgcaaaataattggctatccacaaactggttttggggtgattttttaaacagccaatcacagagactcagtttcatgacattattataacccttggtgcattcagctgcctcactggtttgtgagaataacaagagatggttacatgtaaaattttttaagaaatataaaactccccaaatgttgagaacagtgttcttatcaactcttagaacgtcaatcagccaagctaaatatactgcatttctattggggtacagcatccaagggtgctatgggatatataaaagctgctctatttggttttagggaaattaacatactgcctgtgtcttgagaatcaaaaataatttttggcccaggatattctcatcttaagagtgtgtgtgtgtgtgtgtgtgtgtgtgtgtgtgtgtgttttaatttagaaatatataggcaggagtgttggcttacacctgtaatsccagcactttgggggccaaggtgggaggatggcatgaggctaggcgtttgagaccagcctgggcaacatgctgagatcccatctcagcaaagtataaaagttcagttacca

SEQ ID NO: 680512 - DNA, 594 bp, Homo sapiens
ccattttaaatcaatgtttgcaaaataattggctatccacaaactggttttggggtgattttttaaacagccaatcacagagactcagtttcatgacattattataacccttggtgcattcagctgcctcactggtttgtgagaataacaagagatggttacatgtaaaattttttaagaaatataaaactccccaaatgttgagaacagtgttcttatcaactcttagaacgtcaatcagccaagctaaatatactgcatttctattggggtacagcatccaagggtgctatgggatatataaaagctgctctatttggttttagggaaattaacatactgcctgtgtcttgagaatcaaaaataatttttggcccaggatattctcatcttaagagtgtgtgtgtgtgtgtgtgtgtgtgtgtgtgtgtgtgttttaatttagaaatatataggcaggagtgttggcttacacctgtaatcccagcactttgggggccaaggtgggaggatggcatgaggctaggcgtttgagacsagcctgggcaacatgctgagatcccatctcagcaaagtataaaagttcagttacca

SEQ ID NO: 680513 - DNA, 2155 bp, Homo sapiens
agctgggtgactttagttgaacaagttccttagctactcctagcttcagtttccgaaccagaaaactgtaacaataaaacctattttaagtataacctataactaacataccacagcaataacaatagaaaaacagtgatcttctgcctcatccatacccaccctttaatcctatttaccagaagcaactacttttaactgtttgtttttaattattttttatttatttttacttttaactcttttagacatggtattttacttctgtcttaaattgcttatattgctattcattgatttactattttcgacactatctactaagtaggtattatggtagatgaggatttaacttgcttctgtcaaccttacttcattatcctaatttagaatctatatcacgtcttagaacattaatatataaatattattcatgcttaaagtcaggtagtatttatgatgatatattttcttgtataaccttttgcttttcctggacttaataactgyctgtgattcttattagttgtctttgctcttatgactaattataattgtgaagaatttatcaattacctatgaaaacatatttttcaaattctcaaacacaacagcaaatctatcagttccatttactttttttacgtctcctttcctcagccatgttcttgaaactttcctctctcggctttctgatttcttggcttggcacaatgtagcatttcttatctcagacttcatttgctccccactcatccccatccccactttgtctctgcatggtgttgtaggtcctaagatggttattctctgttctcttcctaatctcttccccaccctcttctgtcctgccctgtgtcttacttcgctgacccctagggaattgcatcctctcagctgccatcactcactggtttccagctgggttcaggcaaaaacaagtgagaggagagagtgactgtatacttttccctaattcttctgcatgttagaccatgtttctggaaatgactaactacaacttctttggggaagcttctctcccatagcactagttgtcagtagacactaataacacttaggtcttagttggagagggagtcatggcttcctgctgttgctagaatctgagtatttctgtatgtcttattggttcccttatagctctattcgtagtcacttctgggttggatccattttccttctggagtgtcactgactgcagattccctttatctggattccatgtcttcctcctttaggtgcattagaagaatgcatacattagagatacagttttcaaattcttagtattttgaaaacgcctttattctactctcacaaatgattgatgtttggctaactgtatatcattaatgataatgtataacttgaatgttaatttttttcctcagaattttcaatacattgttttatttccctagagcttctggtattgctgctgagaagtgtgattccattctccacttctcgatcatttgtgtgccctctcatacttcctccctggagggaattgggttcttccctctatccctggtattccagaatttcatgatgatattgccttggtagtatctttttctattggtgctgggtaagtttccttcaagataaagaataacgtgttttagctcttagaaaacttcttgaatttcttttttaaaaaaatgatttcttccatcctctctgtcgtcactttctagaaaatttgtattactttgatattggaactcctttcttaatcctctattttttaaagtcttttatataactttgtatcttacaaaccttctatttaaaaaaaaatcagcttccatatataaaattgttcttgcttcctttccttctgatctgtatttcttcaaacacggggatggggacattttttggcttttcatttacttttatacattaagcactataaatctatacacttagaagggcccaattaaccggtcagttcattgtatattgttcatgcatagagctaaacttctggttgggagatcctcagatgtcagtatctgaaggctttttctttgttcctcctcatatgctgattacaggcagctgacatcctcaaagcagagtggaaaggggagctgatggtcacatagatcagtaaacatgtttt

SEQ ID NO: 680514 - DNA, 670 bp, Homo sapiens
aaatgagatcatgtcctttgcagggatatggatgaaactggaagccatcattctcagcaatcacaggaacacaaaaccaaatactgcatgttctcacttataagtgggagttgaacattgagaacacatggacacagagargaacaaaacacaccagggcctgttggggtggagggtgaggagagggaacttagaggacgggtcaataggtgcagcaaaccacaatggcatacatatacctatgcaacaaacctgcacattctgcacatatatctcgtttttctttagaagaaataaataaaaaataatttttggataaatttaaaattcttaaaacaaattccatcaatgattattttaacagattttattaagcttttgaatctggctttttaatatttaaaaaccacatgttttctctatgagggcactgagttggcttgcttaacaccagcttttttgtcataatgtcaagggttgagcacaagtatgttttcttttttgccaaatagggtttctactgtgttttccttgataaaaatcatttcaagaaacttcatatcttgattatggtaattacatgccaagcctactaatttgttttgaagtaaatattgagagatattttacccaaaattctcaagtataattttctcaagtgatttttggt

SEQ ID NO: 680515 - DNA, 604 bp, Homo sapiens
tcaccggctcgtctcttctcagtgctgtctggatgagatgctgttaatacagggtccttccctctactcacctcctccaggccatgcagttaggccacggtgctgagtaagtgcggtcctactcttcacaacagtgctctgggttcacatgaccccgggggtatgaagacttcatggggtacccacacaaggatagtttaagggaattattttaagtcatcctccattatacctcctaaaattaagctgctgcagagcacacctggcttaagggggtcctgtatgatggtctttcactctgaaaggaaggcagaccctcagccattcttgtcccaccaaggggtgttgccctggagagtgaaaaccatccctggggcaatgtaggaatawgtgcaaatattggtaacattgaggaagtgtgtgtctctaatgactgacagtttttttttttgcaatttagaggtttttaacaaaattgaaggaggagccagctaagttgtcacttgatcattaaaaataattttgtttttgtttttgttttgagacagagctttgcttttgtcacccaggctggagtgcaatggtacattctcggctcactgca

SEQ ID NO: 680516 - DNA, 621 bp, Homo sapiens
caaaagggaaaagggaaggggaaggggaaggagaaggggaagggaaagggaaaggggaagggaaaggggaatgggaagggaaaggggaaggggagaaaggaagaaagatccattaggccttacagaatcccataatgattacaactatggtaactggcataagcacagatatatatacatatttatggaacagaattcaaagtccagagaaaatctcatacatctttggycaatttgttttcaaaaatggtgccaatactattcaatggagaaagagaagtcttttcaacaaatggtgctgtaactgaatatccacatacaaaagaatgaagttggacacctactgggccatactatatatgaagattaactcaagacgaattggagacctaaaggtaagagctaaaactataaaactcttagaagaaaacatagaagtaaatatttatgcttaagaaacaagagaaagaacagataaactaaactacatcaaaacttaaaactctggtgctattaacaacatcaagaaagtgaaaagaccaccctcagaatgaggaaaatatttgaaaaagatctgtaaggaactgtatccagaatatataaaaaactcttacaagaaca

SEQ ID NO: 680517 - DNA, 570 bp, Homo sapiens
caaactggagaacctagaaacccagtggtgtaattcagtctggaccgaaggtctgagaagcaggggttctgmtgtccaagggcaggtagatgtcccagctcacagagagacagcaaatttacccttcctctgcttttgtgttctattcagtttctcagcagattagatgatgcccatccccatgaatgaggatgatctttactcagtgtgctgattcagatacgaatacctccataaacacccccataaacaccctcaaaaataatgttttaccagctatctgggcatcccgtagcccagccatgttgacacagaaaattaaccatcacagtatttctctggttttttgtttgtttgtttgttttttgtttttgttttttgagacggattctcgctgtgtcacccaggctggagtacagtggcgcaagcttggctcactgaaacctccaccttctgggttcaagcagtcgtcctgcctcagcctcccaggtgtcacagtatttcttttaaaatatttttaaaaggaggctgggcatagtggctcacgtccgtaatcccagcactttggga

SEQ ID NO: 680518 - DNA, 1062 bp, Homo sapiens
cagcctagcaaattgtgatccttataagtactcatcagaacccctagtgcctaccaatgctaaagtatttttcggccatctctataaagctcaaagggaagtggacatttgggcaatggcttgagcaatttcaggacagcagtttrtcttttggtctgagttgtttggagtttaagtctgtgataataaaaatttcacaaaacaacttcctgttttcactactgagcactactgagcaggtctaaccttagccatcagaaaaaataataataattataggacaagattatagccataactgttcctattattcaggttaaaatatatggtttttgtctgatgcaattcaatgagcttggtttgtgtctaaggaaaagactctgccctatgtgaagaaaaaagaaagaaagaaaaagaaagaaagaaagagagaaagaaagagagaaagaaaaaagaaagaaagagaaagaaagaaagaaaaaagaaagagaaagaaagaaagaaagaaagaaagaaaagaaaagaaaagaaaagaaagaaagaaaaaatcaaaggaagtgaatctttgccccctcattagagtcctaccttgtacttatcttgctcagggtataacttggtgcatatactaaagccaaatccaccagggcttccaggacctttctgaccaagagagcagacaatgtgagcttataaggggccttgggtgagtctccaacccctaaaatctctaccagcttaaactcttattagaaatgcatttcttggctgggcatggtggctcatggctgtaggcccagcactttgagaggccgaggtgggtggatcacctgaggtcaggagttcaagaccagcctggccaatgtggtgaaaccccgtctctactaaaaatacaaaaattagctgggcatggtggcgggcacctgtaatcccagctacttgggaggctgaggcaggaaaattgcttgaacccaggaggcggaggttgcagtgagctgagatcacaccattgtactccagcctgggtgacagagtgagactctgtctgtaagaaaaaaaaaa

SEQ ID NO: 680519 - DNA, 1062 bp, Homo sapiens
cagcctagcaaattgtgatccttataagtactcatcagaacccctagtgcctaccaatgctaaagtatttttcggccatctctataaagctcaaagggaagtggacatttgggcaatggcttgagcaatttcaggacagcagtttatcttttggtctgagttgtttggagtttaagtctgtgataataaaaatttcacaaaacaacttcctgttttcactactgagcactactgagcaggtctaaccttagccatcagaaaaaataataataattataggacaagattatagccataactgttcctattattcaggttaaaatatatggtttttgtctgatgcaattcaatgagcttggtttgtgtctaaggaaaagactctgccctatgtgaagaaaaaagaaagaaagaaaaagaaagaaagaaagagagaaagaaagagagaaagaaaaaagaaagaaagagaaagaaagaaagaaaaaagaaagagaaagaaagaaagaaagaaagaaagaaaagaaaagaaaagaaaagaaagaaagaaaaaatcaaaggaagtgaatctttgccccctcattagagtcctaccttgtacttatcttgctcagggtataacttggtgcatatactaaagccaaayccaccagggcttccaggacctttctgaccaagagagcagacaatgtgagcttataaggggccttgggtgagtctccaacccctaaaatctctaccagcttaaactcttattagaaatgcatttcttggctgggcatggtggctcatggctgtaggcccagcactttgagaggccgaggtgggtggatcacctgaggtcaggagttcaagaccagcctggccaatgtggtgaaaccccgtctctactaaaaatacaaaaattagctgggcatggtggcgggcacctgtaatcccagctacttgggaggctgaggcaggaaaattgcttgaacccaggaggcggaggttgcagtgagctgagatcacaccattgtactccagcctgggtgacagagtgagactctgtctgtaagaaaaaaaaaa

SEQ ID NO: 680520 - DNA, 1542 bp, Homo sapiens
tttcttacctgaagtctwaattcctagaagtcttaattcctagaattctcctcctacaatattttcttcctatctgcctcagctactcaatcctacgatcaaagtctatgatcatagcctagaccacctgttttcaaacatttgggttagggactctttatactcttaaatattaagccaacctgaaagaacacccaatggccaaagctggaacaatccaagcaacagaacaagtaatgtagtactgcattataacccaaagtataaaataaacatacatgaggccatactcatataaataaatgattaaataaataagagaataggagataaagtttccttacggaagaattcccagtaacagatgtagacactatctcttccaggaggtagagcttagtccttgctcccccattgagagtgcactggacatagctattcacttgcaaaaaaagagagtacggaaagaggaaaagagtaactgtatagtggtgaaaccgggcaagcactgccttgatctaagctaacatcaacacgacgtcatgtgaatatcaagtaccattcaaaatgattacagacatgagccaccgtgcctggcccctggtaagttccttttaactataaaagtaagaatatctttagaagagaaagtatggctgggtgcggtggctcacgcctgtaatcccagcactttgggaggctgaggcaggaggatcacttgaggttaggagtttgagaaagactggccaacacagtgaaacccctctgtactaaaaatacaaaaattagccaggcatggtggcatgtgcaggtgatcccaggtacttgggaggctgagatagaagaatcacttgaacccgggaggcagaggtttcagtgagccaggatcagaccactgcactccagcctggatgacaaagtgagactccgtctcaaaaaaaaaaaaaaaagaagcaaaaatatacaaacattaaaaatgaatcctgaaatatcaatgcattatgtaggaaagagaataatggaattctataaagtataggataatttttttatttcaacttttattttagattcaggaggtacatgtgcaggtttgttacatgggtatactgtgtgatggtgaggtttggagtactattgtaggataagtatttaaagaaataaaaaattaaaaagccaacagtgtttactagctgacataagcttttctttgtccttaccacgtacagtacaattgttaaaaaaaaaaaaaaaaaaaaaaaaaaattctttccattagccctgggcttcaagatgagtaacagttctgactaaaggtatcagtaaagcttagataggacaaaaagcaaactggccacaaaatgatttaaaaactgtttctctctaccagcaagcagcaagaggctctctacaagttgctaacccacccccacatttcatatataatatgtaacctattaacatctatgccaaagacttgactatataactctgcaagctttataaatctaattagacatctctagtaatattcaaaatata

SEQ ID NO: 680521 - DNA, 1542 bp, Homo sapiens
tttcttacctgaagtctaaattcctagaagtcttaattcctagaattctcctcctacaatattttcttcctayctgcctcagctactcaatcctacgatcaaagtctatgatcatagcctagaccacctgttttcaaacatttgggttagggactctttatactcttaaatattaagccaacctgaaagaacacccaatggccaaagctggaacaatccaagcaacagaacaagtaatgtagtactgcattataacccaaagtataaaataaacatacatgaggccatactcatataaataaatgattaaataaataagagaataggagataaagtttccttacggaagaattcccagtaacagatgtagacactatctcttccaggaggtagagcttagtccttgctcccccattgagagtgcactggacatagctattcacttgcaaaaaaagagagtacggaaagaggaaaagagtaactgtatagtggtgaaaccgggcaagcactgccttgatctaagctaacatcaacacgacgtcatgtgaatatcaagtaccattcaaaatgattacagacatgagccaccgtgcctggcccctggtaagttccttttaactataaaagtaagaatatctttagaagagaaagtatggctgggtgcggtggctcacgcctgtaatcccagcactttgggaggctgaggcaggaggatcacttgaggttaggagtttgagaaagactggccaacacagtgaaacccctctgtactaaaaatacaaaaattagccaggcatggtggcatgtgcaggtgatcccaggtacttgggaggctgagatagaagaatcacttgaacccgggaggcagaggtttcagtgagccaggatcagaccactgcactccagcctggatgacaaagtgagactccgtctcaaaaaaaaaaaaaaaagaagcaaaaatatacaaacattaaaaatgaatcctgaaatatcaatgcattatgtaggaaagagaataatggaattctataaagtataggataatttttttatttcaacttttattttagattcaggaggtacatgtgcaggtttgttacatgggtatactgtgtgatggtgaggtttggagtactattgtaggataagtatttaaagaaataaaaaattaaaaagccaacagtgtttactagctgacataagcttttctttgtccttaccacgtacagtacaattgttaaaaaaaaaaaaaaaaaaaaaaaaaaattctttccattagccctgggcttcaagatgagtaacagttctgactaaaggtatcagtaaagcttagataggacaaaaagcaaactggccacaaaatgatttaaaaactgtttctctctaccagcaagcagcaagaggctctctacaagttgctaacccacccccacatttcatatataatatgtaacctattaacatctatgccaaagacttgactatataactctgcaagctttataaatctaattagacatctctagtaatattcaaaatata

SEQ ID NO: 680522 - DNA, 1542 bp, Homo sapiens
tttcttacctgaagtctaaattcctagaagtcttaattcctagaattctcctcctacaatattttcttcctatctgcctcagctactcaatcctacgatcaaagtctatgatcatagcctagaccacctgttttcaaacatttgggttagggactctttatactcttaaatattaagccaacctgaaagaacacccaatggccaaagctggaacaatccaagcaacagaacaagtaatgtagtactgcattataacccaaagtataaaataaacatacatgaggccatactcatataaataaatgattaaataaatragagaataggagataaagtttccttacggaagaattcccagtaacagatgtagacactatctcttccaggaggtagagcttagtccttgctcccccattgagagtgcactggacatagctattcacttgcaaaaaaagagagtacggaaagaggaaaagagtaactgtatagtggtgaaaccgggcaagcactgccttgatctaagctaacatcaacacgacgtcatgtgaatatcaagtaccattcaaaatgattacagacatgagccaccgtgcctggcccctggtaagttccttttaactataaaagtaagaatatctttagaagagaaagtatggctgggtgcggtggctcacgcctgtaatcccagcactttgggaggctgaggcaggaggatcacttgaggttaggagtttgagaaagactggccaacacagtgaaacccctctgtactaaaaatacaaaaattagccaggcatggtggcatgtgcaggtgatcccaggtacttgggaggctgagatagaagaatcacttgaacccgggaggcagaggtttcagtgagccaggatcagaccactgcactccagcctggatgacaaagtgagactccgtctcaaaaaaaaaaaaaaaagaagcaaaaatatacaaacattaaaaatgaatcctgaaatatcaatgcattatgtaggaaagagaataatggaattctataaagtataggataatttttttatttcaacttttattttagattcaggaggtacatgtgcaggtttgttacatgggtatactgtgtgatggtgaggtttggagtactattgtaggataagtatttaaagaaataaaaaattaaaaagccaacagtgtttactagctgacataagcttttctttgtccttaccacgtacagtacaattgttaaaaaaaaaaaaaaaaaaaaaaaaaaattctttccattagccctgggcttcaagatgagtaacagttctgactaaaggtatcagtaaagcttagataggacaaaaagcaaactggccacaaaatgatttaaaaactgtttctctctaccagcaagcagcaagaggctctctacaagttgctaacccacccccacatttcatatataatatgtaacctattaacatctatgccaaagacttgactatataactctgcaagctttataaatctaattagacatctctagtaatattcaaaatata

SEQ ID NO: 680523 - DNA, 1028 bp, Homo sapiens
ctttaaattttattttattcactaatgactaatcttttttttcactttctgtagcggacaaggcaaaatctcagcaagttcggacctctagtacaataaggcgaacctcctctttggatacaataacaggaccttacctcacaggacagtggccacgggatcctcatgttcactacccttcatgcatgaaagacaaagctactcaggtaaaatcaggaaatcaaaatcagcttattaccctgcacttcttctgttttgatcacagtaaagaaaatgtaatataatcaaatttccccaaatttgaaatacatccaaccaaggaagaaaggaaaaatccattgttttaaataaactttgcagtaattgttttttgtcatctggcttttagaagttttgaaattctttaatacttaaatagcacatcagtctatattacatggttgtagacacgttgtaattttaagaattgctttccaatacaaattaaaatgactggtaaccattttagaaaatataattttttaagaagagtttgcaccgttcttgaaaataatttataaagtagtaacaaatgcctaatgaaatctatgttggagaatttatttttttctgtttaaaaccaagactaaaagccttcagagggaaatagaaattaactgtctcattttccctgtttttggaaggatctccaagcttttgatttgaaaagcttttcctccacatcagaaaaaaaatctgaaaacatctttattcatgattatctgagttcttgaccatatcttcataacagtagtcaatcagcatttattggcataaagaagaatactaaaaatataagagatagtcattggttttaaaaaacctgcagcacagttaggtagatgagatacacatttataaaaattggtaaaagaagacagtgtataattcgacgttagatgaatggagtatgtaaatgtgagggcattcaaaggaaagagaacattttgggctttgtagkttagggaaatagaataattagagtttca

SEQ ID NO: 680524 - DNA, 1842 bp, Homo sapiens
agtgcaagtaaagccctcggcctctctgtttcttctctactccaagggcagcaggggcagaactctaaatgaagttttcatttgcatagtttcagatttcggccttcacttgtttggtatagaaaatattgatacattttgaatttcacctgattttaccttccttcatttcccctcttgacagtttttctaaaatctctgaaatgacaatgatcagagtaagagcagtagacacaataaatagtgaaaataaattataaataaattaacagcatattggttcttttccctagcactgcagtcctgtgtgtttaataacaacaaatattttcaattatataacttaatatagagaattttacttgttaacctcactttgttagcacacaaatgaagaatatggagtaagatctatttttacagaagcagagtagtaaagtagaaagagtccactgcagcagaatctctgatgccacttaattagctgtgccactgaactataggttcctcatttgtgaaaacaaaacaatggaccagtgagctctgaggtaccctcaagaccaaaatatgtggctctatgatgatggtttcctttttttccttctttttgctactgagaacaaagtattcaaactaaggaagattatgagtagtcctacttagttggatactgagttagtagaatttgatatccaaattcttctaatattagaattcttttgagttacattaataaactctattgagtactaatagaataaacctctttattagaaattttggataatttgcaaaggaaatagaaactatggttctgttcataacctctaaaaattaaactaggaaggaatgaacaaacagaaaaatctgtacctgtgaatatgaggaatatgagatttcactttttcttacaagcaagtcaaagtgattttttttttagctttgttaattctttcagcaaatgtttactgaatatctgccatgtgccaggagtagtgccaggcacaggactcccgctgtccttgaagagttttgtgggatgtgctgacctacaggtacatacagtgagctatggaatttttaaggcaaacaatttgatttaaaagaaatgtttagttcaataaaggtaacatacgcagaaattagcttaagacacaagcttggtctttagcctttgaagaataaactgggtcagtagtggtggaatatgaaatcaagggaaatactatgtgctttctatgtagatgaatatatgcaccagcatttggatgtttaatggtattcctcttacagccgttggacataccagatggtcgaagagctccacttcctgctcattaccggagcagtagtactcgcagcattgacactcagactccttctgtccaggagcgcagcagtagctgcagcagtcattcaccctgtgtctcccctttttgtcccccggaatcccaggatggtagcccttgctcaacagaagatttgctctatgatcgtgataaaggtaagaatggaattgtccacttagagggtttgttatgggccttgctcattataccttgtcttagaccattacatctttttttttttcttttgttcaatggtgacattgtcaaagattggttaatctaggtttctttgttcattggtttcacatacccccttttttgtgactctaacaaacatcttccataaatgtgtcagagaagcacagcgcatggttctaacagctaataaaagccataaaatggagtgtgtacaacttcatataatgcataggtcttttccttggtattgtccagagcggatgatggttatggtaaagttagcttkaccatggta

SEQ ID NO: 680525 - DNA, 618 bp, Homo sapiens
gaggctgaggcaggagaatcgcttgaatcggggaggcggaggttgcagtgagccaagatcttgccgttgcactccagcctgggcaacaagagcgaaactccatctcgaaaataaataaagtaaaataaaataaagtgttatccacatttcagagatgttaaaatgtaaaaaagtttcttataataaataaaccgtggcatttgtttaacacctacacatttcatagacaatattcagtcatataccatgaacagatttttagcgcccactgcataataggttatgaacagagaagttccaaattagaatggatatctttgacatttaattcatttatttatttttggattgaaataagaacaraaatgttcatattttaatatgtatgtttctatagagaatattctgtttccataccttacattgcagtctctaagtgggagcagaagccttccatgtgatcttgagtgtctttatctccttgtaatttgtcctcagagataacaaaattctcagttagactgcccttttaccttaagaagcatgactgagttctttcctttcatcttcaggctgccagttagtgacttaattcagttttaataaagtcatcaggct

SEQ ID NO: 680526 - DNA, 3806 bp, Homo sapiens
accttggatatggaaattcaattctaccttggtttcatttggggttgagaaaatcttccgcaagataaaacgaaataaagttcccctctactttttttgttgttgcagtttctttgtatgaacaagggatggttcaaatgactgtgaaagactacatgaggtaggtagcagaatcagtgttacttcatgccaatattttgcagccacacctttgctgaataaaatagaagtagggaagttttcttaatattgccatagctcttgggatctcgtgaaaggtaactggtttagtcacagtgcctagaatgtttacatcagctttgagagaaatagaggttccttaaaaatcataaaattgtgagcaaattaaatcaacaaatgttgatgtgggggaaaatttaattacaacatatgcataaatgacattctactgtactgcaactgttcataaggacctgtttataaaacagttgcattcaatattttcattttggctaatgtaattgattattattctatttactggacaacaatatatacaatttccaatgctaggtagaaagcagtgagagtctcttcattggaggaaatactaggtctcaagtgtggtgcccagaacaccagcattagcattgtgggggaccttcatagaaatgcaaattcccaatccccaccctagacctactgaaccagatcatttggaggtagggtccagaaatctgtatttgtgcatgtccttcagatgactttttcagccacactcttttaaaaaccactggaatagactatgagctctttcaggttaggaactccccttcctgcgcttttgtcaccttcgcattttcaggataattccaactagtcgtaaaccaaatctgcagtactgcatccccctgctgctaccaattcacccctaaaatgctatttgtcatagatttttctcctgcaggattggttgtttttgctacttatagaatcatagagctataaaagaccacagaaatctctcaggcaactctcgctttgttgaagaggaaaatgagagccaggttctgtgaccaactcgtgcttccaggctttattacaacagtgactctgtattggttctccttggatccaagggcaggctgcttctgggttgctctgctgcaccttccaaaataaggtgtggccctcaaacaaagaaggaaaaataaattatggcaggcctaatgaaaactgaggtggggcaataagtgaaagggtatcttctgcctctccttgaggctcaaggagctcaactgtctgttaacagcagagtttttactatccagaaaaacacactttctcaaccttacagaacagaagcaattaaaggacagggcccagctattgtttttttttgtttgtttgtttgtttttgagacagagtctctgtcacccaggctagagtgcagttgcgccatctcagctcactgcaatctccacctcctgggttcaagcaattcgctgcctcagcctcccgagtagctgggattacaggcacctgccaccacacctggctaatttttgtatttttagtggagagggggtttcaccatcttggccaggctgctcttgaactcctgacctcatgatccacccacctcggcctcccaaagtactgggattacaggcgtggccaccatgcctggcccagctattcttaccaaatgtagctagaacaaagttagcaacccaagtaggataccttgttctccttgggaacattgatatctgcattgtatttttaataaattctaaatatatgccaactggctattatatttgatggggctagatgtgatccatggtatagctgagctatatgtataaaactgaactatattatgacagggttccactctctttggaagcactttcaaatgatctgcaaagcaggcctattggatagtgatgttcattttttccatagtaaaggagtttgttagaaatgcatatggatggctacaggagccctggagacagcacttagagagtgttagccatgtgatatgaaatccttcactagtatgagaattaatgtagagtcacttcagtgacggctggctgtacttctttcagcatataattttaacttcttcctgaaagttggtgcctagcaaagctgtgttcctgaaaggttccccaatgatatgccatctgtcaaaagtgagacattctgtcaccttcataatgagcactagcgggcacctaatgcttaaattcttacaccttctrtaatacaacgctcttgaaaacaggagcagctcctccactgcaagctgtcttctgcaaaggtgtggtcattatgggattattagagactaagaggaaatgcaaatgtttgctctggaaggaaaagattcacaatgacctcccaggagactatctaaatcaacacatctcattgttgatattttcccaactgtagatctttgcatcagttttcagaaactcccatcctatccagagggaccagtttcaactcttgctattctactgcaagtgtaccacaaaggtatgtaatttccaggtgcttttcatcctgagaaatcattctgtgcaacaatggatttcatgaaattataaataggcacttgttgaatgaatggatgagagaatgaataaaagattttcaaaccccatcttgcaataacaatataaaagagttaaaggagttaataaaattggaaacagactaaatatctgtcaatggggaaatggccaaatgagtgattggccagttcattttacagaattccatatagtgataaaaagcatagtcagacatacacatattggcttagaaagctctatatgccatattttttaagattaaaaaaagcaagatgcaggaaggtatatagagtatgttactatacataaagcaaacaaatgaaaaccataaaacatgtatgtaactgcataggaaaatgtctggaaggatacacataggtttaactggaagagggtcaggattggtgggggtaataattgaggggagtgaaagcattttgtgtactattaaaaattttttaacaaagtcagtatatctaatttcttccaccattaagtattacttaaaaagttaatgatattttcatgatgatatgaaaatatgtttaatgaccaatcaatacttatattcttggtcaagagactgaagcctttggaaagcaggaactgtgttcatttttgagccatgtgtacctagcatagaacctagaacatgacagatattcaataaatatatgtataaatgggtaggataaacatttgtacagtgaagtcactatgataacagattaaatctttcatgcaactttagatttctcaccagaatttttttcttccttgaacctctttatattcaggtgtctgtgtcagtgtaatcaagtgattggcattcctgattcccctggtaatcccatgattaagatatccaaatggagccatctccagttcacgttataagtttcaataatcaattgcactgcatggtgaccacagttaatattaacttattgtgatttcaaaaatgctaagagaatattatttcagatgttctcaccacaagtgatgtagtgggtgttttaattggctcgattgaatatttctacaacatatacatagaacaaaacttcacactgtactccatagatacacacaattattatttgtcaattaaaaattttagttttttttttttaaaaaagagacacaaaataattaaagaaaaaaaagaaagtgtgaacatgatgctggttgtatctggtaagtgggcg

SEQ ID NO: 680527 - DNA, 817 bp, Homo sapiens
ccctcccttgaactcttcgtcagcagttgttcaagcaaaggcaaatcccctatttatcacttaggtaccaaatactcaagcattgtatctatggacaatcaactgtttccycttaattcacttcccacacacatacctaatctcccaggacagacaaggctcctccctctgctccttgtattctaaggaggccaccttgcaacccccttcctcctgagagacttcctattagagcctatactgtggtataactgaaagcatttctcattaaagaagagaaaaaaaaatccataatttaatctttagcatggtgacactctggtagccaactatttcccccacaatatataacttaatatttacgtaagaatctacagatagatttaacatttcatggatgctcctgtttacaaagtcataacctgcccacacgtgactttgccctttctctgcatgtcccagcctcttctggtggcaagagcagtgatctaaaacatgagcacaaacttgtagtcatagaaatagtccagctgaagctagcaaagggtacttatccaaactttagtaaaaagaacaagaatatgtatatatacacacacacaaatatataaaatgtggtctttcattattttattagtgtggcatttaaggcatatgtgtttccttctggattttctttcccttagtaaagattcatctcacaaccatattgttatttggttttgagagacattagtttctcttccttcgtttcaggttttattctttgtatcaggaaaccagtgatgcaattttaactgaactctctgacaatcga

SEQ ID NO: 680528 - DNA, 817 bp, Homo sapiens
ccctcccttgaactcttcgtcagcagttgttcaagcaaaggcaaatcccctatttatcacttaggtaccaaatactcaagcattgtatctatggacaatcaactgtttccccttaattcacttcccacacacatacctaatctcccaggacagacaaggctcctccctctgctccttgtattctaaggaggccaccttgcaacccccttcctcctgagagacttcctattagagcctatactgtggtataactgaaagcatttctcattaaagaagagaaaaaaaaatccataatttaatctttagcatggtgacactctggtagccaactatttcccccacaatatataacttaatatttacgtaagaatctacagatagatttaacatttcatggatgctcctgtttacaaagtcataacctgcccacacgtgactttgccctttctctgcatgtcccagcctcttctggtggcaagagsagtgatctaaaacatgagcacaaacttgtagtcatagaaatagtccagctgaagctagcaaagggtacttatccaaactttagtaaaaagaacaagaatatgtatatatacacacacacaaatatataaaatgtggtctttcattattttattagtgtggcatttaaggcatatgtgtttccttctggattttctttcccttagtaaagattcatctcacaaccatattgttatttggttttgagagacattagtttctcttccttcgtttcaggttttattctttgtatcaggaaaccagtgatgcaattttaactgaactctctgacaatcga

SEQ ID NO: 680529 - DNA, 817 bp, Homo sapiens
ccctcccttgaactcttcgtcagcagttgttcaagcaaaggcaaatcccctatttatcacttaggtaccaaatactcaagcattgtatctatggacaatcaactgtttccccttaattcacttcccacacacatacctaatctcccaggacagacaaggctcctccctctgctccttgtattctaaggaggccaccttgcaacccccttcctcctgagagacttcctattagagcctatactgtggtataactgaaagcatttctcattaaagaagagaaaaaaaaatccataatttaatctttagcatggtgacactctggtagccaactatttcccccacaatatataacttaatatttacgtaagaatctacagatagatttaacatttcatggatgctcctgtttacaaagtcataacctgcccacacgtgactttgccctttctctgcatgtcccagcctcttctggtggcaagagcagtgatctaaaacatgagcacaaacttgtagtcatagaaatagtccagctgaagctagcaaagggtacttatccaaactttagtaaaaagaacaagaatatgtatatatacacacacacaaatatataaaatrtggtctttcattattttattagtgtggcatttaaggcatatgtgtttccttctggattttctttcccttagtaaagattcatctcacaaccatattgttatttggttttgagagacattagtttctcttccttcgtttcaggttttattctttgtatcaggaaaccagtgatgcaattttaactgaactctctgacaatcga

SEQ ID NO: 680530 - DNA, 817 bp, Homo sapiens
ccctcccttgaactcttcgtcagcagttgttcaagcaaaggcaaatcccctatttatcacttaggtaccaaatactcaagcattgtatctatggacaatcaactgtttccccttaattcacttcccacacacatacctaatctcccaggacagacaaggctcctccctctgctccttgtattctaaggaggccaccttgcaacccccttcctcctgagagacttcctattagagcctatactgtggtataactgaaagcatttctcattaaagaagagaaaaaaaaatccataatttaatctttagcatggtgacactctggtagccaactatttcccccacaatatataacttaatatttacgtaagaatctacagatagatttaacatttcatggatgctcctgtttacaaagtcataacctgcccacacgtgactttgccctttctctgcatgtcccagcctcttctggtggcaagagcagtgatctaaaacatgagcacaaacttgtagtcatagaaatagtccagctgaagctagcaaagggtacttatccaaactttagtaaaaagaacaagaatatgtatatatacacacacacaaatatataaaatgtggtctttcattattttattagtgtggcatttaaggcatatgtgtttccttctggattttctttcccttagtaaagattcatctcacaaccatattgttatttggttttgagagacattagtttytcttccttcgtttcaggttttattctttgtatcaggaaaccagtgatgcaattttaactgaactctctgacaatcga

SEQ ID NO: 680531 - DNA, 817 bp, Homo sapiens
ccctcccttgaactcttcgtcagcagttgttcaagcaaaggcaaatcccctatttatcacttaggtaccaaatactcaagcattgtatctatggacaatcaactgtttccccttaattcacttcccacacacatacctaatctcccaggacagacaaggctcctccctctgctccttgtattctaaggaggccaccttgcaacccccttcctcctgagagacttcctattagagcctatactgtggtataactgaaagcatttctcattaaagaagagaaaaaaaaatccataatttaatctttagcatggtgacactctggtagccaactatttcccccacaatatataacttaatatttacgtaagaatctacagatagatttaacatttcatggatgctcctgtttacaaagtcataacctgcccacacgtgactttgccctttctctgcatgtcccagcctcttctggtggcaagagcagtgatctaaaacatgagcacaaacttgtagtcatagaaatagtccagctgaagctagcaaagggtacttatccaaactttagtaaaaagaacaagaatatgtatatatacacacacacaaatatataaaatgtggtctttcattattttattagtgtggcatttaaggcatatgtgtttccttctggattttctttcccttagtaaagattcatctcacaaccatattgttatttggttttgagagacattagtttctcttccttcrtttcaggttttattctttgtatcaggaaaccagtgatgcaattttaactgaactctctgacaatcga

SEQ ID NO: 680532 - DNA, 650 bp, Homo sapiens
tttaaatgtggatgttcacttgttccacatttttttaatgtggatgttcatttgttgaaagactatctttgctccaatgtatacttcttacatttaaaaactgattttgtgtttcctgatagtggagcacaacttttttcaacctcatttgctgcatactgtttgtgaaaactaattataaacctctaaatatgtataaattattaaaatataaatgtaattaactcatataaatatccctaatcatattttcattttaatatatcgtaaaactaatttaagcttctgtttactcctttgasagcgctctttataaatatactagccgagcagcgaaaatacggttccttagcatatgcatgtaaaaacaattagcatggattccttaacctatgtctaattttaactgaggtatctgccaaaacaatcaaatcagctgtcccagtcaaacatcattagcactaattaaggtagcttcagcgaagaatcctgctgcattcttgaggtgctccccattggatttacagctgatttcaaattgcacgaaaagagatacgggaacaaaacaattgagatttgaagtcagaccggcgtggattgaatcccaatttttaatcctaattaacacctctgcgtctccatttcatcat

SEQ ID NO: 680533 - DNA, 1262 bp, Homo sapiens
gtgcaataatttgctgctttttgtttgtttgtttgtttttttggtccttggactatagtattgttgagggccagggcgcatgtctgaagttactccccagtattatcacagttacctggcacattgtacatgataaatatgtttcctgaatgaataaagaataaaatataaatgtgaaactaatctggttgtgaagtaaaagaccaagtattttctaagcagaggaaatagtgtacatgtaaagactccaaacacattagagtcttatctcaatgaagaagctgtttaaaagaaaaccacagtgagtggaagagagataatgaaaagggtggaaacactgggcaaactttgaagagttttaagcagaaaaatgacataatttatttgtcccattattaggatctctctgactactgtatggaaaatgattggaattgtgttgggtggatgtaagtagaacagataggaggctgtatatggatccagcaagaaaataactggagttaaagtgggatagtgacaatggagatagagaaccaagaatattaaagggtgtttgaatgagaacatataacatttatatttaacaagtagggcagtccaatatttttattataactggctagtgctctcttttagcaaacaatgtcaattttccatttacgtgaaaackactcgatacatgcttctaagcttaggttatttagtgccaagaaaacagaaatgaggagtagtagcaataaatgagtggaaagtcaattatttgctatttaaattcttcaggtattcaattttatggaggttatgcaaccagctaagaaagcagccgattcataaaaatgcataaatgcacttcataatgttcaggatatgctcacttatatttggctgtattcatagtaaattccaaagcttaaatcaataggtacacaaattagacatactatactgaaagttttgttttataaaatatgagatgcttaattctattagccatgaaaaaatgtttagtgtgaagctcatgttaataaaagctcccaataaccagggaaagtcattaatgtttttaaagaatatagacagtttcactctatcttttgttattctattgaccattagtcaacagttgagaatcaggaattttatcatgattctaaaattaatttgtgcagcagtcatatttttagataacaactgtataataatgaaatacataggtcaagatggatgatggaatacttggaattttctatgatcttttt

SEQ ID NO: 680534 - DNA, 619 bp, Homo sapiens
ccaaagggaatattacattaaaaaaaattgttcttcatcaaaatgagtaatgaaaactaaaaataatctattgcagttcttagaaaacaaaattcaatttagattttagccttgccttttacttcacattggggtttaccttggagactttgaaatcctgtcagattttgacaggattatacacttaaggtttaactgggtccgtaatttcttgtatattttaaagcttaaaggttttcttttattttttcctgacacattgtattacaactttacaatcgatatacactcctccaattaagaaacattctttgtatttttacaaaagtgtttaaactcatgtgytatcatggtattttttattaatgctcattcttgaaaaaataaaataattcatatcaaacaattacatgctttacttttaaaatgaaatataatcaatcatacttcaacaaaagcttttctgtcagtttattctcactgaactatgtgaaaatagaccattaatagggaagaatatattatacataattactatgcatgggcacttctctattctatacttaagttactaatgtttttcaacagttatatacacaatatatattcatatatttaa

SEQ ID NO: 680535 - DNA, 763 bp, Homo sapiens
agtcctaacgctagttttaaagctaccaaggctgttattatttctgtgttgacctctgtcaccactcttcagtcccactttagggagtggcagctgggcaagccttcctatctcaccgtgccccaccaagaacctccagagaggtgagtacacaagactggagggaaacctcaattcaaaggacggagttaagctctcataactccgataagaaactgatttaataaagagagctgagaaactgtcctcaggtcgtaagaatatatcctgaccttattgagaaatagcaaggttggtagaaattgggatccctaatttccccaaggacattccagagcaacacagatttagtcaccacttgcatagttaacagctggttgtggcgctcgcttggggagtacatatgttatgctaaaattgcaacgatacagagattagcatggcccyttaattagttaaataatttttaaaaagctggttatgcatgactgagggtggacaggggtcaattccatcacttaagttattttactgaaatggcattttggaaaaaggatgatacctaaccctggcgtttagtcctcggctcgggattagaaaatgcgcggggtgtggggggggggttgcaggaagtactgcctagacagctaagacacacgtgggaaggtctccactcgtggattcctgacagtggagcgacaacctcgagaaggtataaccaacttgaggttgtgcaaaatgtctttcgaagagttacctgaac

SEQ ID NO: 680536 - DNA, 615 bp, Homo sapiens
ttgtccttcccaaatgtgaaccttcacatgttaggctatcctctgtctgaagtgcttttcaccagtttagctgtaacctcttctgaaacctctcctataataactgtcactatcctaccttcgagagctttttgtttatacagtaccatcagtataatacttatccacttatgttgttaatagtttttttgtttcctgttagtgtgtgaattctttgatgataaggacagtgtagtgctattcgttttggagttatctttgtgcaaaatgtattggcaggaaagagtcctagaggagggaaaactagagaggtgtttacagtcatctgggatgaggtctctttggagataagggctttacctagagggcatgtaggggaatgaaaagggagtataagatacatatataagaagttatgcaagaagaactgcagaattgaccatcgtttaaatagcagaacagaatgtcaaagagaggatgtcaaagatatgactttgaggattttgagcttggattagaaaraatgggagtgggaaaaactaattggatggtggggattgggagacagcaagcgagtgagcatgtgtgtatgtgtgtgtgtgtgtgtgtgtgtgt

SEQ ID NO: 680537 - DNA, 667 bp, Homo sapiens
tgactaaatatggcttggtagggataggaaaatcagcatcttacccatttcctgccagactcaaggtgaataagagaaagctaaaagattgccttgccctaggagacaaggttaagaccgagttactaggcttatggtggtcataaacctgcaaatattctgagaagtcaaagtctgtttgacatccccatatggatattcaatgggcatttcaaacttaatgctttaagaacaaacatcttaatttcccattgctccaacctccttttattcatttaacatatatttattgaagggctactatgtggcaggtactgttttagtcttggaatgtccatcaatgggcataacaaagatctctgcccttgtgttgtttataatctggcagggagaaacaggcagtagatagtaaacacagtaggtgaattgttaagtgttgtagaaaaagcaacaaggtagaaaaagggtaagaggaactgggagtgctggtgggatgggcttggggatagtgatggagagatgtaagtagcaacttcaattggggaggtcaggatgacctgactccattgtcaggttgaaattggagcagagagctggrgttgagggagttagtcaagtagtaaggttatccgggggaagagcattccagcaaagggaacaagtagag

SEQ ID NO: 680538 - DNA, 608 bp, Homo sapiens
taattttttgtattttttttttttagtaaagacggggtttcaccgtgttagccagggtggtctcgataccctgaccccgtgatctgcccacctcggcctcccaaaatgctgggattacaggcgtgagccaccacacccggcctaaatgcaattaattttttttgtgtatttgttgtgtaccctgcaaccttgttcagtttgttagttctatatttgttttgttttggtagatkacatccctcaggccctgctactctggactttcatgatggagatggtaataggaattgtattaagaaggaatgtagggatttacagtgagctgtgtttaatttacggtgtttaggccgcacccgaaacacattagaacagtctttggaggagggaggcggggtgggtggggcatcctgtatttttagagttggagattctaaaagttcagttgtgaactcttgatttcggtgccaagcggcactcaagccgaaaggccaccgacactcgcctgcggggatcagggcgggatgacctgggtaccgcggtcacgccaaggccgaggccctcacccttcccctctttgggaaagggcagacaagttccgggttcccttc

SEQ ID NO: 680539 - DNA, 1471 bp, Homo sapiens
atgtggggtggtcaccagccccatctggtgatgagacatggaacccaggactggtgctttgatcactaggccaagtactaaggtatacgggcaatgaacacccctgagagagaccccacccagggtgaggagagggaactgagaagcaacagcaaagaaaagcaccagctgggctcttgctccagaggtaaaggccaagaaaagctaagttctgaggactcaagccttggtatccatctcccatttccaattcagggcttgtattttgtttattatattattatttatagatttaggggacacgaatgtagttttgttacacatggtgaagtctgggcttttaatgtgaccatcaccaacatagtatacatcgtacccaatattggttcctattttgggttgtgtaggagagttctattgttgtatgtggtatgtgtaggggtgttgggttcatagactgagcttgaaaggaccttttgagaccatttgttccaagctattgttttacagatgaggaaactgaggcttagagcacagaagtgaccaacccaaggtttcaaagtgagttgaggacagagctgggctcacatccaggtctctgaattcccagtgtaggtctctgtgtttcgcaccagcctcccctaggtctaggggatatggtttcttgggaaagagacctcccagccccacactgctgtttccatcagtgagcgaggcatgagagacagtaagcaaaggggctgagggaggtggggaggggattgggctctgtcagtatagccaaacctttccctcttttgccctaaggagttcctccccttctctgaccagaaagagggcagacatgcatgtgtcagactggactggccctaaccctggttccccatttcagctggagaaatacttgtgtgtctaccacatggacatcagcaagatgttttccctctcaactgttttttggggggtgggcaggcgggcagggaggtctgaaggaaatgtagaaacaatcaaaatagagctaggagggccggttctggaggtggtggaagaacagactgatttgctggtttggctgtggccatcagggagtgacccacagggatgagatcaggccagggaagaggcacagccccccaataaccatcctactccactgaggttggcctctytctggatgcctgttggacaccccctctcagcagcctctgtgcaaagtgctgctgggcactggcctcacaattcctgcttttcaaggcccacatcaggttccgaatgccaagtttataaatgtctggtctcaagagagaaacggacgtggtgacaacataatcacccaagcagttcccttaggttacacctttccttaagggagtcttgggagcttcttcccacccttctcccattcccactcagcagccaaaaccagttgggtaaagtaacctagttctgagaccaccctgccgcatcacct

SEQ ID NO: 680540 - DNA, 643 bp, Homo sapiens
ttcccagagtcacatgatgagtctttggcagaccctaggcctgcaaatagaacctttgtcccctgggccagggcccctttcacctttccacgtacctgctccgctcttcaccttccaaaattccttccaactctttagccccacctaagtcagctgcactgagtttctctaaccttttctcctggtgcctgtcaaagtgattcccttgttctgggtccccatgccagcacccagacttcaggttctccagtccctacctgcagggtggggagtcactcaggccagctgtacgccattagaaatcctgtttcgtcatcccacccctcagcgggccggtttccacgggtcttccaggataggaggtcccacagtgcaagacagggctgtggacctctggcccctcrtagttacagagtggcagggaaacatacacacaggtattttcagaaatcccaaggctctccatagctcagggcagacattgcagaagggactccttggggccatgtgtgatcttagtcttctcccttcctgtctgccccaaccctgcagagctgaccaaccgagctttggagaacacgtggctgcctgttagcttaattagcttccttcactgggaacctcagcaataagaaggccttga

SEQ ID NO: 680541 - DNA, 1967 bp, Homo sapiens
tgcatcttgttgcacggtttccatcaatgtctgtcttttatggttgctctcttctgcacactttcattttgagtacccatttcgaagtgtcttgcacagatccacacatacacgatactctggaggtaatctatttagtattggtactctcctctatttccataatcaagttatttcaggcttcaaagcaattcttcttcatgatatcaggcttgtgcattatagactgactgtccgtagattttcccttccattcaatttcattttggaacccacaaggctgcaatgtaaagaaatcaggttagacagaaggaaaaaatgtttcagagaggaaagatttttcatacctggaatgggtgtttagttagtgatgttctttcttcatctggttgttacaaagaaaatgtatctgtctccatgccctagtgttggggatggccatggggacatgtggctggatcagatgacttgtggacctttcctccactcataagaaagactaagatagcatcaaactatcatcatttacagcatgatattccaacaaagtaaaaaaagagtaaaattaatcaccttgcaagaaaaaagaaaaagctccccaaatgaacaaaacatatcaagaatctggagaaggaggaacgtgtgctcccgggttgractgccgtgactgcaacactcgcgttttctttacattgttcttccttctaggagacgtggtgcaccgcccacaagacaccagctcatttatcttcttgtggttgtattttattatgggaaggacatttcaagggatatttacaagtaagagaatacatagcttcaaatcactccttcctccccacctgctaagctaggttttacaacattatccctttcaatccgagactgataacacgaaaatgaaaccatggatataaaatacctttctttgtgttttaccccaattttccctctgtaaaatttttctgctctcttttcttagtggactcaatcccataattggttgccttgggctatgttttacagcacctaccttagtctaaaacagattcacaatatcctctggctgcagaatacagagtgcggtagcttcccctgttagacatgagccccagtggggtgggagtttggaatgggggatggtatggggaagcgttctgctgcaattcagataagctcattctgctcatatcatgtggcagatgtggccaggaagtccaagtgatgtctcccacatagccctgctccttccaggaagtgagctgccccaggcctgctgatgaaggttccccacacctgcttggagccatgccttaagttttgccactagagatttttttcctttttaagatttaataatggaatgttaaaaatatgtaaaaatgtaatgaaataatacaatagacactaaaatcaaacattttatgatattcacttcaaacctcctctccaaagaactctaagagttctgcagaatctctgccttccatgtctttccctccgtccccagacataccactaccgtgaaaggtttctatcattcctaagcatgtctttatgcatttgctgtatttatggtatcatgctgtacatatcagtttgcaacttgcttttctaaactcggtgtgttttggtaattgagatgtatcactattgatacaggctgatctcattcatttatttcatctgctctatagtatttcatttactaaaccatattcaccatttgttgttgttgattagatataaagactattggtttgtgtactgctctcatatccaataacctcgatgaatatttattatttataattgttggtctacagattatttttatctctatactggcagttatctcatctgtaataatgagaaacttgttcttcccttccaaaccttcttccttccttccttccttcttttctctttctttctttcttcctttctttccttcctttctttcttcc

SEQ ID NO: 680542 - DNA, 627 bp, Homo sapiens
taaaatgacaagtagtcaattaaaagacaaaagtcaatcaattcgcacctgctacctgaaagaaagtggtgatttaaaacatctggaacttttttgaaaaaagtcaatcaatttaaaggaactaaaaattatagtaaatttggctattgttccgtggtttgattgaaaagaccgaactctctaattttggagtgccagatgccacacacttacattgggcaaaggttgctaaccatgttgttcaaatcttctctatgttattattttttgccwtcttgatctattagtttttagaaaggtatgcttaaatgtatttgccaactcctccttataatgctggcaatagttgcattatatagttttagttttaattgttaggtatagttcagcccagaattattatatattattcatgaattactcctttagtaattaaagaatgactttatctccaaaactgtcttcctctcagatcttttctggctagtattcatatggccatccaggatttctcttagttcgtgtttgctcggggtgcattttccaccccttcattttcagccttgctctgttgtcgttactcttctttccatcacattaggctgttctttttctcgttcattctcc

SEQ ID NO: 680543 - DNA, 627 bp, Homo sapiens
taaaatgacaagtagtcaattaaaagacaaaagtcaatcaattcgcacctgctacctgaaagaaagtggtgatttaaaacatctggaacttttttgaaaaaagtcaatcaatttaaaggaactaaaaattatagtaaatttggctattgttccgtggtttgattgaaaagaccgaactctctaattttggagtgccagatgccacacacttacattgggcaaaggttgctaaccatgttgttcaaatcttctctatgttattattttttgccttcttgatctattagtttttagaaaggtatgcttaaatgtatttgccaactcctccttataatgctggcaatagttgcattatatagttttagttttaattgttaggtatagttcagcccagaattattatatattattcatgaattactcctttagtaattaaagaatgactttatctccaaaactgtcttcctctcagatcttttctggctagtattcatatggccatccaggatttctcttagttcgtrtttgctcggggtgcattttccaccccttcattttcagccttgctctgttgtcgttactcttctttccatcacattaggctgttctttttctcgttcattctcc

SEQ ID NO: 680544 - DNA, 620 bp, Homo sapiens
ctttgaggcctcagctcccctacatctacttggaatccccgagcagccacctttacttctgcacccaatacctccggcggagtggggcagaagggcaggtgattgccccttaactggtcatccagccacatctggacggctggccgcacctctgtcaaaggggaagagaatccggcagccccttaggaaggcagtgctgactcctagccctgagtaggttcacaccgcaggctgggttggtccttccctgtgagctcttccaacaggcatggcttaccccagggcagcactgagcgtctagggagaaatattaaatacaagtggtgatgtctccctctagtggagagtagtcagaatgcgaatgtggctctgaatcttcaaggaaggcaggaagggctctgctggaagctacagggctgaygtgtgcggctcaaagattctcatgcctcatgacctgagggccatgtgtgtggccctcaggtcacacacacagcttctagaggaagctgtgtgtgtgtttgtttgtttgtttcatcatgtccagcacgtggaggccttggccataaagacaatcactcttcatcccataaagacaatcaatcactcttcatctctgactg

SEQ ID NO: 680545 - DNA, 666 bp, Homo sapiens
gtctctggactgaagaggctgagttctgaggttgccagatttagcaaaaacaaacaaaaaaggacaccaggtacatttaaattttacatttaaatcttttagtacaagtatgtcccaaacattgcacaaattactcctagtttatctaaaattcacatgtaacaggcatcctctgttttttctaggaaccgtgtgcctaatgtccaacacctccacaacaatgcacgtaacgtgactgcggagcatccagaaagagaaaagcttaacaacctgcagagggacagaagttcaygtacaaagcaatcagaaaagcgttgacttcttgcagcaagggtggaagttaggaaacagcaaagcaatgctttcaaaattctaagaaaccatgatacccattctggaatttaacatccatccagtaattaataaagtttgagaactgcataaaggcatttttaggcatgaaagctcaaaactgtactttccatttaccctttcttaccctactgaagggtttgtcccatccagagaagaaataaaccaagaaagaagcaacatatagcccaggaaaacgaagacccaatgtagaagggaaggaaaaagattcccaggacaccagctgtacagggcagagagaaagcaggcaagacagtgggggagggaagcttc

SEQ ID NO: 680546 - DNA, 666 bp, Homo sapiens
gtctctggactgaagaggctgagttctgaggttgccagatttagcaaaaacaaacaaaaaaggacaccaggtacatttaaattttacatttaaatcttttagtacaagtatgtcccaaacattgcacaaattactcctagtttatctaaaattcacatgtaacaggcatcctctgttttttctaggaaccgtgtgcctaatgtccaacacctccacaacaatgcacgtaacgtgactgcggagcatccagaaagagaaaagcttaacaacctgcagagggacagaagttcacgtacaaagcaatcagaaaagcgttgacttcttgcagcaarggtggaagttaggaaacagcaaagcaatgctttcaaaattctaagaaaccatgatacccattctggaatttaacatccatccagtaattaataaagtttgagaactgcataaaggcatttttaggcatgaaagctcaaaactgtactttccatttaccctttcttaccctactgaagggtttgtcccatccagagaagaaataaaccaagaaagaagcaacatatagcccaggaaaacgaagacccaatgtagaagggaaggaaaaagattcccaggacaccagctgtacagggcagagagaaagcaggcaagacagtgggggagggaagcttc

SEQ ID NO: 680547 - DNA, 619 bp, Homo sapiens
gaagcctccccagaagcagatgcctccatgcttcctgtacaacccacagaaccgtgagccaattaaacctcttttcttataaattatccactctcaggtatttccttatagcaacgtgagaatggcctaacrtaactattgtttcgcttttcaaactgtgtgcatatattactttaataaaaagtaaagaatttttggccaggcgcagtggctcacgcctgtagtcccagcactttgggaggccgaggcaggcagatcacaaggtcaggagattgagaccatcctggctaacacggtgaaaccctgtctctactaaaaatacaaaaaattagccgggcgtggtggcgggtgcctgtagtcccagctacacgggaggctgaggcaggagaatggtgtgaacccgggaggcggagcttgcagtgagccgagatcgcgccactgcactccagcctgggcgacagagtgagactccgtctcaaaaaaaaaaaaagtaaagaatttttaaaaacatgatcactgttttgccctccacccaaatcatatttcattccaatgacaaaatgaagtgactattgaattatctactattttgtattattaatgcctagaagtcatcctc

SEQ ID NO: 680548 - DNA, 619 bp, Homo sapiens
gaagcctccccagaagcagatgcctccatgcttcctgtacaacccacagaaccgtgagccaattaaacctcttttcttataaattatccactctcaggtatttccttatagcaacgtgagaatggcctaacgtaactattgtttcgcttttcaaactgtgtgcatatattactttaataaaaagtaaagaatttttggccaggcgcagtggctcacgcctgtagtcccagcactttgggaggccgaggcaggcagatcacaaggtcaggagatygagaccatcctggctaacacggtgaaaccctgtctctactaaaaatacaaaaaattagccgggcgtggtggcgggtgcctgtagtcccagctacacgggaggctgaggcaggagaatggtgtgaacccgggaggcggagcttgcagtgagccgagatcgcgccactgcactccagcctgggcgacagagtgagactccgtctcaaaaaaaaaaaaagtaaagaatttttaaaaacatgatcactgttttgccctccacccaaatcatatttcattccaatgacaaaatgaagtgactattgaattatctactattttgtattattaatgcctagaagtcatcctc

SEQ ID NO: 680549 - DNA, 1485 bp, Homo sapiens
ccccagggtgccaccctccccgagattccagaagagcaaaggggccggggatgaccccatcgccttctaagcccaacgggaaaggctcagcggctggcaaaggaaggaaccaatagtgtgtgtggagggagggtggggactccacagggaaaatgctaaagaggggctgcctctgtggctgtggtcaggagccactgtcctacagagagggcactggcctgggagctgacacttcagaagaggaaaggactccccaggtgaggaaatcacttggaaggtgaccttgaaggcgggggaggggaaggctacccgaaatgggagaaagcagtgcaggctgtcagtgccccagcaacagtaactgtccagtctcctctctctgcggtggcacttgcttgttttctgagaattcctttgactgaaaagatagtcttttattcaacagttggaaatgcaagcataaactcctctgagcaaggcaaatccaggactttaactctcaccaagaagtatttgcctggactagcaggtgctctccagaaagctggtttggggatgacgggagaatagagggacacagaaacagctaggatcttggatggcaacttttaccctttgatgactccacagcttgagggcgggggcaggaagcaagtgtggagtagctttctggggaaggcggtgctcaccccagcctttgtctgcagagccccacccagcagaggggcagtggcgggcagtggacgtggtcctagactgyttcctggtgaaggacggtgcgcaccgtggagctctcgccagcagtgaggacagggcaagggcctcccttgtgctgaagcaggtgccagtgctggacgatggctccctggaggacttcaccgatttccaagggggcacactggcccaagatgacccacctattatctttgaggcctcaggtaaaagccttccacctgtgtccttggtcctcccgggctccctccaccaggacagcccaggtcccgattacagccacacatactgcctcccgttggccctggtgttctcacgctaatttgccctctgtgtgtgccctgcttctccccagtggacctggtccagattccccaggccgaggccttgctccatgctgactgcagtgggaaggaggtgacctgtgagatctcccgctactttctccagatgacagagaccactgttaagacagcagcttggttcatggccaacgtgcaggtctctggagggggacctagcatctccttggtgatgaagactcccagggtcgccaagaatgaggtgctctggcacccaacgctgaacttgccactgagcccccaggggactgtgcgaactgcaggtaagaaaatgaaaagcaaggccaggtgtggtggctcacgcctgtaatcccagaattttgggataccgaggtcggtggatcacctgaggtcaggagtttgagatcagcctggtcaacacggtgaaaccccg

SEQ ID NO: 680550 - DNA, 1485 bp, Homo sapiens
ccccagggtgccaccctccccgagattccagaagagcaaaggggccggggatgaccccatcgccttctaagcccaacgggaaaggctcagcggctggcaaaggaaggaaccaatagtgtgtgtggagggagggtggggactccacagggaaaatgctaaagaggggctgcctctgtggctgtggtcaggagccactgtcctacagagagggcactggcctgggagctgacacttcagaagaggaaaggactccccaggtgaggaaatcacttggaaggtgaccttgaaggcgggggaggggaaggctacccgaaatgggagaaagcagtgcaggctgtcagtgccccagcaacagtaactgtccagtctcctctctctgcggtggcacttgcttgttttctgagaattcctttgactgaaaagatagtcttttattcaacagttggaaatgcaagcataaactcctctgagcaaggcaaatccaggactttaactctcaccaagaagtatttgcctggactagcaggtgctctccagaaagctggtttggggatgacgggagaatagagggacacagaaacagctaggatcttggatggcaacttttaccctttgatgactccacagcttgagggcgggggcaggaagcaagtgtggagtagctttctggggaaggcggtgctcaccccagcctttgtctgcagagccccacccagcagaggggcagtggcgggcagtggacgtggtcctagactgtttcctggygaaggacggtgcgcaccgtggagctctcgccagcagtgaggacagggcaagggcctcccttgtgctgaagcaggtgccagtgctggacgatggctccctggaggacttcaccgatttccaagggggcacactggcccaagatgacccacctattatctttgaggcctcaggtaaaagccttccacctgtgtccttggtcctcccgggctccctccaccaggacagcccaggtcccgattacagccacacatactgcctcccgttggccctggtgttctcacgctaatttgccctctgtgtgtgccctgcttctccccagtggacctggtccagattccccaggccgaggccttgctccatgctgactgcagtgggaaggaggtgacctgtgagatctcccgctactttctccagatgacagagaccactgttaagacagcagcttggttcatggccaacgtgcaggtctctggagggggacctagcatctccttggtgatgaagactcccagggtcgccaagaatgaggtgctctggcacccaacgctgaacttgccactgagcccccaggggactgtgcgaactgcaggtaagaaaatgaaaagcaaggccaggtgtggtggctcacgcctgtaatcccagaattttgggataccgaggtcggtggatcacctgaggtcaggagtttgagatcagcctggtcaacacggtgaaaccccg

SEQ ID NO: 680551 - DNA, 1485 bp, Homo sapiens
ccccagggtgccaccctccccgagattccagaagagcaaaggggccggggatgaccccatcgccttctaagcccaacgggaaaggctcagcggctggcaaaggaaggaaccaatagtgtgtgtggagggagggtggggactccacagggaaaatgctaaagaggggctgcctctgtggctgtggtcaggagccactgtcctacagagagggcactggcctgggagctgacacttcagaagaggaaaggactccccaggtgaggaaatcacttggaaggtgaccttgaaggcgggggaggggaaggctacccgaaatgggagaaagcagtgcaggctgtcagtgccccagcaacagtaactgtccagtctcctctctctgcggtggcacttgcttgttttctgagaattcctttgactgaaaagatagtcttttattcaacagttggaaatgcaagcataaactcctctgagcaaggcaaatccaggactttaactctcaccaagaagtatttgcctggactagcaggtgctctccagaaagctggtttggggatgacgggagaatagagggacacagaaacagctaggatcttggatggcaacttttaccctttgatgactccacagcttgagggcgggggcaggaagcaagtgtggagtagctttctggggaaggcggtgctcaccccagcctttgtctgcagagccccacccagcagaggggcagtggcgggcagtggacgtggtcctagactgtttcctggtgaaggacggtgcgcaccgtggagctctcgccagcagtgaggacagggcaagggcctcccttgtgctgaagcaggtgccagtgctggacgatggctccctggaggacttcaccgatttccaagggggcacactggcccaagatgacccacctattatctttgaggcctcaggtaaaagccttccacctgtgtccttggtcctcccgggctccctccaccaggacagcccaggtcccgattacagcyacacatactgcctcccgttggccctggtgttctcacgctaatttgccctctgtgtgtgccctgcttctccccagtggacctggtccagattccccaggccgaggccttgctccatgctgactgcagtgggaaggaggtgacctgtgagatctcccgctactttctccagatgacagagaccactgttaagacagcagcttggttcatggccaacgtgcaggtctctggagggggacctagcatctccttggtgatgaagactcccagggtcgccaagaatgaggtgctctggcacccaacgctgaacttgccactgagcccccaggggactgtgcgaactgcaggtaagaaaatgaaaagcaaggccaggtgtggtggctcacgcctgtaatcccagaattttgggataccgaggtcggtggatcacctgaggtcaggagtttgagatcagcctggtcaacacggtgaaaccccg

SEQ ID NO: 680552 - DNA, 1485 bp, Homo sapiens
ccccagggtgccaccctccccgagattccagaagagcaaaggggccggggatgaccccatcgccttctaagcccaacgggaaaggctcagcggctggcaaaggaaggaaccaatagtgtgtgtggagggagggtggggactccacagggaaaatgctaaagaggggctgcctctgtggctgtggtcaggagccactgtcctacagagagggcactggcctgggagctgacacttcagaagaggaaaggactccccaggtgaggaaatcacttggaaggtgaccttgaaggcgggggaggggaaggctacccgaaatgggagaaagcagtgcaggctgtcagtgccccagcaacagtaactgtccagtctcctctctctgcggtggcacttgcttgttttctgagaattcctttgactgaaaagatagtcttttattcaacagttggaaatgcaagcataaactcctctgagcaaggcaaatccaggactttaactctcaccaagaagtatttgcctggactagcaggtgctctccagaaagctggtttggggatgacgggagaatagagggacacagaaacagctaggatcttggatggcaacttttaccctttgatgactccacagcttgagggcgggggcaggaagcaagtgtggagtagctttctggggaaggcggtgctcaccccagcctttgtctgcagagccccacccagcagaggggcagtggcgggcagtggacgtggtcctagactgtttcctggtgaaggacggtgcgcaccgtggagctctcgccagcagtgaggacagggcaagggcctcccttgtgctgaagcaggtgccagtgctggacgatggctccctggaggacttcaccgatttccaagggggcacactggcccaagatgacccacctattatctttgaggcctcaggtaaaagccttccacctgtgtccttggtcctcccgggctccctccaccaggacagcccaggtcccgattacagccacacatactgcctcccgttggccctggtgttctcacgctaatttgccctctgtgtgtgccctgcttctccccagtggacctggtccagattccccaggccgaggccttgctccatgctgactgcagtgggaaggaggtgacctgtgagatctcccgctactttctccagatgacagagaccactgttaagacagcagcttggttcatggccaacgtgcaggtctctggagggggacctagcatctccttggtgatgaagactcccagggtcgccaagaatgaggygctctggcacccaacgctgaacttgccactgagcccccaggggactgtgcgaactgcaggtaagaaaatgaaaagcaaggccaggtgtggtggctcacgcctgtaatcccagaattttgggataccgaggtcggtggatcacctgaggtcaggagtttgagatcagcctggtcaacacggtgaaaccccg

SEQ ID NO: 680553 - DNA, 1485 bp, Homo sapiens
ccccagggtgccaccctccccgagattccagaagagcaaaggggccggggatgaccccatcgccttctaagcccaacgggaaaggctcagcggctggcaaaggaaggaaccaatagtgtgtgtggagggagggtggggactccacagggaaaatgctaaagaggggctgcctctgtggctgtggtcaggagccactgtcctacagagagggcactggcctgggagctgacacttcagaagaggaaaggactccccaggtgaggaaatcacttggaaggtgaccttgaaggcgggggaggggaaggctacccgaaatgggagaaagcagtgcaggctgtcagtgccccagcaacagtaactgtccagtctcctctctctgcggtggcacttgcttgttttctgagaattcctttgactgaaaagatagtcttttattcaacagttggaaatgcaagcataaactcctctgagcaaggcaaatccaggactttaactctcaccaagaagtatttgcctggactagcaggtgctctccagaaagctggtttggggatgacgggagaatagagggacacagaaacagctaggatcttggatggcaacttttaccctttgatgactccacagcttgagggcgggggcaggaagcaagtgtggagtagctttctggggaaggcggtgctcaccccagcctttgtctgcagagccccacccagcagaggggcagtggcgggcagtggacgtggtcctagactgtttcctggtgaaggacggtgcgcaccgtggagctctcgccagcagtgaggacagggcaagggcctcccttgtgctgaagcaggtgccagtgctggacgatggctccctggaggacttcaccgatttccaagggggcacactggcccaagatgacccacctattatctttgaggcctcaggtaaaagccttccacctgtgtccttggtcctcccgggctccctccaccaggacagcccaggtcccgattacagccacacatactgcctcccgttggccctggtgttctcacgctaatttgccctctgtgtgtgccctgcttctccccagtggacctggtccagattccccaggccgaggccttgctccatgctgactgcagtgggaaggaggtgacctgtgagatctcccgctactttctccagatgacagagaccactgttaagacagcagcttggttcatggccaacgtgcaggtctctggagggggacctagcatctccttggtgatgaagactcccagggtcgccaagaatgaggtgctctggcacccracgctgaacttgccactgagcccccaggggactgtgcgaactgcaggtaagaaaatgaaaagcaaggccaggtgtggtggctcacgcctgtaatcccagaattttgggataccgaggtcggtggatcacctgaggtcaggagtttgagatcagcctggtcaacacggtgaaaccccg

SEQ ID NO: 680554 - DNA, 1023 bp, Homo sapiens
ccctacttattcattaaatacacatataaatgaatatttaataaaacaaaatagctcagtacatttcagtttttaaaaaattaaaaatttcttcattcactgtgtttattatgtctttcctgtttccatatattttcccttcagttttcagaattttcccaaataaggtgaacttatgtcttaaaggagcccaagttatttttatttgcaaataaagatcctaaattgagcaagcatggtataatgttaagcatttagtttaacatggacattactaaaaatccacaactggcaccattattatctttgtgggtaaaacctgggtacttctgattggggaaataatagattagattatttctaaagtttctccagataggcagatttataaagaaacataaagtgtttttggtagtgatattttctccagaaatctctgacccagtgagtcccttccaagacttttgctgtgatttgggggatgggtttagtgtttgcacattaacctactttggtcttgattgctggtcatcttggtctttgcctgtctccctttgtatgatgctgtgattcaagtttaataactattctctttaactcattttctatgtagcatgtattgagacaatcctagacacacaaagagttaccatctccttcccttcccctcastgatttgatactttaaattgctcatccttcacctcatacccatcaaaatggctactaaccaaaaaaaaaaaaaaaaaagcaaaacagataaacaaaaccaaaacataaaacagaaaatcaaaactgttgtcaaggatgtggggaaaatggaaccattgtgcacttttgatgagaatttcaaatggtgcggttactataatgattcctaaaaaaattaacaatagaattatatatgacctagcaataccatttgtgtatatattttaaccaattgaaagcagagtcacaaagagatatttgtaaacccatattcatagcagcatttttttcaatagcaaagaagtggaagca

SEQ ID NO: 680555 - DNA, 591 bp, Homo sapiens
cttctggagattggttgcacaatgatgtgaatgtatttagcactactgacctatacacttaaaaatggttaagatagttaccacaggctgaggagggtagggaggaaaggggaacggggatgggtttgtcatagggacaaagtcacagttggacagcaagaaagggttttgttgctcaatcacacagtagggtgactacagcaaatagtactgtattatatatttcaagatagctagatgaggagattttgaacgtcataaccacaaagaaatgacaaatgtttaaaatgagggacatggtaattaccgtgatttgatcrttatgctatttatacatgtcatgaaacatcacattgtacaccataattatgtacaattatgggtcaattacaagtaaaaacattagcaaaacaaaagaaacgtgcacagaaaaaaaaaaaaagctttatatgatgtgtattttaccacaagttagaaagtaaataaaactttaaagtgtacctcgtgatcagccacaaaagtccctggagcattttatgttctccagaatgtctgaacatcaaagtcagaaacggaggggttaggggtggg

SEQ ID NO: 680556 - DNA, 2336 bp, Homo sapiens
gtggattaattttttatttgtaaagtattcacataaattattacaaagatgatatgtctttgaacagagaggtcctgggaagatttgaaattaactagaaacattcttacaaatcttccgtgcagaagccattttcaaaaagtaaattttctttagtagaatcttcaatgcatcatttaatttttttattatcctgaagaagaaaaggcccttaaatattatygtctaaacaaacgtatagatcactgtttgaagtaaataataaagtgaatactttcaaatgtgattaaatagcccaagtcactgaaaatttgaaattatagttaacttttttgtctgtgatcttatgtatgtatagaaaaatttaaatatataattatatactgattacaaattccataataaatgtccttttattttactcattatttgaattattccatttactctgttttcatagtcataattttatgatattttgttgttaatggattatatttgaaaactatcaaattagatagaacacattgtatggttgaagaaattgatttggtacttgaaagaaagacttcttactgcctagaggtagttggaaaaatttttccttttgttgtatttatgaaagcccatggcctatggcctttaattttcttaatcaacccaaccacatcaggatagaggtagaatttctgtgaaagaagagacagtaagagttcctaaagttttatctggcatacagataggcctatattcaaaacatcttagtcatgtggctacagattcaaagtggaatcactaagtaatttgcactacatttctaatatgggtttaggtaagtatccaaacaagacaaatgctgcgtaaggaaagaagctggcaagctgaaggttaaacaaaaataaaagtactttacatgtaaaaaatgcattggaattttgagattgcattaaatctgtagatcactgttgtaagcactgacaaacacccatgatatggattgaatctataatattattaaaagacccatatatttttaaggtttaaaatcctaaaatgtaaattgtctcatataactggaaaatccaggggtaagatagccttcaggcaaagttagtttggggagatcgtcagatctgccttctgtctgggagcttcatatttataaagtttctaaagcttgttagtaaagacagcttcagggacttccagctttatctctacagcttattatgccaaaggaaaagagcatattaaaataattttaatttcaacaaatccctatggtattggttacagaccaacattatcaaccttgaggagatgttaaaaatataacagacctattgggaaacaatgtgtgtatctgtagcgcaaacccatcacttggacactacagtgagctttctgtatcctatttattctcctctttctgggttcacaggaaattgcatttccaagtctttcttgcactgaagtgagagtatatgataatacttttgcatatttttcataaaagactgtttaataacaaaatgtaatagttctcctttttcattcatgtggattggtgaaagtagatgactgtaatatagtgtaccagctttttgtaaaaaacatgcagcccaaattaaaaggttgtgcctagacaaaaaacactcaattacatcagactggcaggagcaaggaaaaaaaaagttttattttgtcaagccaccaaattttacaattgttactgcagcacaacctccaagctgtctgataccgaatgaatggttacctagagatggctaatgatggatagatgtggcaatgttgctgcatttaacacaaaatgggtgttcaggcaaaatgtacttgatttagtactttatgttttcataatacagcctaaaaatgatgaaagtgtgaagcagtcacatatcttgtaagacataagatgatttttactatcttcagaattacgaaatcaaggtcagttcaaatgagaggaaaacaaaataaatgattccccaacctcaaagacccacgatgaaataataaatcttcagagcttatctcctggtggtgacatatgccacaaagcaatggggcacaatcagtcaatgtgctcattttatcagagtcaataaatgtttccttttcttttttaaaattttattacattgatgtgcataaaaacacatggacacacatgaggcacacataaaaaatctctatcacttgatattttcttttgttctcaattttttagtttctattatgattttatatctcctttataacaatattaaaaaattgcagaaaaccttctgatttttataatattttaaatttca

SEQ ID NO: 680557 - DNA, 1018 bp, Homo sapiens
tgaaaacagccaatgggaaggataatggcagttaaatcgggtggtgtaaactttgaaaacaactaaagtcaagaatggctttggtaatggcaaaaccactctgagatgtaggtttcctactctgacgggtaccttggttaaaattcaggacaatggtcagaacttgtatgatcattgctttcataagtctttttttttttttgagacagagtctcactctgtcgcccaggctgaagtgcaatggtgcaatcytggctcgctgcagcctccgcctcctgggttcaagcaattctgcagccgcagcctcagcctcccaagtagctgggattacaagtgcatgccaccacaactggctaatttttgtatttttactagagatggggtttcaccatgttagccaaggctggtctcaaactcctgacctcaagtggtctgcctgcctcagcctcccaaagtgctgggttacaggcatgagacatgccttcataaatccttaatgacttaaggaatcttgcatatcagttgatcaaattacccatttatttacgcaagcattctgtgacatccctattagtttttttgtctgtgttttcctgtctccagagaatagggcacacgacttcccaagaaaacatgtgtctctctagtcagctccaggaatgacttttcacttatttttgcttaaatcggtcgtcttgtttcttgaccctataaggccacacaggacacatctaatccatcttctacattaagtctttcccttcccccaaagatcttcttttctctgggataattatcactggataccatcatttttcattatgtgacttgaattccagtcctattctcaggatagttgctctacttgcaagactttccaattattcaatattcctttaaaaggggcatgatcagagcctaactcacgatcaaattatctgttagccagtacaggatagggaatagccatcctcttcttttgagtatagtccatattttccaggtcatgtctgcctga

SEQ ID NO: 680558 - DNA, 660 bp, Homo sapiens
aggcagaagcaggacgatcccttgggcccagaaactcaaggctgcagggaaccgagatcatgccactgcttccaccctgggtaacagagcaagaccccgtctccaaaaaaaaaaaaaaaaaaaagcaatacaggggtacttaatatttattcatatatttacctgagaatcatcagttttactaaggctgtatgatgttagcagatattggttctatcagtctctccgcagacatttgctgtaaataaagcagagaggctttcagagtgcaccctgttttkgttcctccatcctgttgtctggatccccttctaaaacgtaagttccaggatggcaggaactttgtctatttggttcacactcgacacagttagtgctcaaaaatgtctaacgacacaggcctgcttctcggtttgcactgctcctccatggtagtctgtgcagtgggagaaggcagcccgggcccagggtccacggagaagacgcaaatcgacagcgcgggagcgcggaccttctggaggcgcgcggcgcttaccgctgtccgtcctcgaagccccgccccggggctccgcctccgccggcgcgtgttcctttagggaccgcgcgcgccgcggcctcgctctggggccggtacttgcgcgcccgcaccccgcgctcccc

SEQ ID NO: 680559 - DNA, 629 bp, Homo sapiens
atatctaatatacatatatattagaggggaacaacacacagtggggtctaccagagggtggaaggtaggaggatggaaaggatcaagaaaaaataactatgggtactaggcttaatatctgagtgatgaaataatctgcacaacaaaccaccatgacacacgtttacctgtgtaacaatcctgcacatgtacccttgaacttaaaaaattttaaacaatgagatatctaaatgaatgaatgaatagataaataaataaaagctattgtgttgaagaaaaagaaattattaggttcccaaaactgcatttccagcctccctcccaaaatttctgatttgatatgtcttgggcagagtctgatattctgcaagttttacaagttccctagtgataygaaaatggctggttcttggaccacattttgagacccatcaacatggaataatcaagattgatctccttgacattgtggagaagctcgactcccttgaaggacaaggaagccatgtagtgagtgaggtctttaggtttctgttagccagataattatcttttgtttagttagctaagaataactgatacagctgacaacttatggcaataacattatatttcacgtggttgataag

SEQ ID NO: 680560 - DNA, 2205 bp, Homo sapiens
aggtttaatagacttacagttacacatggctggggaggcctcacaatcatggcagaacgcaaatgaggggcaaagtcacgtcttacatggcagcaggcaacagagcttgtgcaggggaacccccatttataaaaccatcagatcctgtgagccttattcactcccacgagaacagtatgggggaaaaccccccacaacacacacacaccatggttcaattatctctacctggccctgcccttggcacatggggattattacaattcaaggtgagatttgagtagggacacagccaaactgtatcgtgtctctcccctgaatctttctgctgtggctgccttctttctgctctcccctgattggctttatcggtaaggtggattccatgtgacctggctactgcagcttcgtagattgatattttacagcttcagctaccagaaggcctggctgtctttctcagtgccagtcccacatttctcaggaagagaccaggagcctgcctttgaccaatcaaatgtggccaggaaggcagcagggttttgttatataaaatggttgtttctatgatagtcacacggtggtgggggctagggggtggcaggatgggaaactggactgggcagacacatctactgtccaggtcccagatcttgggcctctctgctgggtgagggaccatgcttggcttttggctctcttgatggagactggtgggatatcttccttgctctggagtaagatggaagtgaaacaacgaggatgtatgtaggaacgtcactcatttgtctaggacgttgtgagtgatttctttgctgaattggataatggcttttgaagcatggaagtctttcctcaatcttttgtgtgtgccattcacaatgtaatggctatagaaatgacatgcttttaatattaacctgcatttttaacattttctccatcactttttaaagtctggaagtccagaggacagtaagtcaagccctggtctgtagcatctgccaatttccatggtgtaaacactctcaccgtggtcaatttcaagggaccactgggacgtcactgaacagggatctgggaaggagtkcacagcagcacagctttctgcactatttccaccccgcagatattccacaggtgaataaccccaagtgtgcagataacagtagaaagttgtaaaataatttggagtgatacattttgagctttcattacctgtgtttccaatacaatttatttaattatacatttatgtaatttaactttgaagaatggctttgtttcataactggtttgcaaaattcttgaaaatttgacagctggagattgcgagctggcactgaccagctctggcaccccctggggtttccccagagcttggcatgagacctgccacagaggagacactgaatgcatgcctgcctgatgaacgcgtattgtccacctggtctctaactctctgagggcctggccaagtcactcacctcctctttctgtccctctaatgtaagaggctattaatgcttacttcatagaggtgctgtgagagttaattaaggtttgctaaatgctttgaaatccgtggatgaaaggcccagttggggagaactttatgattattctcatgcatcatcttaagaagtgtatggtgatgatacccacctggtacttttcatcttcaaagtgttctccagacattagccaattaaacgtcacagttccctgcccagtcagtgggtgtcctccagggagggaaccacgcagcaagtgggtgactccttcccctcttggccaccagggagtggtggtcagagccaggattccagctcctccagctgcaatcttccgctgggctctgttttgaccctcccagccctccatcttttctgcttctaggtatggtgaggactgcttaggctccgggactctgaaatcacgttgcttcttatatagtgtgtgtgatgctactcactgaatgttttcagtggtgagatgcattttttccctacaattgaacatctctgaaatcagtatgcatcttataactgatgaagggttatagttcaattaaaagtgtttttcttcttactagtaaataatataatagtgcatcatacaattgttgtcgtatgtcaacaattgttgaaatatattaccacgatttctatttgtagtttattgtagatttgtagtttttttcct

SEQ ID NO: 680561 - DNA, 2205 bp, Homo sapiens
aggtttaatagacttacagttacacatggctggggaggcctcacaatcatggcagaacgcaaatgaggggcaaagtcacgtcttacatggcagcaggcaacagagcttgtgcaggggaacccccatttataaaaccatcagatcctgtgagccttattcactcccacgagaacagtatgggggaaaaccccccacaacacacacacaccatggttcaattatctctacctggccctgcccttggcacatggggattattacaattcaaggtgagatttgagtagggacacagccaaactgtatcgtgtctctcccctgaatctttctgctgtggctgccttctttctgctctcccctgattggctttatcggtaaggtggattccatgtgacctggctactgcagcttcgtagattgatattttacagcttcagctaccagaaggcctggctgtctttctcagtgccagtcccacatttctcaggaagagaccaggagcctgcctttgaccaatcaaatgtggccaggaaggcagcagggttttgttatataaaatggttgtttctatgatagtcacacggtggtgggggctagggggtggcaggatgggaaactggactgggcagacacatctactgtccaggtcccagatcttgggcctctctgctgggtgagggaccatgcttggcttttggctctcttgatggagactggtgggatatcttccttgctctggagtaagatggaagtgaaacaacgaggatgtatgtaggaacgtcactcatttgtctaggacgttgtgagtgatttctttgctgaattggataatggcttttgaagcatggaagtctttcctcaatcttttgtgtgtgccattcacaatgtaatggctatagaaatgacatgcttttaatattaacctgcatttttaacattttctccatcactttttaaagtctggaagtccagaggacagtaagtcaagccctggtctgtagcatctgccaatttccatggtgtaaacactctcaccgtggtcaatttcaagggaccactgggacgtcactgaacagggatctgggaaggagtgcacagcagcacagctttctgcactatttccaccccgcagatattccacaggtgaataaccccaagtgtgcagataacagtagaaagttgtaaaataatttggagtgatacattttgagctttcattacctgtgtttccaatacaatttatttaattatacatttatgtaatttaactttgaagaatggctttgtttcataactggtttgcaaaattcttgaaaatttgacagctggagattgcgagctggcactgaccagctctggcaccccctggggtttccccagmgcttggcatgagacctgccacagaggagacactgaatgcatgcctgcctgatgaacgcgtattgtccacctggtctctaactctctgagggcctggccaagtcactcacctcctctttctgtccctctaatgtaagaggctattaatgcttacttcatagaggtgctgtgagagttaattaaggtttgctaaatgctttgaaatccgtggatgaaaggcccagttggggagaactttatgattattctcatgcatcatcttaagaagtgtatggtgatgatacccacctggtacttttcatcttcaaagtgttctccagacattagccaattaaacgtcacagttccctgcccagtcagtgggtgtcctccagggagggaaccacgcagcaagtgggtgactccttcccctcttggccaccagggagtggtggtcagagccaggattccagctcctccagctgcaatcttccgctgggctctgttttgaccctcccagccctccatcttttctgcttctaggtatggtgaggactgcttaggctccgggactctgaaatcacgttgcttcttatatagtgtgtgtgatgctactcactgaatgttttcagtggtgagatgcattttttccctacaattgaacatctctgaaatcagtatgcatcttataactgatgaagggttatagttcaattaaaagtgtttttcttcttactagtaaataatataatagtgcatcatacaattgttgtcgtatgtcaacaattgttgaaatatattaccacgatttctatttgtagtttattgtagatttgtagtttttttcct

SEQ ID NO: 680562 - DNA, 2205 bp, Homo sapiens
aggtttaatagacttacagttacacatggctggggaggcctcacaatcatggcagaacgcaaatgaggggcaaagtcacgtcttacatggcagcaggcaacagagcttgtgcaggggaacccccatttataaaaccatcagatcctgtgagccttattcactcccacgagaacagtatgggggaaaaccccccacaacacacacacaccatggttcaattatctctacctggccctgcccttggcacatggggattattacaattcaaggtgagatttgagtagggacacagccaaactgtatcgtgtctctcccctgaatctttctgctgtggctgccttctttctgctctcccctgattggctttatcggtaaggtggattccatgtgacctggctactgcagcttcgtagattgatattttacagcttcagctaccagaaggcctggctgtctttctcagtgccagtcccacatttctcaggaagagaccaggagcctgcctttgaccaatcaaatgtggccaggaaggcagcagggttttgttatataaaatggttgtttctatgatagtcacacggtggtgggggctagggggtggcaggatgggaaactggactgggcagacacatctactgtccaggtcccagatcttgggcctctctgctgggtgagggaccatgcttggcttttggctctcttgatggagactggtgggatatcttccttgctctggagtaagatggaagtgaaacaacgaggatgtatgtaggaacgtcactcatttgtctaggacgttgtgagtgatttctttgctgaattggataatggcttttgaagcatggaagtctttcctcaatcttttgtgtgtgccattcacaatgtaatggctatagaaatgacatgcttttaatattaacctgcatttttaacattttctccatcactttttaaagtctggaagtccagaggacagtaagtcaagccctggtctgtagcatctgccaatttccatggtgtaaacactctcaccgtggtcaatttcaagggaccactgggacgtcactgaacagggatctgggaaggagtgcacagcagcacagctttctgcactatttccaccccgcagatattccacaggtgaataaccccaagtgtgcagataacagtagaaagttgtaaaataatttggagtgatacattttgagctttcattacctgtgtttccaatacaatttatttaattatacatttatgtaatttaactttgaagaatggctttgtttcataactggtttgcaaaattcttgaaaatttgacagctggagattgcgagctggcactgaccagctctggcaccccctggggtttccccagagcttggcatgagacctgccacagaggagacactgaatgcatgcctgcctgatgaacgcrtattgtccacctggtctctaactctctgagggcctggccaagtcactcacctcctctttctgtccctctaatgtaagaggctattaatgcttacttcatagaggtgctgtgagagttaattaaggtttgctaaatgctttgaaatccgtggatgaaaggcccagttggggagaactttatgattattctcatgcatcatcttaagaagtgtatggtgatgatacccacctggtacttttcatcttcaaagtgttctccagacattagccaattaaacgtcacagttccctgcccagtcagtgggtgtcctccagggagggaaccacgcagcaagtgggtgactccttcccctcttggccaccagggagtggtggtcagagccaggattccagctcctccagctgcaatcttccgctgggctctgttttgaccctcccagccctccatcttttctgcttctaggtatggtgaggactgcttaggctccgggactctgaaatcacgttgcttcttatatagtgtgtgtgatgctactcactgaatgttttcagtggtgagatgcattttttccctacaattgaacatctctgaaatcagtatgcatcttataactgatgaagggttatagttcaattaaaagtgtttttcttcttactagtaaataatataatagtgcatcatacaattgttgtcgtatgtcaacaattgttgaaatatattaccacgatttctatttgtagtttattgtagatttgtagtttttttcct

SEQ ID NO: 680563 - DNA, 1506 bp, Homo sapiens
ctgtctgggatctctcaatatttacaatctagcctgcaacttcattactgaagtgttttcagaatctcaaatcaccttcctaagaaagttatactttttggcagcatcttgaagactgatgcaaagggtaacaagaacccaaatcttactctgtgatttaaaacattctagaaagcttctattcaaagaggctatctattgagactacattagtcgaaatactcattgcctccagtatttctctaccattacagccagccaaagaggttaaaaaagcaccagctgcctaagagtgtactgagacacaccaaggataaattcaaagaggaagaaaaacatcctatacatatttgttgaatcaaatacagtatctctcagttagttatacacagttacaagatcatgaattaactcactgacaggtatactcagaatatcagtaaattcccaattgttccacaatcaactgaaagatttaaatgtctccaaaaaggctgtttttccctctgaatgttttccaagttataactactgtctgaacctgtacaaatccaaacatttatgggtatttaatatcctttatgcctaccattataacaagaaggctgtttaagattatctaaactatatatttataatggacattcatctaaaaaaatcacctcaaaaatctgtgaagagctccaattctcaaaatgattaattagcaacaagaaaaaatgcttacctctcaagacagccatcttcactatcaccacggtcactgcatggctctaacaatatacctacagactgacaaaaagaacactaccatgtattaatggagctcccaatactcagataagagaagttgccaatctaaattaggatattagaatacagattagtcaaacacccctaattagctatcatttataatagtctgtagtacttagcatctctttttacagagagtaatttatcttccctcaaaacctgggtcatatgaagtatagcaggtactctgcatttctctctattaggtaatatgtatcaccactaccatccttcttccttagaattatctcctccaaaatgatggtcttctgatcctgcttgccaactgctgcttgctttatttctcctcagctacaaagatacaagtttggtgacttcttgtaggtaagataggagtcatagaggagttcactagattcctttgtatatttgaagtaataactattttccacaaagaaagtccccacatgagaaaactctcccattttccaacgagcttagtgacaccatctcatccctattcccccccaaactaaaaacctaccaagtctaatacaaatacccagagaattactacaaaatacatgaacgttgtggtgtttttgatgatcacctttcaaatcaacaaaaggttccatacttcctagactctctgattcttctttagaaagtaagtaccacttgtccagctttgtttagcrtgaaagaaggtccacaagaatctgcaaa

SEQ ID NO: 680564 - DNA, 647 bp, Homo sapiens
tcccccggggaaagggagactccctttcccggtctgctaagtagcgggtgttttcctttgacacttacgctaccgctagaccacggtccgcctggcaacgggcgggcgtcttcccagacactggcattaccactagaccaaggagccctctggtggccctgtctgggcataacagaaggctcgcactcttgtcttctggtcacttcccactatgtcccctcagctcctatctctgtatggcctggtttttcctaggttatgataatagagcgaggattattataatattggaataaagagtaattgctacaaactgatgattaatgacattcatatataatcatatctaagatctatatctggtataactattcttgttttatattttattatactggaacggctggtgtccttggtctcttgcctcggcacctgggtggcttgccacccacgtatttcaggaataaataaaagccaaattttgttgtgttgtaaccaagaagagaaagccccaatttggtcatgtcctgcccacagccccacataaagatgrgttaggtgtgtgtttctcacatcaacagccccttagcatgtgccatgtgttatggatactgctgggatggaggaaagatggcagaaatagtgca

SEQ ID NO: 680565 - DNA, 1090 bp, Homo sapiens
tgcattcggagcctaattctgctccttcctaggtggggcaatcttagagaagtcacttcacctctctgtgcctactttgcaaggttaagtgaacttacggttgcaaaacattttcaactccataaatccagactttaccacctctttctgattccacgtccctgctcccactgcacacacacacgtacacacccttatgtatgaatccaatactattatcatcattattattattacgtacttcatattactatttctaactttactaaatgttaccttgagccaggagctaggctaagtactcaatctgcattatcttccttctttattgacacagatccaaacaggaaacaatatctccattttaaagagcacagagagttcattcatcatcccaaggccacccacttagtaaaatgtatagcctggatatcagccattcaatgcccacatcaatattcccaacaacgttaggcattaactaccagacgattttcagtgataccgagaaaggtgttgcgagctccataaatacagcactttccactagcaaacccagtgggattcttcaatacgtagcaagcctcgccccagttaacgttcccgttttgcagatgaggaaatggagacttctagaagaagtcagagagatctgagtttgagttcctgctttttcactcaccagctgcacaggtctctgcaaatcacgtaattccttggaggttcacccgtcctcaccagcaacatagggacaatatctgatctcaaagggctggtgtggggtaaatagaaggacagagcttggctcctctttctagaggcaataaaggatcatcttttcttctgttcctagcatgaatgaagaacggttcatgattactgtcccaacctctttctccactttggacgctcttccctgcatcaaatgcacgagggtcctcaataatctcacagcgttctgartcttagtccctgactgctcaccatgcatgaccccttgtggattctacttcccaatctgttcccagcccccagcatctgacctcgtttttggttttctaattatggcttcgtctttgtgacctcttgg

SEQ ID NO: 680566 - DNA, 642 bp, Homo sapiens
tatttcctgctggcttcttccatagtctgaattgaataacagtaagatttactattttaaagccaaataatggtgtactaagtgtgaatgggggggggggttcagtctttgcattttaattttatggtttgttagaaatagactttgcttttcttctttcaaacccaccatcttagactgtgtagagatgaagtttgcaataaataataccttatgattatatgtgaaaacccagagaacttagtgaagtctcattaatttactttcaaagtgtggttgtttcttttttaatatccagggtaccacagatataagaggagtggggacagaattaagcacaaggtaactataaattgcattccagttacaggaacacacagtgattcagtggtgtgacagagacaaggatgtaactatttcatgactattggatagcactatttattactaatatgtctyattgaataaatgttttagaagtaaaatgcccattcccatcaagaccagacaatggatttgtgaactatcctgcaaaaccaacactttattacaaggataaagccacatttggctgccatgatggatattctctggatggcccggaagaaatagaatgtaccaaactgggaaactggtctgcca

SEQ ID NO: 680567 - DNA, 635 bp, Homo sapiens
ggctggagtgcagtagtgcaatcttggctcactgcaacctccactcccaggttcaagcgattctcctgcctcagcctcccaagtagctgggattacaggcgcccaccaccacacccggctaatctttgtattttttgtagagtcagccatgttggccaggctggtctcgaactcctgacctcaagtgatctgcccacccctcagcctcccaaagtgctggggttacaggcgtgagccactgagcccggcctcacagtgctggggttacaggcgtgagcaaccaagcccgagcctggtctgcaattatacttttgttgtttgtttccacytgaggactgatagccagggtttatccccgcccctccccaggcactgtggatgttgggacggaccactctctggggtggggcgtcctggcccctgcagggtgctgagcagcgtccctgcccccacccactccatgccaggagcgcccctgtatcaggacggctcgcccaggtgggagcccctgagctgagccccgtgagggcagtggctgcacccccagctcctgctcagcggggcctcggctcgtctttctggataaacgccacctgctgcccgcccccagcaccccacctggctttgcctcctag

SEQ ID NO: 680568 - DNA, 1556 bp, Homo sapiens
ttggcagctaccatctgttgtgtgcttcctatacaccaggcaccatgctaaacatttcctgaatacctggttctcataactctttgaggtagttaatatcatcttccttttacagaagaagaaatggtcgcagagaggttaagtagcttgcccaaggttacatagccgatgaagaccaggcctggagtctgagtcctgtttgattccaaatctggtgctcctggggtagctctaccattgacgatatgtggacattaatggacagtaggagaagaataaacttataacttttcctcaatcatgtcacaatctccccattgcctgctgccggagcttctccctgacaacgagcttctagactgagtgagcctctagttaatcctcacaatgaaatctacaagcaaagtcaggagtgttgggcacctttgaaagggtggtggattagggctcaggtagtaatgttgacttctaatgctgctgccacacctttcaaagcacttcacaacctctgtatgacctggataatatttctatattctatatttattttcagatgaagaaactaaaacataggttaaataattagctcagaattatatagccagagctgagacttgaacccaggtgggttggctctagagtcaggcacaaactataccccaccaccatccttcttctggacctgtaaggctgaaggttgctctttgcccacaacctctcctcttcaacctagtaagttaacctctcttttaatggtagtggagatagagaagaaaacgtggtgaagtgatggagggagggatcccgggactcccatcccatggagagaaatggcttgttaattctcccaagactccagagcgtcacagttcacagacaattaattagccactggtgctaatgatgattaagaaagaaggagatgattcagaggaaacgtgccagcattggtgctccctgtggtaagtaaaaaggtcacttctgctcctctgtgtcattgaggagcacaaggtcatgttttctcattgccacctctcctgagtgtgtcccattcttttctctcaagtctcatttgaacccatgtaagacttcgttatttcttgtttcttctctactggtagacatttggatataatttacatgcaataaaatgcacagatttgaaatatacgytttgatgaattttgatgacttcaatgaagaaacagaagatttccatcatcctacaaaccttccacttgcctctttccttgatacttagttttgcctcttctaggacttcatacaaatggaataatatatactcctttgagtaagaattatttcactaggagtaattattttgcaatttattcatgttgtttcaagtatcagtagctcatttctgcttttaaaatcaacttcagtctgggcatggtggctcacatctgtaatcccagcactttaagaggccaagaggaatggatcacctgagcccaggagttcgagaccagtctgggcaacatagcaagaccttgtctctacgaaaagtacaaaaacttagccgggtgtggtgg

SEQ ID NO: 680569 - DNA, 1334 bp, Homo sapiens
cataattccaaatatacaacaaataatgattgagccactgaaaaaaattaattcgataacataagctgaggtgaagcagtacagcattttagagtataaaagtgattctatcggtttcatatttactcagctcattcaatcaccatctatgtggtgtctactagcaccaagttatgtgctaaggatataaagatgaatagaaacttctgatgtcaagataatcaccacccactgggaaagcaaataaacaataaattattaggccataataaaactatatttaaagtgttataagagcacagaagatagtactcacctctgcctaaggtaaagttctcataagcacaggattccaaagcagaacaaagctgacaaaatttttaatgcagcatgtagcagtaatttggtgagcacctcatcaaatgttgtacaacagattaattattccgagcggactggaataattctcttaaagtggcataacagtagcattaatgtccttccttttttcacttcgtcacattgtttcgctctgcctctgtgcagaaatgaaattagggtcaccatgcctttgaaatatagcctctgctctcactaatgctagagctgtcaaaatgaggaataagaactatcactcccatgtctgattcctaaataacgatattttctttaagacaggaaaaaaacagttacacgtattcckaatccatagtctaaaatactatctagcataaagctatatcaaataaataaaaagatgtgtttgaagtttcatctaacatctagtcaactggcttttgtgaagagtatctggttatcacccttccttctagctacaccatactttatgctactatgtccttttggctctgtatccaggaagaatacagagaccagaaacaatagggttcaataagaggaggagtataacctaagggtccatagtgcaatgtttggaaatgtacccttgccctctggaactttaacatgaaccctatctccattccatttgtgctcctctctaagtgccttctcacccttaatgtcagcaatcctcaaacaaccctgagaagctggtattattagactcacttgtagatatataaactaaggtctaatctaatgttagacagcaaattagtaacaaaaccaggtctgaaagtcaggagtttctttcttactagctcagaaatctgtcctctatatcagcagttggcaaactttggctatagaaagccaggtgaaaaatattttaggctttgtgggccaaaccgtctctgtctaggactgacagatttagcaaagacaaatgcaacacacctagttacatttga

SEQ ID NO: 680570 - DNA, 614 bp, Homo sapiens
cccaagcagctgctgtgcataatgattacttgaagatttataatatgcaggatataatcactacccaaattaacaatatagactaagggcatcaggtaactgatctatagacaaaaaaacatcttgacagcagggaacattttcttatttatacaaatggtctgtgcactcaggcattcagtgtaaatagatcattatagccatttccaagacattataatccattaagtaaattagacatgctttataagccctaatgatacaatcccaagaccaaatatctccagagacatttattcaattcatctctcagacgggcctggctataagacagggcatttagctgagaaagctaccaagtggttctgttttgagaaaaaccaagagcagaatctcaaggttcagagagttgatgccttctttgtgctgctgagcaataaatgactatayagaatgaaaccctacatttaaagtcactacatttaagtcacttttttaataaccaccaaatcagacacttctttgtttcttcatcacttacagtgtaaacaatgataatctgaatggcttgagcaggtttcatttttccttctcaggctttttcccaaactaat

SEQ ID NO: 680571 - DNA, 1098 bp, Homo sapiens
tcatcctggttaagtcacacaaatgtggctgcatccatctgggaaagggaaagcctcttttgagctgagcatgttggacrctttgggaattctctggtgtaacttaagtaccagaaactgttttattttcataagaaaattatatataagagagttttctaagacttttctttcatttgtggagaatagggtttctattctataaaaatagtggggattctgggtggggtactgcctgagagaggttggcacagctgacattcaacagccagccccactacactgtaaacttccccattccacaccccatgcttcatcgatttgccttccttagaaaagtccaccaatggggttgtgggggaaaggaagtgctatggggctccttgtgatgttctagctgcctcctggtcctcactatttgcatatggcgctagtctacctggagtctgtatgtttttcttataacagtacccttttctcattcttaaaaaaaccaagaacaattctatcccctctgatttttatgagatatctacagcctgctcagcagagactccctttgctaaaaaaaatggtctaactgatcccctccaggatttctgaacaatctcccatgagcctctgaatataccaccaaattagaggaacagacttgacaattatgactaatccctttccataaggttatggcttttaggtgtgtagctgattgtttgtgtgaagcatttcccttcaaaaaagagaatccttaggaagtattagacaggctcatttactccgtgtcctgcaaaataaaatctcagcagaaaagcataagtaagctaaaattagaatgtgaggattcccctacacaattgtcttctgttgagatgctgtgcaggtaaaaattgcttagatattttcctacacatcttggagatacagaaagcaaagtggagtatacttgactgtgaactctttgaggttagatgctctaatttctttttatttctactgtcagatacagggcctgacatataaacgacaattaataagtgtaagttagagtctgagtctgttcacaagaaagataaaagagtaagtatgaaatactataca

SEQ ID NO: 680572 - DNA, 1098 bp, Homo sapiens
tcatcctggttaagtcacacaaatgtggctgcatccatctgggaaagggaaagcctcttttgagctgagcatgttggacgctttgggaattctctggtgtaacttaagtaccagaaactgttttattttcataagaaaattatatataagagagttttctaagacttttctttcatttgtggagaatagggtttctattctataaaaatagtggggattctgggtggggtactgcctgagagaggttggcacagctgacattcaacagccagccccactacactgtaaacttccccattccacaccccatgcttcatcgatttgccttccttagaaaagtccaccaatggggttgtgggggaaaggaagkgctatggggctccttgtgatgttctagctgcctcctggtcctcactatttgcatatggcgctagtctacctggagtctgtatgtttttcttataacagtacccttttctcattcttaaaaaaaccaagaacaattctatcccctctgatttttatgagatatctacagcctgctcagcagagactccctttgctaaaaaaaatggtctaactgatcccctccaggatttctgaacaatctcccatgagcctctgaatataccaccaaattagaggaacagacttgacaattatgactaatccctttccataaggttatggcttttaggtgtgtagctgattgtttgtgtgaagcatttcccttcaaaaaagagaatccttaggaagtattagacaggctcatttactccgtgtcctgcaaaataaaatctcagcagaaaagcataagtaagctaaaattagaatgtgaggattcccctacacaattgtcttctgttgagatgctgtgcaggtaaaaattgcttagatattttcctacacatcttggagatacagaaagcaaagtggagtatacttgactgtgaactctttgaggttagatgctctaatttctttttatttctactgtcagatacagggcctgacatataaacgacaattaataagtgtaagttagagtctgagtctgttcacaagaaagataaaagagtaagtatgaaatactataca

SEQ ID NO: 680573 - DNA, 1098 bp, Homo sapiens
tcatcctggttaagtcacacaaatgtggctgcatccatctgggaaagggaaagcctcttttgagctgagcatgttggacgctttgggaattctctggtgtaacttaagtaccagaaactgttttattttcataagaaaattatatataagagagttttctaagacttttctttcatttgtggagaatagggtttctattctataaaaatagtggggattctgggtggggtactgcctgagagaggttggcacagctgacattcaacagccagccccactacactgtaaacttccccattccacaccccatgcttcatcgatttgccttccttagaaaagtccaccaatggggttgtgggggaaaggaagtgctatggggctccttgtgatgttctagctgcctcctggtcctcactatttgcatatggcrctagtctacctggagtctgtatgtttttcttataacagtacccttttctcattcttaaaaaaaccaagaacaattctatcccctctgatttttatgagatatctacagcctgctcagcagagactccctttgctaaaaaaaatggtctaactgatcccctccaggatttctgaacaatctcccatgagcctctgaatataccaccaaattagaggaacagacttgacaattatgactaatccctttccataaggttatggcttttaggtgtgtagctgattgtttgtgtgaagcatttcccttcaaaaaagagaatccttaggaagtattagacaggctcatttactccgtgtcctgcaaaataaaatctcagcagaaaagcataagtaagctaaaattagaatgtgaggattcccctacacaattgtcttctgttgagatgctgtgcaggtaaaaattgcttagatattttcctacacatcttggagatacagaaagcaaagtggagtatacttgactgtgaactctttgaggttagatgctctaatttctttttatttctactgtcagatacagggcctgacatataaacgacaattaataagtgtaagttagagtctgagtctgttcacaagaaagataaaagagtaagtatgaaatactataca

SEQ ID NO: 680574 - DNA, 1098 bp, Homo sapiens
tcatcctggttaagtcacacaaatgtggctgcatccatctgggaaagggaaagcctcttttgagctgagcatgttggacgctttgggaattctctggtgtaacttaagtaccagaaactgttttattttcataagaaaattatatataagagagttttctaagacttttctttcatttgtggagaatagggtttctattctataaaaatagtggggattctgggtggggtactgcctgagagaggttggcacagctgacattcaacagccagccccactacactgtaaacttccccattccacaccccatgcttcatcgatttgccttccttagaaaagtccaccaatggggttgtgggggaaaggaagtgctatggggctccttgtgatgttctagctgcctcctggtcctcactatttgcatatggcgctagtctacctggagtctgtatgtttttcttataacagtacccttttctcattcttaaaaaaaccaagaacaattctatcccctctgatttttatgagatatctacagcctgctcagcagagactccctttgctaaaaaaaatggtctaactgatcccctccaggatttctgaacaatctccsatgagcctctgaatataccaccaaattagaggaacagacttgacaattatgactaatccctttccataaggttatggcttttaggtgtgtagctgattgtttgtgtgaagcatttcccttcaaaaaagagaatccttaggaagtattagacaggctcatttactccgtgtcctgcaaaataaaatctcagcagaaaagcataagtaagctaaaattagaatgtgaggattcccctacacaattgtcttctgttgagatgctgtgcaggtaaaaattgcttagatattttcctacacatcttggagatacagaaagcaaagtggagtatacttgactgtgaactctttgaggttagatgctctaatttctttttatttctactgtcagatacagggcctgacatataaacgacaattaataagtgtaagttagagtctgagtctgttcacaagaaagataaaagagtaagtatgaaatactataca

SEQ ID NO: 680575 - DNA, 1218 bp, Homo sapiens
ttggtactttcagtttagaacattaaaatggaaaaagaatgcagtgccaatattatatatatatttattttaaaatatgataaaactaattttattagacttccttataggggaacctcccttaaaagactgtgttattaaagatatcaactaagaattctttattcctttctcattactctttaaaaaatctaaaccatagtaaaattcatatggtttttgccccaaagttttcttcatacagcatgcgttaccagtggctaaaatcttttgaagttactgttgctaaactcttactctgcctttctttccccattcagaacctgggacaactaattgcatacagtacaagcttaataatttttaatttattaaatttagaagtacatgtttcaaaagaaaatgttctggtcatttggctaaaaggtttttgatctttttttctgaattatagccatcatttaatttccttcaaaatgcaaatcgctggtgaagacagccatcaaatcatggactaacttttgaattcaggtaagtctgtactaaagttaccaccagcaactttgaagacaatctatatttaaaaatttttaggcatgtagatactgcataataataggaataatgcccctagcaaataatttgttctccgacatgtcaccttaacactcttacacattaactcgtgagataggtaggtagtagtatatttattcaactctttaaatgtagacagattatgtacccaataatatgctttataaattgggtttgcatwaaataataaatttctcaatggacagaattggcttgctttacttctttgattaataaatgttagctttttgagtcttcataaacttgttatcaaaaagtcttgtttgaacacttgagttctgatgaagtcctcatggtatggagcttcataactgtttttgtataatctatatccttccggactctaccgggtataagggccccttggtaggctttggagattatactaccattctaccttgcttgtgagcagaacctaatccaacagaaattgctagttttagccagactacattggagcatagaccataacctttatggtccttaatgtgggaaacaactgccaactaacatttcagtattttttgtaatgatttttttcaacttaattgtttcagagaaaataatacttcctttgatatcattatatcaacattcaaa

SEQ ID NO: 680576 - DNA, 1218 bp, Homo sapiens
ttggtactttcagtttagaacattaaaatggaaaaagaatgcagtgccaatattatatatatatttattttaaaatatgataaaactaattttattagacttccttataggggaacctcccttaaaagactgtgttattaaagatatcaactaagaattctttattcctttctcattactctttaaaaaatctaaaccatagtaaaattcatatggtttttgccccaaagttttcttcatacagcatgcgttaccagtggctaaaatcttttgaagttactgttgctaaactcttactctgcctttctttccccattcagaacctgggacaactaattgcatacagtacaagcttaataatttttaatttattaaatttagaagtacatgtttcaaaagaaaatgttctggtcatttggctaaaaggtttttgatctttttttctgaattatagccatcatttaatttccttcaaaatgcaaatcgctggtgaagacagccatcaaatcatggactaacttttgaattcaggtaagtctgtactaaagttaccaccagcaactttgaagacaatctatatttaaaaatttttaggcatgtagatactgcataataataggaataatgcccctagcaaataatttgttctccgacatgtcaccttaacactcttacacattaactcgtgagataggtaggtagtagtatatttattcaactctttaaatgtagacagattatgtacccaataatatgctttataaattgggtttgcataaaataataaatttctcaatggacagaattggcttgctttacttctttgattaataaatgttagctttttgagtcttcataaacttgttatcaaaaagtcttgtttgaacacttgagttctgatgaagtcctcatggtatggagcttcataactgtttttgtataatctatatccttccggactctaccgggtataagggccccttggtaggctttggagattatactaccattctaccttgcttgtgagcagaamctaatccaacagaaattgctagttttagccagactacattggagcatagaccataacctttatggtccttaatgtgggaaacaactgccaactaacatttcagtattttttgtaatgatttttttcaacttaattgtttcagagaaaataatacttcctttgatatcattatatcaacattcaaa

SEQ ID NO: 680577 - DNA, 644 bp, Homo sapiens
tggcactttaattgaaaaaaatattcactgcttaagtactctatcactacaatcagaagattctagaatactgaaaataagtattaaatttttcaaaggtgaaaatgctgaccagtattggtaagatactgatgacatcttactgcstgaaaaggaaatactcatttgaaatgcagcgtattttaaaagaataaaataaaagccaatgttgaaaattcttctaatttctttgtttaaaaaatgaaacctagaaaacccctaacaaaaggatactctaaagtttacaacattattcagaattgctcatttaatgtcccatgaaataaactgtcctcacacaaacaccatcatatcagcattaaaattttaacaaactcactgcaaagcaaagtcaaaataatgaaaataataaaaagtaaacagaaataagagtatttatcttacatgcaatggataatgcatagcatgaccagacccaaacagcatgcatggaggaggcattatcaggaagaattggcaatatgaagatcatgtcccaatccagcatacaaagacacagagaagaaaatgaaatcataaaagaaaaatctcaatgcataagttgtacttttaatatagcaatctagctgaccattttttaaaag

SEQ ID NO: 680578 - DNA, 644 bp, Homo sapiens
tggcactttaattgaaaaaaatattcactgcttaagtactctatcactacaatcagaagattctagaatactgaaaataagtattaaatttttcaaaggtgaaaatgctgaccagtattggtaagatactgatgacatcttactgcgtgaaaaggaaatactcatttgaaatgyagcgtattttaaaagaataaaataaaagccaatgttgaaaattcttctaatttctttgtttaaaaaatgaaacctagaaaacccctaacaaaaggatactctaaagtttacaacattattcagaattgctcatttaatgtcccatgaaataaactgtcctcacacaaacaccatcatatcagcattaaaattttaacaaactcactgcaaagcaaagtcaaaataatgaaaataataaaaagtaaacagaaataagagtatttatcttacatgcaatggataatgcatagcatgaccagacccaaacagcatgcatggaggaggcattatcaggaagaattggcaatatgaagatcatgtcccaatccagcatacaaagacacagagaagaaaatgaaatcataaaagaaaaatctcaatgcataagttgtacttttaatatagcaatctagctgaccattttttaaaag

SEQ ID NO: 680579 - DNA, 1651 bp, Homo sapiens
taatttgcttctaaaaatggtaaaatgtagcctaaagtgagttactagattactaacatattaaagataattatgaatgaactcatttgggcccaacttgaatttttttctcatttactaagcagaccaaaaacttgtactctactcctgagtactgcacatgtctctagaaaataagagagaaataaaacaagatttctctaccctggaattttaaaaatattttctagagcccaactcttgtcatatctctttttataaagagcttcactttgtctcctaattaaaatgaactctccacaatattgtcctaatctccccttattaccaaaaatgaccaaggtatcatttttttgatatactcagtgcttccccaacttttatgctataccccatttttatggtttcacttttcaccaccaattgcaaaaatcttacactaatatcagctaaaatgtctccattttcttaaccacaacccactttgcccccaatattggcttcattttgaagtcagaattctttttctcattatatccattatatttcgttttgaaatatatttaccttttcctttttaatataactgtttatttttgaccaacatatatttttaatctgctgtgtggagagattataaacaaataactaggaatatatgaggatcactttatcatcttcaaaacagtaaaaataacgctatatgtgtccaatgaatagcaaattcacgtgttccttttttttttttttttacattcagtttcagcttatagcacagcacatttagaaccaacatttcctcctaatgtcatttgtgctatcagtaagaaccttaccagcaatgcagacatgctggctaatgaacttccagtcaaaggaaacacaacagggcataattattgactcctcctatcatacactgtcctgtgatggatttgaaaagtgcaacattttgaccacagctttggatcactatgtgaccttaagtaaatatgtgatgtctaaaaggaacactggacagtaattttaagctagggcttgaggtaagcaagcttcattttatcttccttagcgtgcaaggctgctgttaatagtgcctatttttcttctaacttcctgtatatgtttattttctaaaaaccaaatgataagtaattctaaatggactgcattttgccctatgggttcatcattacatttggaaaagtagtaagaacatatcactgaactccaagtagggaaaagggttactgaatcagcatttattttcaggtcttattattttgattctctccaaatatattattttagtaaattattcataagttcttctcattaagactaaacataagaataaagcttaagtgcgatgattattatttataactttcatgtcaggaaagtaaaaattacatttaaaagattttcaactttggccctattgacatttttggagggaaaatactttgttgtgtgtggtaggcattttcctctgcattacaggattgtttaacagcgtgcctggcctctgtccactcaggggtgtccaatcttttggcttcyctgggccacactgagagaagatgaattgtcttgggccacacctaaaatacactaatactaacaatagttgagatttttaaaaaagcaa

SEQ ID NO: 680580 - DNA, 1039 bp, Homo sapiens
caaaaattccaatttgtatttgtatctatctcaaaaacaatagtcccaaagcaagtcctcagcaactcctattaagatcttttgactttcactgctgtctagaaaatcttgagtcacctattctcacatttttcaaatcctgccctttcatggcgttacccacactgtctcattccctctgtccttactgcatgccatgttttgaacttgtcacagccccccaacttcatggaaagcagttcttcctttttgatggctttttcatgaacatcatggacatgtaccaggaacagttttgaaatctactcacataaaacaatctactggcaaaagacctatttactacaatgaatgcacttaagcagtaagctttttattctgtttyttaatgtgtaaagccaggctaaaaatgaaacccaaaaaaacaaatacaattagcccttatatgtgattatttgggtttgggtttgtttgtttgttttctgatgcagtctcgctctgtcacccaggctggagtgcagtggcatgatctcggctctccacaaccttcgcctccctggttcaagtgattctcctgcctcagcgtcttgaggagctgggagtacaggcacatgccaccacgcccagctaattcttgtatttttagtagagacagggttttgccatgactacaggcacatgccaccatgcctggctaaattttgtatttttagtagagatggagttttgccatgttggccaggctggtcttgatctcctgaccttgtgatccacccgcctcggcctcccaaagtgctgggataacaggcatgaaccactgcacctggccttgggggatgttttatggagaggaataacatattttcttttgagcctcagaaggagatcaaaaggtaataagagtaataccatcttcctgaattccaagtattagggagttgtaccaaacagaaagctgtttcaggttctaggacacagaacactttcatgcttgtgagtaacaagcatgtctctatggccgtactccaagttctggatc

SEQ ID NO: 680581 - DNA, 607 bp, Homo sapiens
tatcccctaaacatcattctctctaaataatttagatatttggtataactccaataagaatcctaataaaattgatcagggaaatgcaaatcaaaaccacaatgtgatatcaccttactcctgcaagaatggccataatcaaacaaacaatcaaaaaactgtagatgttggcatggatgcagtgataggggaacacttctacactgctggtaaatgtcaactagtacagccactgtggaaaacagtgtggagattccttaaakaactaaaagtagaactaccatttgatccagcaatcccactacttggtatctacccagaggaaaagtagtcattatacaaaaatgatacttgcacacatgtgtttatagcagcacaatttgcaattgcaagatcatggaaccaacccaaatgcccatcaatcaacgagtggataaagaaactatatatatatgtatgtatatatatacacccacacacaattaaatactattcagccataaaaatgaatgaattaatggcatttgcagcaacctggatgagattggagactattattctaagtgaagtaactcaggaatggaaaaccaaacattgtatgttctca

SEQ ID NO: 680582 - DNA, 2119 bp, Homo sapiens
tatatgaagactatagctattttttctatttaccctaggtgacattgattcatttgacccatacttattgagtgcctattatatattaaatgccatgtttatacattggatacatatttgtgaataagtaaactatcttcagaaactaaagatgatgaacacaaataatttaaataggaaatacacaaatccaatcacattaactgtgttgaagaaaatgaacagggtattgatgtagataatatcagagaggaggaacttcaagtggccaagagaggtctcayagaggggctggcatttcagccgaaaactgaaaggtgaaaaggaagcttgggaaaaataaaaataaaaatatattcagaaaaagggagcagaatacgacaagactagtgtggctgatcgtagaaggcaaaagaaagtggttttcagatgggtttgaaaggtgggccagagaacatccacatacgtcttacaggacatgatagggattctgaatagtgctttatgtacatcaggacatcaagattttaggcaggggaatgacatagttggatttatatttttcaaggaatttattggcctctctgtgtggaggacatgttggagagagacatggagaagaggcaagaagaccaagaaggaggatcctgtggtagttcaggaaagactggtgactgagcttacagtgggaacagcataaattaagagaaatggtgaaattattttagatagttgacctgctggtagttggtatgttgagagtgaggacaagtcatcttggatgcattaaggttgagtcataactttattttcccccaaagttatggaatgatggtagcacaaattaaaaatgcaatagcctaagggagagacagagatgtatttaattttcagtttactttaatcgggcagaaagggattaaataatgcattttttaactgttaaatgtgtaattccagtgagccatccaattgaagatgtcaattagacagctgcttattcaaacctgaaattgagaggagaggtttgggttagaaatatacatttggaagtcattgtcacacatgtgatatttaaagctttggaacagatgatcacagaggaaatgaaagttaagttttaaaagggaacataatccaggaaccagccaagatttagaggtcaggtttagaaggaagactttaaaaaggagaatgaaaaggataatcagatatagggtaggaaagaagaaattatggatctagaagcgagacagttgaggatttgggggagaaatgattggttactaagtcaaataatttgaagagctcaggtaatgaagttaaaactattgaccattagaaccttagccttaatagttttagagattgttaagagcagaagccagacagctaagtagaacagggagtagatatgtttggtcaagctgttgttatatgacaggctattctacagtgtatttagaggttgatagaatcatagagaaaataagaattgtaggtgtgggtctacagaatagaggaaatccttgaaatcaatcaactttagagctagtgagttgatagaaggttaaatattaactacgaaataacagatcaaagtgttagtttcttccacaattgttctaacaaacacaaaattgcaaattaaagacttgaacttctgattatgacaatctatttctacttaccttgttctttcatctcagaaatcagagatgtcttcaaatatatttttctacataatatcttaattataattggataattcaatccattttcagctgaatttaccaagcatttaacccaatttacctattctattgtaaatagtacttttaaaaaaaatttaagaattacatatatgtctaattatctcatctcatacaattacaaagagtctcagatatctttgtatgttaaaagaaaattaagttaaaaaaactattcaaaatttgtaaagaaacagtgagatttctatataaaataaattaggtagggtatacaattaggcaaattaatggatacagtattgaaatatgtagataagctacaatatataattattaattgatttttaagacctatttctgcttaattactactttttatttctaaa

SEQ ID NO: 680583 - DNA, 2119 bp, Homo sapiens
tatatgaagactatagctattttttctatttaccctaggtgacattgattcatttgacccatacttattgagtgcctattatatattaaatgccatgtttatacattggatacatatttgtgaataagtaaactatcttcagaaactaaagatgatgaacacaaataatttaaataggaaatacacaaatccaatcacattaactgtgttgaagaaaatgaacagggtattgatgtagataatatcagagaggaggaacttcaagtggccaagagaggtctcatagaggggctggcatttcagccgaaaactgaaaggtgaaaaggaagcttgggaaaaataaaaataaaaatatattcagaaaaagggagcagaatacgacaagactagtgtggctgatcgtagaaggcaaaagaaagtggttttcagatgggtttgaaaggtgggccagagaacatccacatacgtcttacaggacatgatagggattctgaatagtgctttatgtacatcaggacatcaagattttaggcaggggaatgacatagttggatttatatttttcaaggaatttattggcctctctgtgtggaggacatgttggagagagacatggagaagaggcaagaagaccaagaaggaggatcctgtggtagttcaggaaagactggtgactgagcttacagtgggaacagcataaattaagagaaatggtgaaattattttagatagttgacctgctggtagttggtatgttgagagtgaggacaagtcatcttggatgcattaaggttgagtcataactttattttcccccaaagttatggaatgatggtagcacaaattaaaaatgcaatagcctaagggagagacagagatgtatttaattttcagtttactttaatcgggcagaaagggattaaataatgcattttttaactgttaaatgtgtaattccagtgagccatccaattgaagatgtcaattagacagctgcttattcaaacctgaaattgagaggagaggtttgggttagaaatatacatttggaagtcattgtcacacatgtgrtatttaaagctttggaacagatgatcacagaggaaatgaaagttaagttttaaaagggaacataatccaggaaccagccaagatttagaggtcaggtttagaaggaagactttaaaaaggagaatgaaaaggataatcagatatagggtaggaaagaagaaattatggatctagaagcgagacagttgaggatttgggggagaaatgattggttactaagtcaaataatttgaagagctcaggtaatgaagttaaaactattgaccattagaaccttagccttaatagttttagagattgttaagagcagaagccagacagctaagtagaacagggagtagatatgtttggtcaagctgttgttatatgacaggctattctacagtgtatttagaggttgatagaatcatagagaaaataagaattgtaggtgtgggtctacagaatagaggaaatccttgaaatcaatcaactttagagctagtgagttgatagaaggttaaatattaactacgaaataacagatcaaagtgttagtttcttccacaattgttctaacaaacacaaaattgcaaattaaagacttgaacttctgattatgacaatctatttctacttaccttgttctttcatctcagaaatcagagatgtcttcaaatatatttttctacataatatcttaattataattggataattcaatccattttcagctgaatttaccaagcatttaacccaatttacctattctattgtaaatagtacttttaaaaaaaatttaagaattacatatatgtctaattatctcatctcatacaattacaaagagtctcagatatctttgtatgttaaaagaaaattaagttaaaaaaactattcaaaatttgtaaagaaacagtgagatttctatataaaataaattaggtagggtatacaattaggcaaattaatggatacagtattgaaatatgtagataagctacaatatataattattaattgatttttaagacctatttctgcttaattactactttttatttctaaa

SEQ ID NO: 680584 - DNA, 599 bp, Homo sapiens
aaccacttgctgactcagattggaaatgtaatatgagcaaaaaatgaacttctgttgtgttagcccactaagacttcgtacatttttcagacatggcatgatttggctcactttgaccaayattccacagatgccattacttcagtatcaatgtttgcttgaccataaattggactcaaatggattttttggggggaggtcaagtctgaaaagagcttacccaaagttttgcatctttagggtacgaaaattatgggagtttagacgttcatagttacttttttcttttactattgcaaaacttaggtattgaaagatttaagacatatggacacagagaagccaccaacaggaaattgtgtctgaagcagtacaacaaataggaaccagagccagagatgaggcaaaagaatatatgaagccaacatatattctagaaatataatctgggtcagagccaggaactgctgagttaatcagtgtgaatcagaagaaagagtcagaaatgagagacatgcactacctaaaacagttgcagattcaagtttcagaccaagtgtcagggtaaagtcaagacatttctggtaagtcaaaacatt

SEQ ID NO: 680585 - DNA, 599 bp, Homo sapiens
aaccacttgctgactcagattggaaatgtaatatgagcaaaaaatgaacttctgttgtgttagcccactaagacttcgtacatttttcagacatggcatgatttggctcactttgaccaacattccacagatgccattacttcagtatcaatgtttgcttgaccataaattggactcaaayggattttttggggggaggtcaagtctgaaaagagcttacccaaagttttgcatctttagggtacgaaaattatgggagtttagacgttcatagttacttttttcttttactattgcaaaacttaggtattgaaagatttaagacatatggacacagagaagccaccaacaggaaattgtgtctgaagcagtacaacaaataggaaccagagccagagatgaggcaaaagaatatatgaagccaacatatattctagaaatataatctgggtcagagccaggaactgctgagttaatcagtgtgaatcagaagaaagagtcagaaatgagagacatgcactacctaaaacagttgcagattcaagtttcagaccaagtgtcagggtaaagtcaagacatttctggtaagtcaaaacatt

SEQ ID NO: 680586 - DNA, 647 bp, Homo sapiens
ttatcttccctaatgtagagacccaggttttgtgaccaaaggaagatttgcaatggttttacttaattagcatctgctgagagaggctgtggtctataatagaatcttcaaaacatgggtgttgtttagagcctcccattagttaatggtgtgaccttggtcaaacagatctgacccttagtttattcatcagtaaatgaggaggttggatcaatacattccaaacctagagttccactgttttctgtggtagtcccaggagttatcactccactactggtgttcttggaaatttttgaaggcattataaatagttttcaaggtttaataataaccaagacaaagactgacaactgcagtgaagactagattttgtcatcgttttaaaaaaatgtgttttaattgaccttgtgggaattaaatatgtgcacacatgttgcacataaagtgtttcaagcttaagagctgaamaactatttcattatttattgttgaaaatgtcttaatgtattgcactggacagcttgagttttctagtttctacaggttgatagtttggtataaaaactgtatttgggaagaaagaagtgaatcactacaaaatgtcaaagcaaacagaggaatcagaggataagaaaggaagtaat

SEQ ID NO: 680587 - DNA, 647 bp, Homo sapiens
ttatcttccctaatgtagagacccaggttttgtgaccaaaggaagatttgcaatggttttacttaattagcatctgctgagagaggctgtggtctataatagaatcttcaaaacatgggtgttgtttagagcctcccattagttaatggtgtgaccttggtcaaacagatctgacccttagtttattcatcagtaaatgaggaggttggatcaatacattccaaacctagagttccactgttttctgtggtagtcccaggagttatcactccactactggtgttcttggaaatttttgaaggcattataaatagttttcaaggtttaataataaccaagacaaagactgacaactgcagtgaagactagattttgtcatcgttttaaaaaaatgtgttttaattgaccttgtgggaattaaatatgtgcacacatgttgcacataaagtgtttcaagcttaagagctgaacaactatttcattatttattgttgaaaatgtcttaatgtattgcaytggacagcttgagttttctagtttctacaggttgatagtttggtataaaaactgtatttgggaagaaagaagtgaatcactacaaaatgtcaaagcaaacagaggaatcagaggataagaaaggaagtaat

SEQ ID NO: 680588 - DNA, 606 bp, Homo sapiens
ttcacatgtaggttataatctgcttagtcacaacatgtttgaaaatacacaacaatgaaccaacctcactgggccctgtgaccagttcatgtcaaacagctcaactttagtttctagttacatagagtaaagagggaggactcaggctatgaaaaatagctgtgcagcrtgttctcagtccctggctgtagggtttataacattttaaaaactatatctgggattacttttacattcacttatgttttggaagggagaaagaaaatgctcctataacagtacaaggcagaaaaacttttgttgttttgtttattcttgtgttcctagaacaatgcctggcacatagtaagtgatcaataagtatttgtaagaaaattgtggtagcaaggccaggtgcggtggctcatgcctgtaatcccagcactttgggaggccaaggcaggtggatcacttgaggtcaggagttcaagaccagcctggccaacacagtaaaaccccatctctactcaaaaaaataaaaaaattagccgggcgtgttgtcacacgcctgtagtcccagctacttgggaggctgaggcaggagactcacttgaacacaggaggtgg

SEQ ID NO: 680589 - DNA, 602 bp, Homo sapiens
tctcaggcacacaggccagggctccaggggtctcgggctcacaggccagggctccaggaatctcaggcacacatgtcagggacaatcctggctctgccaccaactagctgtgaaacctgggatggcttactgkgagtctcattttccttttgtataaaattgaattacagttgtccctacctcataggctcactgtgtggattaaatgagatattaaacataaaggccgggtgtggtggctgacgcctgtaatcccagcactttgggaggctgaggcgggtggatcacaaggtcaggagatagagaccatcctggctaacacagtgaaaccccgtctctactaaaaatacaaaaaattagccgggcgtggtggcaggtgtctgtagtcccagctattcgggaggctgaggcaggagaatggcgtgaacccgggaggcagagcttgtactgagccgagatggcgccactgcactccagcctgggcgacagtgcaagactcaaaaaaaaaaaaaaaaaaagatattaaatataaagtgtctagcatataacaggagcccagtgaatgtagatactatcattatcatcatcatcattattattgc

SEQ ID NO: 680590 - DNA, 602 bp, Homo sapiens
tctcaggcacacaggccagggctccaggggtctcgggctcacaggccagggctccaggaatctcaggcacacatgtcagggacaatcctggctctgccaccaactagctgtgaaacctgggatggcttactgtgagtctcattttccttttgtataaaattgaattacagttgtccctacctcataggctcactgtgtggattaaatgagatattaaacataaaggccgggtgtggtggctgacgcctgtaatcccagcactttgggaggctgaggcgggtggatcacaaggtcaggagatagagaccatcctggctaacacagtgaaaccccgtctctactaaaaatacaaaaaattagccgggcgtggtggcaggtgyctgtagtcccagctattcgggaggctgaggcaggagaatggcgtgaacccgggaggcagagcttgtactgagccgagatggcgccactgcactccagcctgggcgacagtgcaagactcaaaaaaaaaaaaaaaaaaagatattaaatataaagtgtctagcatataacaggagcccagtgaatgtagatactatcattatcatcatcatcattattattgc

SEQ ID NO: 680591 - DNA, 629 bp, Homo sapiens
tcttaaaaacttctccagtctccaatacaaagcaaatcatccaaaagccagcaggaaaggttttaccagttacagtctaacgggcacttactatatgccaggctcccattatcacattgaattctcacaaccacccagtttcatgcccattttaaaggagagggaactggggcccacacacaggtgaaatgatgcccaaggtcacatatctagaaaaaagaagagccagtattagagccgggtcatctcacccaaagccctgggctcttatcaactccagtcagtagattatctgcacccccagccctcctctcctcaccacccagttactcttctctggcttcacgctgaaaaagcagtgggggccgggcgcggtggcccacgcctgtaatcccagcactttgggaggcccrggagggcggatcacgaggtcaggaattccagaccagcctggccaacatagtgaaaccccgtctcctctaaaaatacaaaaatttccctggcacggtggcgcgcgcctgtagtaccagctgctcaggaggctgtgaggcacaagaatcgcttgaaccagggaggcggaggttgcagagagccgagaccgcgccattgcactgcagcctgggcgacag

SEQ ID NO: 680592 - DNA, 678 bp, Homo sapiens
ttgagataggtgattggaggaggcctctccaaggagatctggactgtagtgactggcatgaaaatttaactaggagtgctttctacaccgaaggatccctgaagaagcagcctgcctgggatgtttaaggaaccacaggaagctcattgccagaggagtgagccagggcagaaatgttcagagaaaaagcaggagcttccctttgccaaccaggctcggatcaagtcatcttcccagcctcagtttcacttagatccccactcctaagtactttcccctgtttaattttcttcacaacatttatgtaatctgaaattatcttgttcattttttcataactgaatcacctrccctcctcctccttctctctctgtcatacacatgccaactagaaaataagttccgtgcatcagagcctgcccatcttattcacctgtatccccagaatctagaatggtgcctggcataatagatataataaatatgtgatgactgaaagaaccagaagagaccgccaggaggaaacaagcctactccagcagttttcagacagttttggtctcaagacccctttacactcctaaaaattattgaggatcccaaagtttttgtttatgtgggttaagtctgctaatatttatctgataagttaaaactgagaattttaggctggaggca

SEQ ID NO: 680593 - DNA, 549 bp, Homo sapiens
cactcttgtcgcccaggctgcagtgcagtggcgcgatcttggctcactgcagcctccacctcccagattcaagtgcttctcctgcctcagcctcccccaggtagctggactacaggcatgtgccaccacgcccggctaattttctgtatttttagtagagacagggtttcaccatgttagccaggatgatctcgatctcctgacttcgtgatccgcctgccttggcctccyaacgtgctgggattacaggcgtcagccaccgctcccggcctgctgtcataatattcttagttatagtatttgcaaaggtggtttcattctcattgtctttttccccccactcatctagggagccatgcctttttcatctctgcatagccagtgcctagatctagcatttagactgtccctggaacgaatgcaaggtgctcataatatgtttgaatgaattcatgatcaaggtctagtgcaggtagcatctataattaaagaacagaataggtgctatgtgtggctttcagatagtagaagcaaaaacaaaaagaaagc

SEQ ID NO: 680594 - DNA, 1031 bp, Homo sapiens
tggagcatgcacatgcgcagaggagtcatgtgcactcatgagttaaatgctcatacttgcatttaaaactgaattaatgtaacgattaatggtaaaattcatgctacttatttgaaattttagtttttttcttacttagaaagctactaaaaagaaaataagaaaataccatcagaagctgtgaaagagagagtactgaagaaaagaaaaagctttttattttagtggttttaacagcgctttcttcctgcattttgaacaagggcccctcattttcattttgcactgggatccacaaaataagtagtcagcctgaccatcacctagtagatgaaagaacaggattcaaactctggagtgtgtctcactctaaattttgtttgagaccttaagcatgttgtaggttcagagatgggcatactactactagctgagtgtagggggccttaggaaggaagaggtagagaaagaagcagtggtatgccagaactagctcagtcagctcctccyacatcaggagaaagaacctattgttcagttttcagaaattttgcaagccagctgtcacacatggccattactaacaattaaatcacataaacttaaaactaaataaattacatttaaaacaaaggtaataaatactcaacattcattacttcctactattatctagtttcttgaggttatttatgcctattgtatccatatgttggaaacactttgcaatgggctacggtttacatttcttcccaactttgcattcagggacctcacattggtagcctgaaatcagccatggtggaagtatttactacatgaaaatccacaaatgttacaaaatcaggcttcctacccttccccttcttccccagagagctatttactagcacaccaatgagaagaggtatctgaaatgtgtcctaaagaatagatattgaaggctgggcgtgtgactcacacctgtaatcccagcactttgggaggccgaggcgggcagatcacaaggtcaggcattcgagagcagcctg

SEQ ID NO: 680595 - DNA, 1122 bp, Homo sapiens
ttttaaagaaaatcagtaccctaattaccacaccacatgggggtgttttcaccattgatggttttccagsctctaatgccatagtcacctgttaatcattggtgcggggatagttttggtgaagtaaagcctaggaaaagccagaccaactttgtcagattgccttgagtagtgggacatgaaggcaatattttgaaataggaaaaacgaaaaacaaaaaagaagaagggataacttgtcaagaatttctttctgggttagtaagctgactttctataaaatatgaacaaattttctagtcagaggaagattttacctggaaaattttccctaaaaaattatgaaggacagcagtagcccagaatcgctatctcatctcagaaactgaggtttcctgacagcaaagacaactacagagggtggactttgtgtcttacgtgttccctcccactacagtaccaacagctctgaggtaccaccatcacgtccatattttacagatgaggaactgaagtctgaggaggtcaagtgatttgccaaggttttctcatcagggagtgacagagccagggaacaactgtgtaccaagtactcaagaacaataaaagcagctagcatttattgaatactctgcatatatcacctcaacctcacaacatgataaactggatataactgggattgctcctcctttacaaaagaaaaatgaattgtaggggaattgtcacttgccagtggtcttacagctcattggaactgctcttacaccagaaagataaacgtttgccttgggctctgacttttgagaggccagaatggggtccactcctggccaaactcctccccacagggaaagttgtctataaaaccaaggggatgtacaaagagactgcaccttcccttctaaatatgttctttttagcacagaattccctgcccaaactgccccaagtctaccttccagggccactcctgaaatccttccccaggactcactatatagcaggtgtgcacaagcctacatccatctacctaacagtgcagtagccattatgattgaggtgtcttgaccccaggtctcgaaatgaatcatgatttgtctgagccaatcatgataatccc

SEQ ID NO: 680596 - DNA, 1122 bp, Homo sapiens
ttttaaagaaaatcagtaccctaattaccacaccacatgggggtgttttcaccattgatggttttccagcctctaatgccatagtcacctgttaatcattgstgcggggatagttttggtgaagtaaagcctaggaaaagccagaccaactttgtcagattgccttgagtagtgggacatgaaggcaatattttgaaataggaaaaacgaaaaacaaaaaagaagaagggataacttgtcaagaatttctttctgggttagtaagctgactttctataaaatatgaacaaattttctagtcagaggaagattttacctggaaaattttccctaaaaaattatgaaggacagcagtagcccagaatcgctatctcatctcagaaactgaggtttcctgacagcaaagacaactacagagggtggactttgtgtcttacgtgttccctcccactacagtaccaacagctctgaggtaccaccatcacgtccatattttacagatgaggaactgaagtctgaggaggtcaagtgatttgccaaggttttctcatcagggagtgacagagccagggaacaactgtgtaccaagtactcaagaacaataaaagcagctagcatttattgaatactctgcatatatcacctcaacctcacaacatgataaactggatataactgggattgctcctcctttacaaaagaaaaatgaattgtaggggaattgtcacttgccagtggtcttacagctcattggaactgctcttacaccagaaagataaacgtttgccttgggctctgacttttgagaggccagaatggggtccactcctggccaaactcctccccacagggaaagttgtctataaaaccaaggggatgtacaaagagactgcaccttcccttctaaatatgttctttttagcacagaattccctgcccaaactgccccaagtctaccttccagggccactcctgaaatccttccccaggactcactatatagcaggtgtgcacaagcctacatccatctacctaacagtgcagtagccattatgattgaggtgtcttgaccccaggtctcgaaatgaatcatgatttgtctgagccaatcatgataatccc

SEQ ID NO: 680597 - DNA, 2168 bp, Homo sapiens
tgattagatgctgatgcctgaaaatgtaataaaatacgcttgtatttccttggccacggcccttgatcattctctgccttaacatcccttctgttttccctttgcttagctcattctgtttctcacaacttagtgtgggccacccatgatcaaggccagcatgtgaaacacagagaaagacattccatctcaccaggatatccagatgtgagatgaggataaaatgaaattgcaaggatggaatgctttgagagtcttaaaagtgaaatacaactttgaggttttgctatgtggtaaaaccattttttaaaagattaaaatttcaacagccttcagaaggttttcttgttgaaaaacatatttatttttcttcataaggacaaaaacaatccctctcagacttagtgcgcggggattcttactataatttaactaatgtgggtaacatttggcatgctctggagtctttcacagcttgccttggaagagtttatggatgaatttttttatagcttccatttttttccagtagagttagtcaatgtgtttatattttacttgatactagtttaagaaatttatacagtcagtagccatttcttcagtcatggaattcttttatttcacagtcaataaaattttaagatgtcacaatgcctttgggcttataataatattttgtcctttacatccaggttcaactctgtggaagtagatataggtgagcatggcataatttatgacattttttgaagccatagtttattagcaaatataagtcgagatctaaaagatctttttttgtgaattgataacaatttttgagttaaaggaggatgctttttggtttttgccactccttaagagggcaggggaagctgagaaaaatttggagtcaaccaaccacacatgttgtccccggcaagttgcaaagctgaagaattatggcactaatttctgaccagctcaccataacatgggaagtgaagatgtggtgggaaataaaatattcctctttgttttctgccaacaggtaaagtagttcttattgtcctcgctggatagatgctgtaactgctgcttgtcaaatsctcatgggctggtcagacattctgtggtggcttgagccactgtcatggccacagtgccagactttctctagcagtttgacttcacagtggtcccacagaaaattttaggagtgaatatagaagaatgataaaataatcataggtaatattcatttatcagtttctatttttcaggcattagtctaataaatttaattataaattaacttattaatatgtgctacaattctaggagccagtagataattcttgtttctatttcatagatgagggaactgaggcagaaaaagtttaagtaagttgcctgaagttacacagataacaggtggtcacattttcagctattgcaacataataaataatcacaaaattacaatgtaatataataatacagaatgattctcacaatgatgatatatagacatatgaactacacacattcatatatatgtttgtgttgttattatccaaagcagcccctcaaatatctgggattttcattatacttcttatagatgatatgtggtcagctgaggttcaccaaatctagactgagaatggatgggagcttctgatttaggctatgacagttggggcagctgggctttgtaccataggtgggctggggcaattctgtttcacatgtttcttatcccctctggactaatgagttatcaagtcaatagtctcatggcagtgccaagagcagaaagtgaaaatgcacaaggtcttacgaggcccagccttggaactaacttagcctcacttccgtcacctttcagtaagccgacagaagtcacagagccaaggaaaaagtcaaggaatcgggatgtactcttttctcacaatgagaccatggcaaggatataggcatacagagccactgagaacgggggccaatggttcggttcatcatgtgatgaaagagacgaacttgggcaatcttgtccatagtccttgctcacaagtgtaatgctatatttcctctcaagggatgcttctgtttcttctcttcatgaagagatatattgtaaggagccttttttgagaaatgatggataaaaaattaggctttca

SEQ ID NO: 680598 - DNA, 2168 bp, Homo sapiens
tgattagatgctgatgcctgaaaatgtaataaaatacgcttgtatttccttggccacggcccttgatcattctctgccttaacatcccttctgttttccctttgcttagctcattctgtttctcacaacttagtgtgggccacccatgatcaaggccagcatgtgaaacacagagaaagacattccatctcaccaggatatccagatgtgagatgaggataaaatgaaattgcaaggatggaatgctttgagagtcttaaaagtgaaatacaactttgaggttttgctatgtggtaaaaccattttttaaaagattaaaatttcaacagccttcagaaggttttcttgttgaaaaacatatttatttttcttcataaggacaaaaacaatccctctcagacttagtgcgcggggattcttactataatttaactaatgtgggtaacatttggcatgctctggagtctttcacagcttgccttggaagagtttatggatgaatttttttatagcttccatttttttccagtagagttagtcaatgtgtttatattttacttgatactagtttaagaaatttatacagtcagtagccatttcttcagtcatggaattcttttatttcacagtcaataaaattttaagatgtcacaatgcctttgggcttataataatattttgtcctttacatccaggttcaactctgtggaagtagatataggtgagcatggcataatttatgacattttttgaagccatagtttattagcaaatataagtcgagatctaaaagatctttttttgtgaattgataacaatttttgagttaaaggaggatgctttttggtttttgccactccttaagagggcaggggaagctgagaaaaatttggagtcaaccaaccacacatgttgtccccggcaagttgcaaagctgaagaattatggcactaatttctgaccagctcaccataacatgggaagtgaagatgtggtgggaaataaaatattcctctttgttttctgccaacaggtaaagtagttcttattgtcctcgctggatagatgctgtaactgctgcttgtcaaatcctcatgggctggtcagacattctgtggtggcttgagccactgtcatggccacagtgccagactttctctagcagtttgacttcacagtggtcccacagaaaattttaggagtgaatatagaagaatgataaaataatcataggtaatattcatttatcagtttctatttttcaggcattagtcwaataaatttaattataaattaacttattaatatgtgctacaattctaggagccagtagataattcttgtttctatttcatagatgagggaactgaggcagaaaaagtttaagtaagttgcctgaagttacacagataacaggtggtcacattttcagctattgcaacataataaataatcacaaaattacaatgtaatataataatacagaatgattctcacaatgatgatatatagacatatgaactacacacattcatatatatgtttgtgttgttattatccaaagcagcccctcaaatatctgggattttcattatacttcttatagatgatatgtggtcagctgaggttcaccaaatctagactgagaatggatgggagcttctgatttaggctatgacagttggggcagctgggctttgtaccataggtgggctggggcaattctgtttcacatgtttcttatcccctctggactaatgagttatcaagtcaatagtctcatggcagtgccaagagcagaaagtgaaaatgcacaaggtcttacgaggcccagccttggaactaacttagcctcacttccgtcacctttcagtaagccgacagaagtcacagagccaaggaaaaagtcaaggaatcgggatgtactcttttctcacaatgagaccatggcaaggatataggcatacagagccactgagaacgggggccaatggttcggttcatcatgtgatgaaagagacgaacttgggcaatcttgtccatagtccttgctcacaagtgtaatgctatatttcctctcaagggatgcttctgtttcttctcttcatgaagagatatattgtaaggagccttttttgagaaatgatggataaaaaattaggctttca

SEQ ID NO: 680599 - DNA, 2440 bp, Homo sapiens
atttcttattatgtatcatttaaatcagatatttagcatctgtcaaatgataattgtgtttttaaaaacctagcttattaatgaaacaaatttagtggaaaaaacagacacaaataataaaataatagaacatacttttataagtaaaatagtaagttgaaatatatgaattttcataatttataagaaaataaataccttcttaatcattttgtgtatgcatgtagaattcaaaaacatatgtaaagctatttaatttatgaactaacatttctaagtagctggccttattaattatatgggtttatgggcatcattttatatcagattcataggtacaatgttgttaggtgaattaaaggggtgaacagatgaattacaagtaagaagttcagtttctttattttccaaagtaatgaagaagaggaaaatcagtccatgtgtagcaggaagagccacagccaaaacccctcagacaccgagttaaagaaggaaggggtttattcggccgggagcatcggcaagactcctgtctcaagagccgagctccccgagtaagcaattcctgtcccttttaagggctcacaactctaagggggtccgcgtgacagggttgtgatcaattgagcaaggagggggtacgtgactgggggatgcacacaccggtaattagaacagaacagaacaggacagggatcctcacagtgcttttttatgcaaataactgattaggtcaggggtcgatctttaactacaaggcccagggtgtggcgccaggctgtctgcttgtggatttcacttctgccttttagtttttacttcttctttctttggaggcagaaattgggcataagacaatataaggggtggtctcctcccttacatgcacttaggtcccttatttccagaactttctgatagaaatattatgttggcaacatatgtaattaaaatcttctgatagccacattaagaaataaaaagaaatttgaaattaattttatatttatttaactcaatatatccaaacattatcatttcaacttacaatcaatataaaaaattattaatgagctaatttaccttcttttcttgccattacgtttttgaaattcacagtgtcttttacaacacccctcagtctgcactcaccacattcccattgctcaatggacaaacgtggcttgtgggaactgaattagayagtgcaggcttatatcttcaactcgaatcttctaacttggagaagtgtgtgtgtatgtactaaagtaggaagaaggtgacaaaatacgacccacaatgaattcagaagatggttctttctttgaaacttccctgatggcccacataatgatccacagccttattattttttcagtcaccaaaatcatagcctaacgaaggccatgttttggtcactaaaattctcaagccaacttcatccacctgcctgctctacctaagactcctgggacctatgtcgtagttggagcttggttattggtggaagtcagtgtaatcagctggattctccagtggaagagataatattaagaaaccttatcaaggtgaacataatttttccttttcatcacaaatgttctggaaatacatgcataggtttgtatggacggaatattaaaaattccatccataaaacaaggccaagcaaagatcctcgtctcctccaactggagatcagccattttcttggggtcagtgggtaaatacatctttggctcatttctagggtggagagaaaatagctcaaacctatcaccctaggaaattattgttcttttggtctttcagcaaattttcctaaacgtctcctttcaattttttagaaccccttatccacatggccgaattaaggtcatagagtttcttttcacctggctcattcaaatagtgacatattgtcctttgctgttttcatatgtaacaaaattacatcattttaaggctgaatgcccattcctccacactgaatatttaatcaataagctgaaaagcaaaattaaaatagtaaaatatattggtaattgtctgataagaagttttgtttagagctcagagaactctgttctttgaaaaaaaaacataaggtccagctgtgaaatgcttcctcagttatcagtgtgtaagatcactctgttttcttcttagcaaaaataaataaataatcacagacatataataaataaaaattctgggcagctgtaaaagtcaggggagccttgtgttgagcattctattagctttcagacacttgaaaggtgttaagtggcttgaaaatctgtgctaagtgaggactggtgaaagtgtaagttcacttccactgtctggccgagaacatttcagtatcttcattgaaccagtgtaaatgaggctgtcactagctgcaatgttgagagacggccaccaattgttaaacaga

SEQ ID NO: 680600 - DNA, 2440 bp, Homo sapiens
atttcttattatgtatcatttaaatcagatatttagcatctgtcaaatgataattgtgtttttaaaaacctagcttattaatgaaacaaatttagtggaaaaaacagacacaaataataaaataatagaacatacttttataagtaaaatagtaagttgaaatatatgaattttcataatttataagaaaataaataccttcttaatcattttgtgtatgcatgtagaattcaaaaacatatgtaaagctatttaatttatgaactaacatttctaagtagctggccttattaattatatgggtttatgggcatcattttatatcagattcataggtacaatgttgttaggtgaattaaaggggtgaacagatgaattacaagtaagaagttcagtttctttattttccaaagtaatgaagaagaggaaaatcagtccatgtgtagcaggaagagccacagccaaaacccctcagacaccgagttaaagaaggaaggggtttattcggccgggagcatcggcaagactcctgtctcaagagccgagctccccgagtaagcaattcctgtcccttttaagggctcacaactctaagggggtccgcgtgacagggttgtgatcaattgagcaaggagggggtacgtgactgggggatgcacacaccggtaattagaacagaacagaacaggacagggatcctcacagtgcttttttatgcaaataactgattaggtcaggggtcgatctttaactacaaggcccagggtgtggcgccaggctgtctgcttgtggatttcacttctgccttttagtttttacttcttctttctttggaggcagaaattgggcataagacaatataaggggtggtctcctcccttacatgcacttaggtcccttatttccagaactttctgatagaaatattatgttggcaacatatgtaattaaaatcttctgatagccacattaagaaataaaaagaaatttgaaattaattttatatttatttaactcaatatatccaaacattatcatttcaacttacaatcaatataaaaaattattaatgagctaatttaccttcttttcttgccattacgtttttgaaattcacagtgtcttttacaacacccctcagtctgcactcaccacattcccattgctcaatggacaaacgtggcttgtgggaactgaattagatagtgcaggcttatatcttcaactcgaatcttctaacttggagaagtgtgtgtgtatgtactaaagtaggaagaaggtgacaaaatacgacccacaatgaattcagaagatggttctttctttgaaacttccctgatggyccacataatgatccacagccttattattttttcagtcaccaaaatcatagcctaacgaaggccatgttttggtcactaaaattctcaagccaacttcatccacctgcctgctctacctaagactcctgggacctatgtcgtagttggagcttggttattggtggaagtcagtgtaatcagctggattctccagtggaagagataatattaagaaaccttatcaaggtgaacataatttttccttttcatcacaaatgttctggaaatacatgcataggtttgtatggacggaatattaaaaattccatccataaaacaaggccaagcaaagatcctcgtctcctccaactggagatcagccattttcttggggtcagtgggtaaatacatctttggctcatttctagggtggagagaaaatagctcaaacctatcaccctaggaaattattgttcttttggtctttcagcaaattttcctaaacgtctcctttcaattttttagaaccccttatccacatggccgaattaaggtcatagagtttcttttcacctggctcattcaaatagtgacatattgtcctttgctgttttcatatgtaacaaaattacatcattttaaggctgaatgcccattcctccacactgaatatttaatcaataagctgaaaagcaaaattaaaatagtaaaatatattggtaattgtctgataagaagttttgtttagagctcagagaactctgttctttgaaaaaaaaacataaggtccagctgtgaaatgcttcctcagttatcagtgtgtaagatcactctgttttcttcttagcaaaaataaataaataatcacagacatataataaataaaaattctgggcagctgtaaaagtcaggggagccttgtgttgagcattctattagctttcagacacttgaaaggtgttaagtggcttgaaaatctgtgctaagtgaggactggtgaaagtgtaagttcacttccactgtctggccgagaacatttcagtatcttcattgaaccagtgtaaatgaggctgtcactagctgcaatgttgagagacggccaccaattgttaaacaga

SEQ ID NO: 680601 - DNA, 2440 bp, Homo sapiens
atttcttattatgtatcatttaaatcagatatttagcatctgtcaaatgataattgtgtttttaaaaacctagcttattaatgaaacaaatttagtggaaaaaacagacacaaataataaaataatagaacatacttttataagtaaaatagtaagttgaaatatatgaattttcataatttataagaaaataaataccttcttaatcattttgtgtatgcatgtagaattcaaaaacatatgtaaagctatttaatttatgaactaacatttctaagtagctggccttattaattatatgggtttatgggcatcattttatatcagattcataggtacaatgttgttaggtgaattaaaggggtgaacagatgaattacaagtaagaagttcagtttctttattttccaaagtaatgaagaagaggaaaatcagtccatgtgtagcaggaagagccacagccaaaacccctcagacaccgagttaaagaaggaaggggtttattcggccgggagcatcggcaagactcctgtctcaagagccgagctccccgagtaagcaattcctgtcccttttaagggctcacaactctaagggggtccgcgtgacagggttgtgatcaattgagcaaggagggggtacgtgactgggggatgcacacaccggtaattagaacagaacagaacaggacagggatcctcacagtgcttttttatgcaaataactgattaggtcaggggtcgatctttaactacaaggcccagggtgtggcgccaggctgtctgcttgtggatttcacttctgccttttagtttttacttcttctttctttggaggcagaaattgggcataagacaatataaggggtggtctcctcccttacatgcacttaggtcccttatttccagaactttctgatagaaatattatgttggcaacatatgtaattaaaatcttctgatagccacattaagaaataaaaagaaatttgaaattaattttatatttatttaactcaatatatccaaacattatcatttcaacttacaatcaatataaaaaattattaatgagctaatttaccttcttttcttgccattacgtttttgaaattcacagtgtcttttacaacacccctcagtctgcactcaccacattcccattgctcaatggacaaacgtggcttgtgggaactgaattagatagtgcaggcttatatcttcaactcgaatcttctaacttggagaagtgtgtgtgtatgtactaaagtaggaagaaggtgacaaaatacgacccacaatgaattcagaagatggttctttctttgaaacttccctgatggcccacataatgatccacagccttattattttttcagtcaccaaaatcatagcctaacgaaggccatgttttggtcactaaaattctcaagccaacttcatccacctgcctgctctacctaagactcctgggacctatgtcgtagttggagcttggttattggtggaagtcagtgtaatcagctggattctccagtggaagagataatattaagaaaccttatcaaggtgaacataatttttccttttcatcacaaatgttctggaaatacatgcataggtttgtatggacggaatattaaaaattccatccataaaacaaggccaagcaaagatcctcgtctcctccaactggagatcagccattttcttggggtcagtgggtaaatacatctttggctcatttctagggtggagagaaaatagctcaaacctatcaccctaggaaattattgttcttttggtctttcagcaaattttcctaaacgtctcctttcaattttttagaaccccttatccacatggccgaattaaggtcatagagtttcttttcacctggctcattcaaatagtgacatattgtcctttgctgttttcatatgtaacaaaattacatcattttaaggctgaatgcccattcctccacactgaatatttaatcaataagctgaaaagcaaaattaaaatagtaaaatatattggtaattgtctgataagaagttttgtttagagctcagagaactctgttctttgaaaaaaaaacataaggtccagctgtgaaatgcttcctcagttatcagtgtgtaagatcactctgttttcttcttagcaaaaataaataaataatcacagacatataataaataaaaattctgggcagctgtaaaagtcaggggagccttgtgttgagcattctattagctttcagacacttgaaaggtgttaagtggcttgaaaatctgtgctaagtgaggactggtgaaagtgtaagttcacttccactgtctggccgagaacatttcwgtatcttcattgaaccagtgtaaatgaggctgtcactagctgcaatgttgagagacggccaccaattgttaaacaga

SEQ ID NO: 680602 - DNA, 623 bp, Homo sapiens
ttcaattatgtggctatagcacattttatgtatccaatcatcagttgacaaatatttgggttgtttccacattttggctattatgaatagcactgccataaacattcacatacaagattttgtatagacatatgttttcagttctcttacataaatacctaggagtgaaattgctgggtaactgtatgtgtaaccttctgagaaaccaccatactgttttcaaagcagcattttacattcccatcagcagtgcatgagggttccaacttctccacatcctcaccaacayttgttattatcagtctttttattctagctatcctagtggatgtaaagtgctgtctcattgtggtgttcatttcctgatgactaatgaagttcagttttagatacctggatttgacatgcctgtgaaacatctaggaagcttctggaaattcagctttaagtatacagcaagtctaaactagggatagagcctgtgtttacatttgagagtcatcagcgtaataatatcaaataaagtatttctatttgtgggatttttaggcactgtggcattaggtagaaactatttgggacatgagattgtcccaagaacctcagattgtaccatgtgggta

SEQ ID NO: 680603 - DNA, 629 bp, Homo sapiens
ttttgcctctctgccaccctcctggaggtctgtagggagtagagaagagctgagtgtgctaatacccttttctctatgcacgtgtatcatggttggccccatttatggccttcctataatgggaaaagcactgtgctgggtgcctcacgtgcattaatctctaatgatcccagtgaaccttcagaataagtattagtgctgtcctcacacttataaggaaattaatggttataaacataaaataactcatcaagggccctgaatttatagctggcctagacagtgttcaggccagatatattggcctccctgccccaagcctaatcctggctgttttatcaaataatctcatgaacttcaccctggactatgcaaagtgytaacaacccaggcaacaatggagtggctgactaaatttaactaactgttttgttaccacctttagaaagagaccattacctatagggttgctcaaaattacagggttcttgccacccatacatactatctgcaattaattagatattacagatgcagaaatatgtttataggcctgagattttaaaaatatagtactcctggactccttttgagagttattaaaagtattctggctgggcgtggtgact

SEQ ID NO: 680604 - DNA, 959 bp, Homo sapiens
tgcctaaagtttgatctctggaggtacttttccatacacattgattstcttttcctcattccctatttttctttttcctttcttctatttacagcagtttggcagctctaggcttctgctacctctctccctaattctcactccattctacataataaaggtaaaggaatagctaagaaagaaaattattctatctctacagaagtgggtgtagttataacaatggaatctagtagctaatgcattgcaaattctttacttagtgattaatctttttcttttatccctgtcaaaagttggaggagtagcaaaagcagcatttcctagagtataattgcaattaaattccaaaatgtgaataccttttcttctcctaagtgtttgggtaaagctttcaacgttgttgatgattttagtacaaatctctccaagtgacagtacttcattgcttactcttcctctgcttctgcaaagccaatttgttatttggagaatggagtgtgtaaaggccatagagcaaagtctttcatgctccgtctagcataaagcagctgcaaaaacacatgatttggagcatcaaggctattgctgaagactttcctgttaatgcagatgctcaatttaaatgcatgtgcttatagaccctgaaaggagtaaggtcgacttggtataggaatactaaagatgcatggtgtttctttcattttggtagtcacaagggtagattgtatccagtaagtaaaacactctatggaatgcatgcctttctctgacagtagcaaattccctttctatattttatatacatatatatatataaatatatgctatatatactcaataaatgcatgtatgtgtttatgagtgtacattattactgttattactaaaatttattattgtagtttccctggaaggtactggtaaaagcaaatgctctcaagcatttttgactttta

SEQ ID NO: 680605 - DNA, 1189 bp, Homo sapiens
tagtaatattggtgaaaatgtyctatggatatagaattaagaaaaggtgagttagacattagatacagagacaataatgattcaatggaaattgatgaaatacctaaatatgagcacaggttccattcaattttaatgatacgaatgggataaaagtatatttaaaatgaaaaataaatcattaaagaagccatgtttgtgtgtaaaggaaaatagtgacaaatgtcaaagacaggaaaagcataattggatttgataatcagactaatagatggtaaaaccaggactctaactcaggtccatctgatggatgggctgttccatttataattagcaaatagcctttatgatatgtaaaagttgtgcttgaatagagataagagtagtgctagtttgttgagacgttaaatgagataacatgttaaagtataatgtcaattaaagagctatacaaatataaattggtataaaatgttgatatgaatgtttccatataactcaaaaattgagttttcattatgtagaattccagtatcaaaagtttctatttggttggagatgaaatattgtttaatatgagatattagtttctgttttgtccttcttatttgcatacttgcaaattcccagatggtagccaggcctttgggcttctttgtctttggagcatatgttgtgataggctgaaagagaaagttgctcgacttcttcctggattttgttctctaaatcctaaatgttgagagtttatgcccagaggaggagagggaggaatagaatttgtgaataagataggtccttattggacccaggtcagagttggagcatctgggagtagtgaggactcttattttccttgcttcaggcatgcagtcatacctaagaggaaaaggctgcgtggtgtatttaggaacaacatattagtgtgctaggcactaaggctgtcagcctcagtaagaatctcagtgctcaagttttagaaacggcagagaattgacaacttcttaagggattatgcagcctgggactacaaatattaacagaggtgaccaggtggaccaaagaccaaaggatccacttaccaaatactctttctagatataaaagactctaaagatctctagactctctagagagggaaaaaaatctcaataatgcacacgactgaaactcctcctttctgtttagt

SEQ ID NO: 680606 - DNA, 2011 bp, Homo sapiens
tgggacaaggctcagccagaatgtcctaactctgtccagtgtggtgtggactgggtgtcactgggattagaggatccaagatgtccttagtcacatatgtgagcacatgatgctggcagtctgccaggacatctttatgctcttccactcagtctctcttcccagtagattaggctggacttcctcacttggcggtcgaggttccaaaagtacaaaagtgaaagctgtcagacctcataagctctaggtatagaagtcacatggcacaatttccaccatattctatcagtcaaaacaacaactagactggcccagattcaagggggagaggaaagagacctcacctactgatgggacttctggcaggtccaaatgtggatgagactcctatagagatctgtgaactaaaaggacaaattgcctgcccaccacacacaacatgcaagggtatgacacgaacactcccttcaaggggatgttgagaagcacaaagcattcgctgattcagagcaatcctgaaatccaggcctatactgtcagctcccttgactccaggatcaatcaacattccttaattagagtccatttctgctctctggaaatggttccccaatttattgttttcctcaggtcttagatttgctctctggactttgctctttgaaatacttttcattttctataagaaatggactgtgtcctcagcggagcagctttcttagcctgctttcttcccaaagaaagctggaggcccagagacctctttatttttgatggcctctgtcctaaaatacaaactggtggggctttcttgaatacacttctcttaaaaacttcatagatttttccgtgaatcttacggagattattttgtgccactgtggtacatcgtctcccatggccacaatattccttccaatctcacatgcacttttgaaatgtgactttgccagtatttccatcatgatttgaggtgtgttacccctgtcactagatccaagctgaaccagtgacttgctgtgattaacagcatgcaactgaagtgattgtgtatcacttcaagaccaaggaaggccttaagaaacttggaagcttctacttttgtactcttagagccgtgcaatgccacagaagtcagactatcctgttagagatagagaccaagtggaagagcacgaagcaccccaggctcccagcagcaatgtggttccagacatgagtgaatccagtgatatcatgtgtccctctgagccctgccagaatttctcatctagagaactgggaatagcaaaacgattgttgacttaagccactaagttctggaatggtgtgatgtacaatggtagataaccagacgaagagggctggttggcttctaagagctttcacaggtatgttgtcatcttgttaaactcattcaattgtaaagactcaaaactttagtcttcattgagatcccagcataggtcagagtaggtgataatgacttatgttaaccaaactcacagaaaatgatagataaattacaatatcaattcactcttataccaagaaaaatgttgctgttaggtggacaagatgtgtgttcccatcttctggccagtgaagcatctcatagtggaaaagctatatggggcaacagtggataattagagggttatttggtgaaaaaaatcaagaatgaggggcgtcaggaacatagaatgcccaaatgcatgcagctatggccatgccttccagaagggtttaactttcttactgtttgaagggacaaaaaggcacgctggcawatacttggatgggcacttcacaagttgtcccctctgccctccctctctttatttttagacaggtttagatatttagttaaagttaagatttgtaagttctaaagtctttctttttaatttgatatttctctattctagggcttctcaaccgaggacaattttccccccagaggaatgttggcagggtctagagacattttttgttgtcacagtttgggggg

SEQ ID NO: 680607 - DNA, 2011 bp, Homo sapiens
tgggacaaggctcagccagaatgtcctaactctgtccagtgtggtgtggactgggtgtcactgggattagaggatccaagatgtccttagtcacatatgtgagcacatgatgctggcagtctgccaggacatctttatgctcttccactcagtctctcttcccagtagattaggctggacttcctcacttggcggtcgaggttccaaaagtacaaaagtgaaagctgtcagacctcataagctctaggtatagaagtcacatggcacaatttccaccatattctatcagtcaaaacaacaactagactggcccagattcaagggggagaggaaagagacctcacctactgatgggacttctggcaggtccaaatgtggatgagactcctatagagatctgtgaactaaaaggacaaattgcctgcccaccacacacaacatgcaagggtatgacacgaacactcccttcaaggggatgttgagaagcacaaagcattcgctgattcagagcaatcctgaaatccaggcctatactgtcagctcccttgactccaggatcaatcaacattccttaattagagtccatttctgctctctggaaatggttccccaatttattgttttcctcaggtcttagatttgctctctggactttgctctttgaaatacttttcattttctataagaaatggactgtgtcctcagcggagcagctttcttagcctgctttcttcccaaagaaagctggaggcccagagacctctttatttttgatggcctctgtcctaaaatacaaactggtggggctttcttgaatacacttctcttaaaaacttcatagatttttccgtgaatcttacggagattattttgtgccactgtggtacatcgtctcccatggccacaatattccttccaatctcacatgcacttttgaaatgtgactttgccagtatttccatcatgatttgaggtgtgttacccctgtcactagatccaagctgaaccagtgacttgctgtgattaacagcatgcaactgaagtgattgtgtatcacttcaagaccaaggaaggccttaagaaacttggaagcttctacttttgtactcttagagccgtgcaatgccacagaagtcagactatcctgttagagatagagaccaagtggaagagcacgaagcaccccaggctcccagcagcaatgtggttccagacatgagtgaatccagtgatatcatgtgtccctctgagccctgccagaatttctcatctagagaactgggaatagcaaaacgattgttgacttaagccactaagttctggaatggtgtgatgtacaatggtagataaccagacgaagagggctggttggcttctaagagctttcacaggtatgttgtcatcttgttaaactcattcaattgtaaagactcaaaactttagtcttcattgagatcccagcataggtcagagtaggtgataatgacttatgttaaccaaactcacagaaaatgatagataaattacaatatcaattcactcttataccaagaaaaatgttgctgttaggtggacaagatgtgtgttcccatcttctggccagtgaagcatctcatagtggaaaagctatatggggcaacagtggataattagagggttatttggtgaaaaaaatcaagaatgaggggcgtcaggaacatagaatgcccaaatgcatgcagctatggccatgccttccagaagggtttaactttcttactgtttgaagggacaaaaaggcacgctggcatatacttggatgggcacttcacaagttgtcccctctgccctccctctctttatttttagacaggtttagatatttagttaaagttaagatttgtaagttctaaagtctttctttttaatttgatatttctctattctagkgcttctcaaccgaggacaattttccccccagaggaatgttggcagggtctagagacattttttgttgtcacagtttgggggg

SEQ ID NO: 680608 - DNA, 2204 bp, Homo sapiens
tttggctattcagggtactttgtaactccaagtgaatttgggggttgttatatttttgtaaaaaaaaatgccactggtattttgataagcattgtatttaatctgtacattgctttgggtagtgtggacattttaacaatattaagtcctctgatccatgaacacatgatgtctttccatttatttgtatctcctttaattcatcagtgttttagttttcagtgtataatgatttcacttccttagttttttcctaagtattttattctttttgatgtttttataaataagttgttttcttagcttctttttagaaaagctcacttttctaagatgcaactgatttttgtttgctgattttgtatcctgcaactttattaaatttattagttctaatagtgtgtgtgtgtgcacgcgtgtgcacatgtgtgtagaattctggcacaaagcttattgtcagctttcaggccagatatttgttggttttgatgggtctctaaacgacccactggtgtgagagaattccattcctagctccttctaaatgcctgtctgcaaacttctctttgtgttaacatcttcctttctttgaaataaaaccatccatcatcaagagtcctagcaaaaatcttgctgtcagctttcaggactcgatatttgtaggttttgctgggtccgtaaaagggccactgttgagagagaattccctcctcgctctttctaaatcccagcctgcaaatgtctcttggttccctttagatttccttgccctgcactgcagtctataaactgcctccagtcagtaaggtgagaaaatcatagggctcacatagtttgtttctcgtctttcaagggatcaaggtcctatactgcctgttgtccgatgtcttctaattctgtgtcacaagagggcaactgccaaagtagttgatcctattctaggtctcttatgtgcacactaattctcattatagcccatcaaaatggaagcttatagtcatggcagaaggcaaaggggagccagtgtgtcatacagcaagagaggaagcaagagagatgccaggctcttttaaacaactagctctcacatgaactgatagagtgaaaactcactcattaccatggggcgggcaccaagccattcttgaggaatccactcccctgacccaaacacctcccaccaggccccacctccaacactggggatcacatttcaacatgagatttggaggggacaaatacccaaaccatatcacckggggatttgaatgcaggaagtctggcccatggttttaatcactctactgtatggactctcaaggaagtagtagaaatataaaaatatctaaagcatactaagatatttaaaaatctctaaagatactaagatatttaagatatttaggagtaagatgtagccctgatctcaaatttaagtaagaggatgaatgcaaagctctgggctgtagataggagttactttcatgtctacagaatggtctgggcttttattcaatcaatgcagaataggtgcagggtggggggcaggtgttccataaatactaagagacatcattgataggggaggcaggagggtgaaacatgcttccaataaaaagaagagtgccccctgaactaaccttgacaacatcaatattccaaagagtgatgtgttcaatttgcccagcaaggctgagagtcagcagtttgcaggacagacctgattgtctaaagagcaaatcagagaggatactttgcaattagagaagctgctatgaaggcaggaaagtcagggttctatagaaaaataagtaactgctgactatatagaatggctactgtctcacaacgaaaagtaacaggcttgatgtctgatgtattctttacattgaagaaactgtctctattaatcgtcctcttagaattattccctctggcagtgaatggggtcttcacagttcattgaatcaatgcacttgcctgaaaaacatcactcttagatgctccagaaatgccaagagttcagggggtaaatgctattttacattgtaaatgttttatcactatccttttgaaagtaataactaaggaggctccataaagggtgacttatccttttgtggctggttgttgtcttttttttttttgactcaacttgttacaggatgaatttctcagctatattaacgctgtaccaggcattc

SEQ ID NO: 680609 - DNA, 646 bp, Homo sapiens
ggaaaaactagaatcaaatgggaaagccaaagatacacttttaatatgaagtagaagttcagtgaaatagatgtatacagtgtccactctgatcaaccagagagagtgcactaagtccggattgacaaactcatgagacatgttagactttacccaacataaagtttattaacttgaagaaggaatacaggacagacagcaacacagcatgcacagcaacaacataatcatcattttgtgattcataagcacaaattcccatgccccggtcactccatccttagaacatgtgtgtcctacatctagttactggagtattctctgtcacaggcctcatgggtctgaatattttgacttgttaatgaagtcatcaaaggaataggctaagtctcatactagatgagattggattggcactgaccacttcagttccagaaactcagtggctctgaagtctcttcgacttttgtaccttgctaatcacatagctccttcagagtacaaaattagtatctattttytggtgcagttgcatctcatcaatactaattactcattacttgataaaccactttgacaatgaagtgtaggtgcttagtctagttcccagtactcagaaggacttaatagaatccaacacacaccc

SEQ ID NO: 680610 - DNA, 603 bp, Homo sapiens
tgatgcaattattgtttgtcatttttggaatatactccctttgtagctttaaccraagaatcttttagttttgcataagctgtgtctcctattggaacaacagtaaacaatatggtctcttttattcttgaaattacagggtcatacttaattcctgaattttatatttcagtataaatcttaccaaatggtaaaaaaaaagtacagtggtattttaaaatacaaaataaatgtctgttttatggaaaactacattttctatctaaacagacagctcatctcattcaaacaatagcccaaattaatattaattctaaatcttcaaaatgggagaaactgcttttcagtttaagtgattccaggaaaaacagacatggttaaattgctcctctaaaaataaaatctattaatcctttactacaacttatttatagaaatatatttgcatacactctttagtaaagcacctttcatgttatacccgtttatagaaaaaactttatgtacggtgtggtgattttaacacttagataacttcttcatggtccaaaatggttcctagatattaaatactgcttcattcagcacaatttttttgtatat

SEQ ID NO: 680611 - DNA, 615 bp, Homo sapiens
tgtctggtttggacactaagatgtgatatacaatccccctttctcatttcctatcttgacaatccatacaacccttaaacaaagggggcaaaatcacttttggaaaatcttcttacaaagtgtgaatatctaatatcccaggcacatggtcagttaatgtatttgagcatacacgaaggaatttgctgaatgctgacagcaccggctaacacttcattttactattgcatatttatgaaattaatgatataatgcttaccatccctcgtaactttaactctggatgatggtatttgatcctgtgggaatgcattgtcattaagcccagaattaaaagcaagaataatctcaaattttgagggggtgacaaagaaagatgaatatgagagactacattgtatattaaatgtaggagcttaatgagaacaaagtaaaacaaataaaaaaataagtcaggtatttttccccaatatgccagctaaggttttatttttacagaagtgacccatgytcacttatatgattgagggattaccaaatcccaaatcctgtcagtctaagtatgtttcatctccagatgaatatatctaccacagactccgtgcctcactgtaa

SEQ ID NO: 680612 - DNA, 631 bp, Homo sapiens
attcttccattgtaatttattttagttgccgtgtagtattttgctgcatgaccatagcattaattgtttttcagttctactgtttttgtatcagagttattagttttttaaaacaaattgtttccctttcatgattttatattctttaaaggagtttgcataagatattatttttccttcartgtttgacagaaattaatggtgaagctaccttgtcctagagttttaattgatggatagctttcaataacatatttaatatatttaataaatatttaaatataagtgcttgtaattcctctttcaacagatttgcaaagctgtgtatgttttcctaggcatttactaagaattataactgatcaatatcgttggcataaatatctcaatatttactaacattaatatctttctcccattcctgattttggtaattagctttttcttactttttattccagcaatctaaaaaattgagatgtttaatatttttctctattttttcctattttgttaatatagttatgttcttatattgctttctttttttcacttttttggaaattcagtcttctgattataacttcttcagaggacacttagatgaacaattttcagccactcttttttt

SEQ ID NO: 680613 - DNA, 1394 bp, Homo sapiens
ctcccccaacactactgacagcttcaccctgagaaagtcacatgcattctcctgtgatctgcagcccatgcttgagtgtggtttctcaggtaggagcctattgggtgggaacacgggcaggtttgtaaacttagaacaaagccacactaactggaccttgtggtaattgaaagcacaaccttggcctttttgtaccagactgtaatcagctgagttggggaaatwttttcctctgataccgggaacagggataacaagaagggggtggcctgagtacaccaagcgagctccctgggcagagctggctttttcagcacacctttgcatgaatgggcacagtggcacgacactcccaacaggacatgtatattcagaaacccttttgagatttctccctgttctccttcccttgtcattcattattttatttcctttaggtttgattaaatagcctgctctgttaccagaacaaaattaatgattcaagtgtacaaggaaccaaattaatctctcttgacctctctaatatgaagtgtaatcttttgtggctgtaaaaaagagaactttgtacaaactgaggttaagcatgattaaagaatgcctgtgtaacatgaaaatattctgcacattattttcctggtgagaggttttacaacgtcaggaaaatactgttacagatatatttgtttaaaaaggatcattatcttaaaggtaatgttggaatccttaaggtttgggacagggagaagtttagaaaaaaatacagttctatacataaaatggaagttggtattttacttttagttccttgtcatgtctaaattttcactacaggagaaatactatgagtcgtagcagctacagtttttacatacttggttaattagcaattcttaccaaaccgagtgtatcatttctctttagaatcctacatggcctcgattagacatatttacgggaaaagtcaatggataagacattagaggccaacctcaaagtcagaatagagcaaccgtagaccttagagaagtgctttattagccaagaattggttggttattgatcctggtctgtgtctctggtcacaatagcacttaccctaatttttctagtgtaaatataagtaaatttgaatgggtgttgctgaaaacaatctgtaaatctacattttgtggttttggttgtaattgtagttactggaaggttcaatatttggggcatgtggaggagacaaggctgtggcctggtactctgctctctgcaaatacctcctgaagcactttctcaagggctattaaagtgactctggctctctttgctcagaagcacagaaaccacatgggtactcagccgaaaggaaactgggggctgggatgagtattgtcagaagatag

SEQ ID NO: 680614 - DNA, 1336 bp, Homo sapiens
aacgtttaacaaagcatgtgtttttgtgtttttgtgtttttgtgtgtgtgtgtggttttttttttgtttgtttgtttttttccctgaggcagggtgtcactccatcaacccggctggagtacagtggcacgatcttggctcactgcaacctccacctcccaagttcaagtgattctcatgcctcagcctcccatgtagctgtgatgacaggtgtgtgctaccacacccggctaatttttgtgtatatatatatgtgtgtgtgtgtgtgtgtgtgtgtgtgtgtgtatatatatatatatatatatatatatatatattagcagagacaaggtttcaccatgttggccaggctggtctcaaactcctggtctcaagtgatctacccaccctgccctccctaagtgctaggatcacaggcatgaaccactgagcctggcctgtttttgtgtgtttgatagttaacatttgttggcaaaaaacttcctcggttaaccctttccacatattctcccattccttgctctcagactatcaaatttataaaatcacagcaactataaaggaacagaaagcaagagcaaaaatagaaccgatggaccattgggttatctggtacacccagcagaagataagcccagcactggccaggtgggtacagcatgccagcaccccagacggacatgctgggaggagctgaaatgagataggaaggggaataagagcaacttccaagcttgggcgcctggacttcacttatttgacttttcttttgaaaaattaaattgctagatccagggcttacctgtgttcagctgaaatataaaaaatcactcacctactcaactgtaaattatttcagatcatttacaatttcacacaatcccgacctcttctgttctctcaattagtgtagataatgataattgaactaaactatgtaattaacctcatatctacctagatttttctttttttgcaaaacctcaaagagaaacgtgtgtcaaacttgtattttattttaatattttcgtgttccttgaaaattctacttactctcataaataaagaatacttgtcagagctatgcttttcaattttttaaaaaacaattttttttctaagctccttccataaattgtttattgttcaatgtggctgtgacttttcaatgcagttacttatttttcatgccttcaatttggtataaatatttcttttgcccagaatcaaatgcataaaaggtttcctttcatctcaaggatgcaagttattttgttatcttctatgggaaattaataatggtggggtcaaggtgsggaaggaagttagcggatcc

SEQ ID NO: 680615 - DNA, 1215 bp, Homo sapiens
aaaatgtcttctaggggcagacaactcaaggttcctggaatcaggattaaggacatctagagtgaaaagcagtggctctcaaatttcagcagttttgcttcagtctgtgctgaagtttaggcaattcttcctcctggggagcaggcgccctaggttcctagcaagctgagctctgggcctaaggagaaatactgttagttacgtataaactattttaaaactggtgygctctgtaattgccatttcgaagtttgaaaaggtaaaggaaaaaaaaactttaattttcaaattaatttctggtcattagcagactattaagagcttaaggtccaaaagctttggtcctaggaaaaagccactctccaacccactcagcccactttcacttggaggaggataccgaaagctggaaatagcccttgggtgaggatttccatcactttctacccttcctgggccacaagcacagcagtcagccccagaaggcagcagttggtggggacagtgcaccatcggcttagggatagcagtgcctgttcccttttgccaagtccctgggtccaggctgggatctcctgcagaagaaagaaaactcacctgtctcccatcctccctctcctccaccagctactcactggatggcggcaaaataagtcaccaaacatcatctgaccatcctcagaagacacatatgaggcaaataaatgacaaggtatattcccttcacgttctgacaggaaaagaacaagaggctggagcctttgtgtcctaaacctcaaagccctccaaactgttcctggttcgtagagcctggggctaagaggaacttcagtgaccaaagataattttcagatgtcttatgaatcacgagaagatataaaagaacaggaggcagggattaagcccaaaaccccctgtgttccttcttacacaactgagatacaggactaaatgccatgaaaaaattgctgaattaaagagaaaggtgtagaaattcaagctgttctaaggtaagaaatctccctaagttaccccctagcttaggcttacactgtagagtctgctcaaaaatgtgctcaagccccatcaccttcattcaagccctcgctaaaactttcaatgagttattatatgcattaaattgtcatttaatcgtacccaagcactgtcataaaagcaaatgaagcaagtcaagcagcattggaataaaaaata

SEQ ID NO: 680616 - DNA, 1215 bp, Homo sapiens
aaaatgtcttctaggggcagacaactcaaggttcctggaatcaggattaaggacatctagagtgaaaagcagtggctctcaaatttcagcagttttgcttcagtctgtgctgaagtttaggcaattcttcctcctggggagcaggcgccctaggttcctagcaagctgagctctgggcctaaggagaaatactgttagttacgtataaactattttaaaactggtgtgctctgtaattgccatttcgaagtttgaaaaggtaaaggaaaaaaaaactttaattttcaaattaatttctggtcattagcagactattaagagcttaaggtccaaaagctttggtcctaggaaaaagccactctccaacccactcagcccactttcacttggaggaggataccgaaagctggaaatagcccttgggtgaggatttccatcactttctacccttcctgggccacaagcacagcagtcagccccagaaggcagcagttggtggggacagtgcaccatcggcttagggatrgcagtgcctgttcccttttgccaagtccctgggtccaggctgggatctcctgcagaagaaagaaaactcacctgtctcccatcctccctctcctccaccagctactcactggatggcggcaaaataagtcaccaaacatcatctgaccatcctcagaagacacatatgaggcaaataaatgacaaggtatattcccttcacgttctgacaggaaaagaacaagaggctggagcctttgtgtcctaaacctcaaagccctccaaactgttcctggttcgtagagcctggggctaagaggaacttcagtgaccaaagataattttcagatgtcttatgaatcacgagaagatataaaagaacaggaggcagggattaagcccaaaaccccctgtgttccttcttacacaactgagatacaggactaaatgccatgaaaaaattgctgaattaaagagaaaggtgtagaaattcaagctgttctaaggtaagaaatctccctaagttaccccctagcttaggcttacactgtagagtctgctcaaaaatgtgctcaagccccatcaccttcattcaagccctcgctaaaactttcaatgagttattatatgcattaaattgtcatttaatcgtacccaagcactgtcataaaagcaaatgaagcaagtcaagcagcattggaataaaaaata

SEQ ID NO: 680617 - DNA, 1415 bp, Homo sapiens
tattaaaaaattaatccatctactaccaaaagttatcttgtattccatcagtccaacataaaagcatatttttagaaatattggattaattaactgatctctcaaagaagttcctagagtgcatgactctttaagtataattccagaatatagaggaactagttctaatttgtgaggttataaatttggtcctcaaatccaccactgatggtaacaagtcttaagagtgaaggtgttattctcagcataacttgattggtcttgtgtgtaagcccctattatgtgtcatgtctgatgctaggtgctcagaagaaaaatattagaaggcagaagtctgtccccattaggtgtagcaggaagcagtttagcaagagatagccatatatgctaaaaattccattatggcatagtaagaagaccaagccacaaacttcttgagagcrgaaaccaaatattattcacctgtgagtcctagcccctggcacagtgcccagcacatagtggcgattcccttggcttatctgctgaagttctataatgggatatttacaaagtcctcccagaaaatagtgacaagattcattctttatagggagcatcgtagaaggctctactaagcaggcttttgaaagatgaggtgttctctcatgagaaagtcactccaggaagataaaaagcctatgcaaagacctagaggagagagaaacacaagcgtgtagagacctatgaggcatttaaaagagaaggacagtggtctctgtgcaggggaggtagggtggggatgatgagggctaaagatatccgggtaacccggtcacatagcaacctggaggtgagctaaggggacatgaacttcatctattgaccgggcatagggagtattaagcaatggggcactaagtagagatagcttcctggcaactgaggggtaatgcattaaagagacctgaaaccccctcaaccaccatgaaaactgcttcaaactcaatgtatcccaattctcctgggtaaacaaccaacatgtcatcatccctatgctctgggtttaaatttgaatgtttcatttgttgaacaacactgttaactgacttgacctaattggcatttaccacatccagtaacatcagaatatacttgcttttcaggaacacatggaacattaactaaaatagatcatatgctggaccataaaacaagtctcgatgaattcaaaagaaataatgaatttagagtgcattctcaaaccacactggaattaaattagaaataagtaacaaaagacatctagaaaatccctaaatatttgtaaattattgctaggtaatccagaggtttaacaagaaattttaaaaaaatggaaaaatattttcatttaaatgataataagaaaacataatatgttaaaatttatagga

SEQ ID NO: 680618 - DNA, 644 bp, Homo sapiens
cctaaaggattcaggtaagaggaacactaatttcaatgctgtatgcctgtaagtgcttccaaacttttatgaacctcaatgttttttttgtctaatatcaaaagttcacagggtttcaaaatctgggctggactttttttactgcgggttttgaaattttaaagctgtaggcatgtcaatgatttgattacaaagctgaggcagacatgttgtattactattacaaaattatttttcccaatattaacttgggaatgcttccatcacaaagcagagtactggtgtaagagttggagtgtcttggttcaagtccttgtcctgacgctgaaggcgtgaccgtgggtaagttaytttaccactctgagcctctgtttactcatctattaacaagaacaataatatctctacttttcttgctgcgttttgagatcattaagctagattaaaacacattataaaccactgcttctattaatataactattaattggctgaatatctctaactcagctttatgaagtagttagtatttgtgttcatggagctgatgtaataagctaataatgtgagtctcagataagttatctgtcacctgtttaattcacacaatcatgggggcttccaagaaaatacaattaatagat

SEQ ID NO: 680619 - DNA, 603 bp, Homo sapiens
tcatctggagcgggctggtaggtgtggttaatagtggccattggtttccaagcaaccaagccctttccctttcagaaatatttcagcacccaatctttaaaggattgccayagacactggaggatgcacccaccacccataatgcctttcagaagaactggaaaagcccagaccaataaagataggccaacccagcctacctgctgccaccgatatccccatcaatgggattaccccttgcacatttgatcatgagtcctttgcctagacaggctacagtgtccaagattcagaactctgaaattattcttgacacataaagggtttctaaggcaaatccagcatacttttctgcccataattcagagtgtacactcatcacactttttcaaccttcaacatcctggattattgcagccactccctgactgatctcctgctgctaagccattctccctccagtctatcctgctcatgcagctggagtcatctttgcaaaaggaaattctattcatttctgtctcacaagaccttttgtgatatggcttttgcttaaatccccagccctttcattcttccatatgcaacctttgcttaggacag

SEQ ID NO: 680620 - DNA, 603 bp, Homo sapiens
tcatctggagcgggctggtaggtgtggttaatagtggccattggtttccaagcaaccaagccctttccctttcagaaatatttcagcacccaatctttaaaggattgccatagayactggaggatgcacccaccacccataatgcctttcagaagaactggaaaagcccagaccaataaagataggccaacccagcctacctgctgccaccgatatccccatcaatgggattaccccttgcacatttgatcatgagtcctttgcctagacaggctacagtgtccaagattcagaactctgaaattattcttgacacataaagggtttctaaggcaaatccagcatacttttctgcccataattcagagtgtacactcatcacactttttcaaccttcaacatcctggattattgcagccactccctgactgatctcctgctgctaagccattctccctccagtctatcctgctcatgcagctggagtcatctttgcaaaaggaaattctattcatttctgtctcacaagaccttttgtgatatggcttttgcttaaatccccagccctttcattcttccatatgcaacctttgcttaggacag

SEQ ID NO: 680621 - DNA, 645 bp, Homo sapiens
tttgggttccttcaactgctcctcatgagatatagctttcagatatttcctcattttatcaccagactttatatttttatcacaggtatcctgcccaatcaacaagaaattaccaaactccaattgtcaagactgtaaaggtctgagattttacactcattgcaagttaacaacttaacctgccaaagttttatggatgctggcagaagatacaagactcctgggtcacaaacaaggacaaaacagccacagcaatagctgaaatatcaccaatgtttgtgccagctccccaagcctcaattcccacagagagatgtgaagaggaccaggtaacacctgcacagtggattgcattatagacgaagggcaytgagtttaaggaattccatctattatgaagattgggcaaccctgcccaacctttctcctaaagggagacattatctttatcttccaaggctctttgctgtgcaaacttaagcaaaaagataattcagaaaaggtttccaatacccctactcacaggatgtgcagaagtgtgagagctccatggagaacaccagcattcaggagatgaaacagttctttggctattaagtggaccatacaacagagacaaattggaaacagctctggtctctggaa

SEQ ID NO: 680622 - DNA, 645 bp, Homo sapiens
tttgggttccttcaactgctcctcatgagatatagctttcagatatttcctcattttatcaccagactttatatttttatcacaggtatcctgcccaatcaacaagaaattaccaaactccaattgtcaagactgtaaaggtctgagattttacactcattgcaagttaacaacttaacctgccaaagttttatggatgctggcagaagatacaagactcctgggtcacaaacaaggacaaaacagccacagcaatagctgaaatatcaccaatgtttgtgccagctccccaagcctcaattcccacagagagatgtgaagaggaccaggtaacacctgcacagtggattgcattatagacgaagggcactgagtttaaggaattccatctattatgaagattgggcaaccctgcccaacctttctcctaaagggagacattatctttatcttccaaggctctttgctgtrcaaacttaagcaaaaagataattcagaaaaggtttccaatacccctactcacaggatgtgcagaagtgtgagagctccatggagaacaccagcattcaggagatgaaacagttctttggctattaagtggaccatacaacagagacaaattggaaacagctctggtctctggaa

SEQ ID NO: 680623 - DNA, 645 bp, Homo sapiens
tttgggttccttcaactgctcctcatgagatatagctttcagatatttcctcattttatcaccagactttatatttttatcacaggtatcctgcccaatcaacaagaaattaccaaactccaattgtcaagactgtaaaggtctgagattttacactcattgcaagttaacaacttaacctgccaaagttttatggatgctggcagaagatacaagactcctgggtcacaaacaaggacaaaacagccacagcaatagctgaaatatcaccaatgtttgtgccagctccccaagcctcaattcccacagagagatgtgaagaggaccaggtaacacctgcacagtggattgcattatagacgaagggcactgagtttaaggaattccatctattatgaagattgggcaaccctgcccaacctttctcctaaagggagacattatctttatcttccaaggctctttgctgtgcaaacttamgcaaaaagataattcagaaaaggtttccaatacccctactcacaggatgtgcagaagtgtgagagctccatggagaacaccagcattcaggagatgaaacagttctttggctattaagtggaccatacaacagagacaaattggaaacagctctggtctctggaa

SEQ ID NO: 680624 - DNA, 645 bp, Homo sapiens
tttgggttccttcaactgctcctcatgagatatagctttcagatatttcctcattttatcaccagactttatatttttatcacaggtatcctgcccaatcaacaagaaattaccaaactccaattgtcaagactgtaaaggtctgagattttacactcattgcaagttaacaacttaacctgccaaagttttatggatgctggcagaagatacaagactcctgggtcacaaacaaggacaaaacagccacagcaatagctgaaatatcaccaatgtttgtgccagctccccaagcctcaattcccacagagagatgtgaagaggaccaggtaacacctgcacagtggattgcattatagacgaagggcactgagtttaaggaattccatctattatgaagattgggcaaccctgcccaacctttctcctaaagggagacattatctttatcttccaaggctctttgctgtgcaaacttaakcaaaaagataattcagaaaaggtttccaatacccctactcacaggatgtgcagaagtgtgagagctccatggagaacaccagcattcaggagatgaaacagttctttggctattaagtggaccatacaacagagacaaattggaaacagctctggtctctggaa

SEQ ID NO: 680625 - DNA, 622 bp, Homo sapiens
aactaaaatctaagggtattctaccaaacaagaaacctgtactcttcaaaaatgtcaatgtcctgaaaggcaaagaaaagctaaaaaagtgttccagatgaaaagagagccaagagacatgaaaaccaatggtagtgcctgaaactcgtttggatcttaatcagaatttggcagaattggtgagaattagcagataaaatgctatatgaagaacatgtttggaacaacaggcaaaattggaataaggactgtagattagatgatagtattgtactatcactaacttttctgatttccaaggggaatatgatacagcaaacacagtgacatgatgaaaggtgtatagaattatttgtgctcttcttgaaactyttctgtccatttaaatttatttccaaatataaagttttaaaagattgacaatgtggcattaaggcaaatggtcaatgtatgaatgaatggcaatttacttaagcaggtaaattttcagataattataaatccattttaatatgtttttaaatatatataacaagcacatgtaacccataatttcacaaatattagtacttagtagagggtaaatttaaaggaatcaatgtaaagaaaaatattcagtaaa

SEQ ID NO: 680626 - DNA, 647 bp, Homo sapiens
tttttatagattgacacaatgacttcactcaaggctgcattcatgacaatgcaacaagttgcctatgcctgcagcattcccaaattcctatcccaaactttttttttaaaggtggcttacataggcaatggcaaaattaaaatcaaaaatccacaactgcaggaaagggtccaattctagaaacccagaaacatggtcttccaagaactgggtccacagtacttcccctaaagcaggctgacagcaacagcagctccaaggaaccaagtccccaacccacctcactgcacctctgagtctcctttcaggatgcagactgtgtgctgtgtaatctgtcttgtgcacaaaagcattaacctctggaatcaaatgtgtctgttaataaaccaacacgccgctcacactatcagcccccttgyggcgtccccccttcagagccacagcacaggcacatcacatttgtcagctggttcaactccttaggcacaacataatttggaaatgtgaaagatcccaaattatcttatccagaagtgacaaatcaagtacagtgcccacaagcccagacagtttacacaaataaacaaaacacaacagtagcgggggtatcaatctcataacagtttaggaaaaacaagtttatttct

SEQ ID NO: 680627 - DNA, 1655 bp, Homo sapiens
ctgccacttaaagcacttaactgtgccccggggcatcttgggaaaaggctgatggtgagagcctgtcgttgccccaggggaagagctgtccccagtgcagtatgggcttagacaggcccctccctctctcggtgggctccaggccctcctcctcccctgctcttcccttcctcccttccgcctcttcagagcttacctgcactcctgggagtctggaaactgctcctgcaaacccccagcccttggcttcttccttgaataaccagaatttcattcccatctttgggaaataccatttcaggctgcttaagttatgatttaaagcaggataaacccaagccgatgacaacttttggagggtttttcattgatcatttcttctgttgctctcttggcctgagtgatgacaaatgaatagttctccaggatccttttctacaagcagcgcctccctaagcacgcttcttctcagagtggagagtggaagttcaacttcgaggtcagacagacctggctccaacacttactcacagatgggagcttctccaagactcagcgtcctcaccggtaaaatggggaatattattcaccctccattcagtgcacctcctctcactttattatgccaagcattcagtcctagccccgtcaggatccagcgcttgccctttcaggccaaagaggcaaaaaatggcatgactgtgggctctgcaggagtcctccatcaacatgttctaatattttcctcccacactatttactggtttgctcacaccccattgatttaatccattttgcccagtccagagacagttttgtagacagacatgatatcttgtgaaaaagggtgaaaaaatgtgtcatttcacaccaaatccactgtaggaacctctgatggggtgggcacagtctatctcagtgggaaaataaatcctgatcttccacttacaaggtcagggagggagaaggggaagaatgaaatttcaagaccaggctctatgtctcctcgtgttgcccaggccgatctcgaactcctgggctcaagtgctggaattacaggcatgagtcaccaccgtgcatggcctagccaaagttttcttgtcacataatgacactatataattgtctatatattccaaaacctctaagttctttattttctgcttcacacaactgaaacaccctctccttttgaaaaagagtaaacagaaaacattccaaaatactaagtgcttatatttaaatggtaagtatgtgagaaatttctcttcttttctctacttttcgtattttccgtatgtggatatattgcaaagagcaaacgcaggtatttcttttgtttttcagaatttttcccgccctaagcaacttgtgttttcatatactctgccaagaaccacacaggaaactgaggcccacaggcctttatttttaaggatatcagcaaaagagggcccggtgtggtggctcatgcctgtaatcccagcactttgsggggctgaggtgggaggattgcttaagcccaggagttcaagaccaacctgggcaacatagtgagactgcatctctacaaaaaatccaaacattagccaggcgtggtggcacatgcctgtgatcccagctactctggaggctgaggtaggaagatctcttgc

SEQ ID NO: 680628 - DNA, 1655 bp, Homo sapiens
ctgccacttaaagcacttaactgtgccccggggcatcttgggaaaaggctgatggtgagagcctgtcgttgccccaggggaagagctgtccccagtgcagtatgggcttagacaggcccctccctctctcggtgggctccaggccctcctcctcccctgctcttcccttcctcccttccgcctcttcagagcttacctgcactcctgggagtctggaaactgctcctgcaaacccccagcccttggcttcttccttgaataaccagaatttcattcccatctttgggaaataccatttcaggctgcttaagttatgatttaaagcaggataaacccaagccgatgacaacttttggagggtttttcattgatcatttcttctgttgctctcttggcctgagtgatgacaaatgaatagttctccaggatccttttctacaagcagcgcctccctaagcacgcttcttctcagagtggagagtggaagttcaacttcgaggtcagacagacctggctccaacacttactcacagatgggagcttctccaagactcagcgtcctcaccggtaaaatggggaatattattcaccctccattcagtgcacctcctctcactttattatgccaagcattcagtcctagccccgtcaggatccagcgcttgccctttcaggccaaagaggcaaaaaatggcatgactgtgggctctgcaggagtcctccatcaacatgttctaatattttcctcccacactatttactggtttgctcacaccccattgatttaatccattttgcccagtccagagacagttttgtagacagacatgatatcttgtgaaaaagggtgaaaaaatgtgtcatttcacaccaaatccactgtaggaacctctgatggggtgggcacagtctatctcagtgggaaaataaatcctgatcttccacttacaaggtcagggagggagaaggggaagaatgaaatttcaagaccaggctctatgtctcctcgtgttgcccaggccgatctcgaactcctgggctcaagtgctggaattacaggcatgagtcaccaccgtgcatggcctagccaaagttttcttgtcacataatracactatataattgtctatatattccaaaacctctaagttctttattttctgcttcacacaactgaaacaccctctccttttgaaaaagagtaaacagaaaacattccaaaatactaagtgcttatatttaaatggtaagtatgtgagaaatttctcttcttttctctacttttcgtattttccgtatgtggatatattgcaaagagcaaacgcaggtatttcttttgtttttcagaatttttcccgccctaagcaacttgtgttttcatatactctgccaagaaccacacaggaaactgaggcccacaggcctttatttttaaggatatcagcaaaagagggcccggtgtggtggctcatgcctgtaatcccagcactttgcggggctgaggtgggaggattgcttaagcccaggagttcaagaccaacctgggcaacatagtgagactgcatctctacaaaaaatccaaacattagccaggcgtggtggcacatgcctgtgatcccagctactctggaggctgaggtaggaagatctcttgc

SEQ ID NO: 680629 - DNA, 1655 bp, Homo sapiens
ctgccacttaaagcacttaactgtgccccggggcatcttgggaaaaggctgatggtgagagcctgtcgttgccccaggggaagagctgtccccagtgcagtatgggcttagacaggcccctccctctctcggtgggctccaggccctcctcctcccctgctcttcccttcctcccttccgcctcttcagagcttacctgcactcctgggagtctggaaactgctcctgcaaacccccagcccttggcttcttccttgaataaccagaatttcattcccatctttgggaaataccatttcaggctgcttaagttatgatttaaagcaggataaacccaagccgatgacaacttttggagggtttttcattgatcatttcttctgttgctctcttggcctgagtgatgacaaatgaatagttctccaggatccttttctacaagcagcgcctccctaagcacgcttcttctcagagtggagagtggaagttcaacttcgaggtcagacagacctggctccaacacttactcacagatgggagcttctccaagactcagcgtcctcaccggtaaaatggggaatattattcaccctccattcagtgcacctcctctcactttattatgccaagcattcagtcctagccccgtcaggatccagcgcttgccctttcaggccaaagaggcaaaaaatggcatgactgtgggctctgcaggagtcctccatcaacatgttctaatattttcctcccacactatttactggtttgctcacaccccattgatttaatccattttgcccagtccagagacagttttgtagacagacatgatatcttgtgaaaaagggtgaaaaaatgtgtcatttcacaccaaatccactgtaggaacctctgatggggtgggcacagtctatctcagtgggaaaataaatcctgatcttccacttacaaggtcagggagggagaaggggaagaatgaaatttcaagaccaggctctatgtctcctcgtgttgcccaggccgatctcgaactcctgggctcaagtgctggaattacaggcatgagtcaccaccgtgcatggcctagccaaagttttcttgtcacataatgacactatataattgtctatatattccaaaacctctaagttctttattttctgcttcacacaactgaaacaccctctccttttgaaaaagagtaaacagaaaacattccaaaatactaagtgcttatatttaartggtaagtatgtgagaaatttctcttcttttctctacttttcgtattttccgtatgtggatatattgcaaagagcaaacgcaggtatttcttttgtttttcagaatttttcccgccctaagcaacttgtgttttcatatactctgccaagaaccacacaggaaactgaggcccacaggcctttatttttaaggatatcagcaaaagagggcccggtgtggtggctcatgcctgtaatcccagcactttgcggggctgaggtgggaggattgcttaagcccaggagttcaagaccaacctgggcaacatagtgagactgcatctctacaaaaaatccaaacattagccaggcgtggtggcacatgcctgtgatcccagctactctggaggctgaggtaggaagatctcttgc

SEQ ID NO: 680630 - DNA, 1655 bp, Homo sapiens
ctgccacttaaagcacttaactgtgccccggggcatcttgggaaaaggctgatggtgagagcctgtcgttgccccaggggaagagctgtccccagtgcagtatgggcttagacaggcccctccctctctcggtgggctccaggccctcctcctcccctgctcttcccttcctcccttccgcctcttcagagcttacctgcactcctgggagtctggaaactgctcctgcaaacccccagcccttggcttcttccttgaataaccagaatttcattcccatctttgggaaataccatttcaggctgcttaagttatgatttaaagcaggataaacccaagccgatgacaacttttggagggtttttcattgatcatttcttctgttgctctcttggcctgagtgatgacaaatgaatagttctccaggatccttttctacaagcagcgcctccctaagcacgcttcttctcagagtggagagtggaagttcaacttcgaggtcagacagacctggctccaacacttactcacagatgggagcttctccaagactcagcgtcctcaccggtaaaatggggaatattattcaccctccattcagtgcacctcctctcactttattatgccaagcattcagtcctagccccgtcaggatccagcgcttgccctttcaggccaaagaggcaaaaaatggcatgactgtgggctctgcaggagtcctccatcaacatgttctaatattttcctcccacactatttactggtttgctcacaccccattgatttaatccattttgcccagtccagagacagttttgtagacagacatgatatcttgtgaaaaagggtgaaaaaatgtgtcatttcacaccaaatccactgtaggaacctctgatggggtgggcacagtctatctcagtgggaaaataaatcctgatcttccacttacaaggtcagggagggagaaggggaagaatgaaatttcaagaccaggctctatgtctcctcgtgttgcccaggccgatctcgaactcctgggctcaagtgctggaattacaggcatgagtcaccaccgtgcatggcctagccaaagttttcttgtcacataatgacactatataattgtctatatattccaaaacctctaagttctttattttctgcttcacacaactgaaacaccctctccttttgaaaaagagtaaacagaaaacattccaaaatactaagtgcttatatttaaatggtaagtatgtgagaaatttctcttcttttctctayttttcgtattttccgtatgtggatatattgcaaagagcaaacgcaggtatttcttttgtttttcagaatttttcccgccctaagcaacttgtgttttcatatactctgccaagaaccacacaggaaactgaggcccacaggcctttatttttaaggatatcagcaaaagagggcccggtgtggtggctcatgcctgtaatcccagcactttgcggggctgaggtgggaggattgcttaagcccaggagttcaagaccaacctgggcaacatagtgagactgcatctctacaaaaaatccaaacattagccaggcgtggtggcacatgcctgtgatcccagctactctggaggctgaggtaggaagatctcttgc

SEQ ID NO: 680631 - DNA, 1655 bp, Homo sapiens
ctgccacttaaagcacttaactgtgccccggggcatcttgggaaaaggctgatggtgagagcctgtcgttgccccaggggaagagctgtccccagtgcagtatgggcttagacaggcccctccctctctcggtgggctccaggccctcctcctcccctgctcttcccttcctcccttccgcctcttcagagcttacctgcactcctgggagtctggaaactgctcctgcaaacccccagcccttggcttcttccttgaataaccagaatttcattcccatctttgggaaataccatttcaggctgcttaagttatgatttaaagcaggataaacccaagccgatgacaacttttggagggtttttcattgatcatttcttctgttgctctcttggcctgagtgatgacaaatgaatagttctccaggatccttttctacaagcagcgcctccctaagcacgcttcttctcagagtggagagtggaagttcaacttcgaggtcagacagacctggctccaacacttactcacagatgggagcttctccaagactcagcgtcctcaccggtaaaatggggaatattattcaccctccattcagtgcacctcctctcactttattatgccaagcattcagtcctagccccgtcaggatccagcgcttgccctttcaggccaaagaggcaaaaaatggcatgactgtgggctctgcaggagtcctccatcaacatgttctaatattttcctcccacactatttactggtttgctcacaccccattgatttaatccattttgcccagtccagagacagttttgtagacagacatgatatcttgtgaaaaagggtgaaaaaatgtgtcatttcacaccaaatccactgtaggaacctctgatggggtgggcacagtctatctcagtgggaaaataaatcctgatcttccacttacaaggtcagggagggagaaggggaagaatgaaatttcaagaccaggctctatgtctcctcgtgttgcccaggccgatctcgaactcctgggctcaagtgctggaattacaggcatgagtcaccaccgtgcatggcctagccaaagttttcttgtcacataatgacactatataattgtctatatattccaaaacctctaagttctttattttctgcttcacacaactgaaacaccctctccttttgaaaaagagtaaacagaaaacattccaaaatactaagtgcttatatttaaatggtaagtatgtgagaaatttctcttcttttctctacttttcgtattttccgtatgtggatatattgcaaagagcaaacgcaggtatttcttttgtttttcagaatttttcccgccctaagcaacttgtgttttcatatactctgccaagaaccacacaggaaactgaggcccacaggcctttatttttaaggatatcagcaaaagagggcccggtgtggtggctcatgcctgtaatcccarcactttgcggggctgaggtgggaggattgcttaagcccaggagttcaagaccaacctgggcaacatagtgagactgcatctctacaaaaaatccaaacattagccaggcgtggtggcacatgcctgtgatcccagctactctggaggctgaggtaggaagatctcttgc

SEQ ID NO: 680632 - DNA, 614 bp, Homo sapiens
ccacattcctatatagctcgaagtcaattgggtgttcaatgtcgtccatccgcacgagcatcttctgagatgcccatcatcctctctgcccctcgcaggtctctcatctggctctttcaggtctgcaagctccggcctgtatttctgcggcttgtctgaaaacccagcaatcattcagctgctcctgcaccgcaacagggarcaggatttttacagatagaccatatggtcccaccttgtcgataacttctttctctaagcttccctggggtccccctcagagagtggggcacaggtcctctctgttcccagatcccacaaacttctcttggggtcatgctgcctccccagggctctgcccaggaggtagggaccagattgctccccccgggacacacagggaactatactctcagcttctcctccactcctgtgttcttttcttcccttagcgtttggaatctttgctcttccagagaccagatggtggttactcttctcagtctcccggtcttaaatatttttgtctgactgttcaaaggagctttttgttctgtctaatactgttattttagaacataaaattcaggaaaagaattcacaaccctttcctt

SEQ ID NO: 680633 - DNA, 652 bp, Homo sapiens
gggttttagcatttcaatttaatcaatatcaagttgtgctgtgcttctacctccattccatgtgggtctataagattaggaaataatccatactaaaaacatcaaagccactgactgcagagcaacagctgctctaatgcttttctaagagttatagggattattattaaatgaaaagggaagggccaaagcccttaacttgttgatggtcctttcagctgcctgcctcagtttctcagtctgacaagaggatggctatatctcagtcccaacttcaggaggatgtacaatcaagtgaaataaaaccataaactaggtaggtccaaggtattagtcctttctgtattataatgaggagagtatacacccctaagagggaagacaagaacatgaaaagacacttacttagtataacccaacctcaattcacatcaacagcttaatcttttattttctgcctctttagacaggcaaatcagatacctctgatacccctctaccaccacctcttcttttagtctaatgaataccaaattaracatcaatattaaaaagatcttaatggtgaatattgagaatttcactttgtgagtcagtaaggacaaaatttaaacccagatttagaatcttaattgtattagattaggcagaa

SEQ ID NO: 680634 - DNA, 1601 bp, Homo sapiens
agaagtgcttgaatgtgccagcttaggttgggcatccactcagtcatgggaactgtcactggcccctcctgggtgggatggggtaaacaaaattgggtctcatgagaagggggaagggtggaaatggatattaggaggcaactaacagtgccactgccctctcgtgcttccctggatttcacttgctttctttattttttgagacggggtctcgctctgtggcccaggctggagtgcagtggcacgatcttggctcattgcatcctccacctcccaggttcaagcgattctcctgccttagcctcccaagtagctgggattacaggtgcatgccaacacacccggccagtttttttttgtaattttagtagagacagggttttgccatgttggccaggctgttcctgaattcctgacctcaagtgatccacccgcctcagcctcccaaagtgctgagattacaggcgtgagccaccatgcctggcctggatttcactttaaagtcttactgatgttttacattttgtccgtttctcttgtgcaccaatttgctgagcattttaacgatacttaaggagaaagatgtacctcagaattgtgtggttactaagatcttaggcttaagagagactacctggatcctcgtccaactacttcctagcttggtgcccttgggcaagttatttaacgtttctgagcctcagttttggtatctgtagaatgtggataatagaatctacattgtagaacatgataaggactgcatgagcttggcacagggcctacacgcagcgtgctcagtggccaggagcactgctttgaccttttttccttctgtcttatttgaatgtagggtaagagtaaagtctccaccagaagctggtacccagttaccaaagatcatcttcagcagggatgagaaagtccttggtcagagccaggagcctaatgttaaccctgcttcagcaggcaaccagacccagaagacacaaggtaaaccgtaaggtggaaactggctttcagttttcactacctgctttgtagcttttttgttcctaattaaaagtaaaagtaaaacatgatctgttgtcgtcttagcattatattttggaagttacacaaaaatacgtaaatgttaaagaaaaatgtggaaaatctgaagcagatggaaaaacaacagtcatttctccttattcccagtgttagaattttagtaatttatgttttcttataagcttgtttcataagtctagaacatttgatttttaaaattcagtcatgcttataattttatatrcatgcctgattactttttagcccatttcatacctatcatatatcctgttaagcagatactgtaatttgctcaacctttccccttaaggagacacatttccatttttgtgtgattatgaatattgctgcagtggacttctttatgcatagaactgtcttcgtatagcgaacgttctttaagatggttttcagaattgcaatttctggttcaaaggatatgaatgcatttgagaatattgatgtatatttttaaattcctttccaaatgagttgtgtggatttatattcttatcagaaatatgtag

SEQ ID NO: 680635 - DNA, 616 bp, Homo sapiens
aaaaaaaagaaagttcacaaatttgtgttgggccgcattcaaarccatcctgggccgcatgcatcctggacaagcttgttctgagttcttgcccaaggaaatggaaatcatttgaagagagcctgtcagagcagcaactttagattgtctgttttgcttgagactgagtgaaatagggtacttgatcagattagagacccataatggcaaggataacatgaagaggtcactgagtaccaggagtatgcgttgatctcttaaaacctggctgcgcctggtagctcacacctgtaatctcagcacttagggaagctcgtttgaggtcaagagttggaggctgcggtgagctatgatggcgacactacactctagcctgggcgacagagcaagaccccatctcaacaacagcaacaaaaattagccagatgtggtggtgcatacctatagtcccagctaccagggaggctgaggtggcaggatcccttgagcctaggagtcagaagctgtagtgagctataatggctccagcctgggggacagagtgagaccctatttcttaaaaaaaaaaaaaaaaaagacaaagcaaaacaacctttttattgtggagaatttccaa

SEQ ID NO: 680636 - DNA, 656 bp, Homo sapiens
tgccatcaccatcagcctgggcttctgcactgacttctacggctgcctcttcctcgcctgcttcgtgctggtgctcacgcagagctccatcttcagccttctggccgtggcagtcgacagatacctggccatctgtgtcccgctcaggtgaggcgctcggcgtcgcccgaactcggggccccgtcggagctccgaaatgggtcgtcttctccaggccggggttcctccctcgggggccccagacgggccaggctgggggcgcgcggggcgcttggagggctggttcccagcctggccaccccgcaaygctagaccagtgcgcccgggcacccaagacatcccagatgcgcgtcgctctaaggagatctgcgtagggacagctctagggggtccggggagtgcggtccccggcgcccggggaggcgccgtggaaaccccggggaaagcgtcacccccggggaaagcgtcacccccgtgggcgggtggagcccggggcgcgggagttttggtgatcacatctccactcctgccacgaaggccgttcctaacactcgcccgcagcggcggtgcagcggcagtcccgtgagtgctgcggctcccggaggcccgggaggttcccactaagggcaaggcaactttggacgctgggcattcgc

SEQ ID NO: 680637 - DNA, 656 bp, Homo sapiens
tgccatcaccatcagcctgggcttctgcactgacttctacggctgcctcttcctcgcctgcttcgtgctggtgctcacgcagagctccatcttcagccttctggccgtggcagtcgacagatacctggccatctgtgtcccgctcaggtgaggcgctcggcgtcgcccgaactcggggccccgtcggagctccgaaatgggtcgtcttctccaggccggggttcctccctcgggggccccagacgggccaggctgggggcgcgcggggcgcttggagggctggttcccagcctggccaccccgcaacgctagaccagtgcgcccgggcacccaagacatcccagatgcgcgtcgctctaaggagatctgcgtagggacagctctagggggtccggggagtgcggtccccggcgcccggggaggcgccgtggaaaccccggggaaagcgtcaccccsggggaaagcgtcacccccgtgggcgggtggagcccggggcgcgggagttttggtgatcacatctccactcctgccacgaaggccgttcctaacactcgcccgcagcggcggtgcagcggcagtcccgtgagtgctgcggctcccggaggcccgggaggttcccactaagggcaaggcaactttggacgctgggcattcgc

SEQ ID NO: 680638 - DNA, 608 bp, Homo sapiens
gaaagtttaaatctgttccttcttgtcctggtttgtgctgggtgaggtcttgaaaaaaatgggtgtgggtgtgttaaggggaaagtgctgtgaatcacaggccctgagcttctttgcattgccaagggcaggagggaagaacactgaggctcgccccatcctgccttcctggcccgtccagagcttggaggtctggaagaggtgcacaggcagtccccagctccctgccccagagktagtcgtctgacctggccacagcaccaccccaaccctggtgggtgggagaggtgtactagggcccccagggcttccctctcaggggctggtgcctggggcaggccttccctcagctggcctagcagttcatggccccttgggaagaggttaaaatacagattacagggcctcacctggttgtactgaatcagaatctctggagtgggtgtcgaggggattccagcagtgggatctttaaccagggacatttgggtccagcgatctaagaatcctcctagattcagggcctgaagctttcctcacttgactgacacaggctgggtgcatggcgccccaagcactgacttggccctgaggccttcctggggttg

SEQ ID NO: 680639 - DNA, 608 bp, Homo sapiens
gaaagtttaaatctgttccttcttgtcctggtttgtgctgggtgaggtcttgaaaaaaatgggtgtgggtgtgttaaggggaaagtgctgtgaatcacaggccctgagcttctttgcattgccaagggcaggagggaagaacactgaggctcgccccatcctgccttcctggcccgtccagagcttggaggtctggaagaggtgcacaggcagtccccagctccctgccccagagttagtcgtctgacctggccacagcaccaccccaaccctggtgggtgggagaggtgtactagggcccccagggcttccctctcaggggctggtgcctggggcaggccttccctcagctggcctagcagttcatggccccttgggaagaggttaaaatacagattacagggcctcacctggttgtactgaatcagaatctctggagtgggtgtcgaggggattccagcagtgggatctttaaccagggacatttggktccagcgatctaagaatcctcctagattcagggcctgaagctttcctcacttgactgacacaggctgggtgcatggcgccccaagcactgacttggccctgaggccttcctggggttg

SEQ ID NO: 680640 - DNA, 669 bp, Homo sapiens
tgaggagtgataattaggtggaacttggaatgccaaggtacaattttaatctggagtttgatatggtcaggtttgcattgtaaaagtcactggtggacagctgaaggaaggaatggacgggacaagatgatatagggtagccacttggcatccagatgagaaggaaaaaagcatgaccagggcagaggccatggagatggcagcagactctacagatattggagactcgtagaaccacaatttctgcaccagagaaggctgatgtttgatgccagccatggagttcagcagtctggagcagaggagccacaggtaaaatcatataggaaagagtcctgagaaccacagatgggccctggagccacaatcagtgagtgacacctagaaatgtgggtagttagggccaggctgagtggaattgatgtgcgtgagatctgccattgtggagcagtaatgagtcagcatgagtgactggcaagcagatctgatcgatagcacatagtcgtgtgcttctggctggaagacagggcacacgggacaggttcaagaggacttggtgactcagttggatgtggacatgaaggagaagamgactccaggatgactcccagatttccggtcgcctgggtgatgccatcctgaagatgggggctttgggaaggtgttgcc

SEQ ID NO: 680641 - DNA, 583 bp, Homo sapiens
taaggtcttgctctgttgcccaggttggagtgcggtggcttaatcatggctgactgcaayctcgacctgccaggctcagttgatcctctcacctcagcctcctgagtagctgggattccaggcgtgtgccacaacacttggctaattttcttatttatttatttatttatttatttatttattgtagagacgggatttcaccatatttcccaggctaaatcgaggggactctgtaatcaaaaagatggagaagagaatgactattaggagacagtttgtagtctctgccacagtgggtttggataagaacttaatctctgaggttgttttctactcatcagagagtagtttaaggtacacagaggatgttgagggtcctgatattttgatctgttttcgcttcaaaagggtacttttctgtgtgtgagtgtgcgtgtgtgtgggtatatgggttttacaaggaatgttgcatcagactggcacttagaatccagggtcatatatatatatataaaatggggcccaattaaaagaaaaatcttttccttatgcttttaggctgaacaactttttaaagcaacaa

SEQ ID NO: 680642 - DNA, 583 bp, Homo sapiens
taaggtcttgctctgttgcccaggttggagtgcggtggcttaatcatggctgactgcaacctcgacctgccaggctcagttgatcctctcacctcagcctcctgagtagctgggattccaggcgtgtgccacaacacttggctaattttcttatttatttatttatttatttatttatttattgtagagacgggatttcaccatatttcccaggctaaatcgaggggactctgtaatcaaaaagatggagaagagaatgactattaggagacagtttgtagtctctgccacagtgggtttggataagaacttaatctctgaggttrttttctactcatcagagagtagtttaaggtacacagaggatgttgagggtcctgatattttgatctgttttcgcttcaaaagggtacttttctgtgtgtgagtgtgcgtgtgtgtgggtatatgggttttacaaggaatgttgcatcagactggcacttagaatccagggtcatatatatatatataaaatggggcccaattaaaagaaaaatcttttccttatgcttttaggctgaacaactttttaaagcaacaa

SEQ ID NO: 680643 - DNA, 1107 bp, Homo sapiens
ccaaggttttgctctttttcacataagcaggattttttagcaggtttatgacactcagttagacaaagaactacactgccttgcctgactgcacctcgcactcagttctctcacctttcctgcgtttccccgaggaacttctaattattttttctctcaacaggcagttttctcctcagtctgtttctcatcttttcaatgttttgttcttcatcctttcttaattcaaggggtactaatgcattagcttccctataaatgttacacatatttatttaccctcatttaatctgagtttgtatgaaacgattcggggatgtgctttggcggcactgttgtcaggcacgtttctgctgttcctcccactaagctcctagcctttctcctgaggtattttttttagcatatgtcccgaagttgacattggtaaatcctccaatgaacccccaccatttctgtgacacttccagacacctcatctgtcttttgcaaagcaagcaggcagcaaataaaagctacccaactattgcaaaatgcaaattttttatctgtgggatctgggaattatcagtcaacacttatctgggaattattgattaagcacttatctacactgtcctcagcactgtgtggacagtcccaaatgtcccccgcccccataaaatgagaaaacacaattcttgttctggcaaaaattataatctaataacggcactgtcacgagaagacaatgaacactaaaagaagacagagcaagtgccaaaagaaagtrtgggtcatgaggcactttttgagcccagaggaggaggagaacgtgtctgctctggatgggctgtgccagccagccggggaaggaatcagtaagggtaaagataagaaaatcttgggcattgtttaatacaacatgctaaatgctttatctaagatggagggatttgggagaggctagtgggaggtaaggctacaacaggattcagggcaatttggaaataggacttagattaaaaagaataaaatcaagatttatcctaaaggcaaccctaagtttaaattcattcaaatttatagtatgacctctcattctccctctctctccacttattttat

SEQ ID NO: 680644 - DNA, 1390 bp, Homo sapiens
tcctctgggcctcatggaatcatggaaagttgtcctataggtattttgtattttcactttgtactttattaagccactggtcaatagagagttgtaaaggtaggaaggagatacgaaccgtatttaggaaactgttgtgacaaagtcggttttgggtcatagagttgttaactaggaataaagaaatgtttttgctagattttagggacctataaaaagtgtaggaagtggaatgggggtggtggcatcaggggatttgtatgattaagtaaagaatcacagatccaagaaattccctttcttctgtactagaaaatttgaaagacaggcctattgtaaatttcttgcctcagtttctctagctgaagacgcttattgcctcaacctctgatgtttccatcacaggcttctctgaaagaggtcaagaaagcccctgcctctcgcctctgcagatagccatccagtcccagaggaagcggctatttatgcaggtgagcaaagcaaacctgaggaggaagtgaagtacatctcctcctctctgcaactctacagctttttcttctcttatttggaactttgaaataagattacatacataaggtgctggcagttagcaggtgcccagctaacaccacttatcagaattggtgttgtttgccttatattctgtgtattggttcccttccttctggacttatcttcctaccaggtgagagcatcttgagggaaggagtgttttttattcaccatgtattcccaaagcctagtgcagtcttacatagtaagtgcatgaggcttaatgctgaatttaaatttaaactcagtgtttgtctctgtggctgtacagtctttgtacctccccacaaagcccactgattttaattaattttgacttctcagggggtagtaaggcaatgtggtcattcattctttcattcatttaattgctattagttggtcatgctagatattgcacccaagtgagaaagacagacatggctcctgctctctcaaagcttacaatctaatgccgtagctcctccaccagatttaccttaggaactttaaaaaaatataactcccaggaccacatttctatcctatcgattaataagtrttcataatggggactggggaatagcaagtactcctgtgtgattctgggaccgtccctttgaatgaaacacagagttatgtcagaaggaatggcatatgtattattcctgattctacaacttactttgggaccttgggaaagtgtcttaacccacctgaccctcagtttgttcacctacaaagtgagaaatatgtctctccttcctacctccaagggccgatgtggggagaatatgagataatcaatagttgtgtgcttggtatactttgcatt

SEQ ID NO: 680645 - DNA, 1390 bp, Homo sapiens
tcctctgggcctcatggaatcatggaaagttgtcctataggtattttgtattttcactttgtactttattaagccactggtcaatagagagttgtaaaggtaggaaggagatacgaaccgtatttaggaaactgttgtgacaaagtcggttttgggtcatagagttgttaactaggaataaagaaatgtttttgctagattttagggacctataaaaagtgtaggaagtggaatgggggtggtggcatcaggggatttgtatgattaagtaaagaatcacagatccaagaaattccctttcttctgtactagaaaatttgaaagacaggcctattgtaaatttcttgcctcagtttctctagctgaagacgcttattgcctcaacctctgatgtttccatcacaggcttctctgaaagaggtcaagaaagcccctgcctctcgcctctgcagatagccatccagtcccagaggaagcggctatttatgcaggtgagcaaagcaaacctgaggaggaagtgaagtacatctcctcctctctgcaactctacagctttttcttctcttatttggaactttgaaataagattacatacataaggtgctggcagttagcaggtgcccagctaacaccacttatcagaattggtgttgtttgccttatattctgtgtattggttcccttccttctggacttatcttcctaccaggtgagagcatcttgagggaaggagtgttttttattcaccatgtattcccaaagcctagtgcagtcttacatagtaagtgcatgaggcttaatgctgaatttaaatttaaactcagtgtttgtctctgtggctgtacagtctttgtacctccccacaaagcccactgattttaattaattttgacttctcagggggtagtaaggcaatgtggtcattcattctttcattcatttaattgctattagttggtcatgctagatattgcacccaagtgagaaagacagacatggctcctgctctctcaaagcttacaatctaatgccgtagctcctccaccagatttaccttaggaactttaaaaaaatataactcccaggaccacatttctatcctatcgattaataagtgttcataatggggactggggaatagcaagtactcctgtgtgattctgggaccgtccctttgaatgaaacacagagttatgtcagaaggaatggcatatgtattattcctgattctacaacttactttgggaccttgggaaagtstcttaacccacctgaccctcagtttgttcacctacaaagtgagaaatatgtctctccttcctacctccaagggccgatgtggggagaatatgagataatcaatagttgtgtgcttggtatactttgcatt

SEQ ID NO: 680646 - DNA, 600 bp, Homo sapiens
ctttttcactttgggtttggctgtgtgacttactttgtgtcacagaatttggcagaaatgccatcgtgcaagtcccatgcatgactgttaagaggtttcatatgtttttgcctgctggcttaaatttttgtctttgttggaagaaacatatgcccaggctaactcactggtttcagaaacaggaagagagatatgaagagatattccccagataactctagcctagactgatcattccccaatggacctgcagatatgcaagatacacatgctcttattgctgtatgccactgagtctggatcagtgtgattcactgcgtatctggcagacctgaggcagaagcccaagtcttctgactcttagccagtgaattttcacctgcaccatattttagtaaaaaagcaaccaaaactaaaggctggtatttatatttgcataatacttcagggtctggagttagttagaatgtgggatttatagagaagagtcatgaaggcrttctttaaaatagttaaaattatgtactaagttttatgttttgtgcatttagtggaagacataatctataatggtgcttcatattttaaaagggattcaca

SEQ ID NO: 680647 - DNA, 755 bp, Homo sapiens
attttaattttcttttctgaaaaattagcataacatgaggtttgaaagctgtataaaagtttacataaaacaatgtatgcaatattttgccctctccatccactgaaaaacacccactagcatcctcttatctgacttcctcaatgctttctcacctgtggtcagttaacacaaggtactgatcttcagctacaaggcagggcttcctcttgtcattttctgtttccctacccactttatggtggttctccttcctctttagccctatatggccgccgttccaaggtctagaggctcattttgattgtggttttcttgtaaatgcttcatgaaatcagaatacctttcttttaaagtaacattttcaggaatataatcactacgaggtgttcagtccataatttggacagtcatagaatttggagctattcttgcccttcagggaatggtgtgctattatcaaagcaggtaattttcaaagggagaaaccttcataacctgaagatttaagagcaccctggcttgytgtttctgaggataattcttttctgatcagctcctctctagcctttagctttgagtgaggcaatcacactttgttgcctttattcatttggaaggttcttcctatttcaatttatgtgaacccatttaaacaacagtaaaaatggaaactcatccaaataaatttaattccaattactctgactcttttgcatcttctggctgtaatttaaagcatttttccaaacagg

SEQ ID NO: 680648 - DNA, 920 bp, Homo sapiens
ttttttgtctggttgtcttggtgtttccaggttgtggacttcttcagctacaagtttgggatatatgaaggaaacaaaaaccaaaagagaacagagaagttaccactgtgtcattatttgggtctaaagggttcctagcacgtctgccttcttctcttcatctttcagagtcttcttatgtttcatacataatttccaggtttttaagttgtacttagctggaggaataggaaaaactgtatctattccctcttctccaaagcggaagtctccagagttgttccgcaattaaatgtgatcatgtatgtaaaagtgtccacaggatcgatagtaaacatttaaagtaaacaaaaataacaaaggcctacttttgttatttacttacacaagggaagagcatgataccttaaagctagaaaagaattcttcttgtattttgcatctatttatttcttttctttgacacacaaattgtttacacaatatgaaaataatatcgcatctagccaacttctctttaacacccccattatatacagacacgacttctgatgaaatatgacatgaaattatgtgttctgaaattaaatattgcaaagttacytaggcattcctctagtggtttcttgccctcactaagcagacatgtctaagaatccaaaaggcaaagcagactttaagtacattctttttttggaaaaataactacaagactcttgggaaatattattctttgaaaatatttgcttaacaaagtaaagagactaaacacaaatatgagccagatgtttgacattttttcatcatttgctgtgtacaacatttgtccagctaacacactttagaaagacagtcttatcaataagagatatgtttatgtaacactgtgtcctcagaagatgaccagtgataacattttt

SEQ ID NO: 680649 - DNA, 2402 bp, Homo sapiens
tcccatcactcattttccaatatgagtaggtgaagcttggggctcacttccaaatttttcagtcttcttaaagatgaagtccagaagaattaaacaattcatcactgactatgtctatccacccttgcttcagagctggtcacatgctgactcataaatgagcctattgttccatggggccacccagaggtctccgtagggaggatgacacaaacgctgtttataaaagccatacataacgaatgccctaggaacttatcactacaaactgcctgctgaaattcagccagtttttagacataaactcccaaagctcccatgttgactctttgctcttaaatttacttttgcctctagaaattctagtaactttattcctttcaaagtttacactaaaaattgtcaccagttcaacttctatttttatatttccacaattttatatttctattctctcatttctataatttttctcatgatttcctaaagtctttcatatgtgtgtgcacaggtctgttagatgcacacaggtagtagagaaaaatgtgtataaattattcccatctgatataaaaaatatatatccatcccattcccatgtcttttttccttcaactgttgttagagggatgttgtttatctaattagggcccagctggcatactagaactactttctatttgtttagtccacctctctcaaatgatatgtgttttcttatgacaaactatggcacaaatcttcagctatgtggatccctcagccacttccttttctttctccagtaacccactgtgtgcaatgatatgttcctgcttgcacaaatatctttagtatttcagaatcttacctgcatatccatatcacttcatgtcagtgagaaactatgagttttctgataaacaccttcctgtgccttttgtattttaagctaaaaaatgatgttaaaggaacaccaatattcactcctcattgataagtctaacttatatttcctaattgttttcaattcagctcagcctccagtgatgtgcttgtttgtagaagggcctcatatacagaaccattcctaagttgccaacactttggtttcatgaagtcatcgccttatctatagtatatgtgtagggaggcaaagctggcaatagtgtaactcattctgattctgttcattccttcatttgtcttaaaagccctcttttcttggttccaatatcttttaagttcacccatatctcttttctgccactttgtgattcattctccctagtatctagccagtttattatagtgagatcagaaaaagaaaattaattaatgttaaagtcacattagtggcctccagattttaagatctttcctctttcttttcctgtatattatgattaacacatacactttaatggaaatggatattccatctttggcccattaacttctaaaagtagttgcgaaaagcatgtctgtcagatcttgaagacctcagcactgagacctgcaaactgagatgtgctatccatctacaccatggacctggtggtaatctctgatgtctgatgtcagcacctaaaaggcttgcctctccctttatattttatttttgtctatttctccatttagagacacccccatcccctctacaccttttctagatctttaactcagtttcacaagaaattccattatccagtcactcagtatcttcaccataaattcattctcaaatctcaaatttaccatttttttcttctctgtctatccattacccaaacaggtcttcaggaaggggatttaatcttgcctaatctattctttttcattttgagtatttgatctctgatagcagctatttttgctagaatttcttcacctttgtggttttgttatctaygctctcagtgttatttttatttctcctctgatgtccatttatatagctgttttatttcccaattatctttgacactctgaagcaaaaaacaggtcttctctgcatatgctacatttcaaatttcttattacaatgcaattttaataatctatattatctatctatatttaataatatatctttgttaagcttattctaataaaggatgctaagaaaacatactgaaagctgggtgtggtggctcacgcctgtaatcccagcactttgggaggccaagatgggcggatcacttgagggcaggacttcgagaccagcctggccaacatggtgaaaccctgtctctaccaaaaataacctggtgactgagcgagactctgtcaaaaaaaaaaaaaaaaaaatagagaagaagaaaacattgaggatactttcagccgagtctttgagggcaataggttttgtgaaagtgtcctcattggaggaaatgatatgagcatcaaagaaaagtaggaca

SEQ ID NO: 680650 - DNA, 596 bp, Homo sapiens
atatatatatatatatatatatwtatatatctcatatgagatacacacacatacacacacacacatatatatgtacatatatatgtgtatatgtgtatgtatgcctatgtgtgtgtgtgtgtttgtgtgtgtgtgtgtgtgtgtgtgtgtgtatatatatatatatatatatatgaaatctaggcatactgccccaggaaattgaactttttctacttcagccaattaactactgactagcaattgattcccaaaagtatctccatcaaattagtgtcaatcctgataacaatgacatggcataggatcttgtacttcttctctattacagtaatgatcaagataattatatatataattatatttgaattcttttcccactacactgatctactttgggaaattatgggtaaatcatcagtatttccctagtgattgccacaattcctggcacatagagggatttaaaatatctattaaatgataattaataattactgagtaattacctaattggtagacactgtgatatggactttaaatgcaatatctcatttaatttttatacttattttgtgaaggaaatacaataatta

SEQ ID NO: 680651 - DNA, 596 bp, Homo sapiens
atatatatatatatatatatatatatatatmtcatatgagatacacacacatacacacacacacatatatatgtacatatatatgtgtatatgtgtatgtatgcctatgtgtgtgtgtgtgtttgtgtgtgtgtgtgtgtgtgtgtgtgtgtatatatatatatatatatatatgaaatctaggcatactgccccaggaaattgaactttttctacttcagccaattaactactgactagcaattgattcccaaaagtatctccatcaaattagtgtcaatcctgataacaatgacatggcataggatcttgtacttcttctctattacagtaatgatcaagataattatatatataattatatttgaattcttttcccactacactgatctactttgggaaattatgggtaaatcatcagtatttccctagtgattgccacaattcctggcacatagagggatttaaaatatctattaaatgataattaataattactgagtaattacctaattggtagacactgtgatatggactttaaatgcaatatctcatttaatttttatacttattttgtgaaggaaatacaataatta

SEQ ID NO: 680652 - DNA, 596 bp, Homo sapiens
atatatatatatatatatatatatatatatctcatatgagatacacacacatacacacacacacatatatatgtacatatatatgtgtatatgtgtatgtatgcctatgtgtgtgtgtgtgtttgtgtgtgtgtgtgtgtgtgtgtgtrtgtatatatatatatatatatatatgaaatctaggcatactgccccaggaaattgaactttttctacttcagccaattaactactgactagcaattgattcccaaaagtatctccatcaaattagtgtcaatcctgataacaatgacatggcataggatcttgtacttcttctctattacagtaatgatcaagataattatatatataattatatttgaattcttttcccactacactgatctactttgggaaattatgggtaaatcatcagtatttccctagtgattgccacaattcctggcacatagagggatttaaaatatctattaaatgataattaataattactgagtaattacctaattggtagacactgtgatatggactttaaatgcaatatctcatttaatttttatacttattttgtgaaggaaatacaataatta

SEQ ID NO: 680653 - DNA, 596 bp, Homo sapiens
atatatatatatatatatatatatatatatctcatatgagatacacacacatacacacacacacatatatatgtacatatatatgtgtatatgtgtatgtatgcctatgtgtgtgtgtgtgtttgtgtgtgtgtgtgtgtgtgtgtgtgtrtatatatatatatatatatatatgaaatctaggcatactgccccaggaaattgaactttttctacttcagccaattaactactgactagcaattgattcccaaaagtatctccatcaaattagtgtcaatcctgataacaatgacatggcataggatcttgtacttcttctctattacagtaatgatcaagataattatatatataattatatttgaattcttttcccactacactgatctactttgggaaattatgggtaaatcatcagtatttccctagtgattgccacaattcctggcacatagagggatttaaaatatctattaaatgataattaataattactgagtaattacctaattggtagacactgtgatatggactttaaatgcaatatctcatttaatttttatacttattttgtgaaggaaatacaataatta

SEQ ID NO: 680654 - DNA, 1565 bp, Homo sapiens
gaatatttaaaaaaaaaaacaaaactatagatttcaaatgccactttttccctaatattttgaagggaacaattgcatcatttacttccacattatctaaaacaggatatggactgaaaagagagctacacacgaacaaacaatggtggctaaaaataattccagggcctacatacattaacatactatgaattagttcagtgaaaagtcctaaactgttaagtcacacagacctagttcaaattcaaggtctgtccacagtagctgcatattctatattaggattttaaggtggcaattgacaaaaactgaactttatactgacatagagattacaggattgattgaaaagatactgggtgcttcagaaaacctaagggtcaacccaagggacctcaagaattagagcagaggactcagtaccaacagaactttctttttatctcctccttacattatttccttgcattctctcacctgttcctgcagcatcaacaagactgccctcaactgtgggattacatacatagcactggtggtcaaaaataaagaagttttcactgccagctccagcacaaaatccaaggtagtgactccaattgccctagctggaccatctcctgtttccagacagatgagatctgtcatcagaagaatgatgacaatgagaatgtcaccaagtaacaaaaccatagttgccacagaaactcaagccgttatctaaaaagtgaggtaattccattccccattggcttataataacggtgagttgagtaatgtacgtaaagcaactggcacacgatagatgctaaataactgtgaggctcttcaagttctacagcccttcctccaagttttgggaagctgctgacaaagaacaggaagaccggataaaaaggtgtgtgtgtgcagtcatgtgctcacatgtgcctgtgtgtgttttgtaggggaaatgagcttgcctctcttgctctgtgcctctcttgactcatgtcctaaatattatgcaacccaaggtgaaagtagaaatagaaaaagttgcctcttctttctggaattttactgtatgcctcctaaaaagtaaaattctgtaattgctctattatagtttctgtcatattaattacagttattaatttgcatgcctttctcctctgatgaaatgcaagctcttcaaatgcagaaagcatgttgtattcatctctgcatttttagaatccagaattttcacaaggtatgtgtctaataaaattactgaatgaatgagttgagagggtgtggagtttatggctgtggttaggttttcattgcattgtttacaaggtatacataatcataatcaaaataattgcatgtatccttcattaataagttactaataaagacataatatctaaatactttgcgtgtaccacctcatttaattcttccaatattttctgcattttatagtatttcttcacttttcccttctctcctgctattgcttttttagatagaggaaataagagttaaagatakgaagtaaatgaaagttaaagaggtcaagtaatatttcccagtta

SEQ ID NO: 680655 - DNA, 1389 bp, Homo sapiens
agagttactttcctgagcgcttactccatgctgagccctggcctcaggttgctgttagtctaggacagcatcasacacaatcgtctgtttccttacgtcagattcatactactatatacacatctcaaagatgcacaagggaaagagtactcctgtcgcagaggcaggaaggcttcctgcagatagtagtatttgagcttgttttgcaacaaacagtaccaggtagacaaggaaggggcaagacatttcaggcaagaggaccactgtgacatattaggagaatcgcaagaagaatgtgggtttgtgcagaagggtttcaaagattctagtgcatagtaataagtaaatacatacaagacagagtcctaaagaatggatgaggaaggtgagccagaaggattcctgtcactgaggaatatgattgtcttccccacacagagcctggggacccactcagccaaatttctccaacctccccaggcaccaaaatgtgagtcatcccggcattcccctgccaccatctgtcacaaggtccccaaaggatgtggagagagtctccatggactctgggacagtggaaagggaaggaggaggcaggaagaaaacagaaagagccattccctcaggggctacaaagactataagtccccctgttactacctctggactagggcatgtccctgctacctccccctgccagtctcatgccacaggctgcactgaagctgctctgctgaaagaactccccacccacctccactatttaggtatgtcctaacaatccaataaccacatgcctttgcaatgacagcagctgctgtctgaaccaagacatattaaatgtctgtgtcctggggaggatgacctaaggacttgggcttgttaagaaaagggcaagccacatattgagaaatgccaggaggccagccccaccggactcaaatgcgttcatgagtagagtggggcctggagagcagaggataagtcaagacagagttcagcagaaagctagcaggaagaggctaaggaaccctccagaaagctgaaatcctaagatatcaaagctggaaatactgtccaatatcacctagggtcttaccatgcaagcggtgcccaggctgcagcatcaacaaacacctaggagtttgttagaaatgcagaattttcagagcagtcctgaggcaggcactgcatttaaatactatctccagctgattcctatgcaccctaaaggttgggaagcactgcttgagggtcccaaatcagctgcatatcagaatcacctggaacattttttttccaactacagatttccaagccccactctgcatcaattgtttaggatatctgggcactgtgtgtagcaatctattttttcacaaagctcca

SEQ ID NO: 680656 - DNA, 1389 bp, Homo sapiens
agagttactttcctgagcgcttactccatgctgagccctggcctcaggttgctgttagtctaggacagcatcacacacaatcgtctgtttccttacgtcagattcatactactatatacacatctcaaagatgcacaagggaaagagtactcctgtcgcagaggcaggaaggcttcctgcagatagtagtatttgagcttgttttgcaacaaacagtaccaggtagacaaggaaggggcaagacatttcaggcaagaggaccactgtgacatattaggagaatcgcaagaagaatgtgggtttgtgcagaagggtttcaargattctagtgcatagtaataagtaaatacatacaagacagagtcctaaagaatggatgaggaaggtgagccagaaggattcctgtcactgaggaatatgattgtcttccccacacagagcctggggacccactcagccaaatttctccaacctccccaggcaccaaaatgtgagtcatcccggcattcccctgccaccatctgtcacaaggtccccaaaggatgtggagagagtctccatggactctgggacagtggaaagggaaggaggaggcaggaagaaaacagaaagagccattccctcaggggctacaaagactataagtccccctgttactacctctggactagggcatgtccctgctacctccccctgccagtctcatgccacaggctgcactgaagctgctctgctgaaagaactccccacccacctccactatttaggtatgtcctaacaatccaataaccacatgcctttgcaatgacagcagctgctgtctgaaccaagacatattaaatgtctgtgtcctggggaggatgacctaaggacttgggcttgttaagaaaagggcaagccacatattgagaaatgccaggaggccagccccaccggactcaaatgcgttcatgagtagagtggggcctggagagcagaggataagtcaagacagagttcagcagaaagctagcaggaagaggctaaggaaccctccagaaagctgaaatcctaagatatcaaagctggaaatactgtccaatatcacctagggtcttaccatgcaagcggtgcccaggctgcagcatcaacaaacacctaggagtttgttagaaatgcagaattttcagagcagtcctgaggcaggcactgcatttaaatactatctccagctgattcctatgcaccctaaaggttgggaagcactgcttgagggtcccaaatcagctgcatatcagaatcacctggaacattttttttccaactacagatttccaagccccactctgcatcaattgtttaggatatctgggcactgtgtgtagcaatctattttttcacaaagctcca

SEQ ID NO: 680657 - DNA, 593 bp, Homo sapiens
gtggagcattttttgcttttcaagtaacttcgtaaatactgacttgcctatctcccaatgtacactgttaccatgtgtgtatacacacacatatacacatatgaacccatgtagatacacacaygcatgcacgcatacatacacatatatactggccaggagcagtggctcacgcctgtaatcccaacaatttgggaggccaaggcgggtggatcacctgaggtcaggagttcaagacccacctgggcaacacggtgaaacccagtctctaccaaaaatacaaaaaattagccgagcctggtggcaggtgcctgtaatcccagctacttgggaggctgaggcaggagaaatgcttgaacccagaaggcagaggttgcagtgatccaagatcatgccattgcactccagcctgggcaacaagaatgaaactctgtctcaaaaataaataaataaataaataaacaaacaaacacacacatgtacattcatcactgacttcctaatacctaacacagagctggggaatgagtgggtgctcgttaaacatttgttaaccaaacaaaaaagattttctactaaagggcagtggtcta

SEQ ID NO: 680658 - DNA, 601 bp, Homo sapiens
tgtccagtcccaaactccaactatatyaagctgcccccaaaatgccagtccataattaaactttattttcaaatacttgtcagagtttagtcttggcaagaagcacttcttaccttttgaactttcagactgctgagctgagggaaatggctggagttttcctttgaacaaaagcctacaaggattttttttgaacttcttatttattcaaatgttctgaatacaaatgaaccaccttagttggatatttattattgttcacttgccttgacacagaaactgcaagcactatgataaataggctgaagggtctggtttcactgtggttcccttctgctgaaatcttattttgaaaatttctcactgccaccctccttggtgaatgtcagcatctgttctcctaagccagttgtattcaaaaggatctgttttttaaacataaacttaaaatttcaagcacacaacattgctttcattaaataggggttttggttgactcattatgaaactgcatacagcaaaaacaatcaggaacttttaaagacaaaaggactctaaaagcacaccaaggtgatgtgaataaaattagatgaaagctcat

SEQ ID NO: 680659 - DNA, 638 bp, Homo sapiens
tcaggggaatgaattgagacatgtgaatttcaacaaaaattcaggccatagcagtgcctaagctatctaggcctttccccttgcctgtcctgctcataggcatggtttttcgacagctatgcttctcttggaacacttggctttcaggctacagctgataggttcagatttgaaaatttggaattaagagctccagaaaatgaaagctctggtttgccaagtgatgttaatgtgaacacaataaaaacaaggatcataaacttctgttgctaagtcccccacactttctgagtgaagtccatgccattccccagtatctttccaataagttctttcacctttttggtaagcctctttatatttcttgcaacatatgatcttaaataatacaaccatttcgaataaaaactttttcctggattattttcccctgccagattcttctaaagacaagctccccacaaccartggtagctttctggttttgctggctgtgtcatcagctccatctattcctatgatctccagagacactctttgcctcctctggctatcagttcttgaggactttttgcttagtaatgcttatttttaaaaagatagttggatttcctatgagaatcatatcctggcataat

SEQ ID NO: 680660 - DNA, 2145 bp, Homo sapiens
ttctgcaagctctgcaaacctctcatctccaggttgtaagtaagttacaatatttagctagtaagaaccatgtcaaataactactttcttctggaatgttccaagttatgagcctatcaattttttaggaattacttccaacaaagggaaggatccttcaatagtaattccagcctccatagctattacccttgtgttgcattttctaatcaagttatataagacaccatcacacacttcctatagagaaattgcttgtaacagttcmtttacgtttttaagaaattcattgtctcctaaccatcctccatttactacctggccccaactacaatgccacatgtttttttaaaactgcatggtagcatccaattctagggtcagatttctgtttcagttatctattgcctaaagaaaacctccaaaactactgacttaaaacaacagtgacttacaatttctcagttcgttgggttgacttgtggtacatcacctgagcttgaagattctacatggagatgctgactcagttcttcttgggcaggcctcttatcctagaaatccagtagcctagacctgccaccgtgcaggactccagggttccctggcttgcaaatggaccaaggagaaaattctacggcagcgggtaactgtgtaatgggtcacaacaggaaacctatgggacagattcttaaaatgctgtggcagaaagtcacctcacacagagcctatacagatacaagagtgatttccagtaactgaggcaaggctaagtacctgaaatgtagcagtcggaccaggaagagagaaaaacaaacaaacaaaacaaaaacaaccacttccccagcttttgtctctctgtaggtagagaagcactctacagtgatcaaaaggctggagaaatgctccatgaaccaaagttatttaaccaaataattttcctcaacatttattctaagaccaagtttcaccacagtatgacagtgctggggaaggagggggacaataatggaatctgcagcagaatggggctgtgactgagaatgtggctgagaacaggagccccaggtgctcacacctcacatttctgggcttatgtttctccttcctagatagaagagtgtgagaaaggagtgatagctgaggtcaggagtttgaggccaacctgaccaacatggcaaaaccccgtctctagtaaaaatacaaaaattagccgggtgtggtggcaggagcctgtaatcccagctacttgggaggctgagacaggagaatcgcttgaacctggaaggcggaggttgcagtgagccgagattgtgccattgcactccagcctggggacagagcgagactctgtctcaaaaaaaaaaaaagaagaagaaaaagaaaagaaagtaatggtggcaaacaagtgccaaaaggaagtcagtggaaaaaccacaatcttgcaaattactttatttattaataattaaataaaataataatgaagcaatttttcgttttgctttgttttgttttgagatggagtctcgctctgttgcccaggctggagtgtggtgcaatgtctgctgactgcaagctccacctccagggttcacaccattctactgcctcagcctcctgagtagctgggactgcaggtgcccaccaccacgcctggctaatttttttgtacttttagtagagatggggtttcatcgtgttagccaggatggtctccatctcctgacctcatgatccacccgcctcggcctcccaaagtgctgggattacaaacgtgagccaccgcgcccggcctgaagtaagtttttaaagaaacaatttagaaaaactcaaaaacaataaaggatacctggagagataaaagaaaagagaaaattttcttttagaaaatagttaacataaaactttaaatttaacaaatgctaatctttaaaaataagataaagtaggtcaacctcaactaaatctaatcagaaatatggaaaacatactaaacattgaataagaaagaaaatctaagtaaatataaagagggcattaaaatttaagagattgttatgcagaagtatttgccaataaatttaaaaacggaccattttctgagcaattaatttagttaaattagcaacaaaatgaataagc

SEQ ID NO: 680661 - DNA, 2145 bp, Homo sapiens
ttctgcaagctctgcaaacctctcatctccaggttgtaagtaagttacaatatttagctagtaagaaccatgtcaaataactactttcttctggaatgttccaagttatgagcctatcaattttttaggaattacttccaacaaagggaaggatccttcaatagtaattccagcctccatagctattacccttgtgttgcattttctaatcaagttatataagacaccatcacacacttcctatagagaaattgcttgtaacagttcctttacgtttttaagaaattcattgtctcctaaccatcctccatttactacctggccccaactacaatgccacatgtttttttaaaactgcatggtakcatccaattctagggtcagatttctgtttcagttatctattgcctaaagaaaacctccaaaactactgacttaaaacaacagtgacttacaatttctcagttcgttgggttgacttgtggtacatcacctgagcttgaagattctacatggagatgctgactcagttcttcttgggcaggcctcttatcctagaaatccagtagcctagacctgccaccgtgcaggactccagggttccctggcttgcaaatggaccaaggagaaaattctacggcagcgggtaactgtgtaatgggtcacaacaggaaacctatgggacagattcttaaaatgctgtggcagaaagtcacctcacacagagcctatacagatacaagagtgatttccagtaactgaggcaaggctaagtacctgaaatgtagcagtcggaccaggaagagagaaaaacaaacaaacaaaacaaaaacaaccacttccccagcttttgtctctctgtaggtagagaagcactctacagtgatcaaaaggctggagaaatgctccatgaaccaaagttatttaaccaaataattttcctcaacatttattctaagaccaagtttcaccacagtatgacagtgctggggaaggagggggacaataatggaatctgcagcagaatggggctgtgactgagaatgtggctgagaacaggagccccaggtgctcacacctcacatttctgggcttatgtttctccttcctagatagaagagtgtgagaaaggagtgatagctgaggtcaggagtttgaggccaacctgaccaacatggcaaaaccccgtctctagtaaaaatacaaaaattagccgggtgtggtggcaggagcctgtaatcccagctacttgggaggctgagacaggagaatcgcttgaacctggaaggcggaggttgcagtgagccgagattgtgccattgcactccagcctggggacagagcgagactctgtctcaaaaaaaaaaaaagaagaagaaaaagaaaagaaagtaatggtggcaaacaagtgccaaaaggaagtcagtggaaaaaccacaatcttgcaaattactttatttattaataattaaataaaataataatgaagcaatttttcgttttgctttgttttgttttgagatggagtctcgctctgttgcccaggctggagtgtggtgcaatgtctgctgactgcaagctccacctccagggttcacaccattctactgcctcagcctcctgagtagctgggactgcaggtgcccaccaccacgcctggctaatttttttgtacttttagtagagatggggtttcatcgtgttagccaggatggtctccatctcctgacctcatgatccacccgcctcggcctcccaaagtgctgggattacaaacgtgagccaccgcgcccggcctgaagtaagtttttaaagaaacaatttagaaaaactcaaaaacaataaaggatacctggagagataaaagaaaagagaaaattttcttttagaaaatagttaacataaaactttaaatttaacaaatgctaatctttaaaaataagataaagtaggtcaacctcaactaaatctaatcagaaatatggaaaacatactaaacattgaataagaaagaaaatctaagtaaatataaagagggcattaaaatttaagagattgttatgcagaagtatttgccaataaatttaaaaacggaccattttctgagcaattaatttagttaaattagcaacaaaatgaataagc

SEQ ID NO: 680662 - DNA, 2145 bp, Homo sapiens
ttctgcaagctctgcaaacctctcatctccaggttgtaagtaagttacaatatttagctagtaagaaccatgtcaaataactactttcttctggaatgttccaagttatgagcctatcaattttttaggaattacttccaacaaagggaaggatccttcaatagtaattccagcctccatagctattacccttgtgttgcattttctaatcaagttatataagacaccatcacacacttcctatagagaaattgcttgtaacagttcctttacgtttttaagaaattcattgtctcctaaccatcctccatttactacctggccccaactacaatgccacatgtttttttaaaactgcatggtagcatccaattctagggtcagatttctgtttcagttatctattgcctaaagaaaacctccaaaactactgacttaaaacaacagtgacttacaatttctcagttcgttgggttgacttgtggtacatcacctgagcttgaagattctasatggagatgctgactcagttcttcttgggcaggcctcttatcctagaaatccagtagcctagacctgccaccgtgcaggactccagggttccctggcttgcaaatggaccaaggagaaaattctacggcagcgggtaactgtgtaatgggtcacaacaggaaacctatgggacagattcttaaaatgctgtggcagaaagtcacctcacacagagcctatacagatacaagagtgatttccagtaactgaggcaaggctaagtacctgaaatgtagcagtcggaccaggaagagagaaaaacaaacaaacaaaacaaaaacaaccacttccccagcttttgtctctctgtaggtagagaagcactctacagtgatcaaaaggctggagaaatgctccatgaaccaaagttatttaaccaaataattttcctcaacatttattctaagaccaagtttcaccacagtatgacagtgctggggaaggagggggacaataatggaatctgcagcagaatggggctgtgactgagaatgtggctgagaacaggagccccaggtgctcacacctcacatttctgggcttatgtttctccttcctagatagaagagtgtgagaaaggagtgatagctgaggtcaggagtttgaggccaacctgaccaacatggcaaaaccccgtctctagtaaaaatacaaaaattagccgggtgtggtggcaggagcctgtaatcccagctacttgggaggctgagacaggagaatcgcttgaacctggaaggcggaggttgcagtgagccgagattgtgccattgcactccagcctggggacagagcgagactctgtctcaaaaaaaaaaaaagaagaagaaaaagaaaagaaagtaatggtggcaaacaagtgccaaaaggaagtcagtggaaaaaccacaatcttgcaaattactttatttattaataattaaataaaataataatgaagcaatttttcgttttgctttgttttgttttgagatggagtctcgctctgttgcccaggctggagtgtggtgcaatgtctgctgactgcaagctccacctccagggttcacaccattctactgcctcagcctcctgagtagctgggactgcaggtgcccaccaccacgcctggctaatttttttgtacttttagtagagatggggtttcatcgtgttagccaggatggtctccatctcctgacctcatgatccacccgcctcggcctcccaaagtgctgggattacaaacgtgagccaccgcgcccggcctgaagtaagtttttaaagaaacaatttagaaaaactcaaaaacaataaaggatacctggagagataaaagaaaagagaaaattttcttttagaaaatagttaacataaaactttaaatttaacaaatgctaatctttaaaaataagataaagtaggtcaacctcaactaaatctaatcagaaatatggaaaacatactaaacattgaataagaaagaaaatctaagtaaatataaagagggcattaaaatttaagagattgttatgcagaagtatttgccaataaatttaaaaacggaccattttctgagcaattaatttagttaaattagcaacaaaatgaataagc

SEQ ID NO: 680663 - DNA, 2145 bp, Homo sapiens
ttctgcaagctctgcaaacctctcatctccaggttgtaagtaagttacaatatttagctagtaagaaccatgtcaaataactactttcttctggaatgttccaagttatgagcctatcaattttttaggaattacttccaacaaagggaaggatccttcaatagtaattccagcctccatagctattacccttgtgttgcattttctaatcaagttatataagacaccatcacacacttcctatagagaaattgcttgtaacagttcctttacgtttttaagaaattcattgtctcctaaccatcctccatttactacctggccccaactacaatgccacatgtttttttaaaactgcatggtagcatccaattctagggtcagatttctgtttcagttatctattgcctaaagaaaacctccaaaactactgacttaaaacaacagtgacttacaatttctcagttcgttgggttgacttgtggtacatcacctgagcttgaagattctacatggagatgctgactcagttcttcttgggcaggcctcttatcctagaaatccagtagcctagacctgccaccgtgcaggactccagggttccctggcttgcaaatggaccaaggagaaaattctacggcagcgggtaactgtgtaatgggtcacaacaggaaacctatgggacagattcttaaaatgctgtggcagaaagtcacctcacacagagcctatacagatacaagagtgatttccagtaactgaggcaaggctaagtacctgaaaygtagcagtcggaccaggaagagagaaaaacaaacaaacaaaacaaaaacaaccacttccccagcttttgtctctctgtaggtagagaagcactctacagtgatcaaaaggctggagaaatgctccatgaaccaaagttatttaaccaaataattttcctcaacatttattctaagaccaagtttcaccacagtatgacagtgctggggaaggagggggacaataatggaatctgcagcagaatggggctgtgactgagaatgtggctgagaacaggagccccaggtgctcacacctcacatttctgggcttatgtttctccttcctagatagaagagtgtgagaaaggagtgatagctgaggtcaggagtttgaggccaacctgaccaacatggcaaaaccccgtctctagtaaaaatacaaaaattagccgggtgtggtggcaggagcctgtaatcccagctacttgggaggctgagacaggagaatcgcttgaacctggaaggcggaggttgcagtgagccgagattgtgccattgcactccagcctggggacagagcgagactctgtctcaaaaaaaaaaaaagaagaagaaaaagaaaagaaagtaatggtggcaaacaagtgccaaaaggaagtcagtggaaaaaccacaatcttgcaaattactttatttattaataattaaataaaataataatgaagcaatttttcgttttgctttgttttgttttgagatggagtctcgctctgttgcccaggctggagtgtggtgcaatgtctgctgactgcaagctccacctccagggttcacaccattctactgcctcagcctcctgagtagctgggactgcaggtgcccaccaccacgcctggctaatttttttgtacttttagtagagatggggtttcatcgtgttagccaggatggtctccatctcctgacctcatgatccacccgcctcggcctcccaaagtgctgggattacaaacgtgagccaccgcgcccggcctgaagtaagtttttaaagaaacaatttagaaaaactcaaaaacaataaaggatacctggagagataaaagaaaagagaaaattttcttttagaaaatagttaacataaaactttaaatttaacaaatgctaatctttaaaaataagataaagtaggtcaacctcaactaaatctaatcagaaatatggaaaacatactaaacattgaataagaaagaaaatctaagtaaatataaagagggcattaaaatttaagagattgttatgcagaagtatttgccaataaatttaaaaacggaccattttctgagcaattaatttagttaaattagcaacaaaatgaataagc

SEQ ID NO: 680664 - DNA, 2145 bp, Homo sapiens
ttctgcaagctctgcaaacctctcatctccaggttgtaagtaagttacaatatttagctagtaagaaccatgtcaaataactactttcttctggaatgttccaagttatgagcctatcaattttttaggaattacttccaacaaagggaaggatccttcaatagtaattccagcctccatagctattacccttgtgttgcattttctaatcaagttatataagacaccatcacacacttcctatagagaaattgcttgtaacagttcctttacgtttttaagaaattcattgtctcctaaccatcctccatttactacctggccccaactacaatgccacatgtttttttaaaactgcatggtagcatccaattctagggtcagatttctgtttcagttatctattgcctaaagaaaacctccaaaactactgacttaaaacaacagtgacttacaatttctcagttcgttgggttgacttgtggtacatcacctgagcttgaagattctacatggagatgctgactcagttcttcttgggcaggcctcttatcctagaaatccagtagcctagacctgccaccgtgcaggactccagggttccctggcttgcaaatggaccaaggagaaaattctacggcagcgggtaactgtgtaatgggtcacaacaggaaacctatgggacagattcttaaaatgctgtggcagaaagtcacctcacacagagcctatacagatacaagagtgatttccagtaactgaggcaaggctaagtacctgaaatgtagcagtcggaccaggaagagagaaaaacaaacaaacaaaacaaaaacaaccacttccccagcttttgtctctctgtaggtagagaagcactctacagtgatyaaaaggctggagaaatgctccatgaaccaaagttatttaaccaaataattttcctcaacatttattctaagaccaagtttcaccacagtatgacagtgctggggaaggagggggacaataatggaatctgcagcagaatggggctgtgactgagaatgtggctgagaacaggagccccaggtgctcacacctcacatttctgggcttatgtttctccttcctagatagaagagtgtgagaaaggagtgatagctgaggtcaggagtttgaggccaacctgaccaacatggcaaaaccccgtctctagtaaaaatacaaaaattagccgggtgtggtggcaggagcctgtaatcccagctacttgggaggctgagacaggagaatcgcttgaacctggaaggcggaggttgcagtgagccgagattgtgccattgcactccagcctggggacagagcgagactctgtctcaaaaaaaaaaaaagaagaagaaaaagaaaagaaagtaatggtggcaaacaagtgccaaaaggaagtcagtggaaaaaccacaatcttgcaaattactttatttattaataattaaataaaataataatgaagcaatttttcgttttgctttgttttgttttgagatggagtctcgctctgttgcccaggctggagtgtggtgcaatgtctgctgactgcaagctccacctccagggttcacaccattctactgcctcagcctcctgagtagctgggactgcaggtgcccaccaccacgcctggctaatttttttgtacttttagtagagatggggtttcatcgtgttagccaggatggtctccatctcctgacctcatgatccacccgcctcggcctcccaaagtgctgggattacaaacgtgagccaccgcgcccggcctgaagtaagtttttaaagaaacaatttagaaaaactcaaaaacaataaaggatacctggagagataaaagaaaagagaaaattttcttttagaaaatagttaacataaaactttaaatttaacaaatgctaatctttaaaaataagataaagtaggtcaacctcaactaaatctaatcagaaatatggaaaacatactaaacattgaataagaaagaaaatctaagtaaatataaagagggcattaaaatttaagagattgttatgcagaagtatttgccaataaatttaaaaacggaccattttctgagcaattaatttagttaaattagcaacaaaatgaataagc

SEQ ID NO: 680665 - DNA, 2145 bp, Homo sapiens
ttctgcaagctctgcaaacctctcatctccaggttgtaagtaagttacaatatttagctagtaagaaccatgtcaaataactactttcttctggaatgttccaagttatgagcctatcaattttttaggaattacttccaacaaagggaaggatccttcaatagtaattccagcctccatagctattacccttgtgttgcattttctaatcaagttatataagacaccatcacacacttcctatagagaaattgcttgtaacagttcctttacgtttttaagaaattcattgtctcctaaccatcctccatttactacctggccccaactacaatgccacatgtttttttaaaactgcatggtagcatccaattctagggtcagatttctgtttcagttatctattgcctaaagaaaacctccaaaactactgacttaaaacaacagtgacttacaatttctcagttcgttgggttgacttgtggtacatcacctgagcttgaagattctacatggagatgctgactcagttcttcttgggcaggcctcttatcctagaaatccagtagcctagacctgccaccgtgcaggactccagggttccctggcttgcaaatggaccaaggagaaaattctacggcagcgggtaactgtgtaatgggtcacaacaggaaacctatgggacagattcttaaaatgctgtggcagaaagtcacctcacacagagcctatacagatacaagagtgatttccagtaactgaggcaaggctaagtacctgaaatgtagcagtcggaccaggaagagagaaaaacaaacaaacaaaacaaaaacaaccacttccccagcttttgtctctctgtaggtagagaagcactctacagtgatcaaaaggctggagaaatgctccatgaaccaaagttatttaaccaaataattttcctcaacatttattctaagaccaagtttcaccacagtatgacagtgctggggaaggagggggacaataatggaatctgcagcagaatggggctgtgactgagaatgtggctgagaacaggagccccaggtgctcacacctcacatttctgggcttatgtttctccttcctagatagaaragtgtgagaaaggagtgatagctgaggtcaggagtttgaggccaacctgaccaacatggcaaaaccccgtctctagtaaaaatacaaaaattagccgggtgtggtggcaggagcctgtaatcccagctacttgggaggctgagacaggagaatcgcttgaacctggaaggcggaggttgcagtgagccgagattgtgccattgcactccagcctggggacagagcgagactctgtctcaaaaaaaaaaaaagaagaagaaaaagaaaagaaagtaatggtggcaaacaagtgccaaaaggaagtcagtggaaaaaccacaatcttgcaaattactttatttattaataattaaataaaataataatgaagcaatttttcgttttgctttgttttgttttgagatggagtctcgctctgttgcccaggctggagtgtggtgcaatgtctgctgactgcaagctccacctccagggttcacaccattctactgcctcagcctcctgagtagctgggactgcaggtgcccaccaccacgcctggctaatttttttgtacttttagtagagatggggtttcatcgtgttagccaggatggtctccatctcctgacctcatgatccacccgcctcggcctcccaaagtgctgggattacaaacgtgagccaccgcgcccggcctgaagtaagtttttaaagaaacaatttagaaaaactcaaaaacaataaaggatacctggagagataaaagaaaagagaaaattttcttttagaaaatagttaacataaaactttaaatttaacaaatgctaatctttaaaaataagataaagtaggtcaacctcaactaaatctaatcagaaatatggaaaacatactaaacattgaataagaaagaaaatctaagtaaatataaagagggcattaaaatttaagagattgttatgcagaagtatttgccaataaatttaaaaacggaccattttctgagcaattaatttagttaaattagcaacaaaatgaataagc

SEQ ID NO: 680666 - DNA, 606 bp, Homo sapiens
ttgacagagtgctgattggtccattttgacagagtgctgattggtccattttacagagtgctgataggtctgttttgacagagtgtggattggtccatttacaaacctttagctagacacagagcactgactggtgcatttacaatcctttagctagacagaaaagttctccaagtccccaccccactcagaagcccagcaggcttcacctctcaacatcctgcagaaacattcctatggattctccacacacatgattacttggattttttttttttttttgagatggagtttcgctctgtcgcccaggctggagtgcagtggtgtgatctcagctcactgcaagctccacctcccrggttcacaccatttttctgcctcagcctcccaagtagctgggactacaggcgcccgccaccaggcctagctaattttttgtatttttagtaaagatggggtctcaccatgttagccaggatggtctcgatctcctgaccttgtgatccacccaccttggcatcccaaagtgctgggattacaggcatgagccagcacacctggccaattccttggattttatggtttgacttcccagatttgactgca

SEQ ID NO: 680667 - DNA, 1851 bp, Homo sapiens
ggaaagccaaacaggaaatctgaggactatttgcagtataattcagttaatatttaggatctatctctgttagggtgaattcagctacgatatagagacatccaactaactgtggcttaattaatgaagatatttaattatcttacataacaagaactctgaaggttggtacttccagagtttggtataatggttcaaatatttcatgagaaactaaatctttctgtcttgttctttcattctaatatttttctataggtttttaccttatggatgtaagayggctgcttcagctccaattgtcaaatcctcccacaaccacactcatggaaagaactatgtagcaggggaaaaacaaccttctcttctcgatcttctctctttttattcagtaaatcagtctttttcagaagccactcagatgatttcccattatgtcttattgaccagagctggatcacatgttcactcctggatgtattactaacagaggggaatgaaatttccatgaatgccttagagcaatcatgatttgtctcccaggatgaaggaactcttaccttccatgagaacaaagaatctcatgttaccacatgagttggagtcagcttgtgggtaggcaacactatttgccatagaaacctgtcagtcaggattgtatcagattcctctgatttagaaaaacaaaataatagtagtgaatataattatatcattaggctgggagtggtggctcacatctgtaatcccaacactttgggaggctgatgtgggcagatcgtttgagcccaggagttcaagaccagcctgggcaacatggcaagaccccatctctacaaaaaatatataaaaattagccatgcatggtggtgtgtgcctgtagtcccagctactcaggatgctgaggtggggagtatgacttgaacccaggaagtggaggttgcagtgagctgagatcacgccactgcactccagccttggtggagccagactctctttcaataataatatcattaaaaatcttgcctctaaacattctaataaaaaggagtttcagggaaaacacaactatttctaaaacaggaagggataagttgtaaacaacaccacataaattgttaaaatatcaattccattttggaaaatacaaatatctgggcagttttagagactcaaataatatgatactttaaaaaaaatctgtatccagagccacttacatcaatgcttacagcaaatacatactaattggctaaagattttatttagctccatggtttttataatctcgttatacttaagggtggacaaaagacaagcaaaaatatggagcaacctttcatactcaaactttggcttccactccacctgcaattatattctcaactttatggtgcatcaaactcactgacataaaagccatctcaaatcacttcaaactttccattgcatcctagagatatattggctctgaaccaagtacctaggtactaactagtttagttttaatttagagcagatggactggggttctcaaggttgcattgagaggatctacttggaggacacctcgtggtctctgtaacacagcagatggtgaaaatattttaaggctattttcaaatgatgttagcaaaactacatttccatcaattgtcttatatggctttcataaatatgatttttcttccaaatcaagaatgacaatgatagagcttagcagggttcttttgagatgtcattatcaacaatgacacacagaggatttatattcaaagttcaaagatgaactgaaagcaagaaaacattgtatctcatgagataaatagatattgataaatgatgttataa

SEQ ID NO: 680668 - DNA, 1851 bp, Homo sapiens
ggaaagccaaacaggaaatctgaggactatttgcagtataattcagttaatatttaggatctatctctgttagggtgaattcagctacgatatagagacatccaactaactgtggcttaattaatgaagatatttaattatcttacataacaagaactctgaaggttggtacttccagagtttggtataatggttcaaatatttcatgagaaactaaatctttctgtcttgttctttcattctaatatttttctataggtttttaccttatggatgtaagatggctgcttcagctccaattrtcaaatcctcccacaaccacactcatggaaagaactatgtagcaggggaaaaacaaccttctcttctcgatcttctctctttttattcagtaaatcagtctttttcagaagccactcagatgatttcccattatgtcttattgaccagagctggatcacatgttcactcctggatgtattactaacagaggggaatgaaatttccatgaatgccttagagcaatcatgatttgtctcccaggatgaaggaactcttaccttccatgagaacaaagaatctcatgttaccacatgagttggagtcagcttgtgggtaggcaacactatttgccatagaaacctgtcagtcaggattgtatcagattcctctgatttagaaaaacaaaataatagtagtgaatataattatatcattaggctgggagtggtggctcacatctgtaatcccaacactttgggaggctgatgtgggcagatcgtttgagcccaggagttcaagaccagcctgggcaacatggcaagaccccatctctacaaaaaatatataaaaattagccatgcatggtggtgtgtgcctgtagtcccagctactcaggatgctgaggtggggagtatgacttgaacccaggaagtggaggttgcagtgagctgagatcacgccactgcactccagccttggtggagccagactctctttcaataataatatcattaaaaatcttgcctctaaacattctaataaaaaggagtttcagggaaaacacaactatttctaaaacaggaagggataagttgtaaacaacaccacataaattgttaaaatatcaattccattttggaaaatacaaatatctgggcagttttagagactcaaataatatgatactttaaaaaaaatctgtatccagagccacttacatcaatgcttacagcaaatacatactaattggctaaagattttatttagctccatggtttttataatctcgttatacttaagggtggacaaaagacaagcaaaaatatggagcaacctttcatactcaaactttggcttccactccacctgcaattatattctcaactttatggtgcatcaaactcactgacataaaagccatctcaaatcacttcaaactttccattgcatcctagagatatattggctctgaaccaagtacctaggtactaactagtttagttttaatttagagcagatggactggggttctcaaggttgcattgagaggatctacttggaggacacctcgtggtctctgtaacacagcagatggtgaaaatattttaaggctattttcaaatgatgttagcaaaactacatttccatcaattgtcttatatggctttcataaatatgatttttcttccaaatcaagaatgacaatgatagagcttagcagggttcttttgagatgtcattatcaacaatgacacacagaggatttatattcaaagttcaaagatgaactgaaagcaagaaaacattgtatctcatgagataaatagatattgataaatgatgttataa

SEQ ID NO: 680669 - DNA, 640 bp, Homo sapiens
gtactgtggttcctatttcctagcccccatctgattcttggttctgaacaaatcccaagctagctttcactattcttttaagaaattcccttttttgggccggcgcggtggctcacgcctgtaatcccagcactttggaaggccgaggcgggcggatcacgaggtcaggaaatcgataccatcctggctaacatggtgaaaccccgtctctaataaaatacaaaaaaaaaaattagccaggcgtggtggcgggcgcctgtagtcccagctaagtagtcccagctactcaggaggcggaggcaggagaatggtgtgaacctggccggtggagcttgcagtgagccgagattgtgccactgcactccagcctgggcaacagagcgagactgcctctcaaaaaaaaaaaaaaaaaaaaawaaataaataaataaattcccttttgcttaactagagttggcttggattatttataataaaaatggaaaaatacagagaagcaaaattagataatggaagtatccataatatattttgtagccttgttttcattattattttccgtgattaataaataatatatgttgcagaaaataaattttaatggttacctagcatatatttacatggatgtactgtatag

SEQ ID NO: 680670 - DNA, 640 bp, Homo sapiens
gtactgtggttcctatttcctagcccccatctgattcttggttctgaacaaatcccaagctagctttcactattcttttaagaaattcccttttttgggccggcgcggtggctcacgcctgtaatcccagcactttggaaggccgaggcgggcggatcacgaggtcaggaaatcgataccatcctggctaacatggtgaaaccccgtctctaataaaatacaaaaaaaaaaattagccaggcgtggtggcgggcgcctgtagtcccagctaagtagtcccagctactcaggaggcggaggcaggagaatggtgtgaacctggccggtggagcttgcagtgagccgagattgtgccactgcactccagcctgggcaacagagcgagactgcctctcaaaaaaaaaaaaaaaaaaaaataaataaataaakaaattcccttttgcttaactagagttggcttggattatttataataaaaatggaaaaatacagagaagcaaaattagataatggaagtatccataatatattttgtagccttgttttcattattattttccgtgattaataaataatatatgttgcagaaaataaattttaatggttacctagcatatatttacatggatgtactgtatag

SEQ ID NO: 680671 - DNA, 1367 bp, Homo sapiens
agaacttagaaactattgtttagccaaacaaagaaagatcacgaattagctattataaataattgtgtatatgtccttctacacttttctctttgcatatatgtgtgtgaacattttttagaagaatcttatagtgtatgtgctgtttttctctgttttgtaattgatccttctcctaaaacatcactttgaatgactgcatattattccattttatgcttgtatcacaacttatttaaacccttttgttataaattaaagttgctacttttttttaggtttatctgtgcttctttattattattttagtattagccatagaagtagaatggtgtggtcaaagacaatgcaaaatcctaagcatctgattagcataaccaaactgcctacataaatatgcctactaacatcaggccagtagtatgagagaatgtctgtttcattccactttccaaacactgatatatctgtgatagacagacaaagaggtaggaaaaaatagacatatatatattttagccaatataatagtgaaaaatatgtcattgtttccattcatattttttagatttttcaatcaggttaatgtacattatataatatataaatataattttcttagccatttctattttgtaacgtgtatatctctttattcattttctactttttaaaaccttaaaattgattcataacagtgatttatgtatcaataatatgctagaatattttttcctgattatggtttaagttaaaattttttwaaaaattatgtatattatattatttgtaagtttacttttctttgtaattaaatatatagctatttttcttttgagctgttcatgttaatttaagaatgctatttccattgactttatagtcataggtattttttctaacttttagtgtcttagttatttccaaaatattttaatccattaaattttattctgtctatggtaagaggaggtaaaaatctacctttatttcattaaaataaaagattatccagttgtttcagtaacacttttccaatgcctcatctttttcctactgagataaaaatgccattttatcatatattaattatgttacattgattttatgtctaaccctgcaaccacagttttaatgggggttattggggctttagaatatagttaatatctgacaaagcaaaagctctttcattaattttacattattttaattaatatttttctttacaaaaacattatacttatttttcaaatttagaaaatgaatataagtaaaataaaatgaaataactaccacctagagataactatggttaaaactcaagtatatgccttaccagtgatttgtcaatgcaaaggtactta

SEQ ID NO: 680672 - DNA, 855 bp, Homo sapiens
atgttaaacacaggctgaatctgctcaatgtttagttttattcccagccaaacacttaatagctatttaaaattcacttttattatcaaaattctgtctataacatatatatcatatatttcataatttatatcatacattttcagaaacatatacaccatatattttaggaaatatatgatatatatttcttatcacagtagactatggcatgtgtttttgctttataccttacatttgttcatacaaaaatctrtcttaaacacaggtatatgacataaatattttctacaacatgattgtagaaattatacaaattttaatgacttcattttattttgttttgttttattttatttattttttattttactttaagttctgggatacatgtgcagaacgtacaggtttgttacataggtatatgtgccatggtggtttgcacgtatgccccaaaattcatttaatcatttgattttttttactttcagatgttgccaactttttttgctcttaaaaataagatcacaattaatatacctaagctaaatctccgcatatatatttgattgcttccttaaaagaatggatctttagctgctgcctaaatcaaacggtaagcaaattctagatcttttatttcactaagctcagttacactttctttccttccatctctttcttaccaaaatccataacactttgcctgcctttattcctcctgctgaactttagcatcatttagagaattgtaacaattacctagtagatgttttgattaaaatcatgttaaatttattagttcattaagaaagagcttatttctataaattttgcctttctacccaaaaagta

SEQ ID NO: 680673 - DNA, 669 bp, Homo sapiens
tctgcctcagcctcctgagtagctgggattacaggtgcatgccrctatgcccagctaatttttgtacttttagtagagacaggatttcgccatgttggtgaggctggtctcaaacaaccaacctcaggtgatcctcccgcctcactctcccagagtgctgggattacaggcatgagccactgcgcccagccagtttaaaacccatgaattctttatttctgaaattttccgtgtaataatttcagacctcaattgactgctggtaattaacacagcagaaagtgaaaccatggataaggtgggactatctgcattctactcaggatttccattcctggtcccctgttgtccccatttcctcattcacacacagtcgcggacacacacacagccaccccaggccccactcactggtttttgcaggtagctgcttactctcggaaacgttgagtgctgcgtcctcactgagagggcggccatggttccccagcttgacctgcagggccttgtgctcatttaacagcagccacctcactgctccttcctggcggagcctgggtcctggtgtctgaggatgaggatcgattggggtgaaggggcagggaccatgatgtcactgagaggcatggatgccagcaggcatgcagagctcgtgctcctggcctctaa

SEQ ID NO: 680674 - DNA, 1296 bp, Homo sapiens
gatggtggcagcagctctcctctctttaggaggttttctccaaagccttggaatcctctggcacccacgcatgcgggctggcccacagcacaggacagtgagctgcagctcgtggggtgcagtaacccccacctgcccacccgcccgctaggaagtccctcctgttcttttggtctccgcagctctctcaggttttcctgcactgcccagggggactggcttctccctatcaagctgcttgcctgacaacaagtcacatcatcttcaggaagctttggcgccaggaaccacacaaggctttctctttgcgagtaggtttgatgtgatgaggagacataaagagagatggtggaaccatcaggcaggctgtgctagcctgagagcacaggagttatgtgaagagaaggcttggccccatctctgctccgcaggcatcaagtttgagcctcaagaagttgcagtatcagctccttttcaacaccattgtcttagtgatgtcgtcacaatgacccttccctgcttctgctccccattcctttccctgtgcctctttccttcaaccaccgccaatcaacaccaccatcttctcagaaagaaagacatcatttgtgtctctctcgcaagccctacagacctatgaaggtaaaggaagctgcacacatatttcttctctcttccattttatagggaacatcttaaaccaaaagttattaagcatttatagtgagccaggcactgctgagcatggaaactcatttaattctcacaagaatcatataatgtacataccattatcgtctccattttacaggagaagaaactgaggcacacaggaggtaacgtaacctgccaaagatctcctgcctggcaagaaacagagctgggactgggtctcagtctcccagaactcctactcagccccacactgcaggttatatgtttttaatatcacttcaatgtatgttattatctatctaattattgaaaatattatgttgatagatagtggaaaatatagaaggacacgtctatgagtgccattattctccatgacaggatccatgctgatccctgtggcctcctgggaactcatatctgtcacataaagcaagaactgccaggtgccttccagttctactgccagcccgcaggccagagcgggccagtggtctccgcgacctcggatttcttgttgccaccgcaggccgtaggcggtgtggttttggtcatggcackgtcagaatgcccacacgttcttcgccgccacagcacacgcccacgggaattgacaagcca

SEQ ID NO: 680675 - DNA, 629 bp, Homo sapiens
aaaaaattaagttactcaatatcattttaaagatatatgtaaatcaaaaatattctgctcctagagcccagttggtacaagtagtgctaggcacatgatcagtgatcagctatagtttgctaaattgaatcaaatcgaagagcactgacaaaatgtttccgatgttatcctayggagcctattgaaattcctatgtggctcatggttattgtagacctaaagtactagtgatgggaagcaccatagagattatctgggccaaatggttcattatacgcattaagatattaagttacttatccaaaatcacaacatgagcattaaaactgaagcctcctcaaatgtacgtcagtgtttttcagtaacaccttctgatttttagcttatggtgtgcatatatgttcctgcctaaacatgtatgagaacactataaaatcttaagtttgatttcctgtgccacctgtgaggttagccacattactctagacaatgtatttgtatatgagacgaacatatagtgagtaatgtatgttaaagtcagaaatgctaattggcattccttctagggacaggtgaagtgtgattgcatttgcctttctgagtaatgctggaaagtgaaaatacagatc

SEQ ID NO: 680676 - DNA, 629 bp, Homo sapiens
aaaaaattaagttactcaatatcattttaaagatatatgtaaatcaaaaatattctgctcctagagcccagttggtacaagtagtgctaggcacatgatcagtgatcagctatagtttgctaaattgaatcaaatcgaagagcactgacaaaatgtttccgatgttatcctatggagcctattgaaattcctatgtggctcatggttattgtagacctaaagtactagtgatgggaagcaccatagagattatctgggccaaatggttcattatacgcattaagatattaagttacttatccaaaatcacaacatgagcattaaaactsaagcctcctcaaatgtacgtcagtgtttttcagtaacaccttctgatttttagcttatggtgtgcatatatgttcctgcctaaacatgtatgagaacactataaaatcttaagtttgatttcctgtgccacctgtgaggttagccacattactctagacaatgtatttgtatatgagacgaacatatagtgagtaatgtatgttaaagtcagaaatgctaattggcattccttctagggacaggtgaagtgtgattgcatttgcctttctgagtaatgctggaaagtgaaaatacagatc

SEQ ID NO: 680677 - DNA, 629 bp, Homo sapiens
aaaaaattaagttactcaatatcattttaaagatatatgtaaatcaaaaatattctgctcctagagcccagttggtacaagtagtgctaggcacatgatcagtgatcagctatagtttgctaaattgaatcaaatcgaagagcactgacaaaatgtttccgatgttatcctatggagcctattgaaattcctatgtggctcatggttattgtagacctaaagtactagtgatgggaagcaccatagagattatctgggccaaatggttcattatacgcattaagatattaagttacttatccaaaatcacaacatgagcattaaaactgaagcctcctcaaatgtacgtcagtrtttttcagtaacaccttctgatttttagcttatggtgtgcatatatgttcctgcctaaacatgtatgagaacactataaaatcttaagtttgatttcctgtgccacctgtgaggttagccacattactctagacaatgtatttgtatatgagacgaacatatagtgagtaatgtatgttaaagtcagaaatgctaattggcattccttctagggacaggtgaagtgtgattgcatttgcctttctgagtaatgctggaaagtgaaaatacagatc

SEQ ID NO: 680678 - DNA, 2930 bp, Homo sapiens
gcatattttttatttgtaatccgatgctgtcccagaataagtgtattgtaatgtgaatgttaaaattgaacaagagaaagcaggaaaataagtggtatttgggaaattaaaggaagattgaaccagagtctttatattcctgaatttaattggattaatgggaaatttatcattgttctttctatattggacttgtttttaagtgaatcagctatgttataattttatgacagatcaaagctgagttcatttagcctgttgcactttatactttaaaaatttacataaattttaaataacttgaccaaaaaagttataatttcattcagtttggtcaacaaactctcccttaattgaatgcaaaatgtgccatgttcagttagtagagcaattaaaagtggaaattcatttagaatactttgtttcaaaggaatatgagagagataaattacttgtgttgattagggagatttgtcacttaaacctcttcaattatttcaacctcttgtacagcaataaatccatgtaaatttagagctatagaataaaataacagattgcacctttgcattcctcaaaaggattttctgtctcttttcagaatgatttttctaccacatacttgatttttgattatcacatgctgtaactagttaatttctatttccatccaaactcgctcaatttaagccttttttctctgcttgctccttattgwgattttttttttttttttttgagtttccaggcaaatcaaaggctagatggagtgaaaagtaagcaggcttcgcgagggaatgtcattcatttgttgctagacagcatgaagagagcatcaaaggatgtttcaggcagcatgggaaaagccctccagggaatctaagagactcttctgccatcagaaccttcctccaggccagtgagggggcaaacaccttgagggaagctatactggggaaacacttcaaatagttagatgtctcttctatgagcggtcagaaaggaaaagggactgggaagttctcaggttaaagacagaagagatgtttctcttgggcttgtcccatggcaatttgtaagcaaagttagcatggggaagacaatcttctcagtacaactagttcacaggtacaacttgttgccatcactaacttcactgttcagctctgcatcagttatgacaaccactggggtgcatttaatattgaaagaacaagctgaggctaaattgataaaagatactccctttggtcagggaaaattgacttataacctgcaagctcgtaatgttccgtatagtcagcccatatttccttcacttgatagccaaagagaaaagggtctgaaaaacctttaaagaggagagaattctgtagtggggagacagtgtggcatagtggttaagagtgcagacttgcctgaaaattcatctctgttccactgtgaactacttgaggactttgaggaagtcaatgtccacctgtaaaacagggataataccagcatgtttgtggtgcctatcaaagtgcctggcacaaagtactcattcagtgcaactgctagtattgctgttatcaaccgtgtgtcttacaggcattttagcccaagagaagctgcaacaagtcagcctctctagctttccaatcccatcatacccagccagaagggagccattagatgacttgagcagtaagatcatgggagaggtttcattcatttcttcacctgaggttctccttgacctccaaacctctttcatattctgcctaccttttcacttattacacattgacaccaactccccttcataggtagaattcaggcttttatgtatctccaagtagctaccattttaagtggttaatttatgtattttggtgtatcttcaggtagctagcattttaagtggttctacttgattgctggtctggcctttaggggaaagtatgtgacttaagccaaagaggctgggagcccttgctgacctcttcctgtggcaggaggtggttgatgagcctcactggagagtgcaggccttgatccctgctcctaataacctcaccactccaattcctgctgcggggcagggtggcatactgatcatggtggggaagatgctggggctcagctggccctctctgacacagaacaaactcaacagtgaggccagtgacttccccaccaaattgtagcctcctgtatcaccagtggaataagatggccgatttggacatctacctgttgaaaagaattgctctgttttccataagtatatccctcaaagcagaggagactaatggtcacccttgggaatcttgtcttttagcgaaaagtccagtgtgagcctgtgaagttctctgattgtaaaacttcacatgaattttgcatttttttattatttacagatgttggtattaacatggaaatctcttaaattattttaaatttcaactccaaaagctacttagcttgtgtatgctctgttttttggaaggctggttacagaagtattatgtgctctatttggcaagaacagaaaggaatcccaaggagtatgcattgtgagtccaacctctgagaagaggagagatttaaaagcaaatgatggttgggctatggttagaaatatgttgggttagtggagaaggcagtattccctgagagttgtggttttcagtgggtagaagtgggagagtcaattggtgaagatttccttaggtgtaaggaatgagcaagaactgggccttatgtcctgcctccttcttacctggggagtgcagcctgccccaaatggcttcctgttctcccttagggaaaggacttaaggtttaaggtaagtgagctcattcctagacctctatggaaatctgaaacgtttgaccaaaaatgatattgacagctaattcttgtggaactgttaagaccttaca

SEQ ID NO: 680679 - DNA, 2930 bp, Homo sapiens
gcatattttttatttgtaatccgatgctgtcccagaataagtgtattgtaatgtgaatgttaaaattgaacaagagaaagcaggaaaataagtggtatttgggaaattaaaggaagattgaaccagagtctttatattcctgaatttaattggattaatgggaaatttatcattgttctttctatattggacttgtttttaagtgaatcagctatgttataattttatgacagatcaaagctgagttcatttagcctgttgcactttatactttaaaaatttacataaattttaaataacttgaccaaaaaagttataatttcattcagtttggtcaacaaactctcccttaattgaatgcaaaatgtgccatgttcagttagtagagcaattaaaagtggaaattcatttagaatactttgtttcaaaggaatatgagagagataaattacttgtgttgattagggagatttgtcacttaaacctcttcaattatttcaacctcttgtacagcaataaatccatgtaaatttagagctatagaataaaataacagattgcacctttgcattcctcaaaaggattttctgtctcttttcagaatgatttttctaccacatacttgatttttgattatcacatgctgtaactagttaatttctatttccatccaaactcgctcaatttaagccttttttctctgcttgctccttattgtgattttttttttttttttttgagtttccaggcaaatcaaaggctagatggagtgaaaagtaagcaggcttcgcgagggaatgtcattcatttgttgctagacagcatgaagagagcatcaaaggatgtttcaggcagcatgggaaaagccctccagggaatctaagagactcttctgccatcagaaccttcctccaggccagtgagggggcaaacaccttgagggaagctatactggggaaacacttcaaatagttagatgtctcttctatgagcggtcagaaaggaaaagggactgggaagttctcaggttaaagacagaagagatgtttctcttgggcttgtcccatggcaatttgtaagcaaagttagcatggggaagacaatcttctcagtacaactagttcacaggtacaacttgttgccatcactaacttcactgttcagctctgcatcagttatgacaaccactggggtgcatttaatattgaaagaacaagctgaggctaaattgataaaagatactccctttggtcagggaaaattgacttataacctgcaagctcgtaatgttccgtatagtcagcccatatttccttcacttgatagccaaagagaaaagggtctgaaaaacctttaaagaggagagaattctgtagtggggagacagtgtggcatagtggttaagagtgcagacttgcctgaaaattcatctctgttccactgtgaactacttgaggactttgaggaagtcaatgtccacctgtaaaacagggataataccagcatgtttgtggtgcctatcaaagtgcctggcacaaagtactcattcagtgcaactgctagtattgctgttatcaaccgtgtgtcttacaggcattttagcccaagagaagctgcaacaagtcagcctctctagctttccaatcccatcatacccagccagaagggagccattagatgacttgagcagtaagatcatgggagaggtttcattcatttcttcacctgaggttctccttgacctccaaacctctttcatattctgcctaccttttcacttattacacattgacaccaactccccttcataggtagaattcaggcttttatgtatctccaagtagctaccattttaagtggttaatttatgtattttggtgtatcttcaggtagctagcattttaagtggttctacttgattgctggtctggcctttaggggaaagtatgtgacttaagccaaagaggctgggagcccttgctgacctcttcctgtggcaggaggtggttgatgagcctcactggagagtgcaggccttgatccctgctcctaataacctcaccactccaattcctgctgcggggcagggtggcatactgatcatggtggggaagatgctggggctcagctggccctctctgacacagaacaaactcaacagtgaggccagtgacttccccaccaaattgtagcctcctgtatcaccagtggaataagatggccgatttggacatctacctgttgaaaagaattgctctgttttccataagtatatccctcaaagcagaggagactaatggtcacccttgggaatcttgtcttttagcgaaaagtccagtgtgagcctgtgaagttctctgattgtaaaacttcacatgaattttgcatttttttattatttacagatgttggtattaacatggaaatctcttaaattattttaaatttcaactccaaaagctacttagcttgtgtatgctctgttttttggaaggctggttacagaagtattatgtgctctatttggcaagaacagaaaggaatcccaaggagtatgcattgtgagtccaasctctgagaagaggagagatttaaaagcaaatgatggttgggctatggttagaaatatgttgggttagtggagaaggcagtattccctgagagttgtggttttcagtgggtagaagtgggagagtcaattggtgaagatttccttaggtgtaaggaatgagcaagaactgggccttatgtcctgcctccttcttacctggggagtgcagcctgccccaaatggcttcctgttctcccttagggaaaggacttaaggtttaaggtaagtgagctcattcctagacctctatggaaatctgaaacgtttgaccaaaaatgatattgacagctaattcttgtggaactgttaagaccttaca

SEQ ID NO: 680680 - DNA, 643 bp, Homo sapiens
gcacaggagcatggccagtggtatttccagggaagaatacattagtaatgcaggcttgggtaaccacttgcagctcacctcactactgagcaatgacgtggaattggagctggtatcacagaacagggaatgatcatgggttctggagtcaaaagaggcttttcaaggatttaacccctgagctgtcagtgtccagctctacggacattgtgggcaagtcacatcattctttacatcccagtttcctcatatgtaaaatggagataacttctaggattgttgtaagaattggaaataatataggcaagtgattgacacatagtaggcattcaactaacygtagttgtggtagatgctgttatcaccccatccgattcccctgagattccttttactgctttgtccaatggccagtggcagactaggatagggtgataaaatcctgttcgcttgcctcaaggcagggcagaccctggggagtcctgcaacaggagaccaggacttctatgtctgcaagtcttcctgtgagttcaggctaaatctaatcttcaccagacaccacctccttccccttctctattctgattgcttcacttcatattactttctcctaggagcaatgcttcaataaatcatgggtacg

SEQ ID NO: 680681 - DNA, 599 bp, Homo sapiens
gaaggtcaaaaatctaaacaggacttttgcactttgggataatgtagacagacgacattggtatgtgtgtgatgtgattttgacacataggagaatccagggtagctaaaagctaggcacgtaacactgcatgcctcttttctggcttggatctgggtgagccctgtgtgtagaaagctgtatcattccatttgaaaatgcatttgaccttatttgagcagtttttaagaaatttacttgatagcctttagcaccatatatatatayatacacacacactatatatatatataccatatatatatatatacacacaccatatatatagtgtgcatatatatatacacacacacacactctctctctctatatataccatatatatggtatatatataaaataccatatatatagagagagtgtgtatgtgtgtgtatgtgtatatatatatatactcaactgagatcaacgaaaaagtcaggcaagaagccttgtagtttatgtcagggaatgtaaacccacacttcacagtaacactgaccaatgagaagttgctttgcgggggacaacctgggagttgaaaattttggagacagatc

SEQ ID NO: 680682 - DNA, 599 bp, Homo sapiens
gaaggtcaaaaatctaaacaggacttttgcactttgggataatgtagacagacgacattggtatgtgtgtgatgtgattttgacacataggagaatccagggtagctaaaagctaggcacgtaacactgcatgcctcttttctggcttggatctgggtgagccctgtgtgtagaaagctgtatcattccatttgaaaatgcatttgaccttatttgagcagtttttaagaaatttacttgatagcctttagcaccatatatatatacatacacacacactatatatatatataccatatatatatatatacacacaccatatatatagtgtgcatatatatatayacacacacacactctctctctctatatataccatatatatggtatatatataaaataccatatatatagagagagtgtgtatgtgtgtgtatgtgtatatatatatatactcaactgagatcaacgaaaaagtcaggcaagaagccttgtagtttatgtcagggaatgtaaacccacacttcacagtaacactgaccaatgagaagttgctttgcgggggacaacctgggagttgaaaattttggagacagatc

SEQ ID NO: 680683 - DNA, 599 bp, Homo sapiens
gaaggtcaaaaatctaaacaggacttttgcactttgggataatgtagacagacgacattggtatgtgtgtgatgtgattttgacacataggagaatccagggtagctaaaagctaggcacgtaacactgcatgcctcttttctggcttggatctgggtgagccctgtgtgtagaaagctgtatcattccatttgaaaatgcatttgaccttatttgagcagtttttaagaaatttacttgatagcctttagcaccatatatatatacatacacacacactatatatatatataccatatatatatatatacacacaccatatatatagtgtgcatatatatatacacacacacacacwctctctctctatatataccatatatatggtatatatataaaataccatatatatagagagagtgtgtatgtgtgtgtatgtgtatatatatatatactcaactgagatcaacgaaaaagtcaggcaagaagccttgtagtttatgtcagggaatgtaaacccacacttcacagtaacactgaccaatgagaagttgctttgcgggggacaacctgggagttgaaaattttggagacagatc

SEQ ID NO: 680684 - DNA, 599 bp, Homo sapiens
gaaggtcaaaaatctaaacaggacttttgcactttgggataatgtagacagacgacattggtatgtgtgtgatgtgattttgacacataggagaatccagggtagctaaaagctaggcacgtaacactgcatgcctcttttctggcttggatctgggtgagccctgtgtgtagaaagctgtatcattccatttgaaaatgcatttgaccttatttgagcagtttttaagaaatttacttgatagcctttagcaccatatatatatacatacacacacactatatatatatataccatatatatatatatacacacaccatatatatagtgtgcatatatatatacacacacacacactctctctctctatatatacyatatatatggtatatatataaaataccatatatatagagagagtgtgtatgtgtgtgtatgtgtatatatatatatactcaactgagatcaacgaaaaagtcaggcaagaagccttgtagtttatgtcagggaatgtaaacccacacttcacagtaacactgaccaatgagaagttgctttgcgggggacaacctgggagttgaaaattttggagacagatc

SEQ ID NO: 680685 - DNA, 599 bp, Homo sapiens
gaaggtcaaaaatctaaacaggacttttgcactttgggataatgtagacagacgacattggtatgtgtgtgatgtgattttgacacataggagaatccagggtagctaaaagctaggcacgtaacactgcatgcctcttttctggcttggatctgggtgagccctgtgtgtagaaagctgtatcattccatttgaaaatgcatttgaccttatttgagcagtttttaagaaatttacttgatagcctttagcaccatatatatatacatacacacacactatatatatatataccatatatatatatatacacacaccatatatatagtgtgcatatatatatacacacacacacactctctctctctatatataccatatatatggtatatatataaaataccatatatatagagagagtgtgtatgtgtgtgtatgtrtatatatatatatactcaactgagatcaacgaaaaagtcaggcaagaagccttgtagtttatgtcagggaatgtaaacccacacttcacagtaacactgaccaatgagaagttgctttgcgggggacaacctgggagttgaaaattttggagacagatc

SEQ ID NO: 680686 - DNA, 1247 bp, Homo sapiens
gaatacctctagtgtcagagaacttcctgcttcatgagcctgctcatgccatcttccgagagcctgaagcacgaacacacttaatctgatggaaagttccttctcatatgaacctgaaacctgttttcctatcccttttacctataggctgtttgtcttgcccttttgacagtagagttaaattttattcatcatagttttaacagaaagtatttttattacttttggtctgtgattcactgtcctaaggataaaagacaacctgactgtattggcagtctgawactatggcaaaaacctcaagccattctaaggaggaaagaatctgatctattcctgggaaaacaacttcaattgagcaaatgtattttgagtgcccagtgtgtttcggggatgggagatgtacaggtgaacaaccagttcagggatttctgtggaaggtgggaataaccactgaaaaaccactcctcactcaatggatgtagatttctagtgatggacaactcaataccccttcacggttttaacacagctttgtggacttgtgaccatttcagcaacgaaatgcatattttggcacacacgccacttgctgaagaaataaaaatttaatagacatatatctgaaagtttctagcacttcagggagattttgagatttattctagcataccatacaatgagttttattgggagctgcaaaaatatataattttaatagaaataggtaagcataaaacattgacaccactgaaaaaatattggccatgccaaagcaacccccataaaagtttgcagaatgtttcagaaaagaataagagaattattaagggctgatttttctagtggagctttggccagggtctcatttttaaggaaacatatctatgtttccaaggaaaaagcaggtattcactgcctttgaagtgcagcgatcctgatgtttcttgtagctatgtgaagaaagatcatggagattgttttgtgcaggtttggtgaaaaagcttaattaatgattaaaagcacaacagtcctgttaaaccagacatgttttaggaaaacacttcaagatgagatgacagtgccctcctacattcaaaggctggaaattcaagtattagaacattcattactttttccttggagatggtgctgtctttatcatccatcttcatcacttgctccaagttaaaatggttgatttcttgctgctgattatagggcatgaatcttagtcctatggagct

SEQ ID NO: 680687 - DNA, 1191 bp, Homo sapiens
gcttatatgagattatataaattcgaaatatattatctatatgagattatataaattcaaagaaatactgttaatggccgggtgcagtggctcacacctataatcccagcactttgggaggccaaggtgggcagatcacaaggtcaggagtttgagaccagcctggccaatatggtgaaaccccatctcttctaaaaatacaaaaattagccgggtgtggtggcagacacctgtagtcccagctactggggaggctgaggcagaagaatcgcttgaacctgggaggcagaggttgcagtgagctgagatcgtgctactgcactccarcctgggcagcataacgagactctgtctcaaaaaaaaaaaaaaaaaagaaatattgttaacaagttggcacttcttaaagaaatataggggctgggcgtggtggctcaggcctgtaatcccagcactttgggaagccaaagtgggtggatcacttgaggtcaggagttcaagaccagcctggccaacatggtgaaacccatctctacgaaaaatacaaaaattagctgggtgtggtggtgcacgcctgtagtcccagctactcaggaggctgagcaggagaactgcttgaacctgaaggaggcggaggttgcagagggctatgattgcaccactgcactccagcctgggaaacagagtgtgaccttgtctcaaaaaagaaaagaaaaggaaagaaaaggaaagaaaggaaaagaaaagaaaggaaaagagaaacataggaaaacaattatctgaatggggtttcctagaaatggaatggaaagaattctttaaatagcgtgtccctaaaaatggaatgcaaagggataaaatgacgtagcaagaccgtctcccctcagaaactcttttcaatcagccctgctgttatccataatggcccaagttccggaatcctgacctatgtctgtgcactttgctctaggaagtcaattacttactgcctgtccacatacttcttaattctcccattaaattctccagagtttggcattaacccataatgttgactgtaagtcactgaaaaacactattcagaccttttttcaaaaagtgaacttccctctttatttttttgtatacggtttaatagaaatgcatcttatggctctgattttcaagggaaattgagtaaaaacttaaaaaaat

SEQ ID NO: 680688 - DNA, 588 bp, Homo sapiens
tgatgacaaggtacagatcagaggagatatttgggtcatatcacatggttaattcagtgcaatcaaagctctagaaatgaaataygagaggaagctcactaatatcgagacttttaggtgattacatagctaaaaatgcacagagtagattaaatccttaaagacattttctgctgaaaaaccctcatgaagatcaccttggtaatttggtagccgaatcacctatttggggagattctttgaatcttcttcaatatagaatattaagagccttttgggttacgggtgatttcaagctcttcgggctgcagaaacccccgagttctaatatagtgtatttctgtgttcatggcaaggagtcaaaaaaaaagcatgaaatgttctaggcaattaggggagcagaaaaacctgtgtatgtcagtcacacgctagtcggcatgttaattcattgttggctgtggtgcggaatcccacatgggccagtccacaggtacaaactgcatgattacctcccacccactgttttgcaaatgcatgctccccatcacagaaggcatcaggccagaggagatggatgacttaagacct

SEQ ID NO: 680689 - DNA, 609 bp, Homo sapiens
ctgtgccatcatctctgtctgaggaaaagggaatgttctttcgacatttcctctctgctcaacacacacttctcaagtccttactctgagctggtactgtgtggggctttgggaatatgagaatgaatagaacacagcccctgcagacaytgaccaggggaagagacacacctgaaaagggaacctcactcataactgccccccagcctgtagccccaaaatttttagcacagattgaccgtaaagtccattctcagagtcatacaggtagacagtggagagagtagccaatacaggctatctttgtttaatctcattcaaaaatgatacattttgcctctatcagatatgggggtatcttgtcattaggcacctatatatgaaaattaaatcttaatagacagataaatgaagggacaattatccagtatacaaacctagatctttcatttacctataagttccttttaagttacctaattataagatactgggtggtctcagggaagcattttgaaccagaaatcaagaaaacaaatcataaatactaactctattgccaagtaactatcatgtaagtgagtcacttgaattttctatctctttact

SEQ ID NO: 680690 - DNA, 609 bp, Homo sapiens
ctgtgccatcatctctgtctgaggaaaagggaatgttctttcgacatttcctctctgctcaacacacacttctcaagtccttactctgagctggtactgtgtggggctttgggaatatgagaatgaatagaacacagcccctgcagacactgaccaggggaagagacacacctgaaaagggaacctcactcataactsccccccagcctgtagccccaaaatttttagcacagattgaccgtaaagtccattctcagagtcatacaggtagacagtggagagagtagccaatacaggctatctttgtttaatctcattcaaaaatgatacattttgcctctatcagatatgggggtatcttgtcattaggcacctatatatgaaaattaaatcttaatagacagataaatgaagggacaattatccagtatacaaacctagatctttcatttacctataagttccttttaagttacctaattataagatactgggtggtctcagggaagcattttgaaccagaaatcaagaaaacaaatcataaatactaactctattgccaagtaactatcatgtaagtgagtcacttgaattttctatctctttact

SEQ ID NO: 680691 - DNA, 609 bp, Homo sapiens
ctgtgccatcatctctgtctgaggaaaagggaatgttctttcgacatttcctctctgctcaacacacacttctcaagtccttactctgagctggtactgtgtggggctttgggaatatgagaatgaatagaacacagcccctgcagacactgaccaggggaagagacacacctgaaaagggaacctcactcataactgccccccagcctgtagccccamaatttttagcacagattgaccgtaaagtccattctcagagtcatacaggtagacagtggagagagtagccaatacaggctatctttgtttaatctcattcaaaaatgatacattttgcctctatcagatatgggggtatcttgtcattaggcacctatatatgaaaattaaatcttaatagacagataaatgaagggacaattatccagtatacaaacctagatctttcatttacctataagttccttttaagttacctaattataagatactgggtggtctcagggaagcattttgaaccagaaatcaagaaaacaaatcataaatactaactctattgccaagtaactatcatgtaagtgagtcacttgaattttctatctctttact

SEQ ID NO: 680692 - DNA, 609 bp, Homo sapiens
ctgtgccatcatctctgtctgaggaaaagggaatgttctttcgacatttcctctctgctcaacacacacttctcaagtccttactctgagctggtactgtgtggggctttgggaatatgagaatgaatagaacacagcccctgcagacactgaccaggggaagagacacacctgaaaagggaacctcactcataactgccccccagcctgtagccccaaaatttttagcacagattgaccgtaaagtccattctcagagtcatacaggtagacagtggagagagtagccaatayaggctatctttgtttaatctcattcaaaaatgatacattttgcctctatcagatatgggggtatcttgtcattaggcacctatatatgaaaattaaatcttaatagacagataaatgaagggacaattatccagtatacaaacctagatctttcatttacctataagttccttttaagttacctaattataagatactgggtggtctcagggaagcattttgaaccagaaatcaagaaaacaaatcataaatactaactctattgccaagtaactatcatgtaagtgagtcacttgaattttctatctctttact

SEQ ID NO: 680693 - DNA, 609 bp, Homo sapiens
ctgtgccatcatctctgtctgaggaaaagggaatgttctttcgacatttcctctctgctcaacacacacttctcaagtccttactctgagctggtactgtgtggggctttgggaatatgagaatgaatagaacacagcccctgcagacactgaccaggggaagagacacacctgaaaagggaacctcactcataactgccccccagcctgtagccccaaaatttttagcacagattgaccgtaaagtccattctcagagtcatacaggtagacagtggagagagtagccaatacaggctatctttgtttaatctcattcaaaaatgatacattttrcctctatcagatatgggggtatcttgtcattaggcacctatatatgaaaattaaatcttaatagacagataaatgaagggacaattatccagtatacaaacctagatctttcatttacctataagttccttttaagttacctaattataagatactgggtggtctcagggaagcattttgaaccagaaatcaagaaaacaaatcataaatactaactctattgccaagtaactatcatgtaagtgagtcacttgaattttctatctctttact

SEQ ID NO: 680694 - DNA, 588 bp, Homo sapiens
ctacagtgtctggcttgtggaaaataactgatataggtgatctgagaaaaggcaaaactaggactgcctgtgtcccagtggaatttacagtctgaactgactatgcacatgtgcagtgtttggcaatacgtagtttttgaaaacctttcagcaaatgtaaattactaaaacacaaaccaaatacctaaatttctagagaaactggagaaaaaaagaatggtcagaactgggtcartttaatcagaaacagctagataaggtgaggtttgtttttaatgtaaagactttgtgaacatgaatcacttaacaggaaggaaaatagcatttcagtttcaagaaatgaaataggcaaaaacaaacaaacaaaaaagaagataaaagctctattgaaaaaaaccagcaagcccatttactagactgaacgacgaatctgaaacagcagaacaggttgtcagtatgcaagacctgcataaaatacatctatgaagctgaaattagtctttagggccaagtgtgatagggagtctccaaatcgatgctttcctcccttcttcccctggatgggcatagttttttgaacacttctga

SEQ ID NO: 680695 - DNA, 588 bp, Homo sapiens
ctacagtgtctggcttgtggaaaataactgatataggtgatctgagaaaaggcaaaactaggactgcctgtgtcccagtggaatttacagtctgaactgactatgcacatgtgcagtgtttggcaatacgtagtttttgaaaacctttcagcaaatgtaaattactaaaacacaaaccaaatacctaaatttctagagaaactggagaaaaaaagaatggtcagaactgggtcagtttaatcagaaacagctagataaggtgrggtttgtttttaatgtaaagactttgtgaacatgaatcacttaacaggaaggaaaatagcatttcagtttcaagaaatgaaataggcaaaaacaaacaaacaaaaaagaagataaaagctctattgaaaaaaaccagcaagcccatttactagactgaacgacgaatctgaaacagcagaacaggttgtcagtatgcaagacctgcataaaatacatctatgaagctgaaattagtctttagggccaagtgtgatagggagtctccaaatcgatgctttcctcccttcttcccctggatgggcatagttttttgaacacttctga

SEQ ID NO: 680696 - DNA, 636 bp, Homo sapiens
acccaagtaaaatgctcaggaatctggagtagaatccaggtatctgccaaaggaaactttggacgagttgtcttttgaagaagggaaacaatgctgggtctcttatcttcacggactgtttttgcttgtcaaacttctaacatcacttcagccgagtttcgtatttgacttccaacctcatggccatttgacctgccaactactatttttctttgaggcttttaacaccccacccaagtattttgctttccagattgtgtgcstttccttttcacttcaccttaaagtcagcctgggtttacaacatcggcttaaggcgcaccctctaaggtttcagacagacccagggcaccgcggtgatgacctgaagctgatatctctcggcaaagccaaggtatccgggaggttctccgcgttgtgccaggatttccatccaacccgagagtctcagggcagaggccaggcccccagcgtccgactcccaggggtcccagccccctcccctggctgaccatgcgggctgggacctcccagccggaaaacaccgccctttcctgtcgcctactccttccccaggccgacgactcgcggaggaggaagagacggaggccgattaagaaaattagcattcattaa

SEQ ID NO: 680697 - DNA, 636 bp, Homo sapiens
acccaagtaaaatgctcaggaatctggagtagaatccaggtatctgccaaaggaaactttggacgagttgtcttttgaagaagggaaacaatgctgggtctcttatcttcacggactgtttttgcttgtcaaacttctaacatcacttcagccgagtttcgtatttgacttccaacctcatggccatttgacctgccaactactatttttctttgaggcttttaacaccccacccaagtattttgctttccagattgtgtgcgtttccttttcacttcaccttaaagtcagcctgggtttacaacatcggcttaaggcgcaccctctaaggtttcagacagacccrgggcaccgcggtgatgacctgaagctgatatctctcggcaaagccaaggtatccgggaggttctccgcgttgtgccaggatttccatccaacccgagagtctcagggcagaggccaggcccccagcgtccgactcccaggggtcccagccccctcccctggctgaccatgcgggctgggacctcccagccggaaaacaccgccctttcctgtcgcctactccttccccaggccgacgactcgcggaggaggaagagacggaggccgattaagaaaattagcattcattaa

SEQ ID NO: 680698 - DNA, 1333 bp, Homo sapiens
atagagcaggcagggttaaagaggaagaggcacagcaatgtctttcaagctttctcatttgtttatccattcaacatttttttcaatacctgctatgaataagatctccgttctctctcccagattatagcctgattgggraagagttaaataagtagtggtaataatccagtgtgatagttgctaggtttgaggtgtacacaggacgctatgggagcttaggatgccatggggaactggcaggagattcagttgcaagtgtggcaggccccccagattgctgaagtgggcttcacaagctattttatcttatctccaagctgtagccttaaaacccttgaaaggttttaaagcagagagtgataaggttacatgaggattctaggtacctcactctggtgtagattggaagataaggtggaaggaccggggaggcagggaggtaggtgaaaggcaaatgtccttgtgcaggagaaagatcatgggggccaggagtaaggctgatggagcagggatgaatgaggagagacagtccagacagactgataggactataggacttgatgtagagatggaggcggggagaagtgctgggatgatagctgggttttggaattgagtgacttctgccatttaccaggaaagcatagtttggaaggcagatgcctaaggcaggcagggggaagaaagatggcaaatcccatttggggcaaggtttatgagtattatatgggacaagggaagcaaagtagagaagtctggaatataagggaagggaaaggccaatcaatgcttttcaaactctctgggaagggccactgtctttttgtttgtttccatttccaatccattgtacaatactactgtgcacaaggaatatggagcttgggccacacacaaccgccatgcaagctcaacagcatacagctcccaaacttgtcaatagcctattcagtaagaaaaaaatctgttggtcacatgcttgatgttaaggcaatgtcaaaaagatcttgcttccaacttctgttcttatctcatcatggactgtatgaacccactttgagtagcactggtctggacttaagtagatgcatgtgggttgaaggtactgacttggaagttatccctagaggtggtatgtgattgccgggggaattgttgaggagtgggggatgggcagcagccatccaaccctatgaaaatgccaacatttaagacaggggttcagacttcttctgtaagggctcagttaatactttgggctttgagagcaacatacagtctctgtcacaggctactcaactctgacctgatagagcaaaagcacctttac

SEQ ID NO: 680699 - DNA, 811 bp, Homo sapiens
tcccagcagcacaaacgtcaacttacctagagttgtaaaactgacattttgcccaaaattcttaactttcagggtatttgggagctgttaggattggcaattcagattcaattcaaattatttttttctatagtcctagaagcctatgccccatcatgcagtaaatatgatgtaaatatttgtagaaagaaagcaaaatgcctctgaaggtatcttctccagtatctcctactcaccagaatctcactacagcttaggtagcctccccaccaacccttttcttgcctttttctttgctgcttccctccaacctttgcctccatgccaccgacatgaagccccacttcaagcaggatgagtgagcctctggttggaggcccctggtgctggtgcctgtggctgggcaaggactgaccaaaggctggggcttgacgagcatcttgctccctggtgggtgcccagcccccaccagcctaccgactgggccctccctcccctgcaccctcagcagcacacactttctccccctttgctcttcctcctcactgtcccaaatccttgtttaattcaagggtgtatgtgaatgatccaktcagagtggcagggaactgctctctggctacattttcatgggatttttttttttttttttttttttttttttttttttttgagacaaggccttgctaggctgtagtgcagtggtacaatcatagctctccgcagccttgaattcctgggctcaaccagtcctcccacctcagcctcccaagtagctaagactgcaggtgtgtgctaccattctcagcta

SEQ ID NO: 680700 - DNA, 1754 bp, Homo sapiens
aagagttgtgaacaaaatgcataggcacctagaagaggaaaactaccaatagagctgaaaagagcctctgaaagatgcataggagatcataggagaggggtgttacgcacgagcacagagatatgagagagcaaatcgtgtaaaggataaattaaaaagttcagtgtggccagggcttggagcttcttgagcagatggaaaataattaaagaggttgtcaggcaggctataaaaaagacttctgaatttctcctagctcctagtctgttgytgtgcctaataaataatagcttgtacctaagaaatagtatatcatggtagagcactgtaccatcttcagagaacttttacacttacgatttttggtcttaactctataaataaatgatatctccttcaaatttacggataatgaaattgaggttcagacaattttagtgatgtgcttcaagtcacccagctaagtaacatcaggtgagactctaatctaatccaattacctcttctaattctaaatccaaaactcttcaccacccagatcatgagtgagcaggtccatgactgtcatcattacacagccttatagagtgagatgctgtataacttaatgaaaagagaatgagctttagagacacaatttccaagtttaagtcacttacaacctgtgtgacctttggaaagtgacagaatctgagcctctgttctgtcactatcaacattacatgtcaaagcttctttatagaaccattgatgagatcaaagcatacaatccctccataaattcacaatatgaatactacaaacctattttaagtgactattccacagaggaaattttaattacatattacctttcaaaaaaataaatataattattttaagtctaccaaatattttaattttggcctaagcagtctggtgtacccttaaagccactcattctttcttatttttcctggaatgtcatttacaggctcagctttatttctagaatgaattataaacccatctacatatgaatcatttgctgtcctcatttcacaccacaagttctattttggggggtggagtgggagaatggacagccattacaagctcctgtaagaatttgctgtttgctcagataaaatggctccttcctccatggcttccctttgaaagaaactggttgagaaacactcttttccaggatctctgtgtcattaaaccactgccactagggtgattaagggtggcaggggtggggtgacacagggaaataccatgcaaatgtcactcagatctgtcaacacccaccccagcacttctgcaggccctccaaatcagccttttctccgagtgttgacttccagaaaaatcatgcaatcagcttaaaatttaaaattacctcaaagaccaaaacaatggtggagttaacagtgaaaataaaatagggaccccacgatgcaccaaaaatcacgtgatcatgttacattcctccaaaaaccccctccccaaacaactgagctcttcaattagtgccatctagcatgggaaaggcaagaaaaaaaaaatcacagcttacagccgatattttccactgagccagccaccctccctttttttcttccctgaagttaatagtgaaagctctgtttgtttcacaatgcgttaattcttgctgcttgcaagaaattatttttggaggtatcatattttaatataaatttccatgaatctttccacatgattcccttgcattgaggcactgccct

SEQ ID NO: 680701 - DNA, 1595 bp, Homo sapiens
cggccttcagaactgagagaaataagtttctgtttataaattccccagcctctggtagcagaaatgaactaagacaccctgctttaaaattttttacctaggtgataaaatccttgctaatgatcttctttcttcattcaatcacatattcacaccattgtataacatagatctcagatactacccagaggaagacataatcaactgcagatcatcatcatctatcatggaatgcttatacaaacataattttactatatttaaaatatttaagcctactaacagtctggttctaaaatatcttagcaaaaccattttatgaataccaagctcaagatacatgtttctgacaattttttaatgtatcaaagtatataaaataaataactcgaacggggctttcaagtctatggaggatagttctacatgctgcatttattttgatccctcctcctagaatggtacctgtttgttcaaatgaacagatatacgagctttataaaaactgaattttatttattgtttgctcagagtgggacactttcttccttttatatttaaaaggagaattatagaataataatgccctacaagaattattttattattatttttaacttgaagaatatttaccacgtatctcataaatattgtaaaatcattcactttttaacatctttaagtctttctaggaaaagtgtcataaaaatgtggtccttttatctctttctaagctgtcatcttagttgtcaattttcctctgggaaggtgttctaaagatgtttttgcagaacatcatagtagggctttaaactaagcatctaaaaccattcactatgaacacagggtaaattgggttacattggaatgacagtatattcatttgcaagtcccctgacacagttatttcaacaacttagcttttgcatttatagtcagctcccagctgcagagggaaattcaatggcctcattattgtgtctgaactgaactgtgtcacgcaggagggaagccagagtcagaggcagattgggccttccggttcatctgcagtttgagctggttcagcagcagccctgaagtctggaggtatgatagcatcagctctcacgtgatgaagctctggttcctgtttaaatcctaaaggaatagcaatttttgctctttgagacgtgcagaattcttttgaactcctgttggattcagggatcacagggatcagcttgactcttggaagcaggatgtattcattcagaggcagcagctttggcagccaaagaggattgtcagagcttattttccttttagcagcaggagtaagtactgtaaagaaacagggctcagggaggctgcatgatgcataaacagtatgtaatccactgaatgtgctgggaattagagaataagggaacaggaacagaattctgctgctactacactgtatgggygacactgttccgctgtgtagactattgcttgctaaacaggttttgctttttggagaaagtaaagtatcccatacatattgagtttcactctctctctcttcatcatatatttaacctccatggtttacacactcccgtcttccacaa

SEQ ID NO: 680702 - DNA, 647 bp, Homo sapiens
gccaactgattcttccctgtttaggcactcaaatctccaggctaatagcatttttctatgataaaaataatgatttagtaagttgagtatgcatgatcttctaggcccagtagacttggtttcaagaaaaataattattcattcatttattagttgatgtatttactctttcaataacagctactatgtgcaagcactgkaatgggcattggggaaagagtaaatgtcatcagggccttcaaagaatttaccttctcctgggaaaagtaaatacagaagcaaataagtaaggaaattgcattttgtgataggtgttctgatatgaatagtaattggaatggctactttaattaacataatgtggtagcgagtcgccagagatgtacccacccccttcccttccccccatccataaaccatgtgttcttgtattcatgccctagtgtagtcccctccccttatatctataatggccatatgatttaattttggccaatgaaacacagaagtgatgcctcatggcttggagggtaaattataagaaacattgcagcttctgtctggatctcttggaatgcttgtccatgaatccagcttccatgctgtgagaagctcaagccacatagtgtttgggttggcacctccac

SEQ ID NO: 680703 - DNA, 2089 bp, Homo sapiens
tgttagcatatcaagaaaagataatcaaacccctgatttctcagatataatgccacaaaggcaaataccagcatatccactaatgtttcagaagttcattttgtgcgcactgaggagaattatttggacttcacttttagaattgcagacatcttcgttgtaactgaaacttatcagcgaagtcatcacttccattatatatagagtcagacttagtgattataatactgacagtcaaagtaagttcaaggagaaacttatctcttttaaacctgtctaaatcatatatctcaaggtctctgaaagttattcgaatgactaaagatttttcaggatatctgagggaaagaaagctatcaaattagtacagcatttaagaagtgacttcttagtaagaaagagacattgattaagacatataggcttaatcttatcagagaccaaaaccagggtttggaacaatagatttgtatcacaagcatagctcaggaactaatcttctacttttgactataaatgacatcaaatacttcacactagtgtttgtttaaataactttgtaataatgccatattttaaaagagcctagaatattggaattagatttctttttacctaatcaagttttcatataaacaatgttaatatctgactgtatctttagattgccaaatcattgggcatatttatttattgtgaaatatatcctaagatatttaattctcagattttgcatggctggctacttctcattattcaaatcttggctgagatatcacctgctacgaaaagcctttaatgaatattatcctaaattactatttcctatccagttactctttgcaacatcactctattttactttctacatagcatttgtgtctttctgagattgcctgctcattattatctgtcttctcacagcatataagctccatgaaaatagtgacctctataactcaagtgcctaacagagagtttttttaggcaccgaatatgtacttgaatatatgaaaaactaaaaacatttttatggagataaaaatacttttttggatattggaattttatgattgcatgttgactgacttagttatgtctttaggattagcaaactctctgatgactttcaattctcaagagagtacctagagcttgacatactcagagagcattagagatccttgttctcaaaggaccctgtaatgcagttcaagaactaattacaaaagagcctcatggagttgatttttttatagagaaatatgacctaactaacaagagtcctatcctagacagctgttctttaacttttatattgagaccaggtggaagggaaagactatgcattttttccttttgaagtcttcctggtagaaagggcatcaattgactcagacatctgctggaggataactggtctgaaagagatttgcatactttagttgagatgctctgttgtgcctyctgttaaagaatactatgaaaaatttcctattgtctatttctagaacttaaatcagtgggaagatttgatatccttacctaaattaatgttttgctctgtttagtatcagtccatcatgtgaactcatctggaggctttatctatgtagaagagcaaatgtattggaaatcgcaatttctacccctgaatataggcatgtatggattgaatgtttccagctacaaaaaaaatagatattccagtagctttattcatcaatatttcggacagaatttttcattctataaattgacctgtttttccactaatttactagaagaataagtagagaaaactgcaaattggtgcagaaataagtgatgtgatttttgcctgctggtatccaacattcatacttttcctgataaaagagaaccagctaatcttccattctcaatacttatagttttcaggagttgattcaactctcatatccagaaataggacttgattaatctaaaataatcaccagatcctcactctgaaattagcacatagaagaaaacagagacaatattactttgatcctgaaccaaatctcatttgaaactagtcctatccctggatttttcagttatatga

SEQ ID NO: 680704 - DNA, 896 bp, Homo sapiens
ttatttcctttcctgcctcctcctcaaaatgtcctgaagacattattctctttcaaattcatccacacgtgttctgcctctcaactctgctctgtcaacaagatatttccatcatatttcttcttcctccacatttttaagttattaaatatatttgtgtggaaaggtaaataccaatgttcaagacccagttcagaccaattaaatcaaaatctctagggctggggctgaagtgttggtatttttaaagctatcagctaaaaggtggcttaagggagcattctgtgatgttgcaactgtgtattttcaactggctaaggttacatgggtcaatgcttttgtaaatattcaccaagctgtatactcaagggggctatgcactttatataagttatagcttaataaaacttttttaaaatccaagtcatcccaatgtttctaatgcacagctatatatatatatatatatatatatatatttttttttttttttttttttttgagacggagtctcgctctgtcgcccaggccggactgcggactgcagtggcggaatctcggctcactgcaagctccgcctcccgggttcaagccattctcctgcctcagcctcccgagtagctgggactacaggygcccgccaccgcgcccggctaattttttgtatttttagtagagacggggtttcaccttgttagccaggatggtctcgatctcctgacctcatgatccacccgcctcggcctcccaaagtgctgggactacaggcgtgagccaccgcgcccggccctgcacagctatatttaagagctattaaagtaaaagggaaaaagaaaggttgacaaaaagatttgggtggtgaatataaacaagaaggaaaaaaatatataaaattc

SEQ ID NO: 680705 - DNA, 1141 bp, Homo sapiens
tttttttttttgattcatattagtgtcggtgtcatttggttgtccttctattttttaatttttttatttcaataactttaggggtacaactggtttttgattacatggatgaattgtgtgatggtatgaagtctgggcttttattgtacccatcagttagtgttcattgtgtagatcactgattcttattctgatttcacattcagaattcaggaatgtccattaacctcactgaaaatgtccacaacataactatgcgagagcttttgtaaatgtgtgagtctgcatatatgttaatatgtgtgagtctgaatatatgcaaatgtgagtatgtgtgtatgtgtatgtttggtgtgtgaatacatagatgtcrattagagtatgggatcattcatattcacctataattatttattttctgtggaaaaaggctacattttcaaacattttaaagatccaaggctctgaaaacattagttaaatcatgcaaatatccctgaattctaaagctctagaattgtctgaaaagcttttctcttaacacattccctttctcatataaagcaaatctaatagattttaaataactttaaagtaatattctgggaccctttttatttcaataggagatgtgggagagggaggctgatacagcttaatactaccatttcttttgataattctagaaccatgccatgacatataaagaatttaaggtcaacttatttaacaaagtacttcctctcccactaattttaactgctaattttaacctcctatcatcaaaccacttgatgttcaactgccgatggaaaaactaatctctgcccatctggatgcactctattatttccatatatatgttggctccaaaagtataaaaatagtgcaaccatagctttaccttctgaatagaacaaaacctttttttttttctttttgatcacttgggctaagacagagacacaaataaatgctagtgcttatttctggcttttagccaaagtttctgtttaaggtagtttagagtaggtcatcactggcaggcatttttggctgagattgtttctgaaagaataaagttaaattagcaatggtctaaaatttatttctgagctcttgtaatggtttaattctcatt

SEQ ID NO: 680706 - DNA, 708 bp, Homo sapiens
tccttggtctttagtaagcatctttttaaatatctatataaagtctgtttttcttctgtattaaatttttctcaatgacaattactggtaacggctccttaagtgctcctcagatcaaagagaataaatacatcaaaggcacgcctgaaaaaaattgaacttcttaggttacccttaaatcatgagaagaactcgtgaagtgaaarttctcttcgtgtctattaaccacatctcatttaccgtcatacacagcagctgggtgtggttgtatagattgttcttgcaaaagagtgcctttcagtcaagggcaggtagaggctgaaatccactgaatcctctgctcaccaagcatgcacacatggagctgcacccaaccctaagtcacgcagaatcaatttacacactacctgggccaatgtgaggtcaatgcacagccccaggtccattagatcacgcaagtggcagagaaacactgtggctgtgtcaagcatggtgcttggcactaggagcccaaagagaaataagaaacctcaaatggtggctggctgcagtggctcatgcctgtaatcccagcactttgggaggccaaggcaggtggatcacccgaagacaggagttcaagaccagcctggccaacatggtgaaaccccatctctactaaaaacacaaaataaatagctgggcatagtagcagacgcctgtaatccc

SEQ ID NO: 680707 - DNA, 1032 bp, Homo sapiens
taagaaaggaaggatacacttattatctcaggggataaagaattaatagacaaagccttgttctatctccttggggtcatggctccaatgagcttctgaggaccacaaccatctatgttccatgtgtgacatcaggaagaaggggtccccttcaagctctggctcctttgtacttacaggatgggctatcacgatcccagagaaaacagtcgacattataaaactgcctttcgaaccacatgattcagcataagaacatgagagatccagctttcggtgtcactatcactgccggcttttctggccttgaaactggccagaagtccttctgcttattaccggcttggattgctagaacttcaaaacaaagtttcaagtgctagaaattcttagtttctctctcatacatactattttgaattttatatgaattagcttttagattcaggttacaaattaatccaggctcattatgtaattaaatgtttgattaggagcattaattaacatattacacagaggcatataattttatgagacaaactctttaattccaatgaagagattcaccatggtaacaaattatctgacccacccaattcaatatgtaattccaaatgatttttcaaattaactaaaaatgctgtcattattaaataggtatattacaatgyatgcactgcactgtagagattttttttaaatacttaggcgaaagatgagagaattctaaatatgctttcataaatacacaaagtaaagatcaaggctgaaattttgaaaaaggataaaaatgttgacaattttgttgtagccaatgctttgtgctttaatttttttttaacctggcgacattaggaaatggtgcatttcatgcatttttaatctttctgtgttatcttggtaagatggctcctggcactctacctggagacggatttattttgattgctagacacaatctgtattaatcaatccaaggccaagtacaatttagtttgctacttcaggagctggatggtatgcaattgt

SEQ ID NO: 680708 - DNA, 1078 bp, Homo sapiens
ttatcacactttcaacatttttacccatatgtatataatggattaaaactgtataagtttatatatccttagatactaatgaatggtgcatcttttcatatttcttttattgattaaatgtattaccttttctgttaattgcctgctcatactgtttgactgaatttgtgtcattttcctgattcatttatacaatctggatcttaatctatgttctctatgtattttctccaaatgcttacttcattaatttgtttatgatgctttttatcctacaaaagcttttaactttaatgtattcaaattaatcaatattttgttgtataacttttgtgtttaaaagyttaattttaaaaagaatgtcttttttcaaggccataaacatattctcattttttcttctaatatgatcaaatttttacttttgtacttacatctttaattcatttgtcagattttttgggggtgaatgactcgaagtagagtgaaagcattctcttttttctaaataaataactgtagccaaaacattttttaaactgggtgattttccctattaagttgtctatagtcatgtcttcatgttctcacctgcaattttttttcttcattatactctagtcagtgttccattctcaccaaaccactgagatgactcatgtcaaggtcaacaatgacttccatgttgccagagtgaatggtcatttctctgtccttatcttacttgaccatcggcatgtcccatgcaatgcaccactctcttcttgaagcattctctttccatggcttccatggccccaaactcccttggtttataccccatgtcactggccactcttttttagtttctattgttggctctaattctttgccttcattttgatctttggagtgttccaggactcacttcagagccccttctaactatctattcactctgtctttagataatctcatctagttccatgtcttcttatactattgatatgtccaagactacctaatctacatgtttatccctgatctcccctggaactctagcaccctttttctttctgcttggcctctgtaaatggat

SEQ ID NO: 680709 - DNA, 2230 bp, Homo sapiens
tgacatttttaatattcactcaggtggtctaagtgttaaattcaaaagaaattaaagcaatcccaaacatatgaaccatgggggaaaaaaaacctaactctataggccccagactggaaattgaattattaaatgggtcacttcttcygccagagtgaattatagtacagaatagacagtaagcagagtagtaatttagcctgaatgaagaactcctatgggtaacccatttagaatagcttgttctttagaactgtcaaaaacaagaaggaaaaatgtcccaggtaatctttaaacttaccgtggtgtttctaaaatgtataattacactataaggattataggaagaatatatctatttctggaatctattgctgggtaaggaggtcaatttgatttcaaagagtaaaatagctaataaaactgaagtgtcttggggacttcaaaccactgaaatgaactgtcttccctgggccagcaacctcaaagcatcccagatctgtttcaaatggagacatcatccacctatttcaaaagatgatagatgagatgatttcctgctttaaaaattagagactgaactcaaactaaatcttctctggtaaacaaaaaaattctgagcaaaagcaaaagcttttcctaatgatgctacagagattaaaatagatatgtttttgccatttctcattcaagactatctgtttctacccacaattttcagtatttataaagataggaaaactacattaaagcaaagcttccagttattggaaacgtgttgctttggctgctttagtcactaaatgacaatgaatgacatctttacctctccacaaatatcccagcctgcactgcgtgaacgatgctcttgaaccggggcttctcgtcgctcctcctgagcatcatccccatctgccgcgtgaaggtggaggccagccagtctcggacctcagaaggcacagcatctgactgaatgtcactgagctcatcctctgtatccaggagtctcctgaacacaagaaacagaatcagcacactgagattaaatctgaagttggagctctctgttcaaagcagctgctcctctctgcctcacctgcatgttaggtgcaaagaaaccaaattaaattggccacaaaaaatacagtgcctttttggtaaggcttatgtaagctcgccatgtgtgtttcgcgatggtcttggcttccactgatatttcaggatggttctctctaccagactggacaaaggaactggtccattgtacccagaagcactctgtggcatttgagtgaaatttaaaccttctatttaaaaatgccttcacagggagccttgtattatttcatagatggaccatgtgacgttattttgtttaaaaatataaatggatacttaagagactttgcaaagtatttaccaaatcacagcaacccagtcctctgaagtagtgatcctaagtgatgacaattaagattctttccaggttgctaccaaaatttaaatgtctaaattcaaggaaaattttcaaaataatgcagttctttatttgcgcacaatgatttaatcatctaatagctgtgttttgctgatttttcaaacttgttcataggtcagaccactagaatcgaacacaaagagcaatgttaaaataaaacctaaaatagcatgtcatatttacagtaaacccaactaaaaatcatcagtaaaagtagctgccaatgtaaaggtgtttggattttttttttcctttagacttaccaattggggtggaggtaagcggaggaaacataacatttggaaaaaagctatgatatcgaatttccttaaattagaaaccaagtgtgtcagcaaaataataataatagtaaaccatacaaatcttagattactgtgaaatactttcagattggaatttggcaaataaaagacatcacaaatactgacagagaagcctgtctaaattagggggaaaaaaaaccacacctttcgtattcaacatttcaacatttttcaaaagaaatgcaattttataactttcaaacgtatgtagtaactgaaaccgctttaatacgtttagataattcaagtggaataaacctgctaagtaaatcagcgacatacgtaagactgaagagggaatgctgggtgcttaagagaacacatgcttctcgatcacttcaggagcctccatttactaatggacattatgaattaaaacataaactca

SEQ ID NO: 680710 - DNA, 2230 bp, Homo sapiens
tgacatttttaatattcactcaggtggtctaagtgttaaattcaaaagaaattaaagcaatcccaaacatatgaaccatgggggaaaaaaaacctaactctataggccccagactggaaattgaattattaaatgggtcacttcttccgccagagtgaattatagtacagaatagacagtaagcagagtagtaatttagcctgaatgaagaactcctatgggtaacccatttagaatagcttgttctttagaactgtcaaaaacaagaaggaaaaatgtcccaggtaatctttaaacttaccgtggtgtttctaaaatgtataattacactataaggattataggaagaatatatctatttctggaatctattgctgggtaaggaggtcaatttgatttcaaagagtaaaatagctaataaaactgaagtgtcttggggacttcaaaccactgaaatgaactgtcttccctgggccagcaacctcaaagcatcccagatctgtttcaaatggagacatcatccacctatttcaaaagatgatagatgagatgatttcctgctttaaaaattagagactgaactcaaactaaatcttctctggtaaacaaaaaaattctgagcaaaagcaaaagcttttcctaatgatgctacagagattaaaatagatatgtttttgccatttctcattcaagactatctgtttctacccacaattttcagtatttataaagataggaaaactacattaaagcaaagcttccagttattggaaacgtgttgctttggctgctttagtcactaaatgacaatgaatgacatctttacctctccacaaatatcccagcctgcactgcgtgaacgatgctcttgaaccggggcttctcgtcgctcctcctgagcatcatccccatctgccgcgtgaaggtggaggccagccagtctcggacctcagaaggcacagcatctgactgaatgtcactgagctcatcctctgtatccaggagtctcctgaacacaagaaacagaatcagcacactgagattaaatctgaagttggagctctctgttcaaagcagctgctcctctctgcctcacytgcatgttaggtgcaaagaaaccaaattaaattggccacaaaaaatacagtgcctttttggtaaggcttatgtaagctcgccatgtgtgtttcgcgatggtcttggcttccactgatatttcaggatggttctctctaccagactggacaaaggaactggtccattgtacccagaagcactctgtggcatttgagtgaaatttaaaccttctatttaaaaatgccttcacagggagccttgtattatttcatagatggaccatgtgacgttattttgtttaaaaatataaatggatacttaagagactttgcaaagtatttaccaaatcacagcaacccagtcctctgaagtagtgatcctaagtgatgacaattaagattctttccaggttgctaccaaaatttaaatgtctaaattcaaggaaaattttcaaaataatgcagttctttatttgcgcacaatgatttaatcatctaatagctgtgttttgctgatttttcaaacttgttcataggtcagaccactagaatcgaacacaaagagcaatgttaaaataaaacctaaaatagcatgtcatatttacagtaaacccaactaaaaatcatcagtaaaagtagctgccaatgtaaaggtgtttggattttttttttcctttagacttaccaattggggtggaggtaagcggaggaaacataacatttggaaaaaagctatgatatcgaatttccttaaattagaaaccaagtgtgtcagcaaaataataataatagtaaaccatacaaatcttagattactgtgaaatactttcagattggaatttggcaaataaaagacatcacaaatactgacagagaagcctgtctaaattagggggaaaaaaaaccacacctttcgtattcaacatttcaacatttttcaaaagaaatgcaattttataactttcaaacgtatgtagtaactgaaaccgctttaatacgtttagataattcaagtggaataaacctgctaagtaaatcagcgacatacgtaagactgaagagggaatgctgggtgcttaagagaacacatgcttctcgatcacttcaggagcctccatttactaatggacattatgaattaaaacataaactca

SEQ ID NO: 680711 - DNA, 2230 bp, Homo sapiens
tgacatttttaatattcactcaggtggtctaagtgttaaattcaaaagaaattaaagcaatcccaaacatatgaaccatgggggaaaaaaaacctaactctataggccccagactggaaattgaattattaaatgggtcacttcttccgccagagtgaattatagtacagaatagacagtaagcagagtagtaatttagcctgaatgaagaactcctatgggtaacccatttagaatagcttgttctttagaactgtcaaaaacaagaaggaaaaatgtcccaggtaatctttaaacttaccgtggtgtttctaaaatgtataattacactataaggattataggaagaatatatctatttctggaatctattgctgggtaaggaggtcaatttgatttcaaagagtaaaatagctaataaaactgaagtgtcttggggacttcaaaccactgaaatgaactgtcttccctgggccagcaacctcaaagcatcccagatctgtttcaaatggagacatcatccacctatttcaaaagatgatagatgagatgatttcctgctttaaaaattagagactgaactcaaactaaatcttctctggtaaacaaaaaaattctgagcaaaagcaaaagcttttcctaatgatgctacagagattaaaatagatatgtttttgccatttctcattcaagactatctgtttctacccacaattttcagtatttataaagataggaaaactacattaaagcaaagcttccagttattggaaacgtgttgctttggctgctttagtcactaaatgacaatgaatgacatctttacctctccacaaatatcccagcctgcactgcgtgaacgatgctcttgaaccggggcttctcgtcgctcctcctgagcatcatccccatctgccgcgtgaaggtggaggccagccagtctcggacctcagaaggcacagcatctgactgaatgtcactgagctcatcctctgtatccaggagtctcctgaacacaagaaacagaatcagcacactgagattaaatctgaagttggagctctctgttcaaagcagctgctcctctctgcctcacctgcatgttaggtgcaaagaaaccaaattaaattggccmcaaaaaatacagtgcctttttggtaaggcttatgtaagctcgccatgtgtgtttcgcgatggtcttggcttccactgatatttcaggatggttctctctaccagactggacaaaggaactggtccattgtacccagaagcactctgtggcatttgagtgaaatttaaaccttctatttaaaaatgccttcacagggagccttgtattatttcatagatggaccatgtgacgttattttgtttaaaaatataaatggatacttaagagactttgcaaagtatttaccaaatcacagcaacccagtcctctgaagtagtgatcctaagtgatgacaattaagattctttccaggttgctaccaaaatttaaatgtctaaattcaaggaaaattttcaaaataatgcagttctttatttgcgcacaatgatttaatcatctaatagctgtgttttgctgatttttcaaacttgttcataggtcagaccactagaatcgaacacaaagagcaatgttaaaataaaacctaaaatagcatgtcatatttacagtaaacccaactaaaaatcatcagtaaaagtagctgccaatgtaaaggtgtttggattttttttttcctttagacttaccaattggggtggaggtaagcggaggaaacataacatttggaaaaaagctatgatatcgaatttccttaaattagaaaccaagtgtgtcagcaaaataataataatagtaaaccatacaaatcttagattactgtgaaatactttcagattggaatttggcaaataaaagacatcacaaatactgacagagaagcctgtctaaattagggggaaaaaaaaccacacctttcgtattcaacatttcaacatttttcaaaagaaatgcaattttataactttcaaacgtatgtagtaactgaaaccgctttaatacgtttagataattcaagtggaataaacctgctaagtaaatcagcgacatacgtaagactgaagagggaatgctgggtgcttaagagaacacatgcttctcgatcacttcaggagcctccatttactaatggacattatgaattaaaacataaactca

SEQ ID NO: 680712 - DNA, 1212 bp, Homo sapiens
ttttgcaaatgggagtcatgggatactacataatattgttttaaaatgctaaaccaaatcttgtcatataaatcagaaaaatatctgaagttgtatggaatgctcaaaacttttagtaaattataatttattttctgctagaaattaaagtcaagagatcctatttttacaaaaagtcataaaatacaaggaagaactttttataaccttaagaacaatgctaataataaagatattcaactggtgaaaaattctaaagaaccaacttttcatacatcagtaccctggtgaattgtaaatgtcactcaaataccacaaggtcagattcttagatcaattcctgcattaatacttcttgtataacctgccaaccttcaagtactatatactctagtcagcctggaatgttgtattataataacttaaaaattaaatatcaggatagtctattcttttcccaaagcttcaaagtgaggagcccaaaatgggaagactgattccttaagagagatttctccaaagatgagaaagatttgcctgagtcaaataggaagtcacttggtcaaacccatttattattacaatctaattatgttttacagctgctcatgagatgtctaggaaattacatttgcaactttagtcaaaggaccaatattaatgcttatttaataatcagttctttgggtatctctattattgagataaatatgattgagacatgataggaagtggtcatttctctcataaacttattctgaccttcaacgttggtgtataattgcacatttatacaaatgtatgtcatttataattgcacatatgtatgtagaacagtgaactttggctggtgggaaaattcagagtgaagattttgaagattttcttggtttcatgastaatcatccttatccacaagaacagagagtgctatatgcagcctttcggaaaatgcctgtcctttcagctacacaccacattaggacagaagctggaatccagcctgaattgacacaggactgggcaataggaagataaaacattctaactcttcgtttggttctcattagagctaacagtgaatccagatctagagacactgctattataacacaaaatttgcgagcaaatcacccaaaataaaaaaaaaatctatatacaatttttaaaacttctcttagatttagagtcctaaaacaattgttaattttg

SEQ ID NO: 680713 - DNA, 622 bp, Homo sapiens
tgaaaataaccaaagggtttactgctgttggcaatttaattctggctaatatgtggaatagagagagagaagttgacagagtaaagcttgataataaaaaaacaccagctcatgcttttatcaagaaaataaggcataaccagatatctatttttaaataaaattgcttacttttaattttatataatgcttttactgttattaataactttttttagcatggccatgttatcaattatcaataataataaaacataattatttgcagaacattgatgttgtatcaagcactacataagtattttatacacttagctcatttaagcyttacaagtctatgagatacgtatttgtatccattctataggtgagaaaattagagttaagagaggttaattagtaattttccaaggtcaaacagctgataggtggtagagataaaatccgaaacctgtcagcctccaaaactcacctcttaaactctttattatactatctctgtaagcttatgaaattcacggcatgaagaatgaaaaaggagtctgccttgataatatccgactcttctttaagtatcctcttgtgtgatatccttggcccctcttacaaattcttcagattg

SEQ ID NO: 680714 - DNA, 3440 bp, Homo sapiens
aagacatgaactggtctctgattcatgggggaaaatctccaaaagttgcaatattttaggggattaaaatttataataattcctctgtgtttaaggacacataacatgttttctgcatcaatggttaagtttgatatacattcatggacctaaaaaaattttaggaccaaattaagatgagccatgactctgtacaaaattgtagtgggaaaaaaatgcttacagaattacactatatcaattggaaagggttagtgtcttattagtggctcctcatttcagaatattttccttgatttcagcctcattcaggttgctgcttctactaatctgggtgcattatttacccaattcaattcttcagtcatgcattgcaaaaaagaaaaaaaaaggaaaagaaataaagtcttttgagcaaatattccctagaatatccacagagcttgactgcattggcaatagctggcacttaggagaatgtggtagccagagccctgtattttgctgtctagaatctcactcttgtgcatctggattttcatcccaggcactcctaggcaacccatgatgctgcaatgactgatgtcttagtttcctagggactctaacaaattggtagctgaaaacaacagaaattgattatcccacaattcaggaggctagaacttcaaaatcaagatgttggcaaggccatgctctttctgagagctcatgggtaggatcctttcttgccttctcctagcttcaggtggttgctggcaatccttggtgttgctttgcttgtaggcatattgctcaatctctgcctctgtctccacagggcattttctgtgtctctgtgcccatcaaatgtccttcctcttgtaaggacattagtcattgtattagggctcaccctaacccagtgtggcttgatcttacctagattatatctgcaatgatgctatttccaaataaggtcatattttgaggttctgggtgtacatgaatctttaggaactattattcaactcagtacatttgagaagagttggtggacaactaygtcaaaccttttagtactgttacaatgtcattctgccaaataggtgaacattaattgtaagttatttgagatgaaattccttctactgaagaaggccactttctttcctggaaattggatgaaccagaaacaaagataaatgtcgtgggttaaaaaaaaaaatgttgtaattaggtggcaaaacagcactgattagcttatcattctttccttttgtgcttcagtatgcctacttgtataatgaactacagaatagcctccagattgtgtttgcaaatgcttgatggaaatttaaatcagagcactataaagcattgcgtgatttaaaaaaaagtcttcaaagaaaattcagatataaatatggctaaatgaataaatatttctccctagaaaacttagtcatgtattagtactataatcctcacaggacaaaagaaaatgtcagatatcatggagttacacagatttctttatgtctagtacagtctctagccaaattcaactgctgatttacaaatcaaattcagaagctaggagattaaaatagtttgctttttcagaagctataaagaatatatattctcactctatattttgaaaattcagaatttttaatcaggctcaattcctagcaaaacagtcttactatcccattctctcacctctatatctctgccctcccccacactgtctctgctaccttccctaaccatgctcccaactccagaaagttagaaatatggctactgttgctggtcctctttcaacttcataatctaccttgagtctgggaagactttctataaagtttcatgctgagctacaaaaacaatgctgtgtgtgattaagaatgcaggctttggagacagactgcctgaattccaaactttatgtgactttcggttgtttaatggctctgggccagaattttatgtgtaacataaggctattactaatactcaccttaaggatattatgcaggttaaatgagctaggttacataaagtgttcagaactgtctctcacccaataaatggttattattattaatctgtgtgatgctggtatataacagaataattcaaactaaataatgcattcaaactaaactattcaaactaaatagtggagagttcatattcaaactaaactgtattgtaatgtattcaaactatattgtaatgtattcaaactgtattgtaatgtattcaaactaaactgtgttcaaaccaaataatggagagttttaagtacagaacatcacctcatatacttaatataaatgtgcttttaacagagcaatgatccagctcttgtgaatggtaggttgagctcagtggaataggacccaatgaatatggacactccaactaaatttcaggttcagattgtcccacaataagacacaatcattcaaacaacaccctccaagctgataagcaattaagggatcaaggcagaaacacacagccaaggacctagagcatcttagagttggtggttgtaaagttagaaacggaccacagtggtcctcctgtgatactgagatttaaatgtttttatcttttttcctgctcccctcaccccattcttctttccttaccatttctgttatcgtctcagctaaagttaatggttagaaataatgagagttgatggtagccagaccagaaaaacaaatctgttcggtttttgttattcgacctatgtgcatcctcttgattcaattagttctcaagtatctctcaattatacctgtgaacatgtgcaggacagaaacttgaatttataaaataatgtttgaattaaatggtatctcatttgcaattcaaaattctataatccagggaatagactggaaagttttagctctgaaaatccatggtagacctaaagagctgagtttctaagttgctaatatttatcacttgcctttcacaaatgagaatggattgcctgttctgaaagttggaaacaaaaactcttttctctgattcccttatatcagcataacaaacatgaagaaaggtaatgactgcatcatcaatggcagcaaaatgtgaactacccacagatactaagctaactaggtgtgcctaattgccaacagtagggatatgccccgcctgtcacttgaatacgttcttaatttatgtgccactgaaattccctggtaagatgtcaccacttacattgtgggctaagtggattacacatcttgctgtagggctttgagtgaaatgcagacttcttggctaaggtcaacaatggaaaacatatataatggtggtcccatcagattaactggagctgaaaaattcctatcccctagtgatgttgtagccattgtaacattgcaaaaattcctataatctagtgatgtagctattgtaac

SEQ ID NO: 680715 - DNA, 652 bp, Homo sapiens
tcttattcgcccttctcttggttgtacaacagcatccaggaagtagaaaaggatgaataaactctggctgattgattgattgggactgatgctgccttctacagcagacgtttattttaaaacataaagctgtgacttttaaaatattttataggccaggcacggtggctcacgcctgtaatcccagcactttgggaggttgaggcgggcggttcacgaggtcaggtgatcgagaccatcctggctaacacggtgaaaccccgtctctactaaaaacacgaaaaattagccaggcgtcatggtggccggcgcctgtagtcccagctactcgggagggtgaggcaggagaatggcgtgaacccgggaggcagagcttgcggtgagccgagattgctccactgcactccagcctgggtgacagagcgagactctgtctcaaaaaaaaaaawtttttctaaattttctctaaattcaaatattagcatattagaaaagttttaaaacagcaaggattggataaagggtgagttcctaatccacataggttaggttttagatgtgtgaacagttcaataatttactatacggacaactaatttcaaaaaattataattatattttaattctatatctttaataaaacagaacctca

SEQ ID NO: 680716 - DNA, 1348 bp, Homo sapiens
ctttggggttttttgagtaattttacattcccagaaaaactgggtagaacatacagtttccatacattattatccaaccctccccacttataatttcctgtgttattaaccatttgcattagcgtggtacatttataatattcttttaatatatacctttggtagcatttatattaataataatctatgcttaatagcagctgaaagtacatttttaaatggatattttacctttatgttaaagataaacataaagatctatacagagttacaactatatatttttatgagatataaatagtacataatccatcccatttttatgatactttataagatttkaagcctaccttgatgctttttgaaacacacacacacacacacacacacacacacacgcacacacaaaactgcttgtttattttctgaggcctgcgtgggcactttacttcaaaatgtgctaattgctctgacttcggccagggctctttgctgggctgcacacctctgcctgctacatctgtgtttacataacttgtgggatcactcagagtcctgctgcaggtccctttagcttctttcaggaccaggcctcagtgagtctaaccaaagtcaaagtcacccggatcagttactcccgagagcttactctggtcagaatctacctttcactaacagtttgatgcaaaatcatacacaacatattccctcaactgaggacatatggtttgtacgactgtaaatttaaaaagtagttgataaattactttgtaagatctttactattaatttctgtcaggggacagaaaaatagcaaagggcatctaccattgttgcaaaaacaacacttcctgcaacaggatagaactctctgcagtgtcatattgaaattaatcttgctctctgctggttactgagtgctattcaaaattatccagctgaagttaaacagaaatattgttcttacataagagtataaaaccaaattcatatatttcatatataattaacgtctgcaacacaggtctaataatgtcagcaacaagacatggatggaagaaagacaaatatgtaaatattagaagtcagacccacaaatataatgaaataaaaactagttggaaacttatgcctactctaatacaatggatatatcatttgttgtgctctggggtgttttttaggtaaagcacaaactaatttgtcagtttaagtgcctgacaaagaattcaaaataattgtattaaagtagcttatcaagctacaagagaacactgttatacaccttaataacatcaagaaaaaaaatacacaaacaaaatgaaaaaataaacatagatatgggaaa

SEQ ID NO: 680717 - DNA, 1348 bp, Homo sapiens
ctttggggttttttgagtaattttacattcccagaaaaactgggtagaacatacagtttccatacattattatccaaccctccccacttataatttcctgtgttattaaccatttgcattagcgtggtacatttataatattcttttaatatatacctttggtagcatttatattaataataatctatgcttaatagcagctgaaagtacatttttaaatggatattttacctttatgttaaagataaacataaagatctatacagagttacaactatatatttttatgagatataaatagtacataatccatcccatttttatgatactttataagattttaagcctaccttgatgctttttgaaacacacacacacacacacacacacacacacacgcacacacaaaactgcttgtttattttctgaggcctgcgtgggcactttacttcaaaatgtgctaattgctctgacttcggccagggctctttgctgggctgcacacctctgcctgctacatctgtgtttacataacttgtgggatcactcagagtcctgctgcaggtccctttagcttctttcaggaccaggcctcagtgagtctaaccaaagtcaaagtcacccggatcagttactcccgagagcttactctggtcagaatctacctttcactaacagtttgatgcaaaatcatacacaacatattccctcaactgaggacatatggtttgtacgactgtaaatttaaaaagtagttgataaattactttgtaagatctttactattaatttctgtcaggggacagaaaaatagcaaagggcatctaccattgttgcaaaaacaacacttcctgcaacaggatagaactctctgcagtgtcatattgaaattaatcttgctctctgctggttactgagtgctattcaaaattatccagctgaagttaaacagaaatattgttcttacataagagtataaaaccaaattcatatatttcatatataattaacgtctgcaacacaggtctaataatgtcagcaacaagacatggatggaagaaagacaaatatgtaaatattagaagtcagacccacaaatataatgaaataaaaactagttggaaacttatgcctactctaatacawtggatatatcatttgttgtgctctggggtgttttttaggtaaagcacaaactaatttgtcagtttaagtgcctgacaaagaattcaaaataattgtattaaagtagcttatcaagctacaagagaacactgttatacaccttaataacatcaagaaaaaaaatacacaaacaaaatgaaaaaataaacatagatatgggaaa

SEQ ID NO: 680718 - DNA, 1086 bp, Homo sapiens
tgatttataatcctttgggtatatacccagtaatgggatggctgggtcaaatggtatttctagttctagatccttgaggaatcgccacactgtcttccacaatggttgaactagtttacagttccaccaacagtgtaaaggtgctcctatttctccacatcctctccagcacctgttgtttcctggcgttttaatgatcgccattctaactggtgtgagatggtatctcattgtggttttgatttgcatttctctgatggccagtaatgatgagcattttttcatgtatcacagctcttattttcagatataattgctacatgaaaaaaatatataagcataaattctcttttaagtcaccttaagtcaggatttctgactttcatctgaatgtgttcctaagttatacatgcaaatgtaagcattgttgtaactgcaacgaaaatattattatcatttagggatgtttgctgatatgttgtttccacccactagtaaatgtttgttttagtctgttttctgtttataacagaatacctgaacttggataatttgtaaagaaaataaatttatttcttacattcataaaggctgagaagtccaaggtggagggatcacatctagtgagagacttctggctggtggggactctctgaagagtcctgaagtggcacagagtaccgcgtggcaaggcatctgagtatgccagaatgcatgattaggtctttccttctctgtttataaagacaccactttcacactttgggaggccaagttgggcagatcacgaggtcaggagatcaagaccatcctggctaacacggtgaaaccccgtctctactaaaartacaaaaaattagccgggcgtggtggcaggcgcctgcagtcccagctacttgggaggctgaggcaggagaatggcgtgaacccgggaggcggagcttgcagtgagctgagatcgtgccactgcacttcaacttgggcgacagagcaagactccatctcaaaaaaaaaaaaaaaaaagaaagacaccagtttcactcccgtgaacacccactattccattaatccatgaatggatgaatc

SEQ ID NO: 680719 - DNA, 1301 bp, Homo sapiens
gatgctaattatttgtaattgaccctagagatctttggtgtgaagtaatttgtaattttgctacggcataaatatgagtcacgcggaataggcgaacattcaggtgcaagttgtcaagctagagtgtaactcttcatgagcactaagtgtccactatccaaagaggtttatgcttctttctaccctaccattaagcgcgatggaaaacaaaggtctagagaggccagttacatttattctgtcataattcacctcattttagatgaaaaaattataatataaagctattgcatatggaaatatgtaaagaaagtgccactaatgcatgtgaaaggataggattgcttcatattacaagttgagcagatataggtggagaaagtctacctgcaagagaggcaagcaggtttttttgatagaatatctgtgattttctagaaaatctgggtaaaatcaacagaagttagcttttaagttgtaggactttaagattctaaataatctcttaataatgctggcaatgtgatcatttaggattgaatcatttgttttggaaatcataaaaatgatcaaacagttgattaaatgttaatgtcaaacagatttatgcaactgattttagaatttccatttttgtaacaagtgaatcagatttcatgtttggcttgtgatcacttggcaatgagtcaccagattggtactctaatgatctctaagttaaattttttaaacatagtatgaaatcctgtatattctcaaggattagtaaaatagctcacatcatgtctatgtcattgccaaaataattagatacttattgagaatcctttaaagtattattattagaaacagtaagtcaaaattatttgctttctcccatccgagtactaatcaagcccgaycctgcttaaattccaagattagatgggaatgggcacatttatggtgatatggccataaataaaatgatttgcctttagaaaataatttctctgtgaggttttacatgtaatggtctttgttggtttaaaactatctccgtcttatgtgaaacatttatagtgcaactacacttattgttagatacagactctgtgaatatcttcaagcctgtttaaattgcaacttttattatgccctaaaaagtagcccaatcattctgtcttctgaattcaaattttgacaagaggctctccccgtgggttgctgatgagagatatcaatgatatttccctgcaagggacaagctatcttgtcaatgttaggcaggcactgtgaattaagctttgcctagttaaaaa

SEQ ID NO: 680720 - DNA, 2269 bp, Homo sapiens
ctatctatctatctatccttttctgttttgctgttttatattatattgtgttgcgttattttagtttattatgtttatatgggggttatatttgcactattagcttctaaattttgaaacttgaaacttttgaccaagatctagattttgaggccaaaatttgaaaataataattaataaggctatagaaagctggcatctcccccatctttgcacatgtgtatatgattttttatctttgattttaaattgtattacagtatgaataaatgccttcaaagacaaataaaccacatcactccccatgcagaagaccaatttcatgacatgaaacactaaaacataataaacaaacataataaaaagcgtcatgctttagttggaagtataaactggctccgataaccaagatttgtctttctggattcacagaaagcagggtgagttggatcggaagccatttgaggagctgttgttatcacttagttcatcatactttcctccccaggagcaccgaacacttcctatgagggcatccagccagtgttctgcctgtctaatcaatttgacttatgggataattcctctattatctccttctgtttaatgctcattattgatattatatttgcttatttagttcagtaaacacattgtccaagagatataaatatgggaaattttccttgagaaatatccagttccagaagctaaacattttcagatttctctaccattggcctttcagaaactacttaaratactaagaatatttctcacctttaccagacaaggtcctttccctagccttttttcttccaagaaacagaaggttattctaacgatatttgtcaaactgcccagcaatttcatcatttaatgcctcagcgtatcttagagtattaatctaatcattagctggtagtctccaattattgaaaaggaattcatttcttaaaagttttatatcttttgaagaaattcaggatattcattcagaatttaagtatttaaagtttgatattcttaggcttgcttaaacttcccactgaactcatacagatgatacaaacattttaatatcctctaaagagaagatttgaaattatgccttttttggtgtattttatagaaaacacagaataatttgtacttcaggacctgccaactcagggttttaaagagctttataaatgctgcaataaacatcttcacaaattctttatagaatgacaattaaatacttctttatgcaaaatatattttacctaagtgctttgcaaacttcattttatagctagcagcatttattttgcaataaaaatgagtttgttcaatatctggaaacttgtaaactccctgggaataaaaatacctaatttcaaatctaggacataataaaggaaaaatgaaaaatgtatcaatccatctgactttgcaatacagatggagagattataacaaagttataccaagaagcctattgctaattccaagtttcagtcttttataatcttttttttttctctctcaaaatttccaagaattttttcctgggccttgatttgtcaaaatgatgatataactaaattttcttctgggccacaattaaggacactaatacaatcccaattctcaggaattgccttccctaatctgacttcaatgcctgtgcctggttgtccagagttcttcatccataattaaggtggccctcactcagccaccccttctttcttgatccttatcccttttcccctcaacccagagacttcggtcattgtcccatttcattccactgtatagacattcttttgtctcttttattcagatatagtgtggcatgcatcttcccattgcacacaaagcctttgaggttttctaaacatggattgtcaattctatcacttatctaaatttcaaactttttttttcattaagatcttaaaatctctatcttggtgaaaatactgaactctttctgagaccagcattagaccttagctttgagctttggggtttttcctatggagcagttgttctcaatgtaaacaccctcagacttctcagtctgtctgtgctcacatcttactcagacaagaggggctagcagggttgcctgtcaccagcgagtggggatggttggaaacccttgccttctgaaggcttctgtctcagactaccagtatccatagcttaagctggtacttgtgactttttcacttttcttccttcattgcaggcccagaactgcctcactaagctatac

SEQ ID NO: 680721 - DNA, 2269 bp, Homo sapiens
ctatctatctatctatccttttctgttttgctgttttatattatattgtgttgcgttattttagtttattatgtttatatgggggttatatttgcactattagcttctaaattttgaaacttgaaacttttgaccaagatctagattttgaggccaaaatttgaaaataataattaataaggctatagaaagctggcatctcccccatctttgcacatgtgtatatgattttttatctttgattttaaattgtattacagtatgaataaatgccttcaaagacaaataaaccacatcactccccatgcagaagaccaatttcatgacatgaaacactaaaacataataaacaaacataataaaaagcgtcatgctttagttggaagtataaactggctccgataaccaagatttgtctttctggattcacagaaagcagggtgagttggatcggaagccatttgaggagctgttgttatcacttagttcatcatactttcctccccaggagcaccgaacacttcctatgagggcatccagccagtgttctgcctgtctaatcaatttgacttatgggataattcctctattatctccttctgtttaatgctcattattgatattatatttgcttatttagttcagtaaacacattgtccaagagatataaatatgggaaattttccttgagaaatatccagttccagaagctaaacattttcagatttctctaccattggcctttcagaaactacttaaaatactaagaatatttctcacctttaccagacaaggtcctttccctagccttttttcttccaagaaacagaaggttattctaacgatatttgtcaaastgcccagcaatttcatcatttaatgcctcagcgtatcttagagtattaatctaatcattagctggtagtctccaattattgaaaaggaattcatttcttaaaagttttatatcttttgaagaaattcaggatattcattcagaatttaagtatttaaagtttgatattcttaggcttgcttaaacttcccactgaactcatacagatgatacaaacattttaatatcctctaaagagaagatttgaaattatgccttttttggtgtattttatagaaaacacagaataatttgtacttcaggacctgccaactcagggttttaaagagctttataaatgctgcaataaacatcttcacaaattctttatagaatgacaattaaatacttctttatgcaaaatatattttacctaagtgctttgcaaacttcattttatagctagcagcatttattttgcaataaaaatgagtttgttcaatatctggaaacttgtaaactccctgggaataaaaatacctaatttcaaatctaggacataataaaggaaaaatgaaaaatgtatcaatccatctgactttgcaatacagatggagagattataacaaagttataccaagaagcctattgctaattccaagtttcagtcttttataatcttttttttttctctctcaaaatttccaagaattttttcctgggccttgatttgtcaaaatgatgatataactaaattttcttctgggccacaattaaggacactaatacaatcccaattctcaggaattgccttccctaatctgacttcaatgcctgtgcctggttgtccagagttcttcatccataattaaggtggccctcactcagccaccccttctttcttgatccttatcccttttcccctcaacccagagacttcggtcattgtcccatttcattccactgtatagacattcttttgtctcttttattcagatatagtgtggcatgcatcttcccattgcacacaaagcctttgaggttttctaaacatggattgtcaattctatcacttatctaaatttcaaactttttttttcattaagatcttaaaatctctatcttggtgaaaatactgaactctttctgagaccagcattagaccttagctttgagctttggggtttttcctatggagcagttgttctcaatgtaaacaccctcagacttctcagtctgtctgtgctcacatcttactcagacaagaggggctagcagggttgcctgtcaccagcgagtggggatggttggaaacccttgccttctgaaggcttctgtctcagactaccagtatccatagcttaagctggtacttgtgactttttcacttttcttccttcattgcaggcccagaactgcctcactaagctatac

SEQ ID NO: 680722 - DNA, 665 bp, Homo sapiens
atttgagctaaaattttcaggtcatggcttacatgacaacaaaacaatcaaataagaaaatcagaactataaacagttggtgtaacatttataaatgtttcagcaataggctctgccatgtgtagcttaatatgtttggaaactaaaaaaaaaagtctttccagttgctgctgtttaaaaatgtttcttaattaaaaaaaagacaaaaggtcaaaatgtaaacacatgttccacataaaagtgaagccaagaagatatactgtatacagttattcctgtatctgtttgactaaggatgacattgtttaatttacattagctgttccaagacaaaatagtccatgggagtgatgttgaggggaatttggggggtaaaaagagaaggaaaaaagccgtttgttccatttgttctaatatatttcagttacacccaaagagcatctttttcaaaggtcatgttgaattaaaacatgattcggctgtttcgttctcattattatagaaaactaatgtcttttaaatggtgtccttttaggccgggcacrgtggctcatgtctataattcccagcactctgggaggccgatgcgggcggatcacctgaggtcaggaataggacaccagcctggccaacatggtgaaaccccatctctactaaaaatacaa

SEQ ID NO: 680723 - DNA, 665 bp, Homo sapiens
atttgagctaaaattttcaggtcatggcttacatgacaacaaaacaatcaaataagaaaatcagaactataaacagttggtgtaacatttataaatgtttcagcaataggctctgccatgtgtagcttaatatgtttggaaactaaaaaaaaaagtctttccagttgctgctgtttaaaaatgtttcttaattaaaaaaaagacaaaaggtcaaaatgtaaacacatgttccacataaaagtgaagccaagaagatatactgtatacagttattcctgtatctgtttgactaaggatgacattgtttaatttacattagctgttccaagacaaaatagtccatgggagtgatgttgaggggaatttggggggtaaaaagagaaggaaaaaagccgtttgttccatttgttctaatatatttcagttacacccaaagagcatctttttcaaaggtcatgttgaattaaaacatgattcggctgtttcgttctcattattatagaaaactaatgtcttttaaatggtgtccttttaggccgggcacggtggctcatgtctataattcccagcactctgggaggcygatgcgggcggatcacctgaggtcaggaataggacaccagcctggccaacatggtgaaaccccatctctactaaaaatacaa

SEQ ID NO: 680724 - DNA, 666 bp, Homo sapiens
agagtctgttttcaatttgcattccctaagaaacactttctttgattcagttatcaggaactgttgccgttattacatcagatgggagaatgattgtggtaagtctttggaattttcattctctgctttcctgtaggtttattggttgcaagttttatgtgaaacctctaatctctaatgcctrgacagcacattacacccgtagtgcaattttattataattcagctctttatcactttgctgtcaatccatgttttcctcactaataaacattgtgtgttacctacaaggtttctcggagctagaataatagattctgccctcagagagctcctagtctgtagacctttattaaacttacttttcttcttccatttttatttccttccccattcagcaccacatgaatcagaatttttttgaaattttgcatatgcttagtaactttttaatgatttagatactattaatatctagataacatttaaggcttgtatacaatcttaatattctttgtttttaggttgtgtgacatgtcttctgtaggacacattatgatgattgactctctatatatacacatatatatgtaaaattggcttgttccttgaagttgtttctcccttgctaatttatgtcatataactaagataaaacgttcctat

SEQ ID NO: 680725 - DNA, 1496 bp, Homo sapiens
tacacaattagtaaataggggagtgatatcaggttaacgcagatgtcaaattggttcattctcaacttttccttagccaaaggagggtagaagaattataaccttctgtaggaaagaaaaacactctgcttctgcagtggcaacagaaacatatttagctttaattttttaaatgtaaaactaatatctggactcttagagaggagtcctggactttgcatagcttttggctggtcrtgccacctcaagtgcccaccttgaaggcagacccagagactttgagctccaattctacccatattgtcttagcgtcatacagcactgctcccctcttatgtctattctcaattggtgcaaaaaggagaaaacacaggctctgctacaggtaaagctgaatcccatcatggcaatcatcacaataacagcaacaggcactcagagagtccttactattgttacatgctcttgtgtatgagtgtattaaatcagctcatttaatcctcaacacaacactacaaaataggtgttttcagctgaagaataagacctgggaagggtacatgatttagctaaggccattattattaaactggcacagcttggaaaagaagtaaaaagttctagagttgaaatgatagtttagggtattggggttagaggttaaaggcaggaaaaaaagagctaataccaagcttattgagttggtgtcatggggacattgtaggatcaacttagataaactagaatttggaaaagtgctatgggattataaatgttatcctgaggctgctcagataattgatagatgactaaacatactatttttaaaaatcacataacaaaatgaattcaagttattcttcaactagaatagcagcctagaacaattcttaaatgtataaaaaacggtatgtctgatagaagagttaaactattccgtaagggttaaacaaatttatcctccctattattctttataacttgattcaaaatgattgaatggtactttcagatgagctggatacagactcatatagaacagagaaatattgttttgtattccaatgatgcggttatattatcttaattcgtgaatggcctgaacaaacaactgactctgcaagctcattattgccataaaaccgagttgtagctcaacttttcaaatgtgaaaataattacttttagaaggatgtcccagaacttttaaccagtttataaagtacaagcccatacaacaagtcatcttgatgaacatttcacaaacagggcatctctttggagagtatgtgaggaagtagagctgttcaaagttggataatatatagatggtaaaaggacagtttaaaaaatttttgcttttgtgactgttttctgaatacagcatctggttatactgctttaaattgttttcaagctaaatcaattgttgccatgctacacagagcagaacttttggatttgattttatattaatctgcatgctggaactaatc

SEQ ID NO: 680726 - DNA, 1496 bp, Homo sapiens
tacacaattagtaaataggggagtgatatcaggttaacgcagatgtcaaattggttcattctcaacttttccttagccaaaggagggtagaagaattataaccttctgtaggaaagaaaaacactctgcttctgcagtggcaacagaaacatatttagctttaattttttaaatgtaaaactaatatctggactcttagagaggagtcctggactttgcatagcttttggctggtcatgccacctcaagtgcccaccttgaaggcagacccagagactttgagctccaattctacccatattgtcttagcrtcatacagcactgctcccctcttatgtctattctcaattggtgcaaaaaggagaaaacacaggctctgctacaggtaaagctgaatcccatcatggcaatcatcacaataacagcaacaggcactcagagagtccttactattgttacatgctcttgtgtatgagtgtattaaatcagctcatttaatcctcaacacaacactacaaaataggtgttttcagctgaagaataagacctgggaagggtacatgatttagctaaggccattattattaaactggcacagcttggaaaagaagtaaaaagttctagagttgaaatgatagtttagggtattggggttagaggttaaaggcaggaaaaaaagagctaataccaagcttattgagttggtgtcatggggacattgtaggatcaacttagataaactagaatttggaaaagtgctatgggattataaatgttatcctgaggctgctcagataattgatagatgactaaacatactatttttaaaaatcacataacaaaatgaattcaagttattcttcaactagaatagcagcctagaacaattcttaaatgtataaaaaacggtatgtctgatagaagagttaaactattccgtaagggttaaacaaatttatcctccctattattctttataacttgattcaaaatgattgaatggtactttcagatgagctggatacagactcatatagaacagagaaatattgttttgtattccaatgatgcggttatattatcttaattcgtgaatggcctgaacaaacaactgactctgcaagctcattattgccataaaaccgagttgtagctcaacttttcaaatgtgaaaataattacttttagaaggatgtcccagaacttttaaccagtttataaagtacaagcccatacaacaagtcatcttgatgaacatttcacaaacagggcatctctttggagagtatgtgaggaagtagagctgttcaaagttggataatatatagatggtaaaaggacagtttaaaaaatttttgcttttgtgactgttttctgaatacagcatctggttatactgctttaaattgttttcaagctaaatcaattgttgccatgctacacagagcagaacttttggatttgattttatattaatctgcatgctggaactaatc

SEQ ID NO: 680727 - DNA, 1496 bp, Homo sapiens
tacacaattagtaaataggggagtgatatcaggttaacgcagatgtcaaattggttcattctcaacttttccttagccaaaggagggtagaagaattataaccttctgtaggaaagaaaaacactctgcttctgcagtggcaacagaaacatatttagctttaattttttaaatgtaaaactaatatctggactcttagagaggagtcctggactttgcatagcttttggctggtcatgccacctcaagtgcccaccttgaaggcagacccagagactttgagctccaattctacccatattgtcttagcgtcatacagcactgctcccctcttatgtctattctcaaytggtgcaaaaaggagaaaacacaggctctgctacaggtaaagctgaatcccatcatggcaatcatcacaataacagcaacaggcactcagagagtccttactattgttacatgctcttgtgtatgagtgtattaaatcagctcatttaatcctcaacacaacactacaaaataggtgttttcagctgaagaataagacctgggaagggtacatgatttagctaaggccattattattaaactggcacagcttggaaaagaagtaaaaagttctagagttgaaatgatagtttagggtattggggttagaggttaaaggcaggaaaaaaagagctaataccaagcttattgagttggtgtcatggggacattgtaggatcaacttagataaactagaatttggaaaagtgctatgggattataaatgttatcctgaggctgctcagataattgatagatgactaaacatactatttttaaaaatcacataacaaaatgaattcaagttattcttcaactagaatagcagcctagaacaattcttaaatgtataaaaaacggtatgtctgatagaagagttaaactattccgtaagggttaaacaaatttatcctccctattattctttataacttgattcaaaatgattgaatggtactttcagatgagctggatacagactcatatagaacagagaaatattgttttgtattccaatgatgcggttatattatcttaattcgtgaatggcctgaacaaacaactgactctgcaagctcattattgccataaaaccgagttgtagctcaacttttcaaatgtgaaaataattacttttagaaggatgtcccagaacttttaaccagtttataaagtacaagcccatacaacaagtcatcttgatgaacatttcacaaacagggcatctctttggagagtatgtgaggaagtagagctgttcaaagttggataatatatagatggtaaaaggacagtttaaaaaatttttgcttttgtgactgttttctgaatacagcatctggttatactgctttaaattgttttcaagctaaatcaattgttgccatgctacacagagcagaacttttggatttgattttatattaatctgcatgctggaactaatc

SEQ ID NO: 680728 - DNA, 885 bp, Homo sapiens
taaagttttacaaattactacttcaaatatatctttaaattttaatgtaatattaaactcatgaatctaatcaaataatttcagaatgaaaaaagctattactaacattaattccattactgctcaaaatctatatctatattttaatcattaggctgttgaatgcattactttgatctcagcakaagtgctcagagagttatacagatttacatcatgaaacttattaaacttctcttcgtcttaattttcttggccactttcctatctcctagaaaatgtgaagaataacaagtgaaggattatgttttacttgaggaatacaatggatgttccccaataaatactaaaatttacatttaaatttgtaagtttagtgttttcataataagtaatgttttacaatatttgtttctgggatgtggattttaaacattctgttttatgcttatgatttaatttggcaagatttctccagagacttggatgaggagcctagaattgtttctttactgcatgagtcttagcagctctgtgtggtatggcagagaatgtctgtaaccagaatggttgcaggccaaggagtggggtctaatgtagacataatagaatttccagtctctgtcactaatttcatgtttttttatgttcccaaaaagttataattttcaccctgttgggagcacttgaaagctactttggcatactcaagagacccctctagtattgtggggatggagagattagcatatgtcccaccttctcttttcctgaccacccccaccctgatcctggtgtcacataaataacttaaccctaggtctaagcattctcttctcccatttatgataaaattttaaaacttccctctgtgacttgggtaga

SEQ ID NO: 680729 - DNA, 602 bp, Homo sapiens
attgatatacaaggcgactggtatatactggaaaacttccaacagcaaaaaaatagatccctcttattggtaatttttttccatcttaaagagtatttgaagatttaaatggggattttctagccagaattgtcaattgcagagatcattcaatgaagtatcagtttgcttttcaatcctcatctttttacatgttttatgaatagtaactggtggagtaaaaacagcactggactagtattcgggagatctagsttctagtcctggatctgtcactgaccagctgtgctaccctgagtaaattactccttttctagaagcaccaatttccccatctataaaatgaacagatgaaatagacgagtattccctcagagcctttctttaatatttttatatgtgttctgggtttgatttcatttgtcaaaaagagttctagtgctttaaaaatattcaccaattattgaactagacatcttcatggtcatttattgcttaacagtctgtgattcttaattgtttgttagtgtgcaagaatctagggatacaacagtttcaaaatgatactattccccaaaatttgctattaaactagaaattac

SEQ ID NO: 680730 - DNA, 2033 bp, Homo sapiens
tctcacacctgtaatcccagcactttgggaggctgaggcgggcagatcacctgaggtcaggagctcgagagcagcctggccaacatggcgaaaccccgtctctaccaaaatacaaaaattagcagggcatgctggcacatgcctgtaatctcagctactcgggaggctgaggcaggagaatcgcttgaacctgggggagctgaggttgcagtgagccgagaatgcaccattgcactccagcctgggtgacagagcaagactctgtctaaaaaaaaaaaaaaaaaaaggaaattaaggacaggaggaggtaaacagggcacagtttgggactgtaaaacccagtcccaagcacagactgggaaaccrgttgacttcagtggaggctcatgctcaggagctgcgttaagaaatcctgttgctgtctctaggctcagagtccggggagtaggacaggttgttgagaggagctgagtcttaccctgaagcccaggagttagatccaagtccaggttggaaaggtctcacttctctatggagaaaaaggggcagctcagtggtggtcagtgttatgacaagtgggatagaagcccccagggaaaagagagggaggaaagagaccttcgggagcctggaagattgttgtatatcctccctgggtctggcttagcgtgcgatagagagccgtgcttttgatatatcttaactgtgtgtaacctacaacccaggattctctaaactttagaaaaaatacctgtgcagttgaactacagtatcagggctgcagtggaccagacagggaagtaatgcttcagagaagaagagaaaacagggaaagaccaggaacccagaagaccatctctgggagaaaaatcactcttagtgatggaagcagtgagtgaactgaggcaggttcagcagtaacgcggctgggggcagcccctgtctgggtgtgccactgtgagtttcctgacctggccactgtttatgcggatctaggcctgtgttcccacgtagcttccctgtgaccaacagcgagagtgctgctgggttctgtgtggttaggggtgcagtctgtagtcaaggaacagaatgaaattaattagcccccttgggatagctgcagcctatatctttggactcgttagcaaagggctctaactaggtgagataaccagcttcacgagtaggttagctcttggctgtcaggatttctattctctgcccaatagagcagaggctgaaaaatatttcacaataatcatcacaatggagggactctgcaggagccggtaggagctaggttttttttgttgttgttgttgttagctgacccaactatcctgacatcattgctgggcctgaatgcaaagcagataaagtcccctctgtgcatgtgcatgtgtggggacgtgtcacatgcatgcgtgcatatacattttgctgtaatgtgttcttcacatctggggatatcttaggtgggttcatccagaagcagaccttgaaatggagctttgtatgcagaggttactggggagtgccatgggagagagggagggagggaggaaggcaggggagcgggactggtcagagggagccactgagcggcaatggagttgcagcaaacgtctcagtcatttggacctgggatagcccttcagagtgtcctgttgttttatgaagttggtcacttcgtaccctccactgacccaattgacctgtcattgggtgccagccatcgcttggaaagggtcataccttaggtgaaaccttacctttggccaggattgattccccgggtggaactcagcctcgagtctcagcagggggatgactagaagatcccatgcctccgctctgaagtgggatcttggtggcatcccacggcacccaccacagggggtgatgagagtcttagaatccctgcattctgaaaactgttcccatcctgggctcatccatggtggtttccaacaggacagccttcctgatggtcctggtcactgttatcaggaggctacatggagcttttccat

SEQ ID NO: 680731 - DNA, 648 bp, Homo sapiens
cccagcctgggcaacagagtgagactctgtctcaaaaaaaaaatttgtagacaggatctctctatgttgcccaggctggtcttgaacccctgggctcaagtgattctcccgcctcggcttsccaaagtcttaggatggtgggtgtgagccactgtgcctggcccatttttatttcttagttggaatgctgaccaccagatgatgtggaagcataggtagaggtggctttctagtgggcctgtcctggttgccgggggagacaggatggcttaagggagctgtggaatgcaacggtgatttttctagtgggctgtcctggttgtaggggacatggtttttcagaggtggtttttctagtggggctgagaggtggtttttttagtgggtctgtcctggttgcggggggagacaggatggcttgaaggagctgtggaatgaaaagtgctgtgagcctggaggcaggtgaccggtgtctagattttcaatgaaagagagcactatcaggggattccgtgaatatggacaagcagcccagttagagggagccctggaaagctgtccaaaaggcttattaaacagatggtgggtgagcacacagtgagaaagtggtgatgccggcagagtgaacaagccatgccaagctgacct

SEQ ID NO: 680732 - DNA, 536 bp, Homo sapiens
gtgtgggaaaatttatacttgatagacatagatctgtgtttatagcatgatgcaaacatttcagtaatattatttctgagttcctgtgttcatgtccccttaaagtagtcttaggacagcaactgataagaataactaatatttattgagcacttactaagtgcagggaccacacttagtacttgatgtgagttgtcatgctatgtttgggtcttagaagacttgagatggagaaaaagtaatggaacagtctcttcccattgatgcttccccatgtctccctttgccaccagggacctctaggaaggaagaatgtgctagcattggactaagtggaagctagagtgatgcatttggaagtggaagagcgagrggagatgtgagaggaagagccctggagaaagagaggaatgagctggatgttttgtctgcctttccaacctggcctctgtcttctgcacctgctctgagctcctggaggttgacctaccctctggcttctagtttgggttgtgctacagggaggaactgacggg

SEQ ID NO: 680733 - DNA, 536 bp, Homo sapiens
gtgtgggaaaatttatacttgatagacatagatctgtgtttatagcatgatgcaaacatttcagtaatattatttctgagttcctgtgttcatgtccccttaaagtagtcttaggacagcaactgataagaataactaatatttattgagcacttactaagtgcagggaccacacttagtacttgatgtgagttgtcatgctatgtttgggtcttagaagacttgagatggagaaaaagtaatggaacagtctcttcccattgatgcttccccatgtctccctttgccaccagggacctctaggaaggaagaatgtgctagcattggactaagtggaagctagagtgatgcatttggaagtggaagagcgaggggagatgtgagaggaagagccctggagaaagagaggaatgagctggatgttttgtctgcctttccaacctggcctctgtcttctgcacctgctctgagctcctggaggttgacctaccctctggcttctagtttgggttgtgctacrgggaggaactgacggg

SEQ ID NO: 680734 - DNA, 1465 bp, Homo sapiens
cagtatagggtcttagagactgaagtcagattacggattatacaggttcaaattctgaacctatgctctatcacttactagcatttggtgtgactttacttcagctgtctctacctcagttttttcatgtcccaacttgggataataatagtttccacctcataaagttgttgtgattacaaaatgagttaataattgtaaagtgtttgaaacagtgcctggcacataagcagtggaataggcatactaatggaatagactactttatggtactccttctaccttatagcaagactaagcaaaaagaacaaatctgaaggcatcacactacctgatttcaaactatactataaggccatagtcaccaaaacagcatagtactgctataaaaagtggggaaaggacaccctttcaacaaatggtgctgggataattggctaaccacatgtaggagaatgaaactggatccttatctctcacgttacacaaaaatcaactcaagatggagtaaggacttaagtctaaggcttgaagaaaaattstacaagataacatcggaaaaactcttctagacattggcttaggtaaggacttaaatctaaggcttgaataaaaattctagaagataacatcggaaaaactcttctagacattcgcttaggtaaggatttcatgatcaagaacccaaaagctggatgagattggagactatcattctaagtgaagtaactcaggaatggaaaaccaagcattgtatgttcttactgacatgtgggagctaagctatgagaacgcaaagtcataagaatgatacaatggactttgggacttggcgggaagagtgcggggatgagggataataaaagactacaaatagggtgcagggtatactgcttgggtaatgggtgcaccaaaatttcacaaatcaccactaaataacttactcacgtaaccaaataccacctgtactccaataacctatggaaaaataaaaaaaagaatattcagcagttagctagctagtgcaatcaatgctaacagtatataaaatcctggctaacattcctatttctcagtaggtatgtatttgcaagaattatccaaatagctggctccaatctaaatctgtttgaatgtagtatttttcacataccaggtctactttttaaaaagttctaatctattttcttatcatcttaaaaatgtattgtggaagatggctgactagaggcatttcatactcacctcctcaatgaagaagaactgaaatagtgagtaatcacctttcaaatagatcatgcaagaaagaacactggaattccacagaaaagtgacaggaaatacctaaagcaaggaaggagaaggaaccaggcagcctgctcagatggggtaagctgggagctgagaaagactccccagtctgggaaagggaaaagtgagagaccctcagcagttcacatcccca

SEQ ID NO: 680735 - DNA, 610 bp, Homo sapiens
tgagttggagaactggaaacatcattccagctggaaggacagggaaagcttcatctagaaagtgccttctgtaatggcctttggaatagaagatggccacataaagctgggaagttgggtgcttttcacagtgagaagagtatgtcaagtacrgggctgcaaaaaaccaccagagttaatgctttaactaggctgagtgggagaaaaggccaaaagtacagcttaaggccaagacaacaagtttggatttgatgctgaatgcaatggaaagccattgaaatattttggtgacagtataacaaaatctgaactgtgctggaaaaagattaatctgaaagtcacagggtgaccagttggaagaaggaagcaatttgagttgaaaaaagatgcctcataacccagtacaacagagtaggggataaagacaaagattcagaaaagacagagagagaagaggtgaaatcactgggacctgacagatgactttgctatgggaggcagggaaaagaagaagaactgagagacaactgggaggttccgattttgttgtctgggaggatgggacgatggaattaattctagaaacaggaagagaagagaaaaccaggtg

SEQ ID NO: 680736 - DNA, 610 bp, Homo sapiens
tgagttggagaactggaaacatcattccagctggaaggacagggaaagcttcatctagaaagtgccttctgtaatggcctttggaatagaagatggccacataaagctgggaagttgggtgcttttcacagtgagaagagtatgtcaagtacagggctgcaaaaaaccaccagagttaatgctttaactaggctgagtgggagaaaaggccaaaagtacagcttaaggccaagacaacaagtttggatttgatgctgaatgcaatggaaagccattgaaatattttggtgacagtataacaaaatctgaactgtgctggaaaaagattaatctgaaagtcacagggtgaccagttggaagaaggaagcaatktgagttgaaaaaagatgcctcataacccagtacaacagagtaggggataaagacaaagattcagaaaagacagagagagaagaggtgaaatcactgggacctgacagatgactttgctatgggaggcagggaaaagaagaagaactgagagacaactgggaggttccgattttgttgtctgggaggatgggacgatggaattaattctagaaacaggaagagaagagaaaaccaggtg

SEQ ID NO: 680737 - DNA, 1013 bp, Homo sapiens
tatatctaactttttatgatgccactgggaatggtgttctttttgcatttgcagttaaagggtagaacagatggcggaagtttagtttcaagtgatgggcccattaaaataacttatgctgttgagtgattgttcactctaaaggctccattcattatatctgcgtttgcaagcttcaaaatacttggaaggaaataggacttcaggaaatgtttgctgtatcaagagacttgctggaataggactgcagacccacacattctatcccttagaaaaaaagagtatgagcttgcctgaggcttagctaaataggaagcttgtttcatagagcacccaccctggaagaacttatgcaggaagagacgtggagttagaaaataatgttctggagaacaagtgtggaatccccttgaacaactttttttcaccttttctatcttctaagactgtgaatttaaatataaaaatttgtagctacaaaaataagtataacgacagaatgaaagagaagaaaacataaatgtcaaaatatggtctggaagagtcagctgggagccggctgyaagaactccttcatctcttatcactggtttagcaacatggacgtacacaccaggagtagggccacatgaagtccttcctatatactaaactatcacatattcagctcagtttggttggccaaatggtggcgtgcaccctggaatggaaaccaggacatctgggttctataccagggaactcaggtgcatcagctcatttaatcttctcaacaacccagtgatgtaatattgtcttcatttagcaattgacaaaactgagtatgcccagtggcacctctgatccaaacccaagtctacatgactctgaaatctttcctctacccattattgcacactctctcttccatcacaatttccaaactaaaattcgcttaggtaaaatgatgggtcttggctggaaaatatcaaaagtcaggtccagttataacacttcacgattacactatgaca

SEQ ID NO: 680738 - DNA, 611 bp, Homo sapiens
tcactgttttggggattgggtaggccctctcaacctgaaaagtaatgtsttactgttctgaggaatttctctgtattatttctttgaaaattttctctcaatattattctctttattctttccaaagtccctgttagctagatattagactccctagattagttttctaatttttcttatttttctatcctaatgttcacctatttgatttttactctagtttctgaaaggttttcttgatatttctaccaatctttctcattaatttttcatttcatttattatatttttaaaattgaaaagtgttttttttccttattactccttgttatgtaatcttattctttttcatacactcaagatcttgccttatgtatctaaaggtattaacagaaaaagtttaaattttttttgctttctctattgcctttgtttcttctgagttcctttttatctggtgtttttcactcatttctcaggtatctagtgatacttcatatttgagaatgggtcactaaaataagagtagaaagcctcactgcagggtagtttggaggcaaattgggtttttcctttctatttatttatttatttatttatttattttgaga

SEQ ID NO: 680739 - DNA, 1698 bp, Homo sapiens
atctcactttgttataattatttatttccatgtctttcttccctgctaaactgtgagctctgtgaaagcagggattgtttgtctcccatgccatttgatcacagggcttagcacaattcctgacacatagtaggcatttggtaaatacaaaggaaaagaatgaataagcacgattttacagagaacatctaagataaactttggctactgtacacttgtgtctacctattttacaatttttcctaaaaccaccttgttcccaagaaatggattcttcacttcatatattttcaagctcacaggccattttgcctctattttacagcgtaagaattttgaaatgaggaaacatcagtgaaatccatgtttaaggcacttttattctcatgccactatttccctgcaatggtgacctttaaatttagcctgagtataagtggggttgtcagaacatcaggttacattatgttattcagctatttgtgccttttaaagacgatgtaagttccaacatagaccgcacagcgggaaagttaccctgatgatattctggaaactgccgcagccaggatcacatccggaagtgggtcagtattcaagaaggctcatgcttcttggaagtcacttttactggaaacaggcccacatttatccttccagaaaataagtaacctgtggctcgtgcatggcctttcttcttcaggcagattggagagaggattgtgtttgaaagaaaagaatggaaatgtgcctgcagcacttatttttctccttcagggtggcgtgtggagctgtgtgcttggacctgcagtgaacggtgtagtcactgatttttccacctaatctggggttcagaggactccgggctggtactggtcctccacaattcctcctagatgtaaaccagccccccgaccttttttgcagctgtttgactagctgagcccacttcctcattgataaacagctttgataaataggttgaactaaacagctcccagagacacttccagctctggtcatgcaattgatttcttcaggatgctttcagagacacatcagggcaagaagcatggggcatggggtgaacggaggagggagaggggatccagctttgaatggtaaggcagggcttctccacttcttgttgcattgccatgaaacaatgacctctcgctgtgctcccagtcccaaagaataagctgtaagctgatgtatgagaagaaagatccgaaggagatgcatagacacatagaaatcacaaataataataataataataaaacctaatacaatgcctaacttgctccttagctccttagaaaactgcaatgtggcactagacaaaagacaccttcctgggctttaccccaacccagtccagtttaaatgacaatggacctgcacactttaatagtttttaaagcccattgcctatagacaggcaggataatcyagtaacaatgagaaacatcatcaggcactaagttctagcactgttctgattgctgtaaaggtattaggtagagtcatatgcagcggctgtttttctaggccaaaaatggataaacaccagcaatttcatatttctatctaagattaactcttttgatttttacaacaatcttctaaacactgttgttgtcttttgttatgagctctagatgggtttttaactcagctctgctactctggtca

SEQ ID NO: 680740 - DNA, 1698 bp, Homo sapiens
atctcactttgttataattatttatttccatgtctttcttccctgctaaactgtgagctctgtgaaagcagggattgtttgtctcccatgccatttgatcacagggcttagcacaattcctgacacatagtaggcatttggtaaatacaaaggaaaagaatgaataagcacgattttacagagaacatctaagataaactttggctactgtacacttgtgtctacctattttacaatttttcctaaaaccaccttgttcccaagaaatggattcttcacttcatatattttcaagctcacaggccattttgcctctattttacagcgtaagaattttgaaatgaggaaacatcagtgaaatccatgtttaaggcacttttattctcatgccactatttccctgcaatggtgacctttaaatttagcctgagtataagtggggttgtcagaacatcaggttacattatgttattcagctatttgtgccttttaaagacgatgtaagttccaacatagaccgcacagcgggaaagttaccctgatgatattctggaaactgccgcagccaggatcacatccggaagtgggtcagtattcaagaaggctcatgcttcttggaagtcacttttactggaaacaggcccacatttatccttccagaaaataagtaacctgtggctcgtgcatggcctttcttcttcaggcagattggagagaggattgtgtttgaaagaaaagaatggaaatgtgcctgcagcacttatttttctccttcagggtggcgtgtggagctgtgtgcttggacctgcagtgaacggtgtagtcactgatttttccacctaatctggggttcagaggactccgggctggtactggtcctccacaattcctcctagatgtaaaccagccccccgaccttttttgcagctgtttgactagctgagcccacttcctcattgataaacagctttgataaataggttgaactaaacagctcccagagacacttccagctctggtcatgcaattgatttcttcaggatgctttcagagacacatcagggcaagaagcatggggcatggggtgaacggaggagggagaggggatccagctttgaatggtaaggcagggcttctccacttcttgttgcattgccatgaaacaatgacctctcgctgtgctcccagtcccaaagaataagctgtaagctgatgtatgagaagaaagatccgaaggagatgcatagacacatagaaatcacaaataataataataataataaaacctaatacaatgcctaacttgctccttagctccttagaaaactgcaatgtggcactagacaaaagacaccttcctgggctttaccccaacccagtccagtttaaatgacaatggacctgcacactttaatagtttttaaagcccattgcctatagacaggcaggataatctagtaacaatgagaaacatcatcaggcactaagttctagcactgttctgattgctgtaaaggtattaggtagagtcatatgcagckgctgtttttctaggccaaaaatggataaacaccagcaatttcatatttctatctaagattaactcttttgatttttacaacaatcttctaaacactgttgttgtcttttgttatgagctctagatgggtttttaactcagctctgctactctggtca

SEQ ID NO: 680741 - DNA, 1765 bp, Homo sapiens
ggttggggtgcagtggctcacgcctgtaaccccagcactttgggagaccgaagcgggcagatcacatgagatgaggagttcaagaccaggctggccaacatggtgaaaccccgtctctaccaaaaatacaaaattagctgggcgtggtggtgcacgcctgtagtcccagcttcttgggaggttgaggcacgagaattgcttgaacccrggaggcagaggttgcggtaagccaatatcgcgccactgcattccagcatgggcgacacagtgagactgtctaaaaatatatatgtattgacatgtatttatgatctagttttgctgcacccatgaccttgagcaatgtatttaacctctttctgctttaatccactcatcagtaagggggcgataatagtaccccctcatagggtactatttgttttgagaatcaaatgcacataaactacttagctcagtgactgacacacaataagcatccattaaatgttagcaattattattattataattgttactattgttagcgtttattgtccacatttttttaatttaagaattagaaggttcttcattatttccaacctaaagtattctctaaacgggacaggaatatgtgacactgtgtgtgtgcacctgtgtgtgtgtgcacacatgtgtgtggataaatggtatcacactatagtatggggattgcagctggcagttgtatattagacagtcagatctggcatgattatagctgaaagccttgctacatcctagaccagcctgtttgtgtccgttttctgaatgttggttctcaaaccttccaagtagatcttttaggaaattcctcctttgtcagtttggaaaagttgattcttctctttagtggttaagaacctgactgatagggttcccatccggagctcctatatacacttatttccagtgagaataggttgagaggaaaataattatacatctaatactcttgaatatgcagaaacgtcacatctccctgactaaattcacaaagtataaaataaagaacaggacatatgttcccagtaaattgatagggtgtagattttgatatgaaaccaaatgtatttttaattaagaatcgaaatttactactcagtttctgatactataatttgctttttgtcagtcaatagaaaatgaaacttagcatgacaaaagaggaatataaaatttacaaataggaatagaaatatagaataaaagtatatattttaactgtaaagaggaaaacaagaagaaaggaaggtaaatggaaggtgaggataaaaagttaacgcaaacctatttataattttgctgatatacctcttacctgaatggtaaaatttttacagagtgaactgataagatgagcacatgaatgataagccgtagattctctgcacacactaagttggaccttcccgtccacaggttcaccataggtatatctaatagaagaatataacaataacacaattacagaggtcaaggtcgtttttaatctgtatagggttttgaaacctttatttagtagctgaaaccagcaccgtaacaacatttaaatagctagttagcataaattttattttctggaggaaatctaaaacaatggtatggactaaaattgagttgaatgctttaggcaaaaatatattttaattaaaaaggttgaaataggcatgtagaagttatatatctaagtcactaaaatacaatgtaaacaaaaaaacaaaaaaaatcagtcattatttca

SEQ ID NO: 680742 - DNA, 1610 bp, Homo sapiens
ttcattcactaataaaacgtaatgtgtctggagataggaacaggattcataaaccttgtccagaattcttggaactgagaaatataacagttgaattaagggcctacttgttattctaaattcatggaattgaatcttgatgaaatattgagatggtaytgaagaaagctactgctgcaacattaactcaagcattaagagaggtagagcttctcatgagatttcctcataggaagaaaatgaatatattacccaaaggtgccatgggaagacgttaaccatttggatgagattctaataatgagaaatgaacctagagtactatccctttttgtttgctatttgtaatacttccaatgcagatggcttcaactgtgttcaacaaatttagtttttattacttaatttgtccttttttttagatttttttttaactcagcttggtctatttcaaaaaactagtgaacaagaacctagtaaaatcacattttcattgttctaagctgcttgatttttctctaaaaacaattattaaaatgaggctgattctgctctagtcactaatgactgtctgcactaaatcttgtataaaccagccaagaaccaatacaacaactccttcatgtccccttctggttcatactatctctccctgtccatacacagggcctctttttagaggactagtagttccaggtcttaagataagtttaaagaaagatctgaaacttcttgatgcaaatgaaactttctggaaaaagtatgtttgaatattctacaaaacactgacttaaaggaaaagaaaggcaccatcagcaatgaaattgcagaaaatgaaagaaaagaccgatgtaggatttgggcagaagaaactaggtatatgctccatatcttggctcatttgataatgagcccagttgcatcattactatatttttattatgtagtcaaatttattatgaatacccaaatctcataggccagccatgcattgaatctatttatttaaatggaatactgaaccggacaatgtccagcaattagaaacactggcttgcaaagataaaaccacataatctcttagctgccatcatttttggaaatgctacatcaatttccatctctatacataagcacatgcagtttgttgtgccatggaaactccttgccataaacatttggtacaaacgatcttcttatctatgacccatatttgagggaacagtccattaatcctgttcttatgcaaatgtagttattactaaagcagggagttgggtaatcatatttggcctaattgacaataataagtcaacattcggggggtgagaactaataagggagttatgataatgctgcagctgctttgattttcaagaagccctttacttccccatggtgcttccaatcaaggatgattgtcaaaggattgcagtagaaattctcactgctttggttaaatagaggagttgcattcttagaaatagaagcttcaaccatgaaccaaggagaacaggaaccacatgctatcttacagaagtgatttcggatttagattactacaaggtctttggagcactaaaaattagattcctgctctggaaattaaa

SEQ ID NO: 680743 - DNA, 567 bp, Homo sapiens
cctaaacttggcgatcagagcccagagccgataaagttagctgcgtgagtctagcttcccccagggcgggaatcgaggcggagcagggtacagtacggaggccagggatgagtgcagttgaccagattgttgacggaagtgtcataaaagtggacttaaatgttgataagcagctggttgggttccacacagggtgcgagctcaggatgcacgttggaggggacacagggycagagcaaggtgggaatgcgggtattatgggccaggccatcctccagctggtggagcaccgcagcactgcagtatgtggccctggcttaacagcagtgcggaaaagcttttctcttggggctgtggtgctttccaggtgtgtgaagttaaaacattttagggccatacggtaggtagcacctgccacatagttgtcttggtcagccccggctgtcatgacaaaataccataaactgggtggcttagacacagaaatgtgttttctcacagtcccagaggcttgggatgtccaggatcaatgtggggaggacacaactgagcccacaacaatagtct

SEQ ID NO: 680744 - DNA, 567 bp, Homo sapiens
cctaaacttggcgatcagagcccagagccgataaagttagctgcgtgagtctagcttcccccagggcgggaatcgaggcggagcagggtacagtacggaggccagggatgagtgcagttgaccagattgttgacggaagtgtcataaaagtggacttaaatgttgataagcagctggttgggttccacacagggtgcgagctcaggatgcacgttggaggggacacagggccagagcaaggtgggaatgcgggtattatgggccaggccatcctccagctggtggagcaccgcagcactgcagtrtgtggccctggcttaacagcagtgcggaaaagcttttctcttggggctgtggtgctttccaggtgtgtgaagttaaaacattttagggccatacggtaggtagcacctgccacatagttgtcttggtcagccccggctgtcatgacaaaataccataaactgggtggcttagacacagaaatgtgttttctcacagtcccagaggcttgggatgtccaggatcaatgtggggaggacacaactgagcccacaacaatagtct

SEQ ID NO: 680745 - DNA, 655 bp, Homo sapiens
caatgcaggctgggtgcggtggctcacgcctgtaatcccagcacgttgggaggccgagggggaggatcacttgaggctaggagttcaagaccagcctggccaacatggtgaaaccctgtctctactaaaaatacaaaaattagccaggtgtggcggtgggtgcctgtagttccagctactttggaggctgaggcagaattgcttgaacccgggaggcggaggttgcagtgagccgagatcgcaccactgtactccagcctgggtgacagagtgagwccctgtctcaaaaagaaacaaaacaaaaaccaaaaccaacataatgggtaatgcaacaaaatttaaaacttaggaattatataaacagaaagcaaagaaaactataatatgttactgaataatatacaaagacatttgaatagagagttatatctctggaaggaaagattggatatttttctaaatgaccactctccccaaattgacttataacttcaatgtttttttcaatcaaaatcctcaaagtattttccttggaacttaaagtgattctaaatttctactgggtaaaaaagttattattacctggaacattctgaaaaataactacaaagaatagtaagataagaaattaaaatacatacatttataattatta

SEQ ID NO: 680746 - DNA, 1266 bp, Homo sapiens
ggaaaatcatttaaagggttgagtgccgatatgatcccttctcaaaccagagctgacttgatgaaaaggaacatggaaaattgaggctgatttaaatgttgagaagttctctctttaaaatcattttacccagtagcaagctaacatctccagcaattacacatttctgaactagaagggagggtttgccttctattatgccaaaagtttccctgagccatgccaggtcccaccattcatgagctccctctgtcagctgcaccctctccatccccrgctggacttttaggtgaggtcacactgcagggtgaatgagaccagtgccttctggtataataagcagcaattccctggaataacaatatttacggcagttatagcagctccacttctggagtgccctcttggtactaggcactgggtatttcatgtacattatctttaatcctcaaattcagaagagaaaatataattcaaaattacaaaaaaaaaaagaaaacagactgcaatgttatataaactgtctaaagtaatgtagctggaaagggtggatacaaaagggtgaaccagttctaagacccaggtcctctcagaatcaacgaaacattgagtgtcatggaacatcccctgtatgctaggccctgggctgggcattgggcatcaggcacacaccagtgaaggagacatcatcttgccctccagaatgaaccctgaactccacatgatgaccagagatggatctcctttcttagaactcggaaaccaagcaaatggccagagttttacaagaagcataaatagccaaggggtttcctggccaaagaagctacgtcttgggcctacaaaaggcactaccacctttggcaaaataggggtgagtgaaggccgtgcaattcatgagccaaggaccttctcacaggagtgaaactggcgttttgctacacagggcatatttcaggtaaacacacaggcaatggaacataaagataggtgtgtttattgcctctaggtagcaagcgattaaggacttctaagtgtgtcaccagaagcgatgcttagggccaccgaggcaagctttactccctcattcaaaattatggatgttgcctcgccagtggatcatgcgatcgttcatgctataaaacaagtcaggcgtaagaaactgctctctaacaaaggatctcaaccttggaggagagttctgtatcattcattgtcttacagacaattgtaagacaaatctggggaatcaagaaccttattctc

SEQ ID NO: 680747 - DNA, 1266 bp, Homo sapiens
ggaaaatcatttaaagggttgagtgccgatatgatcccttctcaaaccagagctgacttgatgaaaaggaacatggaaaattgaggctgatttaaatgttgagaagttctctctttaaaatcattttacccagtagcaagctaacatctccagcaattacacatttctgaactagaagggagggtttgccttctattatgccaaaagtttccctgagccatgccaggtcccaccattcatgagctccctctgtcagctgcaccctctccatccccggctggacttttaggtgaggtcacactgcagggtgaatgagaccagtgccttctggtataatargcagcaattccctggaataacaatatttacggcagttatagcagctccacttctggagtgccctcttggtactaggcactgggtatttcatgtacattatctttaatcctcaaattcagaagagaaaatataattcaaaattacaaaaaaaaaaagaaaacagactgcaatgttatataaactgtctaaagtaatgtagctggaaagggtggatacaaaagggtgaaccagttctaagacccaggtcctctcagaatcaacgaaacattgagtgtcatggaacatcccctgtatgctaggccctgggctgggcattgggcatcaggcacacaccagtgaaggagacatcatcttgccctccagaatgaaccctgaactccacatgatgaccagagatggatctcctttcttagaactcggaaaccaagcaaatggccagagttttacaagaagcataaatagccaaggggtttcctggccaaagaagctacgtcttgggcctacaaaaggcactaccacctttggcaaaataggggtgagtgaaggccgtgcaattcatgagccaaggaccttctcacaggagtgaaactggcgttttgctacacagggcatatttcaggtaaacacacaggcaatggaacataaagataggtgtgtttattgcctctaggtagcaagcgattaaggacttctaagtgtgtcaccagaagcgatgcttagggccaccgaggcaagctttactccctcattcaaaattatggatgttgcctcgccagtggatcatgcgatcgttcatgctataaaacaagtcaggcgtaagaaactgctctctaacaaaggatctcaaccttggaggagagttctgtatcattcattgtcttacagacaattgtaagacaaatctggggaatcaagaaccttattctc

SEQ ID NO: 680748 - DNA, 1266 bp, Homo sapiens
ggaaaatcatttaaagggttgagtgccgatatgatcccttctcaaaccagagctgacttgatgaaaaggaacatggaaaattgaggctgatttaaatgttgagaagttctctctttaaaatcattttacccagtagcaagctaacatctccagcaattacacatttctgaactagaagggagggtttgccttctattatgccaaaagtttccctgagccatgccaggtcccaccattcatgagctccctctgtcagctgcaccctctccatccccggctggacttttaggtgaggtcacactgcagggtgaatgagaccagtgccttctggtataataagcagcaattccctggaataacaatatttacggcagttatagcagctccrcttctggagtgccctcttggtactaggcactgggtatttcatgtacattatctttaatcctcaaattcagaagagaaaatataattcaaaattacaaaaaaaaaaagaaaacagactgcaatgttatataaactgtctaaagtaatgtagctggaaagggtggatacaaaagggtgaaccagttctaagacccaggtcctctcagaatcaacgaaacattgagtgtcatggaacatcccctgtatgctaggccctgggctgggcattgggcatcaggcacacaccagtgaaggagacatcatcttgccctccagaatgaaccctgaactccacatgatgaccagagatggatctcctttcttagaactcggaaaccaagcaaatggccagagttttacaagaagcataaatagccaaggggtttcctggccaaagaagctacgtcttgggcctacaaaaggcactaccacctttggcaaaataggggtgagtgaaggccgtgcaattcatgagccaaggaccttctcacaggagtgaaactggcgttttgctacacagggcatatttcaggtaaacacacaggcaatggaacataaagataggtgtgtttattgcctctaggtagcaagcgattaaggacttctaagtgtgtcaccagaagcgatgcttagggccaccgaggcaagctttactccctcattcaaaattatggatgttgcctcgccagtggatcatgcgatcgttcatgctataaaacaagtcaggcgtaagaaactgctctctaacaaaggatctcaaccttggaggagagttctgtatcattcattgtcttacagacaattgtaagacaaatctggggaatcaagaaccttattctc

SEQ ID NO: 680749 - DNA, 1410 bp, Homo sapiens
ttggtgtcatcagaagtgtaagacagaatcacctccgtgctgtaagggagcgccaagtgctgagagctctcaaaagcaagcataaggcagaaggagaagaggcaggctgctgggaggataaacagaaccaaaggcatcttcaggtgggatgcatcataaagtgctggcaggcagaaacgaagtaggggcagaggggcaggcgcacccctagaagaaaggacagaaaaggccagggtgtgggtcctccccggcacatgtgggaagcgtggggttggctggaccactggccacgcggatgagagagagagagcagaccatacgaccacagagatctggtgggaggagctggaacctgggaggctgcagggcaggtgctgtcttaggacctgccccatcctagggagcaagagggggagcgtggctggagagccccgggcaggraggagaaattctcagagtggcgcttataggagaaacctggagtcgagatgggaggcaccagagactgcttagaagaaactacccgcgtcaagacttgtgaggaccttatccagctggtagcagagacagaagaggaggatgaaaagatgaagaaatgcctgatggggtgctggcaggtagggctagcagagaagccttggaaggattctggcctctgtctcgtgggaacattcagaagaagggtggttgtaggttgggtcttctattgggagtggtaaggaaacagaagaggagttcggtttgggaatattcaggttgaggtgtcagccggtcacgatttgtgggcttgtccagcagcctggtggaaatggaggccccgtgctacggagagcacaggctggctgcgtggagtcagaagctcggcgcctggcagggccagacgccaagtgagagaagaatgctcagtgcaggaggctgggtgggaactgggcagggtgcacagtgagggagaggctactacaagaaggggggtcagagaggaacaaagctgaatgcagctgaaatcaaatggaaggaatgcagcattttaggaaagaaggactatagaagaatatccgatgatctaagaaaatactgcaaaaatacaataagaaaatatgatgcaataataagcacgttataaaatttatataaatagaatcccattactgctaaaacacacacacatacaaactaaacacagttaaagtgtggacaatagttttcctgagttgtaggattacaggtcgcttttattttcttccttgtgctttttaacatcttctacatagtccataatgaacatgtactagttctgcattcagaaaatgaatatattaaggcaggaggaaattggtcaacagtaaccaaagtagagatgaggttgagaagaatacggattaggaaagagccactgagttagacaattta

SEQ ID NO: 680750 - DNA, 664 bp, Homo sapiens
agttactctcttctcccttgtattcagtattttgtgggggaggtactttgaaactgtgtaaatataccatttctcattaaacttttcaatttattcccttatttagatgcgtatgaactcatggcttcttgttttatttgatggatccaaatctgttaatatccttactgatttggatgctcagactgccccagatttggccagtggaagccctttcaggcttgctcccrtgtcccttcaatgtatccccatcattctttgagcacttctttgcttcctggcacaaaaaatgttccaagttcatctagcacgttccctgtcttagtgctagaatcagctatttctcctaggagccctggttccttttagaggagaattgtatttagaagccaaggcctgggaattaggtgtgctcattgctgttggggtgttgctgctcccaggccctcccagtagccagagctgggaaatatgtgtgcatgtgaaaagtcaggttacatttatgctttatttttctatcaagttatatatatacatataaaccttgagcacattctaatatctgcatttcaaatccaactttgtataagtcatgttggttttctgttaacttcaactgtaagaaaccagccttccccatgtcttccaagtagccttgggttca

SEQ ID NO: 680751 - DNA, 585 bp, Homo sapiens
gtaaggggatagtcaggacctgcggtttacctcacagggtacagagttgaggcatgaaatcatgtttttcacgtgtgtaagtaactttcacacacaaatatatgtgtgcacaaatatatgtatgcgtgtaatgcccaagcacatgaacttgtgttcatgtgtgcaaatacacatgttcatctctgttggcaataacacagccagcacgaattttatctctgttggcaaaatcacagccagcaccactgaagagctagggtcttacacatgcgcatcaggtgtaagtgtctagagctgggaagaaggatgcaactgcaaaatggtaaattgcacgttatacctgcacttgcgtgctcaggcgattctacttaaatcactgcaagtgctcctacgaggtcgttttgcataattgaaaaaacttgaagttacaatcatatgtgtatattctgcatgtgtacagatgccccaacgcgagggaaggaccactaaacccaaagacgcgcgtgcccgtgtgttcacacagacgtgtgcttcggcgcctgcacacggccggcgckcaggcatgcggacgcctacacgaataca

SEQ ID NO: 680752 - DNA, 850 bp, Homo sapiens
ggcttcacctttccgtgtattatgatgacaagaatgtggtatgacactgtcttatatctggatcatatgctaaaagatagaaaatggtttctaaacttatttgttctgtaataacaaaattttatttcataaagtgtttttaaaaaaaaccatagtagcttgaaacaacaaacctttgttatctcacacagtttctgtaggtcaagaattcagaagcagcttagctgggtggtctggcttggtgtctctcctgaggtcagggttttggctggggctgcatcacctgaaggcttgactggggccagaggagctgcttccaaagtggtccactcacatggctggcaagttggagttgcgtattggcaagagacttcgcttcttctcaatggatcttcccagagttcttgtaggcaacctcatagcatagcagttggcttcccccagagggaacagtccaggagagaacaaggcagaaaccacagggtcttttctggcttaggctccaaagtcatactccaccatttctgcattatcatattagttacacaggctagacctattctgcatggaagrgactataccatggggtgaataccagaagcagggctaattgaaggccagcttcaagggcggctacacattccctttcaacagtatgtcatgaacatctttccatgccaatagagcagatgaatcttaccatttttaatgactacatgtaagtgtagcataatttatttaaccaacctcctgtagttgggtatgtgggttgtgtctcgttttttgatagtagaattaatcatcttgaatatccatcaccaaacttgtcatattattttcttttgatgaa

SEQ ID NO: 680753 - DNA, 640 bp, Homo sapiens
tgaccatccccagggggaccatggtgggggctctgtgggatagaggacatgctgtattctgcacttatatggacgctccacacagcagtcattacagaaaacacaccgggtaaaagggcagtatacaaataggacaccagtactggccagttgggtctcactggtcagtggggtaacgaggtccaggtgggcccacaaggtgtggctggtggtcggtttctgtctgcaggaagcctgggacccgtgtctaacagaggaggacccaggctggagtgaggaagtcatcagagtcaccaggtgaggggtcagagctggaaacagagcaggcagggagccctggcctctcccagtgagggctgagaagctggggtgggaacacaacccatgggcagatgcacacaagtggtcccygggcccctgccggtgcccagtgactgcccagttcctagggagccactgaggcctgagacccagggacacaccacctgatcatcacccccaggcctttctgccgagaccagacaatgcccagtgcaggcaggtggtctgggattggagtctggggcaggggtgcatgttcctacctggcaggtgccctgacctagacctgcctgagctggctgcaccatcacttgttatt

SEQ ID NO: 680754 - DNA, 1846 bp, Homo sapiens
cacatataccttgggagtcttacagaattgctattgctattcaactatgatatggcattaccccactgactaatatagaacactgtatttaaataacaatagcttttctatgaatcatgttttctctacactgtccaatgcaattttctgaaatgatgaaaatcttcgtatatgtgctgcacaaaatggcagccacttgccacatgtggctgttgagcacttgaaatgtatctggagcaaaagagaaattgcatttttaatttaattcatttaactgatgtaaacatttggcaaatgactatcatactagatagtacaactccaggagaattggttactatgtcacagtttcatctctaggagagtccttaggacaaatttggaaagttctagtcaagataattcttctgattaactgtacttcttttttttaatgttatgaagtcatatttaccatcttacactggctaagggcaaatttgcatcttacctctaaggaaggataataaaagttacaacatgtgctttgtatgtattaatattattccagcttatcatcaattaacaatactaatatccatacctgtacagtctttttagttctatgagaaggacctgggtactctggagaatacaaatctgtgaggaataatgagttgattaatgtcgactttcccaatccagattcccctaaaagaaataagggaaaatatctgttaaactcacccattttacccaaccttaaatattcaacagatgctataatccaacttgctttatgcaagtacttcttggtgagacaatgaaatgacattagaaaatatgctacaaagagtatcttgtcctcagtttcttagctatcaaattagactcatgtttccaaggattcttttcagccttctaattatacttatattcattaaaagtaatgtatctaataatttacatttttaacagtaatgtgttcccaaggaaaaacttcagtcatttaaaaaaaaatccaagttggattatgtatcactgcttcagtgaaataaagtttttctttattaatagacaataatggatgaccaaaagaaatcatgcagctacaaaaagcaaaaatctgctaatacaaagaataattaatcacaatgaacatctccacataaaattctaaatcacaaaaaatactttctaatttagccacccatcagcctaaacataagggtgcttctccataaaccagaatccaaaaaaatcttaggtaattactttttctaccacttctactcgaggtagacaggaaggaagctacggcatgatttccactctgatcacatactcttttttgactctccatgtctagtccaatatacatagtctagtgtatagtaactattacaagtataccaaaatataaatggcttcaaggtatatataacctaaggttaaaacaaattagaattcatattatgataattaacatggcacagrgttaaagtatttactgttaaaaattcacttagaataataggcatgtttagcctaagtaaccgatggcacaatacttatatgtctaggaggaattctttttatattagctttcaaaagagataataagatcctttccacatggtttgggcttacccctttgacttagagcatgccactttttactagatgtaaaaatgccataaaggtctaagtcacaggaaagtaacacgggttggccacacctgattctttcttaactcttacaccttgaaggcagaaagactagaataaaacccaagcatttggatgttaccagaaatatctataatatttccttttggaaacataaatgaaaattttagtacataca

SEQ ID NO: 680755 - DNA, 1846 bp, Homo sapiens
cacatataccttgggagtcttacagaattgctattgctattcaactatgatatggcattaccccactgactaatatagaacactgtatttaaataacaatagcttttctatgaatcatgttttctctacactgtccaatgcaattttctgaaatgatgaaaatcttcgtatatgtgctgcacaaaatggcagccacttgccacatgtggctgttgagcacttgaaatgtatctggagcaaaagagaaattgcatttttaatttaattcatttaactgatgtaaacatttggcaaatgactatcatactagatagtacaactccaggagaattggttactatgtcacagtttcatctctaggagagtccttaggacaaatttggaaagttctagtcaagataattcttctgattaactgtacttcttttttttaatgttatgaagtcatatttaccatcttacactggctaagggcaaatttgcatcttacctctaaggaaggataataaaagttacaacatgtgctttgtatgtattaatattattccagcttatcatcaattaacaatactaatatccatacctgtacagtctttttagttctatgagaaggacctgggtactctggagaatacaaatctgtgaggaataatgagttgattaatgtcgactttcccaatccagattcccctaaaagaaataagggaaaatatctgttaaactcacccattttacccaaccttaaatattcaacagatgctataatccaacttgctttatgcaagtacttcttggtgagacaatgaaatgacattagaaaatatgctacaaagagtatcttgtcctcagtttcttagctatcaaattagactcatgtttccaaggattcttttcagccttctaattatacttatattcattaaaagtaatgtatctaataatttacatttttaacagtaatgtgttcccaaggaaaaacttcagtcatttaaaaaaaaatccaagttggattatgtatcactgcttcagtgaaataaagtttttctttattaatagacaataatggatgaccaaaagaaatcatgcagctacaaaaagcaaaaatctgctaatacaaagaataattaatcacaatgaacatctccacataaaattctaaatcacaaaaaatactttctaatttagccacccatcagcctaaacataagggtgcttctccataaaccagaatccaaaaaaatcttaggtaattactttttctaccacttctactcgaggtagacaggaaggaagctacggcatgatttccactctgatcacatactcttttttgactctccatgtctagtccaatatacatagtctagtgtatagtaactattacaagtataccaaaatataaatggcttcaaggtatatataacctaaggttaaaacaaattagaattcatattatgataattaacatggcacagagttaaagtatttactgttaaaaattcacttagaataataggcatgtttagcctaagtaaccgatggcacaatacttatatgtctaggaggaattctttttatattagctttcaaaagagataataagatcctttccacatggtttgggcttacccctttgacttagagcatgccactttttactagatgtaaaaatgccataaaggtctaagtcacaggaaagtaacacgggttggccacacctgattctttcttaactcttacaccttgaaggcagaaagactagaataaaacccaagcatttggatgttaccagaaatatctataatatttccttttggaaacataaatgaaaattttagtayataca

SEQ ID NO: 680756 - DNA, 1492 bp, Homo sapiens
tttctttttggtgctgagtgatattccattttctggatgtaccacagtgtatttatccattcaactactgaaggacattgtgattgcttccatatcttggcaattataaacaaagctgctgcaaatacctgtgtgcaagactttctgtggatctaagtttttaacttagctgggtaaacatcaagaagagcaattgctggatcattgccttgtgtccttactgctcttaaagatcagatcctgctcttaaagatgagatctgttcagttttttacttcttagaatggagtggcaacttccaagctccttatgtacagaaccagaaaaagcagactgagttctcaactactttttggtacccattttttcggcctccttactctgaatgaaacttgtctctttgagggtcatttcccctgtggcatataactctctcaagcgggagcttttgtttcacctcatgagcctcaaggtgggagatggtcttggttactttctcatccaagtttgtgttaaaggcttctgtttctttgggtcttccaatttagaaggaaatagaaatccctttagttcagaataaattgttctaagaattaaatataaagttctcaattataggataaaataattaaggtcttattgatttggcttttctaattgaattcaattctaggggaagaagtgctttgattttcctgcttccttgattctaagataagatctactctgaaacatataatcaaatttgatttgagggaggttaaatagtacagtcaattacattttgattatgagacatttgtttttagaaatattagggggcaaaattgtatcttagagttgaggaaatggaacagttctcaatctgttatgaaaggtttactttgcccagaggcaacttaaaaagaaaactacaactagcatagaaataactcaagcataaatgtggagctgagaactagagaaacacctgttacacaggagctgtgttgaattggaatcagaaattatctttttcttggccagatgataccctttgttgtttgcagtgttgactttgatagagaacacccagttagtgtagttatgtttcacattgtagttggtcttaaaaaaataggaaacctaatcatttatctttaaattgcagttttcccacgtgtttgataagtttttaaacttttgtaaccatggataaagtttcttgaaatacaatacagtttggttttaacaccacttgggaattgaattagaaagctttggtccataatttcagtgtaagtagtctaggaattgatggaagttaatttatttatatatcccatgatacgttaaatayctcatagctgagttcagggtatacagcgtattacttcacatagtcaatgttaagaatttaaaagataaagaaaaaatccaatgggaaaaaatataatcttaactgaaagtataactatgtatttgctaatttttaaagagtattaaaaaagca

SEQ ID NO: 680757 - DNA, 913 bp, Homo sapiens
ctgtacacttgggctatactaaatttattttttaaatttgtctttaataatcttattttgctgtaacttttataacttaaattttaaaaaactttttgattcttttgtagtaacacttagcttaaaacacaaacacattgaacagatgtacaaaaatatgatctttataatmtttattctataagcttttttctattttaaaagttctttcttttttcccttcaaacttttttttttcttaaaaacgaagacgtaaacttacacgttagcccaggcctactcagagtcaagatcatcaagatgctaccgggcagtaggaatttttcagttcctaggggccaccatcatatatgcagtcccttgttgactgaaatgtcattatgcagtgcatagctgtattacaaaatcattttaaataatgggcatttgtagctaggtgttagctaccattagacgaaaatcctaaaggatcaactatataaatacgaatgacaagttctgaaagtagctatagtgttttccatagtggttaacatgccttataatggaataaaaaaatgtcccttcttaaatatttaaaatacaagattctgtttgaggtaagcctcagtacgtgaacaaaaggaaggctttttatctcttttgagcaaaatgtttattgaacaactttggcaaaaaatgtaaggatccaccatagtgaatattgttcataaaatcctaattcacttcaaactcattatcattaacgatgaactttttaactcattaaaagaaacacatacacaaagctactgataattttgtatgttaaaatactaccagtacatattttttgttaaatatatgtacttattcaatatattttttaaatgtttgttatgttgtagatataaggaattgtttatttgtcccc

SEQ ID NO: 680758 - DNA, 913 bp, Homo sapiens
ctgtacacttgggctatactaaatttattttttaaatttgtctttaataatcttattttgctgtaacttttataacttaaattttaaaaaactttttgattcttttgtagtaacacttagcttaaaacacaaacacattgaacagatgtacaaaaatatgatctttataatatttattctataagcttttttctattttaaaagttctttcttttttcccttcaaasttttttttttcttaaaaacgaagacgtaaacttacacgttagcccaggcctactcagagtcaagatcatcaagatgctaccgggcagtaggaatttttcagttcctaggggccaccatcatatatgcagtcccttgttgactgaaatgtcattatgcagtgcatagctgtattacaaaatcattttaaataatgggcatttgtagctaggtgttagctaccattagacgaaaatcctaaaggatcaactatataaatacgaatgacaagttctgaaagtagctatagtgttttccatagtggttaacatgccttataatggaataaaaaaatgtcccttcttaaatatttaaaatacaagattctgtttgaggtaagcctcagtacgtgaacaaaaggaaggctttttatctcttttgagcaaaatgtttattgaacaactttggcaaaaaatgtaaggatccaccatagtgaatattgttcataaaatcctaattcacttcaaactcattatcattaacgatgaactttttaactcattaaaagaaacacatacacaaagctactgataattttgtatgttaaaatactaccagtacatattttttgttaaatatatgtacttattcaatatattttttaaatgtttgttatgttgtagatataaggaattgtttatttgtcccc

SEQ ID NO: 680759 - DNA, 913 bp, Homo sapiens
ctgtacacttgggctatactaaatttattttttaaatttgtctttaataatcttattttgctgtaacttttataacttaaattttaaaaaactttttgattcttttgtagtaacacttagcttaaaacacaaacacattgaacagatgtacaaaaatatgatctttataatatttattctataagcttttttctattttaaaagttctttcttttttcccttcaaacttttttttttcttaaaaacgaagacgtaaacttacacrttagcccaggcctactcagagtcaagatcatcaagatgctaccgggcagtaggaatttttcagttcctaggggccaccatcatatatgcagtcccttgttgactgaaatgtcattatgcagtgcatagctgtattacaaaatcattttaaataatgggcatttgtagctaggtgttagctaccattagacgaaaatcctaaaggatcaactatataaatacgaatgacaagttctgaaagtagctatagtgttttccatagtggttaacatgccttataatggaataaaaaaatgtcccttcttaaatatttaaaatacaagattctgtttgaggtaagcctcagtacgtgaacaaaaggaaggctttttatctcttttgagcaaaatgtttattgaacaactttggcaaaaaatgtaaggatccaccatagtgaatattgttcataaaatcctaattcacttcaaactcattatcattaacgatgaactttttaactcattaaaagaaacacatacacaaagctactgataattttgtatgttaaaatactaccagtacatattttttgttaaatatatgtacttattcaatatattttttaaatgtttgttatgttgtagatataaggaattgtttatttgtcccc

SEQ ID NO: 680760 - DNA, 913 bp, Homo sapiens
ctgtacacttgggctatactaaatttattttttaaatttgtctttaataatcttattttgctgtaacttttataacttaaattttaaaaaactttttgattcttttgtagtaacacttagcttaaaacacaaacacattgaacagatgtacaaaaatatgatctttataatatttattctataagcttttttctattttaaaagttctttcttttttcccttcaaacttttttttttcttaaaaacgaagacgtaaacttacacgttagcccaggcctactcagagtcaagatcatcaagatgctaccgggcagtaggaatttttcagttcctaggggccaccatcatatatgcagtcccttgttgactgaaatgtcattatgcagtgcatagctgtattacaaaaycattttaaataatgggcatttgtagctaggtgttagctaccattagacgaaaatcctaaaggatcaactatataaatacgaatgacaagttctgaaagtagctatagtgttttccatagtggttaacatgccttataatggaataaaaaaatgtcccttcttaaatatttaaaatacaagattctgtttgaggtaagcctcagtacgtgaacaaaaggaaggctttttatctcttttgagcaaaatgtttattgaacaactttggcaaaaaatgtaaggatccaccatagtgaatattgttcataaaatcctaattcacttcaaactcattatcattaacgatgaactttttaactcattaaaagaaacacatacacaaagctactgataattttgtatgttaaaatactaccagtacatattttttgttaaatatatgtacttattcaatatattttttaaatgtttgttatgttgtagatataaggaattgtttatttgtcccc

SEQ ID NO: 680761 - DNA, 913 bp, Homo sapiens
ctgtacacttgggctatactaaatttattttttaaatttgtctttaataatcttattttgctgtaacttttataacttaaattttaaaaaactttttgattcttttgtagtaacacttagcttaaaacacaaacacattgaacagatgtacaaaaatatgatctttataatatttattctataagcttttttctattttaaaagttctttcttttttcccttcaaacttttttttttcttaaaaacgaagacgtaaacttacacgttagcccaggcctactcagagtcaagatcatcaagatgctaccgggcagtaggaatttttcagttcctaggggccaccatcatatatgcagtcccttgttgactgaaatgtcattatgcagtgcatagctgtattacaaaatcattttaaataatgggcatttgtagctaggtgttagctaccattagacgaaaatcctaaaggatcaactatataaatacgaawgacaagttctgaaagtagctatagtgttttccatagtggttaacatgccttataatggaataaaaaaatgtcccttcttaaatatttaaaatacaagattctgtttgaggtaagcctcagtacgtgaacaaaaggaaggctttttatctcttttgagcaaaatgtttattgaacaactttggcaaaaaatgtaaggatccaccatagtgaatattgttcataaaatcctaattcacttcaaactcattatcattaacgatgaactttttaactcattaaaagaaacacatacacaaagctactgataattttgtatgttaaaatactaccagtacatattttttgttaaatatatgtacttattcaatatattttttaaatgtttgttatgttgtagatataaggaattgtttatttgtcccc

SEQ ID NO: 680762 - DNA, 913 bp, Homo sapiens
ctgtacacttgggctatactaaatttattttttaaatttgtctttaataatcttattttgctgtaacttttataacttaaattttaaaaaactttttgattcttttgtagtaacacttagcttaaaacacaaacacattgaacagatgtacaaaaatatgatctttataatatttattctataagcttttttctattttaaaagttctttcttttttcccttcaaacttttttttttcttaaaaacgaagacgtaaacttacacgttagcccaggcctactcagagtcaagatcatcaagatgctaccgggcagtaggaatttttcagttcctaggggccaccatcatatatgcagtcccttgttgactgaaatgtcattatgcagtgcatagctgtattacaaaatcattttaaataatgggcatttgtagctaggtgttagctaccattagacgaaaatcctaaaggatcaactatataaatacgaatgacaagttctgaaagtagctatagtgttttccatagtggttaacatgccttataatggaataaaaaaatgtcccttcttaaatatttaaaatayaagattctgtttgaggtaagcctcagtacgtgaacaaaaggaaggctttttatctcttttgagcaaaatgtttattgaacaactttggcaaaaaatgtaaggatccaccatagtgaatattgttcataaaatcctaattcacttcaaactcattatcattaacgatgaactttttaactcattaaaagaaacacatacacaaagctactgataattttgtatgttaaaatactaccagtacatattttttgttaaatatatgtacttattcaatatattttttaaatgtttgttatgttgtagatataaggaattgtttatttgtcccc

SEQ ID NO: 680763 - DNA, 2071 bp, Homo sapiens
ttattgatgtatttattattctcctatctgctgctctcagttctaaatctcttttagatgaggttttcttttttaattgaaactgcgaagtttgatgaaaccatatttcacccaacaatggcattgattacagacatgaaatgaatgctttttaaataccttcagccaaaatacaaaagaaattttcttattgcaaacataatttccctktgtaatgttgcttgaaaagttgaccaactaaatatcaatattataaaacagtcaaacatgcatgagagtcaaggttaaattggccggaatttaaaaaccactaaagagaaacacacacacacacacacacacacacacacacacacatatatacaaacagataaatatttcagatagaacatccaaaattcattcaatggaatacaattctatagtctgaactcattattggctcaaaaatcagatattgaccataatgaaacatgcagaaggatcttttaggggagattatagttacatgcaattatctgctattccatttacactgacagagaagctatattctccagggagcaatttttacttagacagagagttgtcactattgattatagaaaactgatcatgttttctcagcataagctcacttggtctatcacagtttccctatctaacaaaaaacagctttcctatctaacaaaaatcattgacttccttgttgatttgccttatgtgttaacatttctaatatcttccgtgtaggtatgttactaatgacacttttcatagttatgaaaccagagaagtgatgagtataatttgcctttgtcaaccactgattatctctgctaaaggaagctcagctcaatatgactagataagtaaacctcttttaaaagctattggtcttcaaccctggttttccattagtaccacctgaggagctttaaaaaatacagaaacttagtgtcacatttccagttctctcaccccagatatttcagtgtcttggataattcccagacgtcagtatttttttttttttttttttttttttttttttttttttttgagacagagtctctctctgttgccaggctggagtgcagtggcacgatagaaaacacagaattaagctattggggtttttttttccttcttttgacctttataagaactagatatgagtggaaaattgattgatattaatttcactaatagtgattcctcccacctgctctgagagcaagacatgaacagtgaaggagttctgggcatctgatatggtttagatctgtgtccccacccaaatctcatgttgaaatgtaatccccaatgctggtcgtgggccctggtgagaggtgattagatctcctgctctggccatgtgaagtgcctcacttcccatttgccatctgccatgattgaaagcttcctgaggcctccccagaagttgatgctgccatgcttcctgtacagcctgcagaactgtgagccaattaaacctcttttctttataaattacccagtcttgggtgtttctttataccagtttaatacttataatttctacaatcttaaatttttaacctaacaacttttaactatcctctactgtcttgatgtctctcttacttccttacccagcttaaattctaaggtcagtcatcataaacatttccttgcatacatcctcagcttccttgcaacatctctgactttataaaacttgtttggccaagtatatccaatgtattaatcccttcattcttgcagctgagtgtggctggagaaaaacacacaacctgttgattggttttgcttttaatacatgaccagaaacctcatatgggccctttatgcttccatacaattatactatatgcaattatagacattctttttcttaactagacactttttcccctagcctcaatctgagctaattattttatatcttacagagaaaatggaaacaattagaaaagaacttttggatatttccatcacgtatcttccaacctcccagcattagttttcacaccctctgccttataaatgtagcaccagagataaatca

SEQ ID NO: 680764 - DNA, 2052 bp, Homo sapiens
agatatttagtaatcagctctatgctccctgacatccatgatttcggtcagtttttgtgaaatgtgtcaagctataaatttacaatacattgtgtggaggttgaatttttcccaagaaataatatgaaaacttttatacatttctgttttacttataaaatattaaacaatgatatctcagaatatatcatgtaaagttactaatattaaaattcacaaaaacttgaattatattgtgttatatgtacaagtagcaaagtgcccactctaggtgagggttaaaagagaataaacctgacaggtgaacttaaaagtattgaatagtagtgtgcgctcatttacatggcaacctctggggaactccttggggaaaattatttttaaccaaatctgtaattgacatgaggacatatacatatgtttttgacagatttggaggcccaaatggaaatcaagttgtaggaaactaattaggtgtttgatagaattcatcataaagaaaaatatctggcacagaagtccaacttagcattagaacatacattttagatggaattggtgattttgagaactagaatcagccaaacccagtaactcagtgggtatacagatgtctggagaaaaagagtatgatacatttgaatggaaaagactgttctggtaagctctgcaacatgaaaaaaaaatgtgcaaaatttaggagaagagactacaaaaattcagtgatttagtatccttcaaatatggggaatattgggaaataaacctttataaattttaaagaattgtggcaattcaaatttggacaatatttgaaaatataaatatggttttatttgtaaaaaaagttttcatttgtaaattaaaggggtacaataaaggataattattttcaatatgaattttttcaatattgaaattatttacagaaattgaaaagcaagataactctacaatgtacctataatatatttataaaatatgtatgatgttatatatggggttttacttcttcatgaggtgttacattttgaagtatcttttgtatttcttttcttcgttttctctttccattctccttccactcctgtaccccacatccttttctgacgttcaaaacatcctcattcatctcaagaaatgtaagttatcaaagcattactggtagccttcagggtttacctgaggaaaactagatagaatatacagagtctttgtagagaataataaaatatcactagacatgacctytcttgcttggtagaggaagcaatctaaagaaaaagtaagtggataaacattattgagaaaccagtgggacacaaatattcgttaattttatacaaaatataaataaaatgaacttggttcaaagctaatatattaagaaattatttcctcattgaccattgggaactaaaaatagcacaaaatctcccaaacactttactactaataaatttagaaatgtgttctaaaggtttttttctttaatgtaagattaaaataccaagagtttaaaatttacgatgtaatttgatataatcatttaatataatcaatgaaggcatatgttaggataaaaggggaagaatatatcattgggccattttaattacttaggagatctaaaattaattatgcagcttatactccaccatgaaaaaaatgtgaagctagtaaatttcatactgtaagagcccatgttaagttcccaaatataagtatatatatagaaaatctgtgcagaaagaaagttatctctgaacactgaaattacagagtattaggaaatagaatacaaacttgcaagtagaaaaaaattccaacagaataaaaagcatgcccttttaaggatattttatttttatttttttattatactttaagttctaggatacatgtgcacaacgtgcaggtttgttacatatgtatacatgtgccatgttggtgtgctgcacccattaacttgtcatttacattaggtatatctcctaattctatccctcccccctccccccacctcatgacaggccctggtgtgtgatgttc

SEQ ID NO: 680765 - DNA, 625 bp, Homo sapiens
cattatgtaaatggaatcatagtttatttttggatggcctagcttcatttgctcaacaatatgtttatgatgttcacccatatttttggatatagttgtagatttttaagtttcattgttgtgtagtattccattgtgtggctatggcataactgacttattcattctctttgccaggttttttatttttaatttttctaggcttttttttttttttttcccttgagacggagtcttgctttatcacccaggctggggtgcagtggcacaatctcggctcactacaacctccgcctcccgggttcaagcgattctcctgcctcagcctcctgagtacctgggactacagacgtgtgccaccatgctcggctaatttttatatttttaagagatggagtttcaccatattggccaggctggtctccaactcctgarctcaggtgatccacctacctcggtcccaaagtgctgggattacaggctgagccaccttacctggccaatttttccaggctttgtttgcttgttttgcttactgtttcactaatttttttcgtcttcattttaattgctagtaaagaagattctgtgatgtgatttgtcttcatattcatgtccttatcag

SEQ ID NO: 680766 - DNA, 625 bp, Homo sapiens
cattatgtaaatggaatcatagtttatttttggatggcctagcttcatttgctcaacaatatgtttatgatgttcacccatatttttggatatagttgtagatttttaagtttcattgttgtgtagtattccattgtgtggctatggcataactgacttattcattctctttgccaggttttttatttttaatttttctaggcttttttttttttttttcccttgagacggagtcttgctttatcacccaggctggggtgcagtggcacaatctcggctcactacaacctccgcctcccgggttcaagcgattctcctgcctcagcctcctgagtacctgggactacagacgtgtgccaccatgctcggctaatttttatatttttaagagatggagtttcaccatattggccaggctggtctccaactcctgagctcaggtgatccacctacctcggtcccaaagtgctgggattacaggctgagccaccttacctggccaatttttccaggctttgtttgcttgttttgcttactgtttcactaatttttttcgtcttcattttaattgctagtaaagaagattctgtgatgtgatttgycttcatattcatgtccttatcag

SEQ ID NO: 680767 - DNA, 600 bp, Homo sapiens
attacggtcgttaatgttactgttctatatagtgggtaacatttgtgtgaattctgtgggttttgtgtgtgtgtgtgtgtgtgtgtgtgtaagaggaactactagttgaaaggttaattgcaaaacagttcagtatcttttgctatggctgtggtattgacatacttaaatatattaataacccactgtcaactatttcattaaaaagtatttttttaaattaacaagtcgttatgtgggctgtactgcaggacctccccaccaaataaaaatgtcattttgtgctaaataaaaatcagcagtaaaaaacaaaaaacataataaacttaaaaaaatgaaaagactctttagaagtctacaattatattaattggcctaaacttgatattcttttttaatgtatcaggttttttttttaaaaaggcataaagtgagtatgaaggtagggagagaataaaagagaaataaaaatgcactagcattgtatcaaaatatggagattgtagcttttaaaataattratatctcaaattgttgttttctttggaaatatcaccaaaggctatgagaaaacagaagcctcacaggtggacttcaata

SEQ ID NO: 680768 - DNA, 688 bp, Homo sapiens
tacaacagtgagaaaatatgtttaactgtctggttttgccctgtagcccacagtaaagtactactgaaaataagaccctaacttaacttataacttgaaaacatggtgaaagtattttttctctcaatgtgaaagacagtggggtaccgaaaacacccagagaccctcctcttttatagttaaatttgctcactgtggagcagcatctagacctgctatgctgaccggatcacctgtatagacagacgagtttcaaccatttggtctgtgatggctctgcctgagtacgggttggacacacatttctgacatttagaaacgtagaatgacaatgcaaggcttaccaaagtgagaaggagctgaaatgtctgtggccctgtgtgtggaaagtgaaagctctttttacacaactggaccacaggattcactaaagacagagccttcatgtgctcaatatggacagggaggaagtcatagcttccaactccaagctttcccttttaccagtttcaatgcaattggttatgccctctcatcacatcacccacagtgtgcagaaggtaaaatagcaggcatstggcagcatttagaagttaccaaggaagtaaaatacaacatcagtgaaaaggcgtcatcataggctaagctttttaaggattatgtgagatatgtgcatggaatattcagt

SEQ ID NO: 680769 - DNA, 557 bp, Homo sapiens
tgatggatttagttgtggatcttcgtttcactaaatgtgctgggcattcactgtacccatgcaatctgctgcctgttgaccttggcagcactgatattcccttttggactcttcctctattctcttatatgtgtaaatgtttctaaatatttaaatctttacctcattattttgtttttttgagataataatcttcaacattattttaaaggtattctattgaattaaattgatttgttttatatatatacatacacacattgatgtgtttgtgtactcgtataaatatatagatgtctgcctacaaggttgtcaatgagtggtttgtaagattgatttggcctagkttcactgtgttgttgcttaattctcctctgtaccctgaatctgcatcattattttgttctaagcctattttctcctcattgtttttaactcatctttctctttccagttgccagctctcctcgaatgtgttggtcaccattcacatttaatacataacgactgtgcccaaatgccacactaagagacctgaccaaactatagcatgactt

SEQ ID NO: 680770 - DNA, 2882 bp, Homo sapiens
atatacctaatgttaaatgacgagttaatgggtgcagcacaccaacatggcacatgtatacatatgtaacaaacctgcacgttgtgcacatgtaccctaaaacttaaagtataataaaaaaaaagaaacctgagatttattcttgattcttctttttctcccattttactcatttccctggacatarggtgcattatcaagtgatgtcaactccatgtcctaccatacctcatcagccccatacttagacacttttgatcgcttccctttgcctaaatgaccaaaaccaaacatccttctcctggtaaaatccgaacttcctgactccaatctactttaacagccttttctactttttctctctcatctatacttcaatcataccttcccccaaattccttgccctttcatatcattttatctttgcaatcactcttcctccatcatcaatactcttcttggcctggtgaataacattaggaagccacattagttgtgtaacactaaaataaagctatcacctccttagttttgtttttacactacaaagttgttttgctaagttgagtaaaattataaacatcctagggaaagactcttgttaaaaagaagacatatagatttaagttatttatttataattttatttcagtgattaaaagaatgtggtatttattaaggtttgctttatagcatctttgtggccaatatttgtaaatgctccatggatccttgaaagaatgtgtattctctggtaaatgaatgcaatgttacatatccagtggataaaacatatcagttgtgctcttcaaatctactacatttttactaatttttaaaaatcttcttttatccgttactgaaagaaggtgctaaaatctccctctgtgattatggtatatcagtttacccttataatagtttcagttttcactttgtgtatttgtgtgttttcagactatgttattggttatgtacaagtttagaaattttatgtcttcttggtgaattattcttttactagtgtgtagtgaccctttttattcctattaatgctttttcacctgatagtttttactggaccggttttccttttcagtacttgctcagtatgtgtttttccattgcttgactttgaactttctgcatcctcatattttaaatttatctcttataggcagcatatagttggatttgcttattaatacaatctgagaacctctatcttttaactgatgaatttagatcattgctgtcatattttcctttttaacatcttattgtgctatttatcataccttttatttgcttctcttgttttgttatcttttattttttatattttggttttaaaatgttagcattacagctatgaatgtatggaatgcagatataattcttttggttttatatagtggttgtcaattccattgcttcctacctatctaacaaatttgcttctggttaagagggcagattcccaaatcttaaaacacttgtttttgcttttgacattatttaattgactgacagagatgtcaaatatatataataatcaccacttggctgttcacatactgtaccttgaaaaccaattcactgatgtgccaggtctactgacttaatgagcgaagttagtcccttcataagtgctgccagaatgagagtgctttggtaatgacattatgacctagtcaaagtgaacataaaacctaaattcacactttttctgtaaaacatgacaacctaagtaaacctagatttttaaagggaatggcagggaaaatggaataatgaaacaacttacacattaagagtacaactttactttccagcaacaccaaactgccctgtagttccttgtgtggatggtgctattttcttccttcatgtctttccttctactgcctcctcccctgctgggatagccttgtctttttcgctctgtttttttaaataaacttttgggggaataattttagatttacagaaaagttgcaaagacagtatttaagagtgcctgtgtgcccttactcagtttctcctaatgttaacatctgttttttattacagtgaaacatttgtcacaacaagaaattaacaatgatatattactattaactaaactgtagactttatttgaatttcattagtttttctactaatgccatttttctgttttaagacccagttgaggatacctcgttgcattcaatcatcatatctccttagtctctctgtcttctatttgattgttttttaaatcccctttcccctctttttccagcaaatggttgttttacattctctttctattcttttaaaaggggttttacattcgatttctagtcttttagaagttaccaacacactgtttcttagggtgtggcgagagagtcacatacgcggttgttgctgtagtactataaatggatacaacttctgaggagggaatttgatgtgcatgtcttttgatccagcagctccactccagggactcagtcctacagatttatatacttacatgcatttaccaaattattcactgtgtcattttttatagttgtttaataggatactaataaagaggtgctttatatatggataagaaataatgcccaatatatagttaaatgaatagggatagggggtgaaaaatgtaaaactgtattttactttagtatgccatgataaaaaggtttccttatcatctccctataccaaggggtagatttgttttctggtctaccctttcaccaaggttcagctcttgaagagccctgtcttcacacagaagtcttaattctaaccttgctccatagacaagtctaagtaattgtctcacagtctccacgtaggcttgtaaacccaagcctcggatc

SEQ ID NO: 680771 - DNA, 2882 bp, Homo sapiens
atatacctaatgttaaatgacgagttaatgggtgcagcacaccaacatggcacatgtatacatatgtaacaaacctgcacgttgtgcacatgtaccctaaaacttaaagtataataaaaaaaaagaaacctgagatttattcttgattcttctttttctcccattttactcatttccctggacataaggtgcattatcaagtgatgtcaactccatgtcctaccatacctcatcagccccatacttagacacttttgatcgcttccctttgcctaaatgaccaaaaccaaacatccttctcctggtaaaatccgaacttcctgactccaatctactttaacagccttttctactttttctctctcatctatacttcaatcataccttcccccaaattccttgccctttcatatcattttatctttgcaatcactcttcctccatcatcaatactcttcttggcctggtgaataacattaggaagccacattagttgtgtaacactaaaataaagctatcacctccttagttttgtttttacactacaaagttgttttgctaagttgagtaaaattataaacatcctagggaaagactcttgttaaaaagaagacatatagatttaagttatttatttataattttatttcagtgattaaaagaatgtggtatttattaaggtttgctttatagcatctttgtggccaatatttgtaaatgctccatggatccttgaaagaatgtgtattctctggtaaatgaatgcaatgttacatatccagtggataaaacatatcagttgtgctcttcaaatctactacatttttactaatttttaaaaatcttcttttatccgttactgaaagaaggtgctaaaatctccctctgtgattatggtatatcagtttacccttataatagtttcagttttcactttgtgtatttgtgtgttttcagactatgttattggttatgtacaagtttagaaattttatgtcttcttggtgaattattcttttactagtgtgtagtgaccctttttattcctattaatgctttttcacctgatagtttttactggaccggttttccttttcagtacttgctcagtatgtgtttttccattgcttgactttgaactttctgcatcctcatattttaaatttatctcttataggcagcatatagttggatttgcttattaatacaatctgagaacctctatcttttaactgatgaatttagatcattgctgtcatattttcctttttaacatcttattgtgctatttatcataccttttatttgcttctcttgttttgttatcttttattttttatattttggttttaaaatgttagcattacagctatgaatgtatggaatgcagatataattcttttggttttatatagtggttgtcaattccattgcttcctacctatctaacaaatttgcttctggttaagagggcagattcccaaatcttaaaacacttgtttttgcttttgacattatttaattgactgacagagatgtcaaatatatataataatcaccacttggctgttcacatactgtaccttgaaaaccaattcactgatgtgccaggtctactgacttaatgagcgaagttagtcccttcataagtgctgccagaatgagagtgctttggtratgacattatgacctagtcaaagtgaacataaaacctaaattcacactttttctgtaaaacatgacaacctaagtaaacctagatttttaaagggaatggcagggaaaatggaataatgaaacaacttacacattaagagtacaactttactttccagcaacaccaaactgccctgtagttccttgtgtggatggtgctattttcttccttcatgtctttccttctactgcctcctcccctgctgggatagccttgtctttttcgctctgtttttttaaataaacttttgggggaataattttagatttacagaaaagttgcaaagacagtatttaagagtgcctgtgtgcccttactcagtttctcctaatgttaacatctgttttttattacagtgaaacatttgtcacaacaagaaattaacaatgatatattactattaactaaactgtagactttatttgaatttcattagtttttctactaatgccatttttctgttttaagacccagttgaggatacctcgttgcattcaatcatcatatctccttagtctctctgtcttctatttgattgttttttaaatcccctttcccctctttttccagcaaatggttgttttacattctctttctattcttttaaaaggggttttacattcgatttctagtcttttagaagttaccaacacactgtttcttagggtgtggcgagagagtcacatacgcggttgttgctgtagtactataaatggatacaacttctgaggagggaatttgatgtgcatgtcttttgatccagcagctccactccagggactcagtcctacagatttatatacttacatgcatttaccaaattattcactgtgtcattttttatagttgtttaataggatactaataaagaggtgctttatatatggataagaaataatgcccaatatatagttaaatgaatagggatagggggtgaaaaatgtaaaactgtattttactttagtatgccatgataaaaaggtttccttatcatctccctataccaaggggtagatttgttttctggtctaccctttcaccaaggttcagctcttgaagagccctgtcttcacacagaagtcttaattctaaccttgctccatagacaagtctaagtaattgtctcacagtctccacgtaggcttgtaaacccaagcctcggatc

SEQ ID NO: 680772 - DNA, 636 bp, Homo sapiens
tgagtgtgttctttctgggcccattccctctctgctcctgctttcaccatgtgacatgcctgctcccaatttgccttctgctttgagtaaaagctccctgaggcccccctcagaagccaggcaggtgccatcacaatgcctcctgtacagtttgcagaatcatgagctaattacgtctcttttctttataaataaccccgcctccggtatttctttatttcaacacgagaacggccttacacaccatcgtatatggattgtgattattcataagatttctttgggttctacttcttaaaaagttttaaaaacactgaatataaagtatatattacatttatttctcctgaaatttatttctcagattgttaatcaggtcttcaatttttggactcatttaaaattctaaaattgttcttttgctcttttcacacacatatccatattcttcttctggctcsccacttctccttctgagcttgggatttatgcaagacaataacgggaacaatctgatatggcagcataataaccaaccaaaatatgtcttttctgtttttcattttgcttgatcatgacaacatcaaaatgcaagaatgggtgaactgttttgaagtctaggttttgaaaacactt

SEQ ID NO: 680773 - DNA, 594 bp, Homo sapiens
gaaaccataaaactgccattaatgagtacaggaaagaggttctgtttttaactaaattacatgaattcataatgaatacattttaaaaaaattattttaaggaagggatcttgctatcatgttgtgtccttttgggacattacaaaacccattctcatcatagatcttttttgtcatctacactttgcacttttcacttaggctataagtaaatttagcaatttatgaacaagtttctgcccttaaagccaaacaataagttgcaggtggagtcacttcgtattgcagaagcaaacagctaaaggaaaatgtattcttaggggaaaaaacaagaacaaaaacacctttttctttgtagccacttacaaataaaaaaaatcttgccaccccaatggatatgagttcactggtcccctctcggaactttgggatgtctgctttaggattgaatttgtctgctaaatactatttattgagtgtcaggcactgagcaagatgcttcagagrcaacaatgaaaaatgacaaacatagtagtgacttaattgccattgccttaccatctggtaagaaaagcagaaagagaaacagacatt

SEQ ID NO: 680774 - DNA, 565 bp, Homo sapiens
agtctctcaggtcctagtctaatgttttctcattataacaccctccttctacatgaaatcttctgataagttggygtccttagtgacctggctactgtagctgagtcataaattaccccataactcaatgatgtaacacaaccatttagtatgctcactgagtctgtgcattacagatttcgcacagggcactgtagcgctggcttggccctggtcttcgctccaaggctgagggctgggattatttgaaggctcattcacatgtctgctagttgacccatcttggaagtcacacagcatgacttccactctattccttttttgttgaggcaatcataaaggtccaccctagtacaaggggatagacgccacttcttgatgggaagtagcaagatcctcgaagagcatgtgagaccagaaatattgctgtgactacttttggaaattacaatttgctacaattaggaattaaaagaattctttgcaagaagaaaactagagggagaaaagaggcagaagaacaataacaaatcatacctgcaggctgagtgtacctactcccatt

SEQ ID NO: 680775 - DNA, 1755 bp, Homo sapiens
aagggtcactgtttctcacactctgaatccatcccatgtaattccaccacagaagctggagagatttgacttattggtttccagggccctttttagactacagggacaagtacttggaaatggtcccacctatgggaacagatgccaggaggaggaaggcaggggccacaggcatgttctggggccagcttcctttcctgggctccttcaatagatatctttttaaaagtagcccctataggtagggccacagaggagtccccaagacatccatgtccctgtgtttctggccattttcctctgcattcccgactttcattccttctgcaagcaccctctgttgccttctggtgccaggcatggataaccagagatgaacaagacccgagcgcccaagagagaattcagttttgaggatgctgaggctctcaaagtaggcctgtgtgccacatggatttcttcatggaacaggcagctccctgccccagataaatgaggcaccacccccaccttcagggagtcacagtcagagayagacagataagaggaaggatggaaggatggactggtcaggattgcatctgggcttagcaggaacctgctcggatcctggtggcccttgtctgtgagcagggcggaaagggtggacacccacactcatggtcctcttcctttacgggctgagctccctctgcctaaagatctcctcaggctgctcctcctccccctgtgtctcctccttccttccttctcctctctgaatgtaagctaggaagtcaagggcctcacacagactccaagagttcagcttctctagagatctggagctcccatgttcaacagaacattctctcccagaaaggctgaatgcgggagagagggacacatggtgtaattgccccaaatcaaacgactgcctcatgcctgctgtccaccccgggggacttagctgtgctgggagatggggaggctgatcctctggaggagatgggccaggtgcagcctgggggcaggccacatctgcggggcaggccacatctgcagggcagagctggactctctgggggagacccacagggagccagtgtgcccactctgggtgaatgcttgtgagtgtcccctatagagcaggacccacaagtgcacatggtccaggtgtcctagctgtgggcttctgtggccctgtggcttcagaacagagccccaccgtgctgtcagcctagggccagaggcaggcaggggaactccaggagagctgcctcaggaagcactgcagtcctccggcccttcctcccctgcctggcccacttcagagcattctcttccacctttgactcagtttcccagcaggaggttcctcctgcccagttggagattgccgatgcccagggtccgtaagttcctcctagaatccctcccgagtttcttcctctgtgatccactcactgagcctttcctccctccctgccatcagcacttccccatcacttggtgagtgtcccggctagccccaggctccaaaaagccaactgtctctgtggcccatcgagggctgcttctttcaggcacaaagagctttcttccagaacaggagagcggctgctctgcctgaggaccctgcatttcccacaagcttgtcagtctgatccctgtgttttgccctgactttgcttttccagaaggttttgcacgtcacccaaggggtccctgtaaatcgtgtgcacatttttagtggttctacaggctattgactga

SEQ ID NO: 680776 - DNA, 826 bp, Homo sapiens
aaggcttttatcagacttcctagagagttgaagtaagcatatctatataataccatctttgcagattctcagtgaaatggatttttcaaatataaaacagatagaacatacaatagtattgggaactagagaggttgcctcctcatgttaggaacataaaggaattttatgcaagatttaaaatgccagattaaatgaagacaacaaagaatcaatctgtgtctggaccattccaaggaacccaagatccttggatgtaagaggttaatattctggcaaagttatagtaaggtatcctaaactgaagggcagagactaggagaaaagaactggctgcatcaaaaaagcagccagatcatgtcattgcttgtattcgtttgctagggctgccataacaaaatgtcacagactaggcggcttaaaaacaatggacatttattttcacaccattctggaggctgtaagcccaagatcaaggtgccagcagggttggtttctcctgtggactctctttggtttgcatgtgattgagtctcccaacaaccatgtgtggccttttttctgtgtgtgcaaatctcatgtgtgtcttcctcttcttgtaaggacactagtcatattggattagagtcccacccttatgacctcacttaccctttactaagttcctatctccaaacscagtcgtatttagttcttaacatatgaattcggtggggagaggacacaattcagtccgtaacactcctctccttaaaactctccaaagtctttaaaatggcccgtaatcttcagtgcattcaatgctgcctctctaacattttctcca

SEQ ID NO: 680777 - DNA, 1189 bp, Homo sapiens
cgaccccaatccaaaataaaaaccatacactgttaaagaacccaatcacaattaaagtatataatcatgatcataaatatttgtgtagagaataacatagtatcatatataataaatataatgttaaaatatgaagacaaattggcagacacacaattgtctctggacagtttaacaagccttttttttttttgattaggagtcttgctctgttgcccaggctggagtgcagtggtgtgatcttggctcactgcaacctctgcctcccagattcaagcgattctcctgcctcagcctcctgagtagctgggattacagtgccctccactgcacccagttaatttttctattttagtggagatggggtttcaccatgttgcccaggctggtctcaaactcctgacctcaggtgatccacccacctcggcctcccaaagtgctggaatttgcaggcgtaagctactgttcctggccttaacaagcccctttaagcctctgatagattcataagcccagaataagaatataggatatctattcattcaagattaatgttttattcttatctattcaagataatttttatgtacttaatatctattcaatataatttttatgtacttaataggtacataaaaattttcatacacaaccagaaactcactttctaccaaaatcttaattggcatrtaaaaaaggggattcaaaaatttcttgactaaattagatttttttatgtacaaagacaaaagaatgactgtcaatgaattaagtgttttattagtactaggaaaagacctataacaatctcgaccactttattcaggattctttggttgcaaaagacagaaatgcagcacaaattagctcaagtcaagaagaaggatttatggacactttcccagattgtggaaagatgaggtggagctggctgtagggataagagggctcttacctaaacctatatctaaagccataagacttcccctcattatttttcatttccactctcctatcattccttccacatagagtttctctatggtgggggacttggctgtcttgggagctcctagctaaattgagatttcagtaccaagtagctagcaaacttgctctcacaggaagtgaaagggagctggacatgggtgtttagagtgtgcctttcccaggatacttcttttacctg

SEQ ID NO: 680778 - DNA, 2450 bp, Homo sapiens
gcaccatgtatttaagcacttgactaatctgcagcccagttaaatggaatggtcccactggacggagctgcccagccagttgcttctcagtgagcattaactggtgagggagctactctggaccgtgccggcctttgcctccgctgagctcttgctcagccctaaccaaggttgaacgtggattcggggccccaccagtgagggaaactgaggcagggggccagaagggcacacagttggaggagacccaaagaatatcccaagaatatctggtccaagtctctgtttggaggatgggactgccgagccctgagggcagggatggtgtggatcacatggaggatcaggctgaggtgggtctggaacccaggtgtcctgctcccaacccagggccattgttcctgcattgcgtgtctcagatacatttggggttgagcgacaaaatcatccaggagggaagaataaaggtaggggctggggtgggacagggacctcggtgtaggctgtgtgcagtttaattgctcacctgcttgttgaactctgggctgacagggcaagacaggcctgtccacagggatgtcgtggcagagaagggagatggatgccaggctggaaatacagcatccctggaagggccaggccagtgctggggaggaggtctcacctgcaggtgtcctcaggagaggaagagatgagttctttgtgggaaggattcatatattgaaactggatccttgcttcttaaacctggctgcacatctgaatcactggggaactttcagaaaaacgtactccagccacaatccaaaccaattaaatcagaagcttgggtctgtcatagtcaccatagtttttaaaagctccccaggcgattctaatgagaagctggtgttgagaacccttgagctaggcccaagggataagtaggcatttgaaggtggtggagaattgagggacagacgaatgggtgaacactgtaggctgaggaatccacaagaggcaggagcctggtgtttttggcagtagtgagtaacctcctgtatttggaactcagtattggagcagatgggttgggctattgagggggcatggctgagggcccagggagcagatattgtgtatttcatgtcatctccactggagatgaaggtgggggaaaacagtggccggctcccactgagctggcatctctgcaactgccccaggggctccacttgtgccctctcagggaccttgtgagtcagggctggccataggaggtcagggtgtgaaggattctccaagaattgagtgaatagctctcctttaaccctgtccaggtgggagaggaggctgcaccctctcacgatctgctaaggagaggrtccctcatctatccctactcgtcccctcccttgaatcatagggtggggctttataaaatagagctgagctaattaagcagaagcaaagggcagccattaggtgggaaagaggaaaagagtaaaggcccagttggaccaccaactccatgaccctttcctgctctgggcctcaggagcttctcttttaaaatgagtggagtggggtggatcatgttaatagccagaccctctatagacttcctgtgtgccaggctctgtgccagcacttcattctatcaccacagcagctggagggtgggggtgggtctattatgacccctattttatagataagtgaactgaggcacaaggaggtactttgcttaaggacatagtccattaagaggcagaggcagcctgtaccctcaactgctgggatgcaccacctctaaagagtgacatgctgtgggtcccagcacccccccgggcgcagcaccagccatgggatctttgaagggcccttaacaccttaattttcatgtctgaaaaatggaggaaaaatgatacctaccacataggattattgcattaagtgataaaagcctgtgagaagtgctaaggacagcgtatgggatttactaagcacttaactaagacactgtagttattaggagctgtcatcttggagtgttgggggtttccagggctcccaccttctgctacatcccagttcttctggggagtagagagacatctctaggaagcaggtcagcgccacttggaacaatcctggaagcccctctggaagagcaggggagaagttagggagcagatctgggcttcagagggcagatggagagtacaggaaggtggagagaagcgttccgctggggaagggtggaaagggagcagtgagtaaggtgggtgggcaccgtaacagccagcacttcaaggcgggcactgggttctctgtctctgtctctctcagacacgcacgcatgtgcgcgcgcacacacacacacacacacacacgtacaagaacgcatttaaccctcaccagcctatgggctgggtagagttttacccccacttaacagatgaggctgc

SEQ ID NO: 680779 - DNA, 635 bp, Homo sapiens
gacatttttgagagtgaaaggggagttaatgatgatgccaagaccgcaggtgtaaactgggaagtgtggtcatgctaaaaataaggcaaaatgaggtgcccagtcacctggggagtggatggtagagaaagatgacctggctttcctggtatgaggcttggcaatgtcccttctaatgaagtcctctcccctgcaggcctrgtttctaggcagaccctgccaactgggctttcttttcctgatgcccaggcattctgaggggcctggtgtctttggcatcaagctgcctgtggggctggccagctgtcggcggctgtgtgcattcagttccctcgtgggttcccatcacagtccaccacccctccaactggcaaagcgccactgaaggaagcatttttgtggcaccgggcaatagtatgccacttccctgcctcccgtaacagaagtgttccaagaggcttctagtgctggtcctcaaagaggacatctggttccactgtagacacttgcagcctgatggtgagcagctggtcaccttttatcctccacatcccatcatggaacaggaagcaggctacagacatttcccttttccacaccatcagacatgcccgcattgctgtgctgtgagtcac

SEQ ID NO: 680780 - DNA, 635 bp, Homo sapiens
gacatttttgagagtgaaaggggagttaatgatgatgccaagaccgcaggtgtaaactgggaagtgtggtcatgctaaaaataaggcaaaatgaggtgcccagtcacctggggagtggatggtagagaaagatgacctggctttcctggtatgaggcttggcaatgtcccttctaatgaagtcctctcccctgcaggcctagtttctaggcagaccctgccaactgggctttcttttcctgatgcccaggcattctgaggggcctggtgtctttggcatcragctgcctgtggggctggccagctgtcggcggctgtgtgcattcagttccctcgtgggttcccatcacagtccaccacccctccaactggcaaagcgccactgaaggaagcatttttgtggcaccgggcaatagtatgccacttccctgcctcccgtaacagaagtgttccaagaggcttctagtgctggtcctcaaagaggacatctggttccactgtagacacttgcagcctgatggtgagcagctggtcaccttttatcctccacatcccatcatggaacaggaagcaggctacagacatttcccttttccacaccatcagacatgcccgcattgctgtgctgtgagtcac

SEQ ID NO: 680781 - DNA, 1615 bp, Homo sapiens
cccacttaggaccaagtcaaatgctgtgtacttcagatcaagaaacaccacgcagaaggcagctgcagatgaaagggttcggctctggttccctcctcagtgcactggtgggactggggccgggcaacatgcttttcgtrtgttgactacagtccccaggcagaagtggggagattcaggacagattgccatctctcggctgtgattttcctggtcctccgtgttcatttactggaaagttttctcatacaaaatgactcccaggagctctgtccagaaccaaaaaataaataaaacaaaaacgcaaccaaaaaccactgccttctcaggaggccaaaataggaagtgaggtccagtgtcattgttgtctctgccagcacaggccagacaggagggccatcactggtcctggtgccagccagagccctgtcgacgctgcctcccatgggccctgaatctgaggcacctggaagggttattagcaggattggaactcatccctctgctgggaccagatcataattacagtaattttctaacagagctcggcagtaggactgtttaatcagcatctgactcccttgtgctcccagccctcattactcaaggagaggagtgggatgcctcttaaagagacagtgcccgcctttcagcgttttgaacagatgtgccctaattggtagaatatatctaagtctcacagcttatagcaggcaggctgcattgcctccaacaaactgcctcaggcattcactgttctgggccttctgcgggaaggatccgggtcaggctgctggtggggtgggctaggcttcccacaccaacacagccaccagggaaagggacacacagagctagagcacttacaggattcgaacaggctggccctttctgaactgacggtatcaaagaaaatgtgcttggctgaaggacaggaaggagagacttgacagccatgcagccatgcatgaaaagaaattttggctggtggcttcccataatccagagattccagaagcatcttgtgttcctgcccttccaggggaaaaaaaccttagagacttcccagtagtctcctaattctcacaccctagctttgtcacctctgtttattatctgtgaccctttggcaaccatgaaagtaccccttggctttttttccttctcctttgcttgtgaaaatagaccagatctcccctgaacaaaagaaaagtaaaattattcactctgcttattcagtcaggaggactctgtctcctaggaagtgtagttcttgttaacattttgagcataagttgtctgtttattatatcttgagatttgaggtctccagctttccaactccaaatccagtcatggctaaaatagaagtgtttttcccccctaagaagtcgtatctctaataaggccagactcagtggctaacacctgtaatctcagcactttgggaggccaaggagggcagatcacccgaggtcaggagtttgagaccagcctggccaacatggtgaaatcccatctctaataaaaatacaaaaattagccaggcgtggtggtggacacctgtagtcccagatactcaggaggctgaggcaggagaatcacttgaacccgg

SEQ ID NO: 680782 - DNA, 1072 bp, Homo sapiens
tctttatatgtttatagtttagtctatyatactaggttggtgcaaaagtaactgcagtttttgacattacttttaatggcaaagactgcaattacctttgcacctacctaatactctgtctcgctaactgcagtatcttctgcatcaaatcatctctacttacggttctgacgtcctctctaaatcattttctacacatccagaacaatctttcaaaaatgtaaatctaattgttaacctctgtataaattaaaactccaccaatacctcatttttcacctaaaagaaaatcagaattttcaagtatgaggcaaaaaggtccttatctccctttccaactgaatctcagaaccactcactatttcatggtcatggtgggttgtctgccatgcacctcacataacatgctattcatgtctgtgtgcttttacacattctgttccctcggcttgaaattttgtttttctgctgtgctcccagccttcaaaactctgctcatggctgggcacagaggctcacgcctgtaatcccagcactctgggaggccaaagcagatggatcacctgaggtcaggagttcgagaccagccgggccaacatggtgaaaccccatctctactaaaaatacaaaattagcagggtgtggtggcacatgcctgtagtcccagctactcaggaggctgaggcaggagaatcgcttgaactcaggaggtggaggctgcagtgactagagtttatgccacggcactccagcctgggagacagagtgagaccctgtctcaaaaaaaaaaaatctgcacattatttcctgaatacctattaccacacccaaatatccatttagttgttgaatattacttttactcatatgcttacaagaaacttctgttacataatcatttatttacagcacaactctgtgaatccttgaaggacaggggccttaactttttaaactttgtatccccaactgcctaacatgaatcaagtcttattgaacatattttaagtgaaggacttactgctaaaatcacttttaaatggctctttaagtgataggcatttaaaataaa

SEQ ID NO: 680783 - DNA, 1092 bp, Homo sapiens
ccttacagatgacccaagaaagtggtttcttaaagatggaaactactcctggtgaaaaggctgtgaaattattgaatgacaacaaaggatttagaatactatataaccttagttgttaaagcagtggcagggtttgagctgactccaattttgaaaaaaagttctacttttgggtaaaaaatgctatcaaacagcatcaagtgctacagagaaatctttcatgaaagaaagaggcaatcaatgtagcaaacttcattgttrtcttattgtaagaaactgccagaggcaccccaaccttcagcaatcactgctgggttcagtcagcagccaccaacatcctctatcagcaaaaaatcttacaatttactgaaagctcagatgatcagtagcattttttagcaataaagtatttttaaattaaagtatgcacattggttttttaaatataatgctattgaacatttaatagactgcagtagaatataaacataatatttacatgcactggtaaaccaaaatatttgtgtgccttgctttatggtgatattcactttattgtggtagtctataatggaacctacagtatctccaaggtatgcctgtatttactttggtaccaattctagatatacatctgcatatacctggttatttaacttcctggtctcatgttccttaaatagttaataagaaagagtaattatgaaccatgcagaccaattaacaagcctaacttccaatattttcttcactctgaaataagtatttccaacagtgtattatgtcagaagttctcggttttgggggtgatgtatcttaatttttctgtactctattttcaacttcactgacataatacaagctctatcttccttacaaatttataaggaatcaaatgaaatgaaatatataaaagttgtcctctttctcccatcttcaaaaaacttccccctgcatttcatttcctgttagccctctctccttcaacagcctggtctgtagaaagagtccatacatggcctccctccactccctcatcttccattcactccttgttccaaggccctcccaacaccactgaaacttttttca

SEQ ID NO: 680784 - DNA, 1092 bp, Homo sapiens
ccttacagatgacccaagaaagtggtttcttaaagatggaaactactcctggtgaaaaggctgtgaaattattgaatgacaacaaaggatttagaatactatataaccttagttgttaaagcagtggcagggtttgagctgactccaattttgaaaaaaagttctacttttgggtaaaaaatgctatcaaacagcatcaagtgctacagagaaatctttcatgaaagaaagaggcaatcaatgtagcaaacttcattgttgtcttattgtaagaaactgccagaggcaccccaaccttcagcaatcactgctgggttcagtcagcagccaccaacatcctctatcagcaaaaaatcttacaatttactgaaagctcagatgatcagtagcattttttagcaataaagtatttttaaattaaagtatgcacattggttttttaaatataaygctattgaacatttaatagactgcagtagaatataaacataatatttacatgcactggtaaaccaaaatatttgtgtgccttgctttatggtgatattcactttattgtggtagtctataatggaacctacagtatctccaaggtatgcctgtatttactttggtaccaattctagatatacatctgcatatacctggttatttaacttcctggtctcatgttccttaaatagttaataagaaagagtaattatgaaccatgcagaccaattaacaagcctaacttccaatattttcttcactctgaaataagtatttccaacagtgtattatgtcagaagttctcggttttgggggtgatgtatcttaatttttctgtactctattttcaacttcactgacataatacaagctctatcttccttacaaatttataaggaatcaaatgaaatgaaatatataaaagttgtcctctttctcccatcttcaaaaaacttccccctgcatttcatttcctgttagccctctctccttcaacagcctggtctgtagaaagagtccatacatggcctccctccactccctcatcttccattcactccttgttccaaggccctcccaacaccactgaaacttttttca

SEQ ID NO: 680785 - DNA, 1092 bp, Homo sapiens
ccttacagatgacccaagaaagtggtttcttaaagatggaaactactcctggtgaaaaggctgtgaaattattgaatgacaacaaaggatttagaatactatataaccttagttgttaaagcagtggcagggtttgagctgactccaattttgaaaaaaagttctacttttgggtaaaaaatgctatcaaacagcatcaagtgctacagagaaatctttcatgaaagaaagaggcaatcaatgtagcaaacttcattgttgtcttattgtaagaaactgccagaggcaccccaaccttcagcaatcactgctgggttcagtcagcagccaccaacatcctctatcagcaaaaaatcttacaatttactgaaagctcagatgatcagtagcattttttagcaataaagtatttttaaattaaagtatgcacattggttttttaaatataatgctattgaacatttaatagactgcagtagaatataaacataatatttacatgcactggtaaaccaaaatatttgtgtgccttgctttatggtgatattcactttattgtggtagtctataatggaacctacagtatctccaaggtatgcctgtatttactttggtaccaattctagatatacatctgcatatacctggktatttaacttcctggtctcatgttccttaaatagttaataagaaagagtaattatgaaccatgcagaccaattaacaagcctaacttccaatattttcttcactctgaaataagtatttccaacagtgtattatgtcagaagttctcggttttgggggtgatgtatcttaatttttctgtactctattttcaacttcactgacataatacaagctctatcttccttacaaatttataaggaatcaaatgaaatgaaatatataaaagttgtcctctttctcccatcttcaaaaaacttccccctgcatttcatttcctgttagccctctctccttcaacagcctggtctgtagaaagagtccatacatggcctccctccactccctcatcttccattcactccttgttccaaggccctcccaacaccactgaaacttttttca

SEQ ID NO: 680786 - DNA, 1073 bp, Homo sapiens
caatgtgtccaacttgctctgatatagactcataattaaaaataatttttaactcacaataggcccttagtaatatctgttaattaggttaaataataaatgaggaaatactttgtatacatcttgatatttactgaggraatatgagggagaaaagatgacagagggagtgtgaggtgaagagttacaggtaatctggaggaagttgttcaagaaacgggcaaaaataatgatccagaagtttccagttttggtaacagtgaagtgagtatgtaacacactctatagcatgtgacgacaaaatctctgaacaaaatatctttgaaaactcaactacttgtaagtacttgaatgtgaactaaagcaagcaggaaatggaagttatttgaccgttgaaagaaggaaatggaattgggaaagatccatgtttataagttttttacctgaagagacttttcactaagggcaatgttgaaaataggactcaagaagaaagccacagtcactagaatactagaggccaggggaaggagatttaaaccaacagagaagctgaaaactgaggggtggagatccaaaataggagagaattaaaaagagggagtttccaaatctccatataaactcctctcgcagcactggctaactattgaactgtgcatgtggaagggactctgaggagattagtgagaaacttcagttggatgtttaaaacactggagcaaatatgtcaactgctacctatcacaagagagataaaggtctgagtttgaatcctaccaaattagaagagcttggtaaaccccaggcttatcaatgaatcatttggaccaaaagtgatttcaagtctttacaattccaaagtgctatgccaataatttacatatctgcaaaaagaaaaactgtactctcagtggaagacaacagtctctataacatttccaatgatgaacataggagaaacaattactagacatcaaatacacaggaatatacagcctatgcttaagaaaaagaagtcaacaagaaattatcctaagaggatcccaatgtcacaactagcagaaaaagat

SEQ ID NO: 680787 - DNA, 1073 bp, Homo sapiens
caatgtgtccaacttgctctgatatagactcataattaaaaataatttttaactcacaataggcccttagtaatatctgttaattaggttaaataataaatgaggaaatactttgtatacatcttgatatttactgaggaaatatgagggagaaaagatgacagagggagtgtgaggtgaagagttacaggtaatctggaggaagttgttmaagaaacgggcaaaaataatgatccagaagtttccagttttggtaacagtgaagtgagtatgtaacacactctatagcatgtgacgacaaaatctctgaacaaaatatctttgaaaactcaactacttgtaagtacttgaatgtgaactaaagcaagcaggaaatggaagttatttgaccgttgaaagaaggaaatggaattgggaaagatccatgtttataagttttttacctgaagagacttttcactaagggcaatgttgaaaataggactcaagaagaaagccacagtcactagaatactagaggccaggggaaggagatttaaaccaacagagaagctgaaaactgaggggtggagatccaaaataggagagaattaaaaagagggagtttccaaatctccatataaactcctctcgcagcactggctaactattgaactgtgcatgtggaagggactctgaggagattagtgagaaacttcagttggatgtttaaaacactggagcaaatatgtcaactgctacctatcacaagagagataaaggtctgagtttgaatcctaccaaattagaagagcttggtaaaccccaggcttatcaatgaatcatttggaccaaaagtgatttcaagtctttacaattccaaagtgctatgccaataatttacatatctgcaaaaagaaaaactgtactctcagtggaagacaacagtctctataacatttccaatgatgaacataggagaaacaattactagacatcaaatacacaggaatatacagcctatgcttaagaaaaagaagtcaacaagaaattatcctaagaggatcccaatgtcacaactagcagaaaaagat

SEQ ID NO: 680788 - DNA, 617 bp, Homo sapiens
ttttctcatttgtgaaacaggcacaataatggatatgaaggtgtgacaaaattgttggcatcagatgaggtaaaaggtatgtaaagcacctaactaatgtttttgacacatagaaatcactcaataaatgttagctatgatgatgatgatcatggttagctatgatgatgatgatggttacagttggggaggtatgaatgcgggtaatacagaggactccaggggccctgagatgtggtgagtgtgtgtgagggctccttgacttttccccttcccctgctccataagatcagagagttgatttagttcatgtctgtcttgtttagttcacgtctgtcttgtttagttcacgtctgtcttgtttagttcacatctgtcttagtaacaagccagtttccmtaaaggcttttcattcacccccctctcttttcaaaactcttatttttctttctaagtgttattttccctctgcatgtgagtaagttgttggccatctcaggaatcaaaacttccagaaccagctggctttgtaaccagcccggggcttggacctgctcactcaccaaggtggtatcttccagccacctttactgatgaggtggccctgtcaatctgta

SEQ ID NO: 680789 - DNA, 559 bp, Homo sapiens
cacagtgctggcatcttcttctggtgagggcctcaggaggcttccaatcattgtggaagacaaaggggagcctgcatgtcacacgatgagagtaacagcaaagtgtgggggaggtgctacacacttccaaataaccaggtctcactcactgcagtgaggacagcaccaatccttctatgaaggatccactcccatgacccaaacacttcccaccaggtcctgcctctaacattagagattacatttcaacatgagaaatgaggggccaaacattccaaaaatatcaactcttgatccacagaaactgtgasataataattgtgtgttgttgtaagttgtcacatttgtggtaatttgttatgcagcaatagataaccaattcagtcattatatttaaagtgaattttttagtagatagcctatggttgaatcttatggttttcttgtggttttaaccaatctaaatggattttagatcatttatcacaatctacctataaaaatttcaggctacttcacatatattttaagaaagttacaatagtgtatttgcaattca

SEQ ID NO: 680790 - DNA, 654 bp, Homo sapiens
tccaggtctatcctggaagaagttccagggcagcttctgtgagtttgtggggacattggtctgtcggtgccagtacatcctcctccatgatgacttccctatggacaacctcatctccctgctcactggcttctcagactcacaagtctgcgccttctgtcacactagcaccctggctggtgagcattcattttcattccggacattctyctggggatttataggactttcctctgttctctgattcagggtcttctttcctacctgtgtcttggctcttcacttcaaggccatgcctcttttatcctaaacttcaatccagtttctcactggtggagttttgagaaggggtagatcacagcaacaatttccaggcttagtatttttgtcagagctcaccactagggtatgctgatggttaaaagaagaccacaagggttagagggaaacagtccactccaggacaggcagtcaggattttagggtcacctacctctggcttctcatttttattgcccttctttccttctatttttccttctactcatcctctctcctctgacctcagtaatgatttctttatctctttttccttactcaaagctatgaaactgatgacctccctggtaagagttgccctccaactgagtctgc

SEQ ID NO: 680791 - DNA, 655 bp, Homo sapiens
gccagtgaaagaggctttgatcccaaggacacaagacatcagagaaagaacaaatcaaaggctatttctggatgttgagattatctgatttcaaggtactgaaggacaaaaacttggatggcctcaaaaggttcttgaacaccactgtgattctccaaggacgaattacgtaaattatactttcatacaaaggagacrataaggcagtaaacatggagacacgggggacagcgtccacactcagagggcctgggccacagccccgatgtttcttttcagaactcagcccctttcctgattttacttctaagaggaaaattattttggggaggaactacacagtcgtgattagaatttatctgatggttttgtattataacttgtaagacctgccagaatgctagtcccgagagtgtcagacaaggaagaagtccctgggcctcttccccttacccggcccttagatttcatggagcagccacttagcattgaattgcactaccctgagctaaacgtgtctgtgctttctaagataagagcttgatccctttcttctatcttaagacagcacctcctgaaaagaatcgaagttgtcacaactctcaattattttttaaatactgcatagattgagttttggtttattaccaaccct

SEQ ID NO: 680792 - DNA, 655 bp, Homo sapiens
gccagtgaaagaggctttgatcccaaggacacaagacatcagagaaagaacaaatcaaaggctatttctggatgttgagattatctgatttcaaggtactgaaggacaaaaacttggatggcctcaaaaggttcttgaacaccactgtgattctccaaggacgaattacgtaaattatactttcatacaaaggagacgataaggcagtaaacayggagacacgggggacagcgtccacactcagagggcctgggccacagccccgatgtttcttttcagaactcagcccctttcctgattttacttctaagaggaaaattattttggggaggaactacacagtcgtgattagaatttatctgatggttttgtattataacttgtaagacctgccagaatgctagtcccgagagtgtcagacaaggaagaagtccctgggcctcttccccttacccggcccttagatttcatggagcagccacttagcattgaattgcactaccctgagctaaacgtgtctgtgctttctaagataagagcttgatccctttcttctatcttaagacagcacctcctgaaaagaatcgaagttgtcacaactctcaattattttttaaatactgcatagattgagttttggtttattaccaaccct

SEQ ID NO: 680793 - DNA, 655 bp, Homo sapiens
gccagtgaaagaggctttgatcccaaggacacaagacatcagagaaagaacaaatcaaaggctatttctggatgttgagattatctgatttcaaggtactgaaggacaaaaacttggatggcctcaaaaggttcttgaacaccactgtgattctccaaggacgaattacgtaaattatactttcatacaaaggagacgataaggcagtaaacatrgagacacgggggacagcgtccacactcagagggcctgggccacagccccgatgtttcttttcagaactcagcccctttcctgattttacttctaagaggaaaattattttggggaggaactacacagtcgtgattagaatttatctgatggttttgtattataacttgtaagacctgccagaatgctagtcccgagagtgtcagacaaggaagaagtccctgggcctcttccccttacccggcccttagatttcatggagcagccacttagcattgaattgcactaccctgagctaaacgtgtctgtgctttctaagataagagcttgatccctttcttctatcttaagacagcacctcctgaaaagaatcgaagttgtcacaactctcaattattttttaaatactgcatagattgagttttggtttattaccaaccct

SEQ ID NO: 680794 - DNA, 655 bp, Homo sapiens
gccagtgaaagaggctttgatcccaaggacacaagacatcagagaaagaacaaatcaaaggctatttctggatgttgagattatctgatttcaaggtactgaaggacaaaaacttggatggcctcaaaaggttcttgaacaccactgtgattctccaaggacgaattacgtaaattatactttcatacaaaggagacgataaggcagtaaacatggrgacacgggggacagcgtccacactcagagggcctgggccacagccccgatgtttcttttcagaactcagcccctttcctgattttacttctaagaggaaaattattttggggaggaactacacagtcgtgattagaatttatctgatggttttgtattataacttgtaagacctgccagaatgctagtcccgagagtgtcagacaaggaagaagtccctgggcctcttccccttacccggcccttagatttcatggagcagccacttagcattgaattgcactaccctgagctaaacgtgtctgtgctttctaagataagagcttgatccctttcttctatcttaagacagcacctcctgaaaagaatcgaagttgtcacaactctcaattattttttaaatactgcatagattgagttttggtttattaccaaccct

SEQ ID NO: 680795 - DNA, 1505 bp, Homo sapiens
cttatgacccagagcactgggtgtgggcacgagatcgcgctcacctttcctagagctccagggaccgtggaggcctgaggtcatcggcctgagagaaggtacatctgcatcctccggggtaaaggcagaatattggggtctatttcggaaatccgaagaacccaattgcttgatccggcttcaagcctgggcaacgtggtgagatcccctctccacaaaaatacaaaaattagccaggcgatgtgggacgcatctctactcccaactactcaggaggctgaggcgggaggattgctggagcctggaaggttgsggctgcacggagccctgatcctgccactgcactccagtctgggcgacagagtgagaccctgcctcaaaaataatcataaatactgagtttggggaggttcattatgattgacgcacttgagttactgatttgggtcgagggttcagtgaagctttggtttacatcttgtgcagctaaccacgttgagcacagagcatgagacttcatcatgaggaggtaggattaaggattaggcttctggactcgtggttcgtgatgttgtcacattagaaacacatctagcatggttacaagtttagatcttaagtgacacaaaaggccccagctgtgatgaagtccaaagccacattctctgagggtgccctactccctgggcagacccacccaaagtccttgctatgaagcagatcactggggctgaccttgggtgtattaagtgagttttggagtcgtggtcaccaaaatgtgagtttcacagttgaacacgatggttcagaagcagggtatagaatgaaaggcagcagataaaattgtatttctcaattgctctgaactctagacttgacatgggacgtgaataaccttcctgtctagagagctgcctccttgaagtgtgacattgtctctctcacttccagaacaccggacccaggggagatgtggattttcagcaggaactttattccaatgctaatggcagacaccaggaaggagaagaggaaccatttgtgcagatcatctagaagaacctggaccattcttgatggagctgaatacagtgatcacgtgtcctcctgggagcaggggttgggggaggggggtggggtccttctaggagtccttggagaaaagtaagaaaccaggagtgtttccagttccaccctttcctgcggcaccaccaccctttttatattgctgaattccaacctccctggggcggaacctggaggtgctgtttcttacggacttggttgccacagtccaggagcatttgaaggcacaatgcaggggctcagattggcacagaattcttttgtgaaatatcagtgccacagattgtaacagatagcttcatgcacactctgcattttattggtttgtttggaaaatgttggccattgaattattcatagatttatttcaaatagtttggaaattgttgtacttttgaaaacatgctgttcctgtagtt

SEQ ID NO: 680796 - DNA, 1246 bp, Homo sapiens
gtgacaggcagaagcagggcaaatgtcaaactaccaatgatagtgacaattcagtgggcccaccattcactaagtgcttaaaattcttttgcataattatgcacatctctctttaaaaactgtgtacatattagttttagcacaactaatgatagcttttctgacataggacgtctttcattttttaataaattgctatttttttatttttttattatgggttttggaatgaagattgatttttgaaccgttttggggagataatagctgacttttgtgctgctgtgccattgcatagctcaaatttcaataattaaatataaacatgctccctcaaaagtacagtcacataaaatatggcagtgcttcattaataatcgatttacagaatctctcactgtggaaacggcagcctcctgaagctgtcatgacactgtcagtgttactaaagcaggtaagaattagttcttgagctccagagtcacaaattgtcatggtttccttggagacttaacgcactgtatctacagaactgaagtttccaaattagaggggagtctccagaaattaatcaggcttaattgaaaaactttcagctcagtcctagggaggaatccataaagaattgctagtgagggggtgacaataggtgacatgcttccagcagggtggaggtggtcaatgtgtgggcctgtgaattacgtggcrgcagagccagggccacagcagcctggttagcaatgctaaggagactgacagaagcaggactggctctcattattaatgagtcaccccatatgaaaagcctcctgtatttctcaacaaataatcgctaagtcacaaggcagaaggctaccctggaaagaagagacaaagacagtgcaagtcatatttttttaaagagggcatataatgattctggttcttcttcttttcatgttattttctttgtgaaccaaaaaagttggtgcccttttcataattttagaattctgcattatcttcttggatgcttctaatgggacggcacttcacccgccccctttttcccatactttttttagtatcccttgtaggagaggcttttgttttgttttgtttttttgttttttggtgttttttttttttgagacagagtctctgtcgccaggctggagtgcaatggcaccatcttggctcactgcaaactcttcctccgccttgtggggtcaagagattctcctgcctcagcctcctgagtagctgg

SEQ ID NO: 680797 - DNA, 639 bp, Homo sapiens
ctgtgccaatgtgcagtttattgaatgccatgtagactaaattaccttcacagtttgaactttgccaatataacaacaaaaatttactgctatgttccaggaactctatgctagacttcataaatgttttgtaacatgtacttgtcaaaccatcatcatcattattatagaattattctaaaatgaaataaaaacaatatatcaaatttttccccttagattttwtattaaagtccagggcaaatttaagtcacgcaacttttgtttgtctattctattctaataccctgggatatgttcatttcccaaacatatgcattttgcctttgtagataaatagctgagtatatttgtttccaacgtggctcgaagccatacccttctaagacttccaaggttacttgggtagtaaacagttaactttaaagatactgatctgttttttgcaggataacttttgtaacattctgatggtacttaaatggtcacatactctaacatattctaggaagttttacgtggctgagaaataaatcgttgataatatttcatgctctgttatttttgaatttattcattgctctatatatttgctagtgccttcatacattgtttttaacattgtaatatcatctttcc

SEQ ID NO: 680798 - DNA, 1219 bp, Homo sapiens
gtttcaagtagctccacaggtgtttctgatatccacccggggccaggtcatagtagttccagctgagtgcttagtaattgacccacaagtgtgtcaggccatgaggagtcaaagaagccatactaacaacaagagatttagggtgatctgcagattaaaccacaaagcaaaaagttttcctttacatgccaaattccgcagcccctgcagatccaataattcataataatttctttgtagatacagttacaaactgacaactggagccaggggttcccagttgtgacagcacccagaataatctggaagcaaacataggtacactgacccactgaactggaaactctgggaatgggaactggagatctacatttttcaaatctccaggtgattgcttaaagcagaaaggattggaaatctctttttaggtcattccaaattagtacctatattccctctaagctactcagatattgtctttaaagaactgcctggtcagtaagtctcaacccaattccactagagcttcctcatatgagatcttcccaacagcattccagaaatccacatttggagctctaagacataaggaaatgataaaggattcctatgaaagaagacaaaaacttggtttgcgttagctgatactctcatctttccaatggtcatcacaataattgcttaactaagtcagtgttatggcacgagtgtttgtatattgttctaaaatctttccattggctgtgactctagtgtattaaccattcttcttgcctagagataacctaatatctttgccatacagaagatgaaaagcagctgaaacctttaggcttctttgtgtaaatatattagctggggaytcatatcatgaactatccactctttaaatacccttggaaactgttttgtctcaattgcaaaaatcactattatgaagcatcactttttattataacacagtagatagtttaatgtacagcaaccaagaaaaaaaaggaatatgtttgccagttggtattttgcccttattatataaaattggaaatggaaaaggcagccttgatgaaaacactgaaattccagtaagtaggattagtcatactttttgtgttccagggttagatttcaaacggcaagtaaaaattccctgagctaccagtggaggcaaacactctcaaattaaaataaaaaggactacacatatttacaagagcca

SEQ ID NO: 680799 - DNA, 630 bp, Homo sapiens
tgagaggcatgtgaataagaaaagtccacagggccttgtagtaatatattacctgacacatggaacatctaataaacatttgctgaatggaaaaaggagcccgaggaatgggacaacagacatgagttgttagaagtattgaagtattgatagcattatttatgtattaaggagagtcctgcttggacagcaataattcctattggcaatactttgtattgatgttatagtttcattaaatgcaaacactatttatataactaataaatcaaaacctatagtttaacacgaaaaaatgatgagtgagaaagcccttcatattcaatgttgctcacaatgccagtctgtcaggaagatagaaacgttatggaagcagcttctgcctttaagaaattacatcctgtcacattctgtagcaataayaggctgcactgagatgcaagagacaaggactctgaaccaggtgctttgctaatttctgaacttctctggacctctggtttctcatccacaaaaatgaggggcagtatctctgaaacaaactgacaatctacatcgattttcctgccttcttctttacggtcaatttcctactgtcatgaagcattcattactgagggaaaaaacata

SEQ ID NO: 680800 - DNA, 630 bp, Homo sapiens
tgagaggcatgtgaataagaaaagtccacagggccttgtagtaatatattacctgacacatggaacatctaataaacatttgctgaatggaaaaaggagcccgaggaatgggacaacagacatgagttgttagaagtattgaagtattgatagcattatttatgtattaaggagagtcctgcttggacagcaataattcctattggcaatactttgtattgatgttatagtttcattaaatgcaaacactatttatataactaataaatcaaaacctatagtttaacacgaaaaaatgatgagtgagaaagcccttcatattcaatgttgctcacaatgccagtctgtcaggaagatagaaacgttatggaagcagcttctgcctttaagaaattacatcctgtcacattctgtagcaataacaggctgcactgagatgcaagagacaaggactctgaaccasgtgctttgctaatttctgaacttctctggacctctggtttctcatccacaaaaatgaggggcagtatctctgaaacaaactgacaatctacatcgattttcctgccttcttctttacggtcaatttcctactgtcatgaagcattcattactgagggaaaaaacata

SEQ ID NO: 680801 - DNA, 581 bp, Homo sapiens
aatgaatgctttgtgtacctctcttaatttgtactagcacgattgtctcattgataacactacaaagatgtatatgcatactctacctcctctaaagagattaaactcaattttagaagtgtaagttcaagttttgaggagttacaaaaaaattatytacgaggggttactgttcccactaaattcttcatgccataaaaggcatcttttctgttaagccatatttgagagtgacttcctaaggactatttcaatcaaattgaaagttcattcttggacaaaataaaatgtgctcacaagcaatgaacaatccaaatattaaattaagaaaacaactccatttacaatagcatcaaaaaattcttagtatttaacaaaggaactatataggcttacacactgaaaactacaaaacaccaatgaaagaaactgaagaagacctatttattataggaaaatatctcaaatttatggattggaagatactgctaagatcttccaaatttgttaagatggtaatacttaaattgatttacagattcaacacagttcctatcaaaatcttagctggcttttttttt

SEQ ID NO: 680802 - DNA, 581 bp, Homo sapiens
aatgaatgctttgtgtacctctcttaatttgtactagcacgattgtctcattgataacactacaaagatgtatatgcatactctacctcctctaaagagattaaactcaattttagaagtgtaagttcaagttttgaggagttacaaaaaaattatctaygaggggttactgttcccactaaattcttcatgccataaaaggcatcttttctgttaagccatatttgagagtgacttcctaaggactatttcaatcaaattgaaagttcattcttggacaaaataaaatgtgctcacaagcaatgaacaatccaaatattaaattaagaaaacaactccatttacaatagcatcaaaaaattcttagtatttaacaaaggaactatataggcttacacactgaaaactacaaaacaccaatgaaagaaactgaagaagacctatttattataggaaaatatctcaaatttatggattggaagatactgctaagatcttccaaatttgttaagatggtaatacttaaattgatttacagattcaacacagttcctatcaaaatcttagctggcttttttttt

SEQ ID NO: 680803 - DNA, 581 bp, Homo sapiens
aatgaatgctttgtgtacctctcttaatttgtactagcacgattgtctcattgataacactacaaagatgtatatgcatactctacctcctctaaagagattaaactcaattttagaagtgtaagttcaagttttgaggagttacaaaaaaattatctacgaggggttactgttcccactaaattcttcatgccataaaaggcatcttttctgttaagccatatttgagagtgacttcctaaggactatttcaatcaaattgaaagttcattcttggacaaaataaaatgtgctcacaagcaatgaacaatccaaatattaaattaagaaaacaactccatttacaatagcatcaaaaaattcttagtatttaacaaaggaactatataggcttacacactgaaaactacaaaacaccaatgaaagaaactgaagaagacctawttattataggaaaatatctcaaatttatggattggaagatactgctaagatcttccaaatttgttaagatggtaatacttaaattgatttacagattcaacacagttcctatcaaaatcttagctggcttttttttt

SEQ ID NO: 680804 - DNA, 581 bp, Homo sapiens
aatgaatgctttgtgtacctctcttaatttgtactagcacgattgtctcattgataacactacaaagatgtatatgcatactctacctcctctaaagagattaaactcaattttagaagtgtaagttcaagttttgaggagttacaaaaaaattatctacgaggggttactgttcccactaaattcttcatgccataaaaggcatcttttctgttaagccatatttgagagtgacttcctaaggactatttcaatcaaattgaaagttcattcttggacaaaataaaatgtgctcacaagcaatgaacaatccaaatattaaattaagaaaacaactccatttacaatagcatcaaaaaattcttagtatttaacaaaggaactatataggcttacacactgaaaactacaaaacaccaatgaaagaaactgaagaagacctatwtattataggaaaatatctcaaatttatggattggaagatactgctaagatcttccaaatttgttaagatggtaatacttaaattgatttacagattcaacacagttcctatcaaaatcttagctggcttttttttt

SEQ ID NO: 680805 - DNA, 581 bp, Homo sapiens
aatgaatgctttgtgtacctctcttaatttgtactagcacgattgtctcattgataacactacaaagatgtatatgcatactctacctcctctaaagagattaaactcaattttagaagtgtaagttcaagttttgaggagttacaaaaaaattatctacgaggggttactgttcccactaaattcttcatgccataaaaggcatcttttctgttaagccatatttgagagtgacttcctaaggactatttcaatcaaattgaaagttcattcttggacaaaataaaatgtgctcacaagcaatgaacaatccaaatattaaattaagaaaacaactccatttacaatagcatcaaaaaattcttagtatttaacaaaggaactatataggcttacacactgaaaactacaaaacaccaatgaaagaaactgaagaagacctatttatwataggaaaatatctcaaatttatggattggaagatactgctaagatcttccaaatttgttaagatggtaatacttaaattgatttacagattcaacacagttcctatcaaaatcttagctggcttttttttt

SEQ ID NO: 680806 - DNA, 1208 bp, Homo sapiens
tattaatttctttgctcctctgttctgtatctttgctggaaagcaactgagctagaaacctaggagtctttttctaatgttttatctctctcttagcctctgtaggcaatctatcatcaaattccattgactctgcttttcctatatatccctggaatctcttcccccattccactcccattgccatcattctaattcaggctcaagtcatttcttaccaggcctatttaattaatctcttggcctcagggcttgttaaacaacaatccctatcttgctaccaaactgatctataaaagcaaaactactcaccttaaaaacaccccaggggctccctgctgctacaaggtaaagcccaaatgcctcaataacacattaatctttcagccctttgtgagctggtctttgcccacatcttcagcttcaygtgccactaatccccaccttctaccacagcaccccatgaccccgaaacgttttccaggaagtccatcttacagggctgtgaatttcttgagataaggagttgtagcttcttaatcattatgtgtacaatttggcaattagggcattcaacaagcttttgtgaaatgagaaaatgtcatttttcatgttctatagagtcttcatattcataattttgaatggctgtgtgatagttgaccaaattgattgccatagtttgataaaacattttgcaatttttagttatttgttttgttttgttttgttttgttttgttttgtttctggagacagagtcacactcttgttgcccaggctgtagtgcagtggcatgatcttggctcactgcaacctcagcctcttaggttcaagtgattctgctgcctcagccttctgagtagctgagattacagacatgtgccaccacgcctggctaatttttgtatttttagtagagacggggtttcaccatgttggccaagctggtctcgaactcccgacctcaagtgatccgcccacctcagtctcccaaagtgctgggattacaagcatgagccactgtgcctggccacaatttttagttatttaagtatactgatagtgatagttgactttatgtgtcatcttagctagaccgtggtacctagatgtttggtcaaactttattctagaagtttctatgaacatatttttagatgaaattaatatttaaattagtaggctgagttaagcaaattaccctcc

SEQ ID NO: 680807 - DNA, 1208 bp, Homo sapiens
tattaatttctttgctcctctgttctgtatctttgctggaaagcaactgagctagaaacctaggagtctttttctaatgttttatctctctcttagcctctgtaggcaatctatcatcaaattccattgactctgcttttcctatatatccctggaatctcttcccccattccactcccattgccatcattctaattcaggctcaagtcatttcttaccaggcctatttaattaatctcttggcctcagggcttgttaaacaacaatccctatcttgctaccaaactgatctataaaagcaaaactactcaccttaaaaacaccccaggggctccctgctgctacaaggtaaagcccaaatgcctcaataacacattaatctttcagccctttgtgagctggtctttgcccacatcttcagcttcacgtgccactaatccccaccttctaccacagcaccccatgaccccgaaacgttttccaggaagtccatcttacagggctgtgaatttcttgagataaggagttgtagcttcttaatcattatgtgtacaatttggcaattagggcattcaacaagcttttgtgaaatgagaaaatgtcatttttcatgttctatagagtcttcatattcataattttgaatggctgtgtgatagttgaccaaattgattgccatagtttgataaaacattttgcaatttttagttatttgttttgttttgttttgttttgttttgttttgtttctggagacagagtcacactcttgttgcccaggctgtagtgcagtggcatgatcttggctcactgcaacctcagcctcttaggttcaagtgattctgctgcctcagccttctgagtagctgagattacagacawgtgccaccacgcctggctaatttttgtatttttagtagagacggggtttcaccatgttggccaagctggtctcgaactcccgacctcaagtgatccgcccacctcagtctcccaaagtgctgggattacaagcatgagccactgtgcctggccacaatttttagttatttaagtatactgatagtgatagttgactttatgtgtcatcttagctagaccgtggtacctagatgtttggtcaaactttattctagaagtttctatgaacatatttttagatgaaattaatatttaaattagtaggctgagttaagcaaattaccctcc

SEQ ID NO: 680808 - DNA, 1208 bp, Homo sapiens
tattaatttctttgctcctctgttctgtatctttgctggaaagcaactgagctagaaacctaggagtctttttctaatgttttatctctctcttagcctctgtaggcaatctatcatcaaattccattgactctgcttttcctatatatccctggaatctcttcccccattccactcccattgccatcattctaattcaggctcaagtcatttcttaccaggcctatttaattaatctcttggcctcagggcttgttaaacaacaatccctatcttgctaccaaactgatctataaaagcaaaactactcaccttaaaaacaccccaggggctccctgctgctacaaggtaaagcccaaatgcctcaataacacattaatctttcagccctttgtgagctggtctttgcccacatcttcagcttcacgtgccactaatccccaccttctaccacagcaccccatgaccccgaaacgttttccaggaagtccatcttacagggctgtgaatttcttgagataaggagttgtagcttcttaatcattatgtgtacaatttggcaattagggcattcaacaagcttttgtgaaatgagaaaatgtcatttttcatgttctatagagtcttcatattcataattttgaatggctgtgtgatagttgaccaaattgattgccatagtttgataaaacattttgcaatttttagttatttgttttgttttgttttgttttgttttgttttgtttctggagacagagtcacactcttgttgcccaggctgtagtgcagtggcatgatcttggctcactgcaacctcagcctcttaggttcaagtgattctgctgcctcagccttctgagtagctgagattacagacatgtgccaccacgcctggctaatttttgtatttttagtagagacggggtttcaccatgttggccaagctggtctcgaactcccgacctcaagtgatccgcccacctcagtctcccaaagtgctgggattacaagcatgagccactgtgcctgsccacaatttttagttatttaagtatactgatagtgatagttgactttatgtgtcatcttagctagaccgtggtacctagatgtttggtcaaactttattctagaagtttctatgaacatatttttagatgaaattaatatttaaattagtaggctgagttaagcaaattaccctcc

SEQ ID NO: 680809 - DNA, 576 bp, Homo sapiens
cacaagagggttattcacaagagggtttttattaagctaggcttggaagtgaaacatttatttttactgccaatccattcagtacactcagtcataaagccaccctcactgaagaggttctggaaaatggagtccagctgcatacccaggaagattttgtatccccatggattgtggtgagtcgttatcagtcgttaccagggtatgaaacctgctgtgctcagtggtagaaacatggactctagagtgagacacactcatgtcactatcatatccagcaaggtacttacactttctgatcctgagttttctyattttcccaacgcaacatagaaataagtatattgtagggcagttgtaaggtttaatttacataaatatgtgcaacttcatggcatagagtgggtttatcatacatgttaaattcctttataatttttctgtcacatttttggtaaatgtgtgtttatattttgatttttttcaatttacacttatgttctttttcccttttatttttagttgacacataagaatgacatatttatgggatgcagagtgatattttgataagtg

SEQ ID NO: 680810 - DNA, 576 bp, Homo sapiens
cacaagagggttattcacaagagggtttttattaagctaggcttggaagtgaaacatttatttttactgccaatccattcagtacactcagtcataaagccaccctcactgaagaggttctggaaaatggagtccagctgcatacccaggaagattttgtatccccatggattgtggtgagtcgttatcagtcgttaccagggtatgaaacctgctgtgctcagtggtagaaacatggactctagagtgagacacactcatgtcactatcatatccagcaaggtacttacactttctgatcctgagttttcttattttcccaacgcaacatagaaataagtatattgtagggcagttgtaaggtttaatttacataaatatgtgcaasttcatggcatagagtgggtttatcatacatgttaaattcctttataatttttctgtcacatttttggtaaatgtgtgtttatattttgatttttttcaatttacacttatgttctttttcccttttatttttagttgacacataagaatgacatatttatgggatgcagagtgatattttgataagtg

SEQ ID NO: 680811 - DNA, 589 bp, Homo sapiens
gtttctaaacactattctccattaaaaggaaccagagctgtttagagatataactgattccagagctgggatgagtcgggaacaatgtattgtactggaaagcaagtaagtactcaaacattaatggggtcatgatagtaggacacttcagctggcttttgatgtggcacacgctggctaaatttggaacgaggttggcagcaaaaagagtaatgatggtcatggattttatcacgctgaacagaataatcctgaaggcaggatgttctgcaggaccacatgccttgactcgtcaaagaagtcagtgtcatgaaaaacagtgaggcagtggtattgtactggtttgaagaaggctcaggagggcccacagaatcattagaaatgtaagyatataaaggtcatgcagaaaggcacaaggggatcagcccaccataaaaaaaaaaaatcaccagttcatctaaaaaaaagcaaaacttatcaaggttacctaggttacatagtgtaaatacaactttccatcatgactaacatacaggccaggtgtcgtgttcatgggtgtaatcacagtgctttgggagtctgaggcagg

SEQ ID NO: 680812 - DNA, 545 bp, Homo sapiens
aaaattcaatatgtcctttatgttagtgaatgctaytgaattactttgatcaaataattttccccttcttaactctgagcccaagacaacgaaggagttggtttctgtagaatactcttgtccttggaactgacacgccgaagtatttaggggtgaattatcatgattttgcatcctattctcaatgatttggggaaaggaaaatgttagctggagcaagtgtcataagatctaatgatttcaggaaaggaatatatgagcattcattttattcttttttcaacttttctatgagttggaatgtttttacaatttaaaaaatcacagaaataaaggcaaaataaattttataatggcaataaaaatatagatgaataaaaacaaaattatcaataaattttggtataagctttctatagaaaaaaattaattctgatgaaaatacaaaaaaatcggaaaaaggtttaagtgctatataaaaatttttgagtgattaaattgaattatagagaatcatgaaagtcttcaatgttggcatgatttca

SEQ ID NO: 680813 - DNA, 545 bp, Homo sapiens
aaaattcaatatgtcctttatgttagtgaatgctactgaattactttgatcaaataattttccccttcttaactctgagcccaagacaacgaaggagttggtttctgtagaatactcttgtccttggaactgacacgccgaagtatttaggggtgaattatcatgattttgcatcctattctcaatgatttggggaaaggaaaatgttagctggagcaagtgtcataagatctaatgatttcaggaaaggaatatatgagcattcattttattcttttttcaacttttctatgagttggaatgtttttacaatttaaaaaatcacagaaataaaggcaaaataaattttataatggcaataaaaatatagatgaataaaaacaaaattatcaataaattttggtataagctttctayagaaaaaaattaattctgatgaaaatacaaaaaaatcggaaaaaggtttaagtgctatataaaaatttttgagtgattaaattgaattatagagaatcatgaaagtcttcaatgttggcatgatttca

SEQ ID NO: 680814 - DNA, 655 bp, Homo sapiens
gtgagggacaaaaaatcatctgttgggtaaaatgtacactattcaggtgatgggtagactaaaatccgagacttcaccactataaaattcacccatgtaaccaaaaaccacttgtacccctaaagctattgaaatttttaaaataataaaaaggaaagagaagcaggagaagacagtaagtgaaggagccaaggttccacccaaagattaaaataaaagcccagacattaaaagttttttcaaaaagagcaatccaggttttggagttgacaaaccgcttttgaatactagccatagtggccttcagcaagcctcagttactttatctattaagtagaaataatatttacttcctaaacttttaaagttttcattttcaataactgtattgagatataattcacacagtataaaatgcacacatttaaagaacacagctcaatggtttttaggacaggtatattgcagatactgcaagttgggttcctgaccaccgcaataaagcaagtatcatagtaaagcaagtcacacmaactttttggtttcccagtgcatatgaaagttacatttgcactatactgtagcctattaagtgtgcaatagcattatgtttaaaaagatgtacaaaccttaatttaaaaatactttattgcta

SEQ ID NO: 680815 - DNA, 662 bp, Homo sapiens
gcccaggaggtggaggttgcagtaagccgagatcacactacagcactccagccagggtgacagagtgagaccctggctcaaaaaaaaaccattcaagagcgtttcttcgtaatatgcgtaagcatttgctgagtttaggagcaaagcctagctgtgcctgagaggagaaaattacaatttagtaaaatttacactgtttagaagagagagtacattttaaagacactacacagagagagctccaaatgttaaactccccagcctggtgtttgcttgccttattttaattgtgggtttcatatctagctacatggtctkgtcttgtctttttttgtcccccctttttttgagatggagtcttgctctgttgcccaggctggagtgcagtggtgcgatctctgctcactgcaacctccgccccccaggttcaagcaattctcctgcctcagcctcacagggattgcctcagctgggattacaggcatttgccaccacgtccagctaatttttgtatttttagtagagatggggtttctccgtgttggccaggctggtctctaatgtctgacctcaggtgatccctccgcctcggcctcccaaagtgctacagtcttttcaaaagacgtttcagatatgttctccgggaccctcgggcccttcag

SEQ ID NO: 680816 - DNA, 576 bp, Homo sapiens
cacttatatagtaaaataccttaagttggataattggtttcaacaattgggtgctacctgcaatttgatagtgattagctgaaatgggtgatatttatacatgcagtatattatggaattatggaggaacattctcagataaaaatatgtaaacttttcttgcaaattttgaatgcaaaggtgaagcccccactttaccccttataatacacgtcccagatacttgtcttacaacagtatcctctgttttcaggaccgcaagctctgtagaaggtatgtaattgttatgtccctgactgcacgctcattttttttcttttttyttttttttttcaagagacagggtcttgctttgtctcctaggctggagtgcagaagcactatcatagctcactatagcctcaaactcctgggttgaagcaaccttcccgccttactgcctgctgagctgggactacaggggtgtgccaccacacctggctaagtttaaaaaaaaaattttgtagaaatgggatcttgctgtgttacccaggctggtctcacactcttggcctaaagcaattctccaactttggc

SEQ ID NO: 680817 - DNA, 1929 bp, Homo sapiens
tgacccatcccagtggccagccgtgtacaaggcaggggacaaggtgagggctgtgaagagggcatagggggagaggggagaaggtcgttgctggccgggggagtgaccctgtccctgccttccccaggactgcctggccaaggagtcagtgatccggccggagaacaaccaggtcatcaacctcaccacccagtatgcctggtccggctgtcaggtgcaggctcagcctgggggagtgggcaggtgctgaaggatgaagccttcggggcatcaaggacaggcttcagccttctcgtttgtccccaggtggtatcagaggagggaacccgctacctgagctgctccagtggccgcagcttccgctcagtgcgtgaacggtggtggtatattgcgctcagcaagtgtggggtaaggggctggggtggccacctggaccaccttctctttgccttcctgccaacccccaacttgcccagggccccccttaggcctccctaccccccacagggtgatggattgcagctggagtatgagatggtcctcaccaatggcaagtccttctggacacgacacttctccgctgatgagtttggtgagcacgtggggacctagaaaccaggctctctgtgggacaccagagctgggtgcccactgaggggacatccacctgaatgaaccttactcctcctaccaaatcggcagggatcctggagacagatgtgaccttcctcctcatcttcatcctcatcttcttcctctcttgttactttggatgtgagtctggcacatggggtgtgggggaagagataggagggagcagggttgggggaggtgagctgctctccctttctgcctgtggacagcctttccctaccttgcttcctagatttgctgaaaggtcgtcagttgctccacacaacttataaaatgttcatggccgcagcaggagtagagggtgaggttccgtgtcccaacttttgggttctgaaagagaaggcacttggggccagacacctgggcctaagaggaatgcctgggggcctggactcctgggtcctgggggaggaggggctgggggcctggactcctgggtccaagggagaagggcctgggggcttcgactcctgggtcctgggggagaaggggctggagccctagttcctgggggaggatgggctggggacctggacccctggttcctgggggaggagggggtgggacctgacacccctgggtccttgagggagtataaaggccggaactaggctggacacggtggctcacacctgtaatcctagcacttggggaggccaaggtgggcggatcacgaggccaggagttcaagaccaacctgaccaacatggtgaaaccctgtctccactaaaaatacaaaaattagctggacatggtggcgtgtgcgtgtaatcccagctactcaggaggctgaggcaggagaattgcttgaacccgggaggtggagattgcagtgagccgagatcacgccactgcattccaacctgggtgacagagagagactctgtctcaaaaaacaaaacaaaacaaaacaaaacaataaaggcctgaactcctgagtctgggggaggaggggctgggagcctggactcctgggtctgagggaggaggagctgggggtctggacccctgggtcctggaggaggagggyctgggggcctgagcccctgggtctgaaggaggagggggtgggggcctggacccctgggtctgaggggggagggggtgagggcctggacccctgggtctgagggggtagggggtgggggcctgggcccctgggtccttggggagcagggttgggggctggactccagattctcctagcaggtgagtcggggtagaaggtctggagtcctaagggaggaggcgggattcagactgcctggatggtag

SEQ ID NO: 680818 - DNA, 590 bp, Homo sapiens
tgccaggatgcaggagggcaggagcatgccaaacagagcaaagggcccgtgcagggcctggaggtggggaactgtagggcgggatgtgtttggggacatgggagtaggaaatagaaaagaagaaagtgaactcgggasagatcgtcccatagctggaggggagaagaggagatggcagaggggtgggacacagtgaggagctgagaagaggccaagggagcccaggggttcaccccagggcacgggctggtgcaggggaatgtgccaaggctgaactcggctccgcctgaccccagagctcaaactctgaaccacttacaaccctgcccattctgataacctggccagaaaggtgaagaggagttcatacgggacccagaccgagggaccctgcctgaggttcacagcccccaggaggaacagaaatggaggacaaaattgggttttcctggtcccagaagggttgctcccctccaggatgctgagcagggcccctgcaatgtgaggggcttggtctgagtgtcacaggagcccagagttcccacccggtccccacatggtcccaagggctggggtgaaggcagctcatg

SEQ ID NO: 680819 - DNA, 590 bp, Homo sapiens
tgccaggatgcaggagggcaggagcatgccaaacagagcaaagggcccgtgcagggcctggaggtggggaactgtagggcgggatgtgtttggggacatgggagtaggaaatagaaaagaagaaagtgaactcgggacagatcgtcccatagctggaggggagaagaggagatggcagaggggtgggacacagtgaggagctgagaagaggccaagggagcccaggggttcaccccagggcacgggctggtgcaggggaatgtgccaaggctgaactcggctccgcctgaccccagagctcaaactctgaaccacttacaaccctgcccattctgataacctggccagaaaggtgaagaggagttcatacgggacccagaccgagggaccctgcctgaggytcacagcccccaggaggaacagaaatggaggacaaaattgggttttcctggtcccagaagggttgctcccctccaggatgctgagcagggcccctgcaatgtgaggggcttggtctgagtgtcacaggagcccagagttcccacccggtccccacatggtcccaagggctggggtgaaggcagctcatg

SEQ ID NO: 680820 - DNA, 1454 bp, Homo sapiens
tgggcttgaatgatcctcctaccttggcctccgaaagtgctgggattacaggttatagtgagctatgattaagcaactgcactccagcctgggcaagatcaagatcccatctcttaaaaaattaaaataaagttaattagtgtctggatatttcacatttatgttatttcatatttcatctttagttacaacatgacaaagaggttctgggattatctacctgtcaaaggcatatatggtaaagttggaatacaatgcttctttattgctaatggctatttgttttcaatataaataattggagaaaagggtcaatagaagctgaactatttcatgaagattttctgtggaccaaattattaaagagaaaatttaaaatggaatttaaacatgccttcatgtctctatttatttatttatttatttattttttaacagacagggactaattatgttgtccaggtaggagtgcaatggctactcacaagcacgatcatagcacaccacaacctcratctcctgggctcaagtgatcctcttgcatcagcctcaggagtagctgggaaccacaggggtgggccaccactcctgactcttatgtctctctctttcattaccaaagtaaatgctctgtcaagaaaacttgggacccgagtttgtgcttccttgggtgaatggcattcagctccacttagtgtagtgcagcggactagagatagaaaatagggagctgacatgaccctcgcactagtttgctgcacaatgttaggaaaaatttcctgactccctgggcactgcttctctccccttgtaacatgaaatgaagaaaacagaactaaacctagctcaaaggattgtaataagggacaattcaggaaatgctttggaaatgcttccaaataagttaactaagcaataacaacttggaagaactgccacatttcctaataggtaaaacatcactgagaactgaaagtgatctcagtgtctacagtcatatcaccctgaacacgcctgattttgtctgaaagtgaactcaatgtagggcacattataaacaagaccacccattcatcattttcagagtccacaatctaatttcatttaaacattcaacaacaggaataccactgaaataaaggccaaacataaaagggtgcttctcggtcttccaccataggagtccctcttgtggcctctgggagcaccagaatccctatgaaacaactgtatttattgtatcaggatgagaatgagaagtgcctcagtcaaaggctgagtgacgaatggggcactggggtactagaacctagatttctatctggacatcaacttcataaaagcctctaaacaatatgaaaatactaatcaaaccaataacaaacaaaatgtaaatatgaattaaaacaaatgtgtttataaatattccactgatagaagggaaacaacaggtc

SEQ ID NO: 680821 - DNA, 587 bp, Homo sapiens
tggagaagtagtaaatcgataggttgggactccgtggaatgagggtaaggggcccagagtggatgtagaaagcagagaggggtgaaagatgcttttgaaggaaggtggcttggttggctttgcgttgatttgacatcctgggatggtagtactcatttttctttctttttttttttttttttgagacggagtctcgctctgtcgcccaggctggagtgcagttgcgcgacctcggctcactgcaacttctgcctcccgccttcaaacagttctcctgactcagcctctggagtagctgggactacaggcasgtgccaccacgcccggctaatttttttgtatttttagttcagatggggtttcaccatgttggccacgctggtctcgaactcctgacctcaagtgatccgcccgcctcggcctcccaaagtgttgggattagaggcgtgagccactgtgcccggccggtagtactcattttcttttgctctttttgaatgatattctagccctcacctccttgcttccaattggtttaccaggattctgtggtatagtagtctaagcagaggaaagtttcgttcctt

SEQ ID NO: 680822 - DNA, 696 bp, Homo sapiens
atgaatcacacttgtaaactcatataacatagaagccagaatagaccaaatacactagagagggaatcaggacccttcatttcatagtgaggagactttagcccagagagcataggtgattcaccaaaggcacacaactaggtaaattaaacttgatttaaaaaatggaccctaactgccagaataaatagasaggtatggtccctgtaatatattttgaggctgtcaaaggttgccttgacagaatggagaatgcttgacaggccaacatttaccaagtgttcttaatgaaggaataccatgttcccctgaaaggaatcatcaattgtagagtattataaaatgactttctcttggcattgttaatcggtataatcaatacattttatctcaatttacagtcttacacatctgggaggggtgcaaaacctggaatacctgcttttccagccttttcaattcataggtgaagaacctgacagagatctaaagagggggaagtataaccaggatattctgacctcagctgctgggctctttattatgggtcacccctcttctttcacagtaaacctcccatttaaaaaatggcccattatgagatttacttattgtccaacttagcactctgaaaacagagagctgtaagaataagtccattgatatgttgaattgcccaaacagtggtactggttg

SEQ ID NO: 680823 - DNA, 696 bp, Homo sapiens
atgaatcacacttgtaaactcatataacatagaagccagaatagaccaaatacactagagagggaatcaggacccttcatttcatagtgaggagactttagcccagagagcataggtgattcaccaaaggcacacaactaggtaaattaaacttgatttaaaaaatggaccctaactgccagaataaatagagaggtatggtccctgtaatatattttgaggctgtcaaaggttgccttgacagaatggagaatgcttgacaggccaacatttaccaagtgttcttaatgaaggaataccatgttcccctgaaaggaatcatcarttgtagagtattataaaatgactttctcttggcattgttaatcggtataatcaatacattttatctcaatttacagtcttacacatctgggaggggtgcaaaacctggaatacctgcttttccagccttttcaattcataggtgaagaacctgacagagatctaaagagggggaagtataaccaggatattctgacctcagctgctgggctctttattatgggtcacccctcttctttcacagtaaacctcccatttaaaaaatggcccattatgagatttacttattgtccaacttagcactctgaaaacagagagctgtaagaataagtccattgatatgttgaattgcccaaacagtggtactggttg

SEQ ID NO: 680824 - DNA, 651 bp, Homo sapiens
tttcaacttttcggtttctcaaagcctcgagcctcttaataaggagcagctaatctggaggcactttcttgttcttatccacaccgaacactctctgccctgtgccatggctgtttccctcgacagtaactgtagaccccgctctttcacataaaatgagcccagtgatttcattttaccttttagaaactatcactgaatggccaggcatggtggctcacgcctgtaatcccagcactttgggaggccraggcaggcaggtgacaaggtcaagagttcgagaccagcctggccaccatggtgaaacactgtctctactaaaaatacaaaaattaggccaggcgcggtggctcacgcctgtaatcccagcactttgggaggctgaggtgggtggatcacgaggtcaggagatcgagaccatcctggctaacatgatgaaaccccgtctctactaacaaaaatacaaaaaattagccgggtgtggtggcgggcgcctgtagtcccagctacttgggaagctgaggcaggagaatggtgtgaacccgggaggcggagcttgcagtgagccgagatggcgccactgcacctccagcctgggtggcaaagcgagactccgtctcaaaataaataaataaatacatacatacataa

SEQ ID NO: 680825 - DNA, 618 bp, Homo sapiens
ggtataatagagagagggaaggataacctatgcattagaagaaacttaaaagccatatcagccaggcactgtggctcatgtaaccccagataggggtgctaaggtgggaggatcaattgagaccaggagttcaagatcagcttgaacaacatagcaagactccatctctaaaaaaaaattaaaaatgcggcagggcacagtggctcacgcctgtaatcccagcactttgggaggctgaggcggacggatcacgaggtcaggagatsgagaccatcctggctaacatggtgaaaccccgtctctactaaaaatacaaaaaaaaaaattagcctggcgtggtggcgggcgcctgtagtcccagctggtcaggaggctgaggcaggagaatggcgtgaacccgggaggcggagcttgtagtgagccgagatcgcgccactgcactccagcccgggcaacagagcaagactccgtctcaaaaataaataaataaataaataaataaataaaaacaaaaatgctttttaattaaaaaaaaggacataaccaattgcaatatggaaactttatttgtatcttaaacaacaaatctttaaaaatgtctgacttatgaaacaaaca

SEQ ID NO: 680826 - DNA, 1305 bp, Homo sapiens
cagtgtatagtgagaccctacaaaagagactctaaaaaaaaaaaatagaattagcctgatgtggcggcacacactagtagtcccagctacttgggaggctgaggcgagaggattgtttaagcccaggagttggaggctgcagtgagctgtgattgggccctgcactccagcctgggtgacaaagtgagaccctgtctctaaaaacaaacaaaaaactcacaaccacctctcttccttatttccctgcccagaagggatcattcaatggaaaaaaatagaacatcctcgtaaactgaggtcgtcttacctcctcacaccccagtaggaagggcccgctcttacccactaccttctgtgaacactctgcccaactccatcccaaatccacggtgcttctcaccaacagcagggcaggagagccgggtgccctgctcctcactccctcttaggatayccgagttctagctcagtctcctgcccactccccacatcgaagcctacttccttctaaaatgccaccaggagatcgctgcacacataaaagctctcaactgctccttgcaaccccaggagtgtgcataggaggcctctcaccagctgggggtcatctgtggggcctacaccaaaccctgtacatgccactcaaactcaagtgctcacctcccctgcccaactccgccaggagagaatctagtattcctgcaaactcctatctctggcccagcatctcttacaaggctttctatctcttgacagacccatcttccctttgaacgccagcatctggcagcgtctaaaccctatggactcaggaaagcctgcgattgttgaaaaattcacagccacatggtcacgttccttggggaggccatttctctctgggtctctgtttccacctcagtaaaagagaaaacgggccaggtgcagtggggcacgcctgtaatcacagaactctggaggccaaggtggaggatcacttgaacccaggagtttgagaccagcctgggcaacacagtgaaaccccatctctaaaacaaaatacaaaaattagctgggtgtagtagtgcatacctgtagtcccagctactcaggaggctgaggtgggagggcctgagcctgggaggtcgaggctgcagtgagcagagattgtgccactgcactccagcctgggcgacagagcaagaccctatctcaaaccacccctttgttccttcagcctgtactgagcacttcctaccagagccactgttgggtcttggcataaaaaagaaaaaatgtagaattgagtaagacgacagctctcaa

SEQ ID NO: 680827 - DNA, 1356 bp, Homo sapiens
ttttcacaataatggaaatgaaagtggtgttccagcctaagtttctggggttctcttctttttgagayggagtctcgctctgtcacccaggctaaagtgcagtgacgtgatctcggctcactgcaacctccgcctcccaggttcaagtgattctcctccctcagcctctcgagtagctgggactacaggcgtccatcaccacgcctggctaattttatgtatttttagtagagacagggttttgccatgttggtcagactagtctcaaactcctgacctcaagtgatcctcctgccttggcctcccaaagtgctgggattacaggcatgagccaccacgcccggcctccagcctcagtttctactgacaacgatgacatggaaaaagtactactggatgcccagcaagaagtctggatggagttgctccacgagttgtcaccgtgacagcccacctcactcacagacacaaggaaccaacagagcttctgaaacacccaaggcattggagagaaaaacagttattagtctgtggaagattatattgacagaaagaaagaaattgaaagcatattgaaggaatactcagattagatatgggattggttaagtgagcaagaaaaaattccccccaatgtttctctttaaagaaccaaagtgcacagctactctcagcatgagaaacacacgcattctgaagaacagatacatattctatccagaatttctagaggtttttcttccatctttgctgctgtctcatctgctggccattggactagggatttatattggaagccatctaacaacatccaccagcatcttttgatgaggaataggaaaccaacgttgttcacatattggaattatatctgagcttgcggcatagctaactgaagagctattatatccgtgggtgggtgactgcatccgttgcatttattagttctgtaaatgccgcatgcctaagttagtaaaatgaaaaaatagggccaggcgcggtgactcacgcctgtaatcccaacactttaagagaccgaggcggacggatcacctgaggttgggagttcgagaccagcctgaccaacatggtgaaaccacctctctactaaaaaaattagccgggcttggtggcgcatgcctgtaatcctagctactcaggaagctgaggcaggagaatcacttgaacctgggaggcagaggttgcggtgagccaagattgcgccattgcactccagtctggggcaacaagagcaaaactccatctcaaaaaaaaaaaaaagaaaaaagaaagaaaagaaaaaataaggtcaggcccggtggctcatgcctgtaatccaagcactttgggaggctg

SEQ ID NO: 680828 - DNA, 1475 bp, Homo sapiens
ttcaaggagtatggaatttaatagaagatgacaacatacatgatcataaatctatctacatgagagtgcctaattgtgagattcctaataaacggcaagatatgttctgaaaatgtgaaacataaatgaggttgaagaaattgtgaaaagtttagcagaggaggaataattcatcaggttctttaaatacaagtaaaggggaaaggaaggaccatttttaagtttagatattccaagggttagtggtgaggttgattatggtatgtcttctcgttgatgagggaggagactggcgaatagtggaaaataaagttaaatagctagggtggggccaaattatgggttttaataaaagccaggcattgaaatttagattggggtggtagaaaaaggaaggctttaaaagtttttgagccaatgaatgacatcatacaagttctatataaacagcagtgatttcaggatgggagagaatggcatcaggaagacccacttgaatgctggtaagtaatgttactaacagtgccattagtaacattaatgttactagggcctggactgatatgctgatggaagtgagaatgaagaataagatgggatgaaagagattttgacaagagttttttaatgaacctgaaacgggaaagggcgagagtaactaacctgcttgccatggacagcaacggggttgctagaagattagctgtgcggaaaaagttatgcatttacctttgggcataatgaaatgcaattgactctccatattcatgggttctgcatccactgattcaaacaactgtggaacaaaattgtcagaaaaaataatacaatgataaaaaatgatacaaataaaaaacaacatggtataccaactatttacatagcatttacatcgtattaagtgttattaagtaatctagagatgatttaaagtatataggaggatgtgtgtaggttacatgcaaatactacactattttataccagtaacttgagcatctatggattttggtatacaagggggatcctggaaccaattccccatgcatatcaaaggatgactgtatgagttatctgtaaaatggtttggttgaaatgtttagaaaacagctagaaatacaagactggctgttggatgaaaaaaacataggactaggaaattcaggtatgctagtctwtttgagtattgcttaaagccatgggaaaagagcttctgtgagttccaaggcagatacaaggactggcattcatgcacagcttctaacagataaatctgaagagttcttagtatgcatgttgactgaaattactttagaagtaatttttctcctggtgataaaaggcatgtaaggctattttaggaaattgaaaaatgcaaaaaggtataaagaaaaagaaaagataatcattaatagtacgttagcaaacaagatttgactaaagatatgactttcctcccgcttgttttcttatgc

SEQ ID NO: 680829 - DNA, 634 bp, Homo sapiens
gatgatttagaattccaaacccataatgtgctgtactgtaactaagaatgttctgtctcccttagtggaggccaagtctgccagtcttgccactgggtgtctattaacagcctccagtgctgggggacccagtggtcaaggtccaggcaggagatgaacttgactatcagtgacctgagtggctcccaagtctcccttggccatgggagaccaaggactagctaaccactgagaacccggtgccacctcccctctccctctgggtctcagtgagggctcatactgaccttggtgacatcrgctgttgtctactgcaggaagggtattccgcctggggatggcagcagcaacagaccacctgctactttcactgactaaaggtctctgctgagggctgccccactgacatgcttctgcctgacttgccttgggcaggggaagggaggctatgggcccaggagtggccaccaccatggcatagaggttcttgtctaacgtgactgtcctaggaatctggtgcactgagagtggggtggccggaacaccactattgttcaccaggtggcccccaaactcctggaacagggtgcttctgggtgccttgaaggggtacacaccctcattatccgcctca

SEQ ID NO: 680830 - DNA, 633 bp, Homo sapiens
ttttcatggaatatctttgtctgttcactttcaatctagttgtgtctttgaatgtaaagtgagactttgkagatagcaaatctacaaagctgatcatgtgtttctatgatcatgtgttggatcatgtgtttttatccattctgccaatctctgtttttttattggagacttcaatccatttatgtagaatcttctaattcctctctctctctctctctctcccctacattgaatttgctgacttttgtgctgctgttgagataaaatgcactgctgatgcatggtattgctaatccaaaactacttgggtattttgtttttcttatacaattcagccagttctagctaaaatgcaaaaattgaaaatttaaccctaaactcatttgaaactgaaggtgaaaaaaatatatgaaaagagttttgtgggtttttttaaatcaaattgccatggaaactgcttttttcaaaactttgtttcatagccttcattacattaccctctggggcaaatgaaatttagccatctgaacaggttccagttttgtcaggaatacaatttgaatccagccatctttggtaaaccagtgagtttatattaccatctcatgacaaaattatagaatgaaagctata

SEQ ID NO: 680831 - DNA, 1428 bp, Homo sapiens
gatatgacctaaagctgctctagagagttgagataataaatcatgtttcctgacaacttctctggcctcwtttgacctccttcaccaggacagtgaattccagcttcattaccgagcttgggtttcatgattcatctggcagaagagcaatgtcccaaacacaggagaatggctaagccctgaaaaaggagacttcatcaggagtgaccctcggcagatacctgaggcagcagaacccacaggaaggaagaaagaaagtcctccaaaccaggtgggaaagactactgcctggcagatgtaaacggaacaaagttgtagggcctgccaatcgagtcttcctaagagactttgtggttgtgagccaagcacccctgactgctgccgcaccaaaagaaagattgtaaaaacagcaaagtatagtagagtaataacaattctcaaccctctcagacccaaagtttgtttttaatacaaatattacataactcctttactgtcttgaaatgaaatacatggctaatataaccaccctcaaatataattttcagaaaatcaatgtagtagcctaactgtaatatcaggttggtacaaaagtaattgcagttcttgccattacttttgcaccaacctaatataatagaaataaataaaagaaaaggagtttataataaagtaatatgtgtttctgtccacagacacttaggcacgaccacgcagagactccatgaaagacccacatgcttaagtctttatgcagaatctatgggaacacacatgcacaaacgcagatgagcgcagctgagtcgcattggcagctcaaataccatgaggagcatagccatcgatgacctaatttgccaaaataatgaacaactcttgttaagattgccacatgatcaaagcacaatcatcccttgctttccatggatgttaccttctcagagcaattaacatatagtaaaatgatgcaaaaagtgctctgtgtttacaagtacaaccaaggtactcagttactctctggattcataagtagaaaaagatttttcacctccttgcatgtctagtgtgatttgtgggatgttctactcatcgatagtagtgcttcctctatcattaaatacgaaagacatcccacacctgaatgcttcccggagctggaattacccttgtagcaaaacaatagtgtagggtttactgttgtaaccaaataaaacttacaagagctctatctgcatatattcattaattcactcaacaaacatttaaaaaatacttatgttgagcaaggaagttattcatttatttaacaaatatttattggatatatgctaagagctaggagttatgtcaagatgtgtaagacttggtcctttctctcaaaggccttatgttctaatattcaagataagttccaaatataaaaataac

SEQ ID NO: 680832 - DNA, 862 bp, Homo sapiens
ttaaagtttgattcaataaaaattgaatgaagcaaaaacaaaaaagtgaagtacataaaaatagttaagaaggtgacatttcattgtcattcatctttgtaaaaggtaggtttttctgcattcaaaatttacttgcattgttttgtttgggtacgatacttcttttcttaagcacacactcacttcattagtttttttaaaaaatttctggtacctatattttctaaatagtgcatattttgtcaagaaaacgtattttctaawtagtgaatattattgaaacttggagaaataaaaagctaaagtaggacaatttaagtggtcaaagaataaaaaagcagttttatcataaaatggttctcttgcacagaatattataggaaagcctccatttcattttcctgaagtaagtttaatagatctgaaatttacattaagctaaggcagaatatttacatagagcttcatccttagtctagtaggcccaggattatatctaggagactggtaacaatgaaatcagttctagcaagagctaatcatcatttctgttaagcaaattttcatttgaaatcactttccagttattgtagaccctgcaagtagatccttagtaccatcagtgtggtaataaatattaaggacactggaacgagtcccacaagatttgtattctagcttttctttgataaaaaaagatgtgtgtttttgggcaactgaactgcaatttcctcatccctatggtgttattctcaaggctaatgtttggagtgcaatagcctgaataaatagtagttattgtgattattaacctcttacagcttagtccctcattcattcattcattcattcattcactttc

SEQ ID NO: 680833 - DNA, 862 bp, Homo sapiens
ttaaagtttgattcaataaaaattgaatgaagcaaaaacaaaaaagtgaagtacataaaaatagttaagaaggtgacatttcattgtcattcatctttgtaaaaggtaggtttttctgcattcaaaatttacttgcattgttttgtttgggtacgatacttcttttcttaagcacacactcacttcattagtttttttaaaaaatttctggtacctatattttctaaatagtgcatattttgtcaagaaaacgtattttctaaatagtgaatattattgaaacttggagaaataaaaagctaaagtaggacaatttaagtggtcaaagaataaaaaagcagttttatcataaaatggttctcttgcacagaatattataggaaagcctccatttcattttcctgaagtaagtttaatagatctgaaatttacattaagctaaggcagaatatttacatagagcttcatccttagtctagtaggcccaggattatatctaggagactggtaacaatgaaatcagttctagcaagagctaatcatcatttctgttaagcaaattttcatttgaartcactttccagttattgtagaccctgcaagtagatccttagtaccatcagtgtggtaataaatattaaggacactggaacgagtcccacaagatttgtattctagcttttctttgataaaaaaagatgtgtgtttttgggcaactgaactgcaatttcctcatccctatggtgttattctcaaggctaatgtttggagtgcaatagcctgaataaatagtagttattgtgattattaacctcttacagcttagtccctcattcattcattcattcattcattcactttc

SEQ ID NO: 680834 - DNA, 585 bp, Homo sapiens
gactgcttgggtttcgcagtcaaggcagctttttatatgtgatgaagctactccgagtttttctaattctttactttggaacaagactttctcttctgattttcctgaaaaaagattcaaatgtcttgatactataaacatgctagaggcaaacaagcatcctaagctgtactttccatttgctaaaacgggataattgtcacataggtgttaagtaatagcagccacccattacccaaatgttcctgaagtttctctatcctcctggagtccataggtttcaatatctctgtaaatagcactgacatctaattggtgatgatcttgctttctctgagtgtgccagctctctctacatagttccattccttgttttccagayagaattttgctacaaggtggggcatgttgtccagtgtactcacatccataatctgttcacacaatgcatggtcaatctcacctcccagatcctttttgtccatttttactttaatgtacaaaatataatgatggtgatgacaatgatggtattgttgacctatatgataatgacaaaccaagctatgctctttttatgttttc

SEQ ID NO: 680835 - DNA, 1045 bp, Homo sapiens
aggtggggcctgagattctgcatttctaataagctcccaggtgatgcaaaagctgccagcacctcattcacactttgacttagcaaggctagaggggataccaagataagtgacagtgatgcttgtcctttagaaaggagattatgcccttgtaaagataatctaaatatccacataccttcactttcattagtgctacagggagcatgtaaactctgaagctatttgagattgggatagatgttgattttactaaacattatacgagacagaccagcataaggtcacatctggctataacaaaatcattcaaggtgttgtaacaagatatacaacttagagaaagcaattagcaatttagaatatgaaaatatagatcatttttaacaaaaaaacaaatatcctggatcagacagataagaatttgtctttcattctgctcctgagtagctctgtaaccttaagcaagtcacttatattctttgaatctcattttcattatctataaattagggcaaataataaccaccgaagaggtgcaaagatgaagtgggatatcgcatatcaattttatgactgtgcctgacatatgatagtccttataaaataccaggtcttccttttcttttttttttattatactttaagttttagggtacatgtgcataacgtgcaggtttgttacatatatatacatgtgccatgttggtgtgctgcacccatcaactcgtcatttaacattaggtatatctcctaatgctatccctcccccctcccccgaccccacaacaggccctggtgtgtgatgttccccttcctgtgtccatgtgttctcattgttcaattcccacctatgagtgagaacgtgcagtgtttcgatagaagattttccttataacattagggtaagagaggatccattttgaatgttatgtttggcacccttaacatcttagagaaacaaaaaaggttatgaaaatagaayaaataacaatgtaggtaataagcaagtatttttgtctaaatgaacactagaccatgagtc

SEQ ID NO: 680836 - DNA, 631 bp, Homo sapiens
cctatcatgattctttccgtcatacatagataagagtctcacacagataagagtctatgtaaatacaggtcctgaatttacatagacattccctcagtcactgaacatgtttagtgagcttatttttatatttgatatgatattagtggttgggattttgagaccacctagaagaagttcacrggttctaccttattttttggttatgtatgctcaagtgttatttccccatccagcctgtaaactaactgaggtgaaggatgtatgagtcatctctgtaatccccacaacatttaagcccattatgtgcctataacagatgcacaatacatattggttgaatacatttactctaggaataatgaaaaaacaaattattttaatataaatttataatacagtgtgattaagttgatagagtgtggcatcttatactccctttgtaaaacggatagtaatatctatcttgaatagttttcttgaagattagaaataaaatatgcaaagtatctggtatatttttaatgtccaatcagtgataactgaattaacaatgataactacacaaaccaaagaacagtatggtattacagtgggtactttctaaattcattttattaagaattttaaa

SEQ ID NO: 680837 - DNA, 1033 bp, Homo sapiens
ccagagagagagagacatgtgaagaacacggggcttgatcagaatttgaacgatggttgtggaagaactggataaacaaaaagggactttccaggccaatgacaaggcaggaggaaaacaacattatccggaatcatttaaatgtacttctaacgctccaagccacttgtaactacatatttgaaaactcaaaatgtaaatctgtatctgtgcatgcataaacaaacaatattattactaccgcacaaaacaaatcctgcattaaatacaattgtcattgctgtcaggaatgtataaacaagataattagaaaacccaaagaatcttatacttataactaagcattaaatctccttatatttttccaagtacaaatgactaaattgcaacccacaacaacccaaataaatgaaggacttttaccttagcattcaccaacatcaccattcatttttgcttccatactgtaagaccaacagattttttaaaaaattacatattgagtagccagtatgaataaggcacctcaaacgtgtaagctgcagcttcttgttcatcagagaagcagagttgtaaataaaagaatctttgtttatgtaagttttaaacctttggttaagtttctttggctctgatggttgcataaagcaggttataatcttgggaacaggttctaagattactgtactcacttggaaccagaggctcctccttgctttttttttttttttttttttttggkggttgttttttcaaacagttaactcttacgtggctttggctccaataccctgttgaaaaacctcagttaatggcactaaactttgctgagcctcaattttctcagattttttctttcgtgattaaggcacctttaacaagtgtcttgtaaatcaaatataatatgttaatgtactcattgagtaaactgacacacatatatttgagcatgagttcaactttcagtgtagctggatatctaagaaaaaatgacaccaaaacgggaataagcttgaaaacagagttgatgcgg

SEQ ID NO: 680838 - DNA, 1708 bp, Homo sapiens
ttgcttaaaacatgtgatgatccatgccattatagcttttggagggtcaactttaggtgattcttctttccttttaggcaggcaggtggagtatagccactcccaaattatagatgagcaatctgagtgtgagggaggctcagttgtgctttgtagttcaagaaactaggaattggaggttacagttaggggaaggaaaatggccccacctcttcagtggggatgcaccgatgatccccttatgccatcctcctgctggcttctccccaccttcaacaactctagtgagcagaggagggtgggcgatggtgggagggttgaggagctgaagctcaagcaacttccctcccccactctgttgtctggaaaatcattcatgccccaagttgccttttgagcaggcttctttttatcctgcctattagtccctgttatgaagtgttaagtattaaaaacataaaaggtcttttccagaaatactgtggtgattgcttacacatgtcccctctctgcctgcccagggaatctgctgtagtattgcgatgtcttaacctcatctgttttctatccgatgctaatagtctcggtgtttaatttcctgaaaagtccygcatcagatttaaaggaaaaggaggaagcatgtctcaccacatctcacctctctcgcccaaccattttctgtcctcccactctctaatttttccttccttccctttaaatggtgatcaccatccattgcctgtgtaagaaaacaggtggtgaccccagcctgtctaggatcattacggagaccaggaacacacagcaagtcataggagagatcagtcagccttctgttacctgcactaatggaagaagtaaattgtggactatttacaatatatatgttgtagatataaaaatatgtatttgtctttggaaagatacgaaattactgttaaccacagcaatgccttttaacaaaaaattttcccatcagaaaatgtttctctttggctgatataatgaagtcagggtccactccacctggtagaataggtgggaactaggaggcagggagagcccagccaggatggaattgcatctccatggataactcccaaagttgatgtcagaaagatgcttcgtgaaggtgaacaagtctttgaaggacaagatgaccctttcttgtggcctttccttgggcttgctggccagtcttggtgatacctagccaggagagaagactggttttaatgtccctgaatgttcgtgaagtcaggactaaaaccttagtgtccaaatcccagctagtgctgtgtggtcatgttgacacagcttcttctgttaagcaagagagattctcacggcagggctagatttgtttctgtagttttagtggtatgtgggtggtgcctacaacatatcctgaaggagaaagagcaaaaacgcccaagtgtgtgctgcatatttatttgttttcattatattataactgtcaagtgttcttcgaggtggttgcaggaagcattttgcttaggtgcaaggaaggacccctgcatttggagctgaaggacatggagaaggcttgggagccgcagtgtagggtggcctctctggggcctgtagggattatttgccatggtgtcccaacctgcccatcctgccagcacctggatgttctccttcactcttccttaccatctgtggctgttcccatgttctcccc

SEQ ID NO: 680839 - DNA, 642 bp, Homo sapiens
tttctgattgtagtagagatgaggtttaagtacttagaaggagttgagctagaaatattttgggaaaaaatacactgaggagaagggagatcattgaaggggagggcacactccttcctctcaaaggcatgatctggaatttgcacatctcgtgttccatagcccagaacttaggcaatggccgctcctaacaggaagaaaggctggagagtatagtggagagtatagtttttcttctggacagctatggaccctgttaaaaccaggagctctaacaccatgagggaggaaactggatagaggggaacaactatcgagctctgtgggacagcacatttagttgatcgtgtactcggtgtagtacataaggggcggcttttggaaaagtgaacctgaagggaatttgcaaatggtctcaggtgatgttttatttaataatgtatttaaaaagtgcttattgagcacctactatgtgccagccactgtgctagcagctgtggatgcgaaagtgaataagacagatatgttttcaccktcatgaagcttacagtccatgggaaagactggcattaaacaaggaagtaattatttatatcatcattttattcagtgacacaaatggtgtgggactgtgtaacagga

SEQ ID NO: 680840 - DNA, 917 bp, Homo sapiens
tgaagatcagataaattgttatttatttaagcttacttcatactagttaagaaactagtagctgtagacaatgtagaagcttaactaacccaggtatttcaattccaatgccagtgtacttttcaacacatccaagttgtcaatactgaacttattatatcaagaatatttaatactataaactaaacacagtacttaaatgctgaaagtttagtcaagagtaatatgcctttcaaagcatccaacagaatacagaaaaccatattggaaaaaggaatgttgtaatatcctcttttttgttgttgtatactggtaaaattggggcttggtgacgttagttgattttcaaaaatagtgatacagattatgataatcaagtgataaaaggtgttacagaggattaaatgaggtcttcgaattatcattagtgtctgtctcttcagccaagtcaacagaaagaaaaaaaaatatgaaaaaaagaaatctgtaaggcagttgctactgttattaccaagagaagatttttagtgtaagaataaggctgtcaggaaaatcactgaggcttcaactgcgtgatgtctgggtttcatcatctttgaggagggatctctgggatatttggtttagcgaacatcttggtgatttgcagacgtgttgaggcattgttaatgggtaccttctgttgggtagaatcccactaaaaatataatcctaattgttattggggtctgtccatttggtacctacaaacttcctcttgtttagaggaactaagaattgatactgtgaggctatttttggagtgaggagttattgagggcaaggggcatattgaakcagtggagacttggactgtcaggatgctgtgcagaatgggcaataaaaatcagagaccaaattatgcaataattcccaga

SEQ ID NO: 680841 - DNA, 625 bp, Homo sapiens
atggataaaagactataaattgggtacagtgtatactgctcagatgatgagtgcaccaaaatctcacaaatcaccagtaaagaacttactcatgtaaccaaacaccatctgttcccccaaaacctgtggaaatacaaaaaatrtaaacaccactgttcatgtaagtgttgaaaacaacaaattgagaatgaatactggtgaacttttttgggagccttcttcaaaatttggacttcgctattccattcattttctattctctgtaacaaattacaacaaatgtaacagcataaaatgatactcatttacaactcattgttctgtaggtcaagagtccagcatggctagattctctactcaggatatcacatggctggaattaaggttttggccaggctgatttcttatctggagtctctgggaagaaatctacttccaaattcattcagattattgggagtatccagttctttgtgactgaatgactcaggtctctatttccttgctaaagtgatacagcaatcactttaagctgtatcactaaagtgcagcccacatgttgcccccttcatcttcaagccagcagtgatgcatttagttcttctcatgcttttaatatctgact

SEQ ID NO: 680842 - DNA, 625 bp, Homo sapiens
atggataaaagactataaattgggtacagtgtatactgctcagatgatgagtgcaccaaaatctcacaaatcaccagtaaagaacttactcatgtaaccaaacaccatctgttcccccaaaacctgtggaaatacaaaaaatgtaaacaccactgttcatgtmagtgttgaaaacaacaaattgagaatgaatactggtgaacttttttgggagccttcttcaaaatttggacttcgctattccattcattttctattctctgtaacaaattacaacaaatgtaacagcataaaatgatactcatttacaactcattgttctgtaggtcaagagtccagcatggctagattctctactcaggatatcacatggctggaattaaggttttggccaggctgatttcttatctggagtctctgggaagaaatctacttccaaattcattcagattattgggagtatccagttctttgtgactgaatgactcaggtctctatttccttgctaaagtgatacagcaatcactttaagctgtatcactaaagtgcagcccacatgttgcccccttcatcttcaagccagcagtgatgcatttagttcttctcatgcttttaatatctgact

SEQ ID NO: 680843 - DNA, 2718 bp, Homo sapiens
gctgggaaagccttttggaaaaaaagatgagtactctaaaaaaatataaatcaagtaactattactggatttatctggctgtatcatttcaaaaattacaaaaatctgattcattcctacaaaggcatgcaacttttgctgctactcttaccgtgttgctactattgactcttgtcaaggtcatgcctgactttcaccagacacacctagtgctgccaggacaggtgtcgtcaaggtggtgaaggcttctctgcctccgacttgctagttgtgtgaccttagcaagtcaatttccctctctgagctttagttttcttttttctaaaatgaggaagttaaattgtatttctaagtttactctaaaattctaagaactaaataagaaacattggttaatgacagggctggcttgagaacacagacttcagcaaggctggggagctggatcccagcagaactgtctcccctgggtaagcaaaccctgggctcttcctcctaccccaaagggaggggtgggctggagcttcctcccttccaccaaagagtctagagggtttcacaccacaacctgctccctgccyctagctccagaccttttgataataggcagtgtttctaggaaaatggatggaactctgctaagggaaacgccaacaacaggcccaggggaagagagaggaagaccccatggaggattcagatgttcttctgggtggaagagccaaaagcgaatgtaccagcgtgttgttagcacacacacacccagcgtgggaagaggagcagctgaggtgaccaggaggtgacggatgctctcactcttcatcacaaaatattcagagaacaccattccagctccttgagatctacggtgtccagagcaaccccagattcctccatcattataaatccctgactaaaagaaagcagccagaagattttcccctgtgaaatggcccaaagtcatcccatcagtctttctcaaaggtgcactgggcgcctttcatcattatcacattataaatgaatttgttaagaaatatgtgtttgctgactacaatgtgccagtcactgtgctggatgcttgggatgtagcaatgaataaacaaacctatcaagattcctgccctcagggagggtacagtctggcaggggagacagacacacaataaagataataaattaaatggcatgttagaaggtgatggaactaaggaaagaaaagaaaggaaaagccatcatttacttcatcattcgcgttttagtttttctttagctccaacatttagaatacccccaaatattttcttcatattataatttcttattctttagtttttttcgttgctagcgtgactacagtattgcttgagactaatttcattctatatgaatacactttatgcattgcgtaatgtggaagtgccttggctctgttcagtgaaacattttctaaattttcctttcaatactaccacaacttgggcagaaagagcattttacagacaaaaagcccaaggttcatggagtctttgaaaagctgagtgtcttgaattttttttttttctcagtattctttttcagacttaagtgggaaatatttttgttttgcttcaatttttttcaaaacaattatttagagcaaacctggctatttgttggcaacttcatttttttttttttttttttttttctgagagggagtctcactctgtcacccaggctagagtgcaatggcacgatctcggctcactgcaatctctgcctcccgggttcaagcaattctcctgcttcagcctcctgagtagctgggattacaggtgcgcaccaccaggcctggctaattttgtatttttagtagagatggggtttcaccatgttggccaggttattcttgaaatggctggtctcgaactcctgatcttgcaatccacccgcctcggcctcccaacgtgctaggattacaggcgtgagccactgtgcccagctggcaacttctaatatagtgattaagtaggttcacacctgatggcatatttccagttccgggaaagtggtggttaaaaagaaatctgcttacattgtgtgctcgattatcaccactgtggttcctgataccaggttatccttacaggccacctgtgatttctttagagagctggcaacctgccctgctcatcatggtggggggacatttttctccacagcataaaattggtgaagtgcaagatctgttttggtttctccctagaccctaatgatactggcagataccagcctgccttctgggatttaacgtcaattgcatcttctggaaatgggttgcatcgtttgatataatctagttaagccttcttcagagggcaaatgggacacatagagacacgcacacacacatagacacacccgcatgtgattcctaaagtgcctggggaatttgtctgtgtacattcagggtatataatttgacaggctataaaggtgaaagttttatctctgaatttctttggtcccctgttcctgccgccagacaatttcctcctaacattgcaatctgtgacaaaacttttgtccctagattggctttctatgaaagctcttggtgccttttaatcagttgctaggtggtctgtatccatggtccaatttcagtattagtacaatcagaacacattagggaaggtaactttacttctgttgtagcaaaaatattcttatgta

SEQ ID NO: 680844 - DNA, 2718 bp, Homo sapiens
gctgggaaagccttttggaaaaaaagatgagtactctaaaaaaatataaatcaagtaactattactggatttatctggctgtatcatttcaaaaattacaaaaatctgattcattcctacaaaggcatgcaacttttgctgctactcttaccgtgttgctactattgactcttgtcaaggtcatgcctgactttcaccagacacacctagtgctgccaggacaggtgtcgtcaaggtggtgaaggcttctctgcctccgacttgctagttgtgtgaccttagcaagtcaatttccctctctgagctttagttttcttttttctaaaatgaggaagttaaattgtatttctaagtttactctaaaattctaagaactaaataagaaacattggttaatgacagggctggcttgagaacacagacttcagcaaggctggggagctggatcccagcagaactgtctcccctgggtaagcaaaccctgggctcttcctcctaccccaaagggaggggtgggctggagcttcctcccttccaccaaagagtctagagggtttcacaccacaacctgctccctgcctctagctccagaccttttgataataggcagtgtttctaggaaaatggatggaactctgctaagggaaacgccaacaacaggcccaggggaagagagaggaagaccccatggaggattcagatgttcttctgggtggaagagccaaaagcgaatgtaccagcgtgttgttagcacacacacacccagcgtgggaagaggagcagctgaggtgaccaggaggtgacggatgctctcactcttcatcacaaaatattcagagaacaccattccagctccttgagatctacggtgtccagagcaaccccagattcctccatcattataaatccctgactaaaagaaagcagccagaagattttcccctgtgaaatggcccaaagtcatcccatcagtctttctcaaaggtgcactgggcgcctttcatcattatcacattataaatgaatttgttaagaaatatgtgyttgctgactacaatgtgccagtcactgtgctggatgcttgggatgtagcaatgaataaacaaacctatcaagattcctgccctcagggagggtacagtctggcaggggagacagacacacaataaagataataaattaaatggcatgttagaaggtgatggaactaaggaaagaaaagaaaggaaaagccatcatttacttcatcattcgcgttttagtttttctttagctccaacatttagaatacccccaaatattttcttcatattataatttcttattctttagtttttttcgttgctagcgtgactacagtattgcttgagactaatttcattctatatgaatacactttatgcattgcgtaatgtggaagtgccttggctctgttcagtgaaacattttctaaattttcctttcaatactaccacaacttgggcagaaagagcattttacagacaaaaagcccaaggttcatggagtctttgaaaagctgagtgtcttgaattttttttttttctcagtattctttttcagacttaagtgggaaatatttttgttttgcttcaatttttttcaaaacaattatttagagcaaacctggctatttgttggcaacttcatttttttttttttttttttttttctgagagggagtctcactctgtcacccaggctagagtgcaatggcacgatctcggctcactgcaatctctgcctcccgggttcaagcaattctcctgcttcagcctcctgagtagctgggattacaggtgcgcaccaccaggcctggctaattttgtatttttagtagagatggggtttcaccatgttggccaggttattcttgaaatggctggtctcgaactcctgatcttgcaatccacccgcctcggcctcccaacgtgctaggattacaggcgtgagccactgtgcccagctggcaacttctaatatagtgattaagtaggttcacacctgatggcatatttccagttccgggaaagtggtggttaaaaagaaatctgcttacattgtgtgctcgattatcaccactgtggttcctgataccaggttatccttacaggccacctgtgatttctttagagagctggcaacctgccctgctcatcatggtggggggacatttttctccacagcataaaattggtgaagtgcaagatctgttttggtttctccctagaccctaatgatactggcagataccagcctgccttctgggatttaacgtcaattgcatcttctggaaatgggttgcatcgtttgatataatctagttaagccttcttcagagggcaaatgggacacatagagacacgcacacacacatagacacacccgcatgtgattcctaaagtgcctggggaatttgtctgtgtacattcagggtatataatttgacaggctataaaggtgaaagttttatctctgaatttctttggtcccctgttcctgccgccagacaatttcctcctaacattgcaatctgtgacaaaacttttgtccctagattggctttctatgaaagctcttggtgccttttaatcagttgctaggtggtctgtatccatggtccaatttcagtattagtacaatcagaacacattagggaaggtaactttacttctgttgtagcaaaaatattcttatgta

SEQ ID NO: 680845 - DNA, 2718 bp, Homo sapiens
gctgggaaagccttttggaaaaaaagatgagtactctaaaaaaatataaatcaagtaactattactggatttatctggctgtatcatttcaaaaattacaaaaatctgattcattcctacaaaggcatgcaacttttgctgctactcttaccgtgttgctactattgactcttgtcaaggtcatgcctgactttcaccagacacacctagtgctgccaggacaggtgtcgtcaaggtggtgaaggcttctctgcctccgacttgctagttgtgtgaccttagcaagtcaatttccctctctgagctttagttttcttttttctaaaatgaggaagttaaattgtatttctaagtttactctaaaattctaagaactaaataagaaacattggttaatgacagggctggcttgagaacacagacttcagcaaggctggggagctggatcccagcagaactgtctcccctgggtaagcaaaccctgggctcttcctcctaccccaaagggaggggtgggctggagcttcctcccttccaccaaagagtctagagggtttcacaccacaacctgctccctgcctctagctccagaccttttgataataggcagtgtttctaggaaaatggatggaactctgctaagggaaacgccaacaacaggcccaggggaagagagaggaagaccccatggaggattcagatgttcttctgggtggaagagccaaaagcgaatgtaccagcgtgttgttagcacacacacacccagcgtgggaagaggagcagctgaggtgaccaggaggtgacggatgctctcactcttcatcacaaaatattcagagaacaccattccagctccttgagatctacggtgtccagagcaaccccagattcctccatcattataaatccctgactaaaagaaagcagccagaagattttcccctgtgaaatggcccaaagtcatcccatcagtctttctcaaaggtgcactgggcgcctttcatcattatcacattataaatgaatttgttaagaaatatgtgtttgctgactacaatgtgccagtcactgtgctggatgcttgggatgtagcaatgaataaacaaacctatcaagattcctgccctcagggagggtrcagtctggcaggggagacagacacacaataaagataataaattaaatggcatgttagaaggtgatggaactaaggaaagaaaagaaaggaaaagccatcatttacttcatcattcgcgttttagtttttctttagctccaacatttagaatacccccaaatattttcttcatattataatttcttattctttagtttttttcgttgctagcgtgactacagtattgcttgagactaatttcattctatatgaatacactttatgcattgcgtaatgtggaagtgccttggctctgttcagtgaaacattttctaaattttcctttcaatactaccacaacttgggcagaaagagcattttacagacaaaaagcccaaggttcatggagtctttgaaaagctgagtgtcttgaattttttttttttctcagtattctttttcagacttaagtgggaaatatttttgttttgcttcaatttttttcaaaacaattatttagagcaaacctggctatttgttggcaacttcatttttttttttttttttttttttctgagagggagtctcactctgtcacccaggctagagtgcaatggcacgatctcggctcactgcaatctctgcctcccgggttcaagcaattctcctgcttcagcctcctgagtagctgggattacaggtgcgcaccaccaggcctggctaattttgtatttttagtagagatggggtttcaccatgttggccaggttattcttgaaatggctggtctcgaactcctgatcttgcaatccacccgcctcggcctcccaacgtgctaggattacaggcgtgagccactgtgcccagctggcaacttctaatatagtgattaagtaggttcacacctgatggcatatttccagttccgggaaagtggtggttaaaaagaaatctgcttacattgtgtgctcgattatcaccactgtggttcctgataccaggttatccttacaggccacctgtgatttctttagagagctggcaacctgccctgctcatcatggtggggggacatttttctccacagcataaaattggtgaagtgcaagatctgttttggtttctccctagaccctaatgatactggcagataccagcctgccttctgggatttaacgtcaattgcatcttctggaaatgggttgcatcgtttgatataatctagttaagccttcttcagagggcaaatgggacacatagagacacgcacacacacatagacacacccgcatgtgattcctaaagtgcctggggaatttgtctgtgtacattcagggtatataatttgacaggctataaaggtgaaagttttatctctgaatttctttggtcccctgttcctgccgccagacaatttcctcctaacattgcaatctgtgacaaaacttttgtccctagattggctttctatgaaagctcttggtgccttttaatcagttgctaggtggtctgtatccatggtccaatttcagtattagtacaatcagaacacattagggaaggtaactttacttctgttgtagcaaaaatattcttatgta

SEQ ID NO: 680846 - DNA, 534 bp, Homo sapiens
ctcttctttgtatttcacatttcatatgctattattttctatagcatgttkgataattagacttctcaaaaatgaaagaaaggtatcaaatgaaaaattttaaaaatgtcctcttaaaatgaaagatagcctacagcctacatttaaatgttaaattttggtagtctccactgtgagaataatacattattttagaaatatttatttcttcaaaataaagtaggttatgtttgttggaaatatttctattcaatatttgatgagacaatttatatgttacatagaacatctattggctaacgtacatttgtccttcaaaaacgttattgaaataatcatcttattctaattttcatacctggttgtgatagcatgaactattagtttcactattttcactaaattgatattctagcaattcgtcatttcgtttgaaaatataagaactagaaatatgtttcatcataaacatattgataataaaagaagaaaggcatggtgtaggttgactctatttccctgacattttgcaca

SEQ ID NO: 680847 - DNA, 552 bp, Homo sapiens
gagccaccgtgcccggccrtaaatgattttttaaaaactgatataatatgataaaagagctgttctgggtgcactagcatacatactacatacatacacacatacatacatacatatgtgcatgaaagagaatagaggaagataacggatttcatagcatggtctacctttacaagacaggttagagcaggtattagggctcctttgtttcaagcaacagaaattaagcctgacttaggctaatggtaatttattggaaaggatcaggagctcacagaatcaatgagaggccagaataccaggctaggaagtaaaggaaaagaaagcagccctggagacaaggtatcagagaccacaacatctgtgcacagcagggccaaagtgtcaggaggctgtgctgaatgcaatgaacactgattgttttcaatttccttgttcccctactcaagaattaaattccactgagggagcatccaactggcctagcttgggtcacgtgcctgtcctcagcactcattgtaaagatttactgtgtctcagtgttccaagcat

SEQ ID NO: 680848 - DNA, 552 bp, Homo sapiens
gagccaccgtgcccggccgtaaatgattttttaaaaactgatataatatgataaaagagctgttctgggtgcactagcatacatactacatacatacacacatacatacatacatatgtgcatgaaagagaatagaggaagataacggatttcatagcatrgtctacctttacaagacaggttagagcaggtattagggctcctttgtttcaagcaacagaaattaagcctgacttaggctaatggtaatttattggaaaggatcaggagctcacagaatcaatgagaggccagaataccaggctaggaagtaaaggaaaagaaagcagccctggagacaaggtatcagagaccacaacatctgtgcacagcagggccaaagtgtcaggaggctgtgctgaatgcaatgaacactgattgttttcaatttccttgttcccctactcaagaattaaattccactgagggagcatccaactggcctagcttgggtcacgtgcctgtcctcagcactcattgtaaagatttactgtgtctcagtgttccaagcat

SEQ ID NO: 680849 - DNA, 961 bp, Homo sapiens
cctaattttcccctgtctcagcggcttcatgctctatactctttaactgccaactgcatcatggatactaataggccttcttcagttcacattccagggacaaatttctttagaactagacttctgccttccagtttaaaattgcttccattttctcattaaaataccttttaaaacaggggaaagacaggaaactcacactactgtaaactaaaattgacaagtagagaatataagggtctaagatgaatctctattgactaatgaggctggtggtgaggtctgtctagaaaattccactcacagggtactccttcaaagtatctcccctctccggtttcctggcaactcaccaggaaaagtgtttytaagccactattcacctttaaaagatgcagaattgattctttatatattcaacgaaaaaagacaaatgacgaaaaacgtatttgtttagcaaaatgttcacaaattattgttattattttacaaatgacatattttcaactgcaggagaacattggagttgttctttttatttatttttattttttatcatcatcatcatcatcatcaatattatgactagagacagagtctcgctctgttgcccaggctggagtggaatggtgcaaatcatggctcactgcagcctggaagtcctgagctccagtgatgctcctgcatcagcctccttagtatttgggatcacaggcgtgtgccaccatgccccacccggttaatttttaaattacttgtagagacagaggtctcactatgttgcccaatctggtctctaactcctgagctcaagcgatctatccgcctcagcctcccaaagtgctgggattacagatgtgagccatcgcggcccggccagagttgtttttaaatataggagtacttctaagtctcagcaaccttttaggtcttaagagccttccatggggaaaaagacttc

SEQ ID NO: 680850 - DNA, 635 bp, Homo sapiens
cccgccattacttagcttgtttttgttatataagttgcttactgccccagagtcttgtatctggggtsgcaagatttagagcttctccaacttctcctgtaggtaatattactattgtaaaacctgaagaactggtctttgagacatttttcagatttagcatttcaggagaccaagagatgccacttcgtcctgagaccgcttcccaggaaatgacctggctgtgtgaaaatggttttagacacccctgcaatttcatccccagccaatccgttgtttcagttctccagccccctgcctgccaaagtagtagttaaaaaactctagcctctgaactcttggggggatgagtttgaaaagtgtctgtcgttctcctcacttggctggccctgcaattattaaactctttgctgcaacacctgctgttctcattgtttttttcagggcagcaggcaagaagaacccctcgggctatgacaaatagggtacaactctatttatgtaggccttaatttttttcagcaatgttttacagttttcagtgtagaggacttacgtgtctttcgttacatttgtcctgaagtgctttattttttgatgcttttataactgaagttattgtgaaaaatttattt

SEQ ID NO: 680851 - DNA, 635 bp, Homo sapiens
cccgccattacttagcttgtttttgttatataagttgcttactgccccagagtcttgtatctggggtcgcaagatttagagcttctccaacttctcctgtaggtaatattactattgtaaaacctgaagaactggtctttgagacatttttcagatttagcatttcaggagaccaagagatgccacttcgtcctgagaccgcttcccaggaaatgacytggctgtgtgaaaatggttttagacacccctgcaatttcatccccagccaatccgttgtttcagttctccagccccctgcctgccaaagtagtagttaaaaaactctagcctctgaactcttggggggatgagtttgaaaagtgtctgtcgttctcctcacttggctggccctgcaattattaaactctttgctgcaacacctgctgttctcattgtttttttcagggcagcaggcaagaagaacccctcgggctatgacaaatagggtacaactctatttatgtaggccttaatttttttcagcaatgttttacagttttcagtgtagaggacttacgtgtctttcgttacatttgtcctgaagtgctttattttttgatgcttttataactgaagttattgtgaaaaatttattt

SEQ ID NO: 680852 - DNA, 660 bp, Homo sapiens
tctttccttagaacaacattaaagagcaaatatgaaacaccgtggcaagttcaaaaagagatcagggaaaacaggaaacagctttttctatttcactacttttaacagcatgtttgcccctgcttttaaaaagggggacctgcattccatttgcattgggccttcwaattatgtagtcaagagctataggagggccgggtgcagtggctcatgtctgtaatcccagcactttgggaggccgaggtaggcagatcacctgaggtcaggagtttgagaccagcctggccaccatggcaaaactctatctctactattaaaaatacaaaagttagccaggcatactggcaggcacctgtaatcccagctactcaggaggctgaggcaggagaatcgcttaaacctggaaggcagaggttgcagtgagccaagatcacaccactgcactccagcctgggcaacagagtgagactccatctcaaaaaaaaaaaaaaaaaaaaaacaactctaggaaatgctgtttctactcaggtgctctaaactttgctcttctccaactcctaagtctggatctttctgattttacctcttaataactttacattcatatagaaaacaaatgttgtataatcacaatgctcaggtatgcaaaaattcacattt

SEQ ID NO: 680853 - DNA, 663 bp, Homo sapiens
cactgtttccctaagagaaaacgtgctcgtttcctcacccatcagccgctgctactgatgtaagggcgagtcagacttgcatgccccccctccacatacgactggcctgccgtgctcaggagaaatggtaagagaaattgccgttctcaactgaatacgtaatgactagaaatctgtttagagaaaggcactcaaaagataactgcttcaaaacaaacaaggtttgttttatggaaaagatctgataaacacctgactcagaggagcacaaatatttcgcttcagaccacagacgcaaccccacctgtttcctagacgtttctagaaagttcacaccaatcgatgggcatcatcgctttcctaggcacgtctgatcggctgcacttggtagctgtgatgttctgcttttggtcctgactcagtgcagagaaatttctgcttcccctaagctgatctgcagttgggaaacaggctgccacacctagacctgctgaccaagccttaccgtgttaccttacaccttgaggagccactgggaactaaatkgtaaaataagaacggactgttacacagaacagagctaaacactcaggaatgggaatagatcgttaaacccagcatcaggtgccccaccccactcaccagcaaactgtagcaaggatc

SEQ ID NO: 680854 - DNA, 1544 bp, Homo sapiens
aaaggaaaagctttgcttctcacatccagtattgtggagtcaatcgtattccccaaaatatgtgctgaagtctgaatccctggtacttgtgaatgtgaccttatttggaaacagggtctttagagatgtaatcaaattaagataaacccctcctggcttagaatgggccttaaatccaatgactggtatccttgcaaggagagggaatgggagacacacagacatacagggggaaagaccgtgtgaagacggcagcagagactggagggacgctgccacaaccaacaaatgccaaggactgcctgcaaccacaagaagctagaaragccaaggaaggattctcccctagagacttcagagaaatgatggctctgccaacatctagatttcagactttagtcctgtaaaactgtaagacaatacatgtctgtcgctataagccacccagcttgcagcagtgtgttatggaagtcctacaacacgaatgcacccagggatacatgtggggaagctcaggaataaaaaaagagaaatgcctgagctcagtggcaccaatgagatcacggtgaacacgaagatattcagaactggccccaaagaggcctcccattagggccacactgaggttaccaataaagcccaaccaggcaggatgtgctcaggacgtatctgtcctcctgaagtttccaggcagtgtcagccacgagaaaggtgtctccaagagccttaccaaggcaacagaagaactgagatgagagaagttgaacgcccagagaggttgggaacagggaggaggctcaaacagctgtgtgcccagacagccacgtcgcatcatagtctgctccaaggaggggggctgactatccccaaatagttcccctccagcctgccactaaattgttgtttatttctaaaatgccttagctaagaagcacataaaccactctccactggtgccatgactcttccccactgggacccaggagctggagcaggacctagtagagactagacactccatagcaatgagctgaatgactgcactgtgaaggaatgcatgatttggtaaaagcagagagaagagaggagccccctttagatcccagaaagttaagcggaggagagtcgagggctgcaggaagcacagcagagaggggcttctggaaatggtgagcagaatgggtgccttggagggcggctctgaaatgccagggtcacttagtgacccggaatttgctaaccctccagccttctctcactcccttctcttacgttttatgcccaattcctaattgtttccagttgtctgcacttgccttgctattttgggcatcaggcctttgcgcatgctgttccctgagcctggaaggttgtcctgttgcattctccaataccattgcttgtcatcccctcctctaggaagccctcctggataaccccatccagtgcctacttgcacatcccatggtattgcaacaacctggggccttccagggctccctctttagctcacctctataacttcagaaactgagacaaactcc

SEQ ID NO: 680855 - DNA, 2446 bp, Homo sapiens
ctttggccaaattagagcagagtgtccagggctggggatggtggtcctgcctccctactctgtctctggctgtcctctgggatatttcttattccaggcacactttctttctgtgcctttctgtgggttgagtttctgtgggttgagtcagggactcaacctttctgtgggttgctttctgtgggttgagtcagggacaggtttcctgccagtgaacccacgatgatggagaagctggctggccatctcgatctcactttttccagtgaagaatgcatgagtcagcgagttttctgcacgcttggtgtggggcagatttgagggaggggcatgatggatatagaagtctgagtctcagccaggcacagtggctcacacctgtaatctcagcactttgggaggccgaggcaggcagatcacctgaggtaaggagttcaagaccagcctggccaacatggtgaaatctgtctctactaaaaatacaaaaattacccacgcgtggtggcgcacacttgtaaccccagctactcaggaagctgaggcaggagaattgcttgaacccgggaagtacaggttgcagtgagccactgcactccaacctgggcaatagagcgagaccccgtctttaaaaaaaattttctttaagtctgattctcttgacartgtctcaaagtttttttcatatgtggccccaggaactctcatcttcatatttgagttctggaacattgctggtgatgatcttggtgctatgtgtttcttttcagttttctgttggggaagtaaagccagcttgcttccgcagcaccattttagaacccctagtaaaattttcgattgagaaatattctgcaaatgtttttatattttacctccttttcagtgatcaccattctctagccatgtgattgacaaggactttctcatagttctatacccttcaccacatcattcactcttcctcccgtaacattatttctagtcagtcacctacaaccctctcctctgtttcttcaaatctcaatgtaccttttcttttcttttcttttcttttttctgagacggaatctcactctgttacccaggctggagtgcagtggtgtgatcttggctcactgaaacctatgcctcctgggttcaaatgattctcccgcttcagcctcccgagtaactaggattacaggcacccgccaccacgcccggctaatttttttgagatgaagtcttgctgggtcacccaggctggagtgcagtggcgcgttctcagctcactgcaacttctgcatcccaggttcaagcaattttcctgcctcagcctcccgactagctgggattgcaagcgcccgccaccatgccacgcgctcagctaatttttgtatttttagtagagacggaatttcatcatgttggccaggctggtctcaaactcctgacttcctgatccgcccactttggcctcccaaaatgctgggattacaggcgtgagccaccatgcctggccaatttttacatttttagtagagacagagtttcaccatgttggccaggctggtctcgaactcctgacctcaagtgatctgcccacctcagcctcccaaagtgctgggattgcaggtgtgagtcaccacaccccaccaatgtaccttttctttaaaatataaatttaattgctattcctgcatgtaattattctcagtctggcttcatgcaacaggaagaccccctagcctgagagctaaaaacttctaacttctttaccaagcacaccatctggctctctttatcctgggctctgccactgactacctgtgtggcatgagtcacaaaatttctctatcagagcctcagtgttgtagtttggttgtgtagtggtggtggtttggtttagttttgttaatgccaaaactatttcaaaaatctgatgagacttatgaactctctttccagagaaaagcacactcacacaaacatttttcaaattatttccaagtgtttacaaacttcctagagcctatctatggacttcagtttaacaatccttggactggcctcccatccttttaattaaatagctctctctggctctaactctaattcctcttagaaataaaaatagaaaagaaacaatttctatctctgctaagagctcacctctcagaaaaatggcgctgacatctctcagccacattctgaaaatcaggattctggaaagtcctgtgttctaagataagtggtctaggcaggccgggcgcggtggctcacgcctgtaatcccagcactgtgggaggccgaggcgggtggatcaggaggtcaggagatcgagaccatcttggctaacactgtgaaaccccatctctactaaaaatacaaaaattagccaggcatgatggcgtgcgcctgtagtcccagctactcaggaggctgaggcaggagaattggtgtgaac

SEQ ID NO: 680856 - DNA, 2061 bp, Homo sapiens
tgatgtttcccgtcccctctctccctttacagaagcaattacttgggccaggcacagtggctcacgcctgtaatcccagcactttgggaggccgagatgggtggatcacttgaggtcaggagttcgagaccagcctggccaacacggtgaaaccccgtgtctactaaaaatacaaaaaattagctgggcatggaggcgggcacctgtaatcccagctacttgggagactgaggcagaagaatcacttgaacccgggaggcggaggttgcagtgagccgagatcatgccactgcactccagcctgagcaacagagtgagactccctctcaaaaacaaaaaaaaaaaaaagaagaagagctcttggaataagagctgggccgtccaccacacgtgtgttcgtgtgcacacgcacacacacaaacactcggcagttccacttaaccrttctcaagtcagagcaactggtggctcttgaggccaggccatcagcatggggaggacaatgtggcttttctctttcaagggctgtttgcttaacactgagacctcctgagcctgagcaaggttatgaaagggggacgacttctcagctctcagcgtctggaaggaatcccaatgcacactgctccctggtttctgatgttccttgtgcccagtggtcctcctgggatggaaatgcaggggcagagaagaggaagatggactacagccaagcatcgctggggatggaggatggcgtggaaagagggtgccccagggccactgggcaagcctagagattcgtttctcctttgagtatctcccaaaaattcttcactggaactcgagcctggaagtccactcaagggaacaaatcatccataagcagcagccatgtgccaggcaggtccaagagcagaatggaagagtcttcaaggatttccaggatgtggagtttgagagtggaggaagagaagagatcagaggccaggagttcaccagcacagccccagttccttgcaccaggacagtttcatggccaagccctgctaccctgttagtcagggtacccggccacccttgagactcattggctaaagaattcactcactacaccgctgtccggtatggcttttgtcctgttacaaaaacccccagtttggccgaaagataaaaatggaagggaaaaagaagtttcatggtattacttacataagattaaactaaaagttaacattctcctactcctcaatagcaatcttaagcaaattatatttgctttgcagcatagtgtacaggcattcaaaatcaacacaaagacaaggacacaggcatgaggaaaaacaaaaacaaaaagattaagttaaatggtgggaatcaaactgcatgctctaagatcatgactctgcaaaactcaaatacagaccagggataaaagagattgtcaaatgtgtaaatacatgacaggctctaagatcatgactctgcaaaactcaaatacagaccagagataaaagagatcgtcaaatgtgtaaatgcacaacaggcttttttaaatgcaaagttgtttggaataacaaatatacctccaatagcaatataaaatcgaaagagaaacttctcagaggacctcagtggatggcagcagagaacatcattgcatctccacgttcaagggtctagcctgcttaaccaaagccccgttgtcaaatcaacctacagtgtggaatcagcatctcctgccatcttcctcctgcccctgaccatgggttatgagcaggcactgcccctgcagcctccgacgggtgatctaaacactgcctgccccaagctgagctttccagcttctctggccacaccatggctgtagtcccgcactgcaccccagcaacccttgttcactcttccgcccaagccttagtcctctcttctgaggctcccttcctccctccccacagctgtccctcaaggttccacatctaccttcttgatcatctcatgcaccaccatggtcttccctatctgggagctgtggtccattcattctgttctcgttagtgaatcgctggattgtttatctca

SEQ ID NO: 680857 - DNA, 633 bp, Homo sapiens
gcctgagcagatggaagaaagagagaggaaggggcgggtgctacacacttttaaacaaccagatcttgtgggaactcgatcacaagaacagcactaggagaatggtgttaagccataagaaaccaccccatgatccaatcatctcccaccaggccccctctccagaactggggattacatttcaacatgagatttgggtggggacacggatccaaaccctatcaggtgtcaacttggacaacccaagattcttcaaatatttatcctccccagttatcctgaagctgaaggcattcattcgcaaacacttttacctcacaacctcttctgaggatcccactcattacccagcttttccctatacctctcagcattgccagatcccatccccagcaacgcctatcccctgggaaagaattaatgcagccaaagttttggaacccamggttctccaaatcccacactttggcatgaaaaatggtcaatgtttctaagcaccctaggggtatttctcttgctatcatgatgatacaaccagaacgtaggcaggaccaccagtcacacccatccaggagcccaccttggtgacccacaatttagcacccctattttcattcctggtcagtttgtcca

SEQ ID NO: 680858 - DNA, 599 bp, Homo sapiens
agagcattactgtgatttacaccagctttgaatgggcaactagactgaaaaagtgagctgctgtggcatgaaaaacacatgtctgccgattacttccagatactgaaaaaaatcaccatggattagaaaagcaaatactttgttgcttccaggtgttctttgaggtatggcagtttattatacagaaaatttcacctaaaaaactaaagcagttagggatgaaagtgacaaaaaagcaccaaagttcgcattatgggattcttaaagatctcttcaaaagcagttctaaatatggcttgagtagggtgctctggaaatgtcaaaarcaatgctataggatagtgctactttcagagaacaggtgaggccactaaggaaacacacctgaggagagagattatcaaccaaaagctttcctcatacatgtatgtctgtaggaagtactttcgttcttgcactattacgtcaggtttggagtcaaaaaatgagttgggaagttttttctccttctgcattatctggaagagttcgtaacagaggaattatttgctctttgaatattcattatcctgagtgggaaagctatctgaaattaaggg

SEQ ID NO: 680859 - DNA, 644 bp, Homo sapiens
gtaaggaattaagcacttgcatatttacatatatataggccatcttgatttgtgaatgtttaccttgatctcctttggaataatattttctatgtgagtttcttagtaacaggattactggccagagtaggatgcagtttggttgcacctttgttaggtaccaccatagaggcaccagtcatcatgttattcagctctagcagcaggtggcattactctttacttcaacttctattgttctatagatttgttttgtgctttccatactgcagattttacttcttttagctttactgatcataactggcgttgtatcatgtcagaaatgcatctttctagttcactgggaactggaatgcygttaagccaggaaaggccttctttagaatgactttaggcctatctttttccaaaaggaattaggatggagctggtttcactcacttcctttaggctattggtctctttcttctctgtggtgcaagagagttactaagagacctgtacagagatagtttctgctgctgattttgtcaccctgcattataactagcactgaagtcttttccatgttttttatcgggaagttgctttttatgcatacatttttaggtctatatctttaaaaacacatccatcccaat

SEQ ID NO: 680860 - DNA, 619 bp, Homo sapiens
tggccttttaaaagcagaaaatgagaaaacatgccaaacttctatccaagaccttattataatttaaatgagctaagtatactctttagatgaaccttcaagatgaagaccatatatactgcacaggtgaaatatgctacaatatactgatgtatttgtaacgtacaatttgttcccttgccaacgatatatgcccagataaggcataaagatggtctycaatattttctcagaaaaatagttttaaaataaaaccctaactacatttttatctgattttacaggactgcttattttatgatttgataagaatttctgagtgaagaaatttgtctctatgcttaatataaatgcacttacgcagttcacctgctgcatttcgcccaccaactgcatacagatatcctttgagggcacttaggtggaagaaggtgcgcttttcatttaaagatgcaacttgcatccatttattgtatcgaggatcaaatctgaagactgtatcaactgccgtttttccttttgtatcataattactctgtccgccaaccacatagagaaaatttccaatgacggcgatgccatgctggtaccttggggcatccatgggggctaacgattt

SEQ ID NO: 680861 - DNA, 1421 bp, Homo sapiens
tggctcacacctgtaatcccagcactttgggaggccgcggcaggtggatcatctgaggtcaggagttcgagaccagcctggccaacatggcaaaaccccgtctctactaaaaatacaaaacttagccaggcgtggcggcgggcacctgtaatcccagctactcgggaggctgaggcaggagaatcacttgaacccaggagaaggaggttgcagtgagcctagatcgcaccactgcactccagcctgggtgacagagcgagactccagctcaaaaaagaaaagatgaaatcacctaacaacacatttctcaatgcattctcrtgggtaagcaacacataactataggtcaccacgtgtatagttatatagatgatgtggcatatatctaggtgtgtaggtgacatagcatatttttgctttagaaaagggtttcggggcatgtagaaaggtactcgcgattcctattcctattcccgcgaggctcgttcagcagagcttggtctccctcaggcatgcttgttccaggctcctgagttgtgccaggcacggcacggctcacaacaggcctctcactgaggcttggccttggagcagcctcttcctgttgtcaggctacaactaacaaaggcctggtaccctcttccagcgaagggttggcatttgttcctagcaaatggtgaaggcgtggctgtggtgagcgtgctgctcctgctcagtgcctttgtaggaataagggaaagtggccctgaatgaggccaagtctagttaaaggccacacattggtaaatatgtattgaaggagagatttgaagggaataagtcttaagtggttctagatagagaaacccttgctgggtgacccccaggtgtctgccctgacctcgtcatggtgaggctcagagggaccccgtgggcgctggctgcctgtgctgtcccacccccgccttgaggcggagctgagggcacttgagaggattgtcctgaatgtcacctgggtggtggataagggcaggtgcatgtcacaaatcaaggatgttggttctgtttcgcattctaatctctaagaagagtttatgatgtaaatgtattgaactgatagaatttcttagaacatttcttaggaaggtttagtcttctaaactcagggaagcggacggtcttcgcggccaggggagattctgttccccaggggggcatttggcaatgtggaaacatcttcggttgtcacagcttggggtggggagaggggactgcgatgggccaggccctgctcctctgcctgcacccaggccccctagctcactcattcaagccacctcctgggcctcacaggcattggagggcgaaaggctttggatgggagctgcccctggcacacagcagtgggctctcagccgggctgacgctgctctcagatcagc

SEQ ID NO: 680862 - DNA, 1421 bp, Homo sapiens
tggctcacacctgtaatcccagcactttgggaggccgcggcaggtggatcatctgaggtcaggagttcgagaccagcctggccaacatggcaaaaccccgtctctactaaaaatacaaaacttagccaggcgtggcggcgggcacctgtaatcccagctactcgggaggctgaggcaggagaatcacttgaacccaggagaaggaggttgcagtgagcctagatcgcaccactgcactccagcctgggtgacagagcgagactccagctcaaaaaagaaaagatgaaatcacctaacaacacatttctcaatgcattctcatgggtaagcaacacatarctataggtcaccacgtgtatagttatatagatgatgtggcatatatctaggtgtgtaggtgacatagcatatttttgctttagaaaagggtttcggggcatgtagaaaggtactcgcgattcctattcctattcccgcgaggctcgttcagcagagcttggtctccctcaggcatgcttgttccaggctcctgagttgtgccaggcacggcacggctcacaacaggcctctcactgaggcttggccttggagcagcctcttcctgttgtcaggctacaactaacaaaggcctggtaccctcttccagcgaagggttggcatttgttcctagcaaatggtgaaggcgtggctgtggtgagcgtgctgctcctgctcagtgcctttgtaggaataagggaaagtggccctgaatgaggccaagtctagttaaaggccacacattggtaaatatgtattgaaggagagatttgaagggaataagtcttaagtggttctagatagagaaacccttgctgggtgacccccaggtgtctgccctgacctcgtcatggtgaggctcagagggaccccgtgggcgctggctgcctgtgctgtcccacccccgccttgaggcggagctgagggcacttgagaggattgtcctgaatgtcacctgggtggtggataagggcaggtgcatgtcacaaatcaaggatgttggttctgtttcgcattctaatctctaagaagagtttatgatgtaaatgtattgaactgatagaatttcttagaacatttcttaggaaggtttagtcttctaaactcagggaagcggacggtcttcgcggccaggggagattctgttccccaggggggcatttggcaatgtggaaacatcttcggttgtcacagcttggggtggggagaggggactgcgatgggccaggccctgctcctctgcctgcacccaggccccctagctcactcattcaagccacctcctgggcctcacaggcattggagggcgaaaggctttggatgggagctgcccctggcacacagcagtgggctctcagccgggctgacgctgctctcagatcagc

SEQ ID NO: 680863 - DNA, 1421 bp, Homo sapiens
tggctcacacctgtaatcccagcactttgggaggccgcggcaggtggatcatctgaggtcaggagttcgagaccagcctggccaacatggcaaaaccccgtctctactaaaaatacaaaacttagccaggcgtggcggcgggcacctgtaatcccagctactcgggaggctgaggcaggagaatcacttgaacccaggagaaggaggttgcagtgagcctagatcgcaccactgcactccagcctgggtgacagagcgagactccagctcaaaaaagaaaagatgaaatcacctaacaacacatttctcaatgcattctcatgggtaagcaacacataactataggtcaccacgtgtatagttatatagatgatgtggcatatatctaggtgtgtaggtgacatagcatatttttgctttagaaaagggtttcggggcatgtagaaaggtactcgcgattcctattcctattcccgcgaggctcgttcagcagagcttggtctccctcaggcrtgcttgttccaggctcctgagttgtgccaggcacggcacggctcacaacaggcctctcactgaggcttggccttggagcagcctcttcctgttgtcaggctacaactaacaaaggcctggtaccctcttccagcgaagggttggcatttgttcctagcaaatggtgaaggcgtggctgtggtgagcgtgctgctcctgctcagtgcctttgtaggaataagggaaagtggccctgaatgaggccaagtctagttaaaggccacacattggtaaatatgtattgaaggagagatttgaagggaataagtcttaagtggttctagatagagaaacccttgctgggtgacccccaggtgtctgccctgacctcgtcatggtgaggctcagagggaccccgtgggcgctggctgcctgtgctgtcccacccccgccttgaggcggagctgagggcacttgagaggattgtcctgaatgtcacctgggtggtggataagggcaggtgcatgtcacaaatcaaggatgttggttctgtttcgcattctaatctctaagaagagtttatgatgtaaatgtattgaactgatagaatttcttagaacatttcttaggaaggtttagtcttctaaactcagggaagcggacggtcttcgcggccaggggagattctgttccccaggggggcatttggcaatgtggaaacatcttcggttgtcacagcttggggtggggagaggggactgcgatgggccaggccctgctcctctgcctgcacccaggccccctagctcactcattcaagccacctcctgggcctcacaggcattggagggcgaaaggctttggatgggagctgcccctggcacacagcagtgggctctcagccgggctgacgctgctctcagatcagc

SEQ ID NO: 680864 - DNA, 1421 bp, Homo sapiens
tggctcacacctgtaatcccagcactttgggaggccgcggcaggtggatcatctgaggtcaggagttcgagaccagcctggccaacatggcaaaaccccgtctctactaaaaatacaaaacttagccaggcgtggcggcgggcacctgtaatcccagctactcgggaggctgaggcaggagaatcacttgaacccaggagaaggaggttgcagtgagcctagatcgcaccactgcactccagcctgggtgacagagcgagactccagctcaaaaaagaaaagatgaaatcacctaacaacacatttctcaatgcattctcatgggtaagcaacacataactataggtcaccacgtgtatagttatatagatgatgtggcatatatctaggtgtgtaggtgacatagcatatttttgctttagaaaagggtttcggggcatgtagaaaggtactcgcgattcctattcctattcccgcgaggctcgttcagcagagcttggtctccctcaggcatgcttgttccagrctcctgagttgtgccaggcacggcacggctcacaacaggcctctcactgaggcttggccttggagcagcctcttcctgttgtcaggctacaactaacaaaggcctggtaccctcttccagcgaagggttggcatttgttcctagcaaatggtgaaggcgtggctgtggtgagcgtgctgctcctgctcagtgcctttgtaggaataagggaaagtggccctgaatgaggccaagtctagttaaaggccacacattggtaaatatgtattgaaggagagatttgaagggaataagtcttaagtggttctagatagagaaacccttgctgggtgacccccaggtgtctgccctgacctcgtcatggtgaggctcagagggaccccgtgggcgctggctgcctgtgctgtcccacccccgccttgaggcggagctgagggcacttgagaggattgtcctgaatgtcacctgggtggtggataagggcaggtgcatgtcacaaatcaaggatgttggttctgtttcgcattctaatctctaagaagagtttatgatgtaaatgtattgaactgatagaatttcttagaacatttcttaggaaggtttagtcttctaaactcagggaagcggacggtcttcgcggccaggggagattctgttccccaggggggcatttggcaatgtggaaacatcttcggttgtcacagcttggggtggggagaggggactgcgatgggccaggccctgctcctctgcctgcacccaggccccctagctcactcattcaagccacctcctgggcctcacaggcattggagggcgaaaggctttggatgggagctgcccctggcacacagcagtgggctctcagccgggctgacgctgctctcagatcagc

SEQ ID NO: 680865 - DNA, 627 bp, Homo sapiens
agcctgggtgacagagcgagactatgtctcaataaaaaaaaagaaagaaagaaaaagagaactatgaaatgttaggagaaatttggcatggcagctcacgcctgtaatctcagcactctgggaggctgaggtgggaggatggcttgtgtccaggagttcaagaccagcctgggcaacatagtgagacccccccatctctatttatattaaaaatattattaaaagaccgggagtggtggctcacgtctgtaatcccagcactttggaaggccaaggagggcrgatcacgaggtcaggagactgaaaccatgctgggtaataatggtgaaaccccatctctactaaaaattcaaaaaattagccgggcgtggtggcatgcacctgtagtcccagctactcaggaggctgaggcaggagaatcgcttgaacctgggaggcggaggttgcagtgagctgagatggcaccactgcactccagcatgggcgacagagcgagactctatctcaaaaaataaataataaataaaatgataatatttaaaaaaaaaacatgttagaagaaatgtaaatagtttggatatttgatggtatttaaggattccttagctggtcttggtggcccatgcc

SEQ ID NO: 680866 - DNA, 627 bp, Homo sapiens
agcctgggtgacagagcgagactatgtctcaataaaaaaaaagaaagaaagaaaaagagaactatgaaatgttaggagaaatttggcatggcagctcacgcctgtaatctcagcactctgggaggctgaggtgggaggatggcttgtgtccaggagttcaagaccagcctgggcaacatagtgagacccccccatctctatttatattaaaaatattattaaaagaccgggagtggtggctcacgtctgtaatcccagcactttggaaggccaaggagggcggatcacgaggtcaggagactgaaaccatgctgggtaataatggtgaaaccccatctctactaaaaattcaaaaaattagccgggcgtggtggcatgcacytgtagtcccagctactcaggaggctgaggcaggagaatcgcttgaacctgggaggcggaggttgcagtgagctgagatggcaccactgcactccagcatgggcgacagagcgagactctatctcaaaaaataaataataaataaaatgataatatttaaaaaaaaaacatgttagaagaaatgtaaatagtttggatatttgatggtatttaaggattccttagctggtcttggtggcccatgcc

SEQ ID NO: 680867 - DNA, 627 bp, Homo sapiens
agcctgggtgacagagcgagactatgtctcaataaaaaaaaagaaagaaagaaaaagagaactatgaaatgttaggagaaatttggcatggcagctcacgcctgtaatctcagcactctgggaggctgaggtgggaggatggcttgtgtccaggagttcaagaccagcctgggcaacatagtgagacccccccatctctatttatattaaaaatattattaaaagaccgggagtggtggctcacgtctgtaatcccagcactttggaaggccaaggagggcggatcacgaggtcaggagactgaaaccatgctgggtaataatggtgaaaccccatctctactaaaaattcaaaaaattagccgggcgtggtggcatgcacctgtagtcccagctactcaggaggctgaggcaggagaatcgcttgaacctgggaggcggaggttgcagtgagctgagatggcaccactgcactccagcatgggcgacagagcgagactctatctcaraaaataaataataaataaaatgataatatttaaaaaaaaaacatgttagaagaaatgtaaatagtttggatatttgatggtatttaaggattccttagctggtcttggtggcccatgcc

SEQ ID NO: 680868 - DNA, 1572 bp, Homo sapiens
tttcaagtgctggaactcttcattttttctgtaatttcctcaattttgaattatttgcttttctaactgtctaactgagctatccaatatcagaaaggtttcacctttttttcctgtcatacctaaaaccccaagttgatcagttttaacaagaaaaagaccatactaaagattctgctttttgaattatgacaccaactaagtggttttaaatcttgcaataattagcaaaaattctggccttaaggatgacatcaattcttcttaatgatattagagccatagtataaccaaaaatgaattaataatatataaccatgtttaattcaattctgatagatatttaataaagaagagaataacttaagattttaaaaagcataaaagaaactggatatagccttccaccagagtttcagagatagctttaaagagaattaagttatatttatgatatayagcacacacacacaattttaaacaacttttgtggacagacgtttaaaattacagaatcaattggaaaagtcagaaattgattgatggtgactgttatccctaaccagaaaatgtctattcatccagattatattaataggatattcaagcagactgttttattagtttctgtattccctgcacagagcctagcacgaaagacttaatatatgtcctctgaatgaatacagaatcttctttctgtagatcattccaaagacatttctttattatgcagtgcttaaatgaccatcaattatcattcttatgaaactgcagatgtaaaagggataggagtaaagctgaattcacattgccacaatgacatatcccggaaattgcttttttgagtaaactacaagtaacaacttatttactttgtcatttgtctcttgctcttaaaaacagaaagcaaaaagtgaaaatgcagccctttcttgccaacataatatgcttgcctttttaattaattacttcaaaagctgaagaagcctggactaaaattatctttttcatgatgttttatcagtatcttttgactttttaacattcaaaacactccctactaatttctgctttggtaacagtacatgccatgttaaccttcttagcagattcaatattcccatctatctcccctttattaagtttattgattgaatgtgaagagcactgttcttcaacattgcaaggaggtaacacttctctgcaaaccccaagccacaattatatcaatctatgcttaaaggaatgattatctgagtaattccaagaaaaaaaataacagtttttaatctgatgttttttcaactcatatagttaaatacaatatacatacaagtcattctcaatgtggggagggggagcaggaggcattttgcccctccttccacccccatgattcataatgtctgcagacatttttcactgtcacaactggggatgctgctaaacatcctacaaaacaggacagttctctaggtcaaagctgttcttaggcaaaaaagtcaagtgccaaaggtgagaaatcctaatatagaggaatttactgtctcatgaaaatttttctcaagc

SEQ ID NO: 680869 - DNA, 637 bp, Homo sapiens
gctggagtggccccctttcctgccatcatccacacaatctactctgaggatttccctcttgtgcagtgcacagctgggcagcttgaccagtgacccagagtccattcccgctctccctctaccgctgtacacctgctgtctttaaggcacaggtcgaggactgatgaggtttgaaagaacccatagggtaatgaggaacgtggagcatgtgcaaggagacctgacatagaatttatgccctgcgttgtgaggatggatggtcatttttgactttccaaaattgacttccttgattccttctcatgagtgmtagatacatttctttggtgttgaaactgtgaaaactgaaacacacatgatttttataattagaaactagaacattgtctaaaaaattgtgtgatgcacccaaatattaaggtgattagataagcgcacacagggctttgaaattccgaaatgtgctgcctgttctgtgccattggccactgattgactttctgcatttgctgcagtttatacataagctctacaaacagcttaaactaagcaatagaaaataatttaaaaaattgatatgtaattgtatatattcttgaagtacatgtgatgttttgatacttgcatgcaacatgta

SEQ ID NO: 680870 - DNA, 637 bp, Homo sapiens
gctggagtggccccctttcctgccatcatccacacaatctactctgaggatttccctcttgtgcagtgcacagctgggcagcttgaccagtgacccagagtccattcccgctctccctctaccgctgtacacctgctgtctttaaggcacaggtcgaggactgatgaggtttgaaagaacccatagggtaatgaggaacgtggagcatgtgcaaggagacctgacatagaatttatgccctgcgttgtgaggatggatggtcatttttgactttccaaaattgacttccttgattccttctcatgagtgatagatacatttctttggtgttgaaactgtgaaaactgaaacacacatgatttttataattagaaactagaacattgtctaaaaaattgtgtgatgcacccaaatattaaggtgattagataagcgcacacagggctttgaaattccgaaatgtgctgcctgttctgtgccattggccactgattgactttctgcatttgctgcagtttatacataagctctacaaacagcttaaactaagcaatagaaaataatttwaaaaattgatatgtaattgtatatattcttgaagtacatgtgatgttttgatacttgcatgcaacatgta

SEQ ID NO: 680871 - DNA, 613 bp, Homo sapiens
aaactcaccaacataatgttgaatcaaagaagcaagtcaaagaaaaatatgtggagtattattccacttttataaagttttaaaaacaaccaaactaagcaagatacatatttagggatacatacttggttgctatcatgataaaggggagaaakgaatgattatcacaagtcagaatagtgttttgttttttttttctggagcagggtagttatagatgggggtgcttttgaggaggggttttaagggggagttttaagatactagcaatattctatttccttatctatggtaataatttgatttgttgattgattgattttattaaagccagaatctgtcacccaggctggagtacagtggtgcaatcatgggtcactgcagtgtcaagctcctgggctcgaaaaatcctcttgcctcagcctctgagttgctgggactacaggcagcatgaccatgcccagctaatttctttaaatacttttaagtgatggggtctcactatgttgcccaggctggtctctaactcgaggcctcaagtgattctcctgcctcagtctcccaagttgatagaattataggcataagctactgtgcctgacccaacagtgtt

SEQ ID NO: 680872 - DNA, 613 bp, Homo sapiens
aaactcaccaacataatgttgaatcaaagaagcaagtcaaagaaaaatatgtggagtattattccacttttataaagttttaaaaacaaccaaactaagcaagatacatatttagggatacatacttggttgctatcatgataaaggggagaaatgaatgattatcacaagtcagaatagtgttttgttttttttttctggagcagggtagttatagatgggggtgcttttgaggaggrgttttaagggggagttttaagatactagcaatattctatttccttatctatggtaataatttgatttgttgattgattgattttattaaagccagaatctgtcacccaggctggagtacagtggtgcaatcatgggtcactgcagtgtcaagctcctgggctcgaaaaatcctcttgcctcagcctctgagttgctgggactacaggcagcatgaccatgcccagctaatttctttaaatacttttaagtgatggggtctcactatgttgcccaggctggtctctaactcgaggcctcaagtgattctcctgcctcagtctcccaagttgatagaattataggcataagctactgtgcctgacccaacagtgtt

SEQ ID NO: 680873 - DNA, 652 bp, Homo sapiens
aggtagggcttagtcataagcagcatctcaggtacaaagtcagaccatggttagcaaccacatcaatgatgctgagtctccaaactggtgatcttagtatccttaagtgcatttaaaagtggccccaaatcctagggtagggctgaatcatcagaaagtggcgggtccccaacttgtacacaggtccaggagtccaaagaggtcactagaagaccttagctgatattaaagttcttccaaaagtactgatacaaaccagaaaccctaggattgcttgggaaaataagytcattcaacattacatagagttactgatgcttcaaatcctttctaaaagcacacaaatgataaattatgaagtagttaactgactacatcctcattctacttctggctttctcatgacttccagagtgactgaagattgacacacacatatttctttcactcagggtaaggcaccttctctttttattttgagagaatcctcactatctcctaatagtatctatccccagtctcagaaattcaaaggaatctagaactaattccatttttttcttttaatgctccctataatggactacattgagaataattttggtttatacttactatacattaagaatctgtaatctgttcatgataagaa

SEQ ID NO: 680874 - DNA, 736 bp, Homo sapiens
tgagaatgaaaaggaggagatgtctgtaccagacgctggatgacaggcaccgacaggctgtctgccaggggagcagcgattcctgtatgttgtagaaagtttttcaaaagtcaccttggaaagaggttttgttccttaaccttctgttaaataggaagctccgtgaatgaaaacaactcccttccctaaacattctagtaatgacccaacactgccaagcctgccagctctgcctcatggtcgtgttgactgtktgagactatgtgagtgcctgctacacagtacgctttcagtaaacatggtattgcctcgataatcccacaaaaatgtcctattcaaatcacctggcacccaggaaatttccttcttttttttcccaggtgaaatatacagttgaaaacacctgacagcaattcccctctcccatgtgtttgcaggatggtggttttggttcctccatctttgatgtgtacaagtgtgatgttttccccccacagacaagtaaaccacattctcttcacattcccaatgttttgtcaatgtacctccttcaatagaggatcgataaggaaaaaaatcattgacaatctcaattagattcactatttcatccaaaagcatagcttagaactctagtttttgttcaacactcttgccctatgagtgcacagaactttaattctgatacaaacatccctgaatgtttagctttgacagagattccaaggtgatttga

SEQ ID NO: 680875 - DNA, 736 bp, Homo sapiens
tgagaatgaaaaggaggagatgtctgtaccagacgctggatgacaggcaccgacaggctgtctgccaggggagcagcgattcctgtatgttgtagaaagtttttcaaaagtcaccttggaaagaggttttgttccttaaccttctgttaaataggaagctccgtgaatgaaaacaactcccttccctaaacattctagtaatgacccaacactgccaagcctgccagctctgcctcatggtcgtgttgactgtgtgagactatgtgagtgcctgctacacagtacgctttcagtaaacatggtattgcctcgataatcccacaaaaatgtcctattcaaatcacctggcacccaggaaatttccttcttttttttcccaggtgaaatatacagttgaaaacacctgacagcaattcccctctcccatgtgtttgcaggatggtggttttggttcctccatctttgatgtgtacaagtgtgatgttttccccccacagacaagtaaaccacattctcttcacattcccaatgttttgtcaatgtacctccttcaatagaggatcgataaggaaaaaaatcattgacaatctcaattagattcactatttcatccaaaagcatagcttagaactctartttttgttcaacactcttgccctatgagtgcacagaactttaattctgatacaaacatccctgaatgtttagctttgacagagattccaaggtgatttga

SEQ ID NO: 680876 - DNA, 736 bp, Homo sapiens
tgagaatgaaaaggaggagatgtctgtaccagacgctggatgacaggcaccgacaggctgtctgccaggggagcagcgattcctgtatgttgtagaaagtttttcaaaagtcaccttggaaagaggttttgttccttaaccttctgttaaataggaagctccgtgaatgaaaacaactcccttccctaaacattctagtaatgacccaacactgccaagcctgccagctctgcctcatggtcgtgttgactgtgtgagactatgtgagtgcctgctacacagtacgctttcagtaaacatggtattgcctcgataatcccacaaaaatgtcctattcaaatcacctggcacccaggaaatttccttcttttttttcccaggtgaaatatacagttgaaaacacctgacagcaattcccctctcccatgtgtttgcaggatggtggttttggttcctccatctttgatgtgtacaagtgtgatgttttccccccacagacaagtaaaccacattctcttcacattcccaatgttttgtcaatgtacctccttcaatagaggatcgataaggaaaaaaatcattgacaatctcaattagattcactatttcatccaaaagcatagcttagaactctagtttttgttcaacactcttgccctatgagtgcacagaactttaattctgatacaaacatccctgaatgtttagctttgacaragattccaaggtgatttga

SEQ ID NO: 680877 - DNA, 1028 bp, Homo sapiens
ttttttttgagatggagtctcgccctgtcacccaggctggagtgcaatggtgcgatctctgctcactgcaagctccgcctcccaggttcacaccattctcctgcctcagcctcctgagtagctgggactacaggtgcccgccaccgcgccgggctaattttttgtatttttagtagagacggggtttcaccatggtctcgatctcctgacctcatgatctgcccgcctcagcctcccaatgcactgggattacaggcattatattattctttaaattcacatgagaatttagtatggcttcaaaaaataccataagttaaaatatcaccaagactctgttcagacaaaagtatcagaaaagtgagccaggcactcacatagtttatagtttataaaagtgagacaggcatgatctcttaacctcactatagtcctgtgaataaggtttatttacatttcattttacctgccaggattattgtaaaaacgccaagcacattgcctacacaaactaaatattcagtcaatggmtgctattttcatgagttcgttttaacatatatttattgtcctctactggatttaagaagttatatttattatcatctaagattttagctattccttctcttaaaaatagattttataatcaatggcagtaagggagagtaactcgcagttctctgaatctcaaggggttcctggaagccttcctgaaggtatagtgaaatttcagcttcacattcccatccatgagctccctgcaaatatcccggtctgctctcaggacccagtgacttacctatgcagaggctgtagatagcacctggagcttcctgtgtgccctcctcaaactcagccaatgccgtcatacagtagcaggcaggtgtctttgctgggtagttggactggatgtccctgggattgcagaactggaatggggagtgacatcaggaaactataatcatcaggacaacatggtttgccataactttaagttttaagcgaccgcagattatgcggagaga

SEQ ID NO: 680878 - DNA, 3563 bp, Homo sapiens
gttaggaggtggggcctaatcacaggtgattaggtcataaggctctgccctcatggatggcttaacatgtttagtgaggcagtgggttagctattgtgagagtgggcttgttagaaaattgagtgcagccccctcttgcttgctggctaccatgctctcttgcttttctgccttctgccgtggggtgacacagcaagaagaccctccccagatgctggcaccatgccctgggactttccagccttcagaaccacgagccagacaaatttcttttctttataaattacccagtctgtggtattctgttatagaaacacaaaatggactaagacaatcttctttcatcaagttagggtascaacctttaaagactgccagtccaaggttaaaggaaacttttcaagagcagtccaaacatgatctggccctcagctactctccagggtcatgccaccctatcacccactggctcacacagacgctgaccactgcttagtttctcaaactgaagttttcctcctcagagcttttgcaaaaccttttctttgcctggaaaactccccccacaaatctttagttgtaggttccttctcatcttgcagaattattagtttgctcttcaaatagtctctccagctagactatcaactccaggagggcagagttcttcttcgcttccttcacccatgtgcccactgagtccagaactgtatagcagtttgattgaaaaaatccacagggtggaggatgagaggaccctggatcccagcctcacagcctcttacttcacctgtgtgattttggtcaagtcctttattcttcctgggctttagttttcccttatctaaaatatgagaaaagttcccctctcctgggtattctgggagactcatgtaaaaggcactgagccagtgcagcacatctatgaccaggaagggtcagcttcctgccttgcatgagacacacattcccttcttcatgcacagttattcatgagttaaatatgtattgagaagtgggttctcaggagatgatgcatccacagcattgtttgtatgcctctgtctttgatgtccctgcctgagtcgcccactttagagcccttctgttcttcagaaaccagacttttctttcaatagtttcagtaatcaatcgatcaatcaatcaaccaatcaacagtgataataatcatgagtgagcccctgcccgtgctggctgtgtcctgctgaaggcacactaagtgctgcccttcccagaagcctcaggaagcttgcgaagctcaggtgcatggatgcctggtggaatgaggaagggatgcagccaggtagagaaatgccctgccatcacttgcatcagcatctgtgaagagctggccaggcttttgctcacagtggttgacacagtcaaggagcaagggccccgtaggagaggggagtcaagggctccgggtgggaatggagctgggggctgatgctggcttctggagcactgtaatgtgactgagaaaggtgaaggagccgttctgaaaaagaagaaggcaggagctcgcacagctcttgactcatcttgacttctttttcctgcttcatccaagcaggtcgactctctcgtgatctcagagacagagtgaagtcatgagtgggaggggagcacagaaaataagaccttgattcccagcattgggagactccctgctcccctgagtctcggaaaatagcacccttcaaatgttttagggatccagatttgatgaagagatgttattttggcttttagattcttaggagagatttgtctttctcaggtcaggaagaaaatgctgcccgctgcacattcttcgggacagactcttttaattattactagtttaatgtatgttttgcttagttaaggaaaacccctgtggtttcttgacgtgcttcagtattctaactcacagctgattcagttcagggggctggggagatgtcctcgacctctggaaaggagggtgcatctctagaaataaggctaagtatgccactgacactgtctgcataaacgtgtgtgatctcaggtccaaaggatggggcctggtctaagccagggacgtgggaaatcattttcctgtggcaacttgtgaagaccattctgtgaccttggtgtctctgggccttctcttagattttctaagttggctagtcagtggagctgccatccctcctttgcccatgttctactcccagagttcctccaagaaattgcggagcaatgcctgtttcatgagagctgagtttgctgtgtcttccacttagaaacaacactgtggaccaggaggacacacagctcccagggccatcaccacacaaagtgaaggctggtgaatccgaggcttctagcccttgccgggccaggcccgcagcactccgctccccaacccagccgctgctttgtcgcaggaacctcagcagggcagggtgtttcctaggaggacatccgattcccagccattcctttcagtgaatcacctgagctcacattcttttttcttttatttttgaagctcttagccaatctgcttcgcgatgaaccagttttgcttgaagcagacaaacccgattgtcaggagacagtgatgatttcttcagtctctgaggaagagttttcattttccccaattcgcaaaaaaagtcaggtccctccctccctccctctccgtagaatattttccatgtgtgttaacaatggctgagcgtggtagatgccaggaatttctgtcaaccctcaaagaggaaagccctgcctaatggtctgcccgttcttgttcactccctgccccaggctccccacccgccttctttctggaaggtataaaggctcctgcttatacctggcactgcacgcttcgctccctctgatctcctgactgtcatgcccagtgtctcagcctatcattctacctctaactcgaccttgagtgaccttgagcaagtttctcaggattccacctccaagtcactctccctttgggatatgcagcactaagttaagcttgcctggaaaacatcacttgaagctggaaaaccacttttaacacagcgggaaaagctatttgttcagacaggagtggggtgggtctgggcagagcactgctctaacttggccatgccgtggcagcagctcctttaatgccactttttcctggcgcgcccgcggggcctggagctcagaaagaggggaacgctccctcgtctctcaacagttgctccagacaggtcagcaaacatggaattcagaatgttcattaaacactggctgtgtcttttgtgttcaaaagcaagacactctctctgaaccatggccccacagagagtgcagaatgtgtgaaacctgccgggaaggtctggaccccttgcggggcagtgggcagcaccgtgcctccgttcacaccactcacatggctgtgcctctgcttccttctggcatggctgcttcttcctcaggtctcaaccatctccctcagatgctctttcccatgtttgtggctacaggtccccgtgacctgcagaggcagagcactcacc

SEQ ID NO: 680879 - DNA, 540 bp, Homo sapiens
catctgaggtcaggagttcgagaccagcctggacaacatggtgaaaccccatctctactaaaaatacaaaaatcagccgggcatggtggcaggtgcccgtaatcccagcttactagggggtgctgaggcaggagaattgcttgaacctgggaggtgaaggttgcagtgagccgagatcacaccactgtactccagcctgggtgacagagcaagactccatctcagaaaaaaaaagtattgcaccatggtcagagaatcttaagcctttcagttgtaaaggatagaagcataactcaaaatagcattaagtggaaaaactgtatattgtttcaaattattgaaaaggatcctagggtaacttagagaattgaaggaacaaaggcaggacccaatgcccctggagctgaaatttagagagagagggagggggacagagagagagagggagggaaggagagagagagagagagagagagagagagagagagwgtgtgtgtgtgtgtgtgtgtgtgtgtgtgtgtgtgtgtgtgtgtgtgtgtg

SEQ ID NO: 680880 - DNA, 600 bp, Homo sapiens
cactcagaaactccaaactacatagtgttatcataatactttatagccaggctttgtatctaggctctgttattttgcaagcaacttactttaacctctttcagctttagctttctcttgggtaaaatgaatagcatatatataatacttggaaaatattaaatttatgtgttcttatttctctgtgtaaatcgtgttcccttgatgctacccccagaatgaggaggatatgacattaggagaagtcactgacatacagtaaaggcgaaaaaaaaaaaaaggaaaaagaaaaacaagaaaacttttctggacctagaggaggaggaggaaagggaacagggagtgaaaacagtggtcaggcagtgacctaaattccaaccccgccccccaaacctcacgattcaaacctaaagcatgcaccggagagcaaggattaggttttaaaaggagaatcagtcaaaggggatatggggaaacctttaacccaacttctttgttcagacactggaaggaaattacctcagaggaaaacaaaayggggctgtcacatcagaataaaaatggtggttagcagatgagatgcccgaaatgaatgtgctg

SEQ ID NO: 680881 - DNA, 613 bp, Homo sapiens
taccatcattggtataggggttacggaaaattacagaaattaaaagcactttgtaagccattattcactcaacaaactagactgattatcaccttcatcactgtcaccattgccatcaattggttctattcccaacaaattacttctggttgagaaaatgggtaaaattcattcacacgaaaatgttaggtaaaggacaggagagatcaagatcactatttgccttgctttggtgaaatgctgggtaaagagggtgacctaaaatatggaaggagtcagaagaaaaaaaaattggtagcaattgtaacatttgttaataatctgccaaataatgggctaagctcattacatgaattatcttatttaaggaattagttaagggataatttagcacatttacaaatactttataagagaatttggagatactaatactctcyggatataaagcttggaatttcattagccatcataagcttataaagtaagctaccctgagaacaatgctggcaccccaagcagggcagagtcaagagaatcacagagacatagtgtcactgccatgattaagggacatgtgaagctcaccatattctcttattccccattaatg

SEQ ID NO: 680882 - DNA, 1855 bp, Homo sapiens
tgcacatgtatgtttgtaaaaattttaagacgcaagtaatggcaaaactgaaagacatttcattcaattttctttgatgttgagctttgcagttggtggattgctaaacccccttaacttgaaatctcatgaaatgctgttttataagcggtgatgttggtccttggatataaccacatgtcctgctgcagcctggatcttgcatcaggcaattccacagcttgaactgggtaatttttgtcaaaccatggttagttaacttgggcctttttcttaaactggagcttgcattggcaatctagatttcctgtttttttgcagccataacatgcaacggtgaaagaagcaaaagtctggtcagaggaaaaaccaaaagtccagtcacactctttaagggtaataggactctaagttctgaccagattttggtttttcctctaatgaaatacaaataaaaagttttcttagattaagataagacatcaagtttctgatttatagcagatagaacctcagagaaaaggatgcttcacatgacactggactgcatttgcattacactgattattgtgagagaactgagataaaaatgatgtatttaatcaattaaaattttattttaattaattttaatttagttagataatttcatttaattgatacattcaattaatatataatttaattaatatttttacttaattaaaatgtaattattttaaaatatgtaacataattctgtatcactagcctcttagagaaggccatattttacacatatgtgaaaagttctttgaaggagaaattcaatatcattatccatattatttatgtgttttgggaaaggtcaggacaaggcactagggttgacatcattatccattgtggtggtcacttgactttccttatttaattttatttaaattaaaaatattggttggatgcagtggctcacacctgtgatcccaacactttgagatgccaaagggggcagatggctttgagctcaggagttcaagaccagcctgggcaacatggtgaaaccctgtctctaaaaaaaacacaaatattagtcagacatgatggctcatgcctgtggtcccagctactcaggagtctgaggtcagaggatcccttgagcctgggaagcagaggttgcagtgagccaagattgtgccactgcactccagcccgggtgacagagtaagactctgtcaaaaataaaataaaataaaataaataaaattgaataatctttaaattctaacctagactcttaccaggtggaaaaacttatctggaatgaaaataaaattaactgagaattacctctgtgttaggcattatccttggcattgttgattatttcactatacctgaaaaatattacaagtcaggcattttttttcctcagtattattttaaggtggaatttagaaagatatgacaactaataagtcaaaaaaactgaatgttggcaataagttcatatgactcgattgaacaaaattgttcattctgtttgaagttatacattaatcaatttttaaattataatgtcttttatatttttgcctttacaataagtaatattctagttttctttattatatttttgtcaaacaaaatcaaaaagtaaaattttaaaaatgagaatactttgtttgattctatgtaaataaatatgacaacctaaagaaaatatgcaactttttagagtaaattaatcacaaaaatgaagaaaacattgaaaactaaacaaaaaaaatcatatataaaattaataaacrtggcagagtaacactcggatagtgaggtaatgaagggtttaagttaaatgtttaaaccttcagaa

SEQ ID NO: 680883 - DNA, 554 bp, Homo sapiens
aattttgttggctattcagagcctctggtatttccatataaattttaggatcaattttaggatcaaaaaaaagaactagcttggattgtgataggtgtcatgctaaaactgaagataaatttggagagtatcaccatttgaactatagcatctttcaatccatgaacatggggtgctttctatttattgagaccctcactgatttctttcaaaaatgttttagaattttgtagcaatgtggtatagttttgtgtttacaaagaaatacacacatgtgattgctagccagaatctggaggatcaacaaaacaaagcaaaaaaataaaccaaaacaaaactaaaaccaccaatccagaccacgctcctctcctcccaggaccctgtaaacagccacaggtccagctgatctcacacacacggtgttatcctctccactccmtcacccctggagtctactccttgtccaaactctcctgtccctatgaagacaaaccttctccagagaggggctgtcaaagctcgcaatctggttgttcagctctttactcaagcgc

SEQ ID NO: 680884 - DNA, 1098 bp, Homo sapiens
ctgatactgccagccatgctgaggtcgtgcactgcccagcctctaggggtacagagatgaagagtaagttctcatcaaggacctggctttggaactgggttttgagtaattccaggcaactggaagaggaaggcccctcaacactccagacagcaggaacggaagaagcaaagatgtggaattctgggcatgtgtggttcacccccagcctggcgtggtgacccactgtgcgggtggggcagggcccactcacggtggtcatcccactgacagaagaggtaatgatcttcacagtgtccatggtgactttgtggaccatcctctcctccaagtccctctgataaaacttctcccggcgatttgtctggaagaaagaaccaagggattcccacctgtggcctagcagaggtttgtcgtggtctcaggtgtggtctcctcactccccaggggctccatgcccagatactgagtctacagaatgctcagagctgtgcmtatatctaggaccccacacattgtcacctgcaggttcactgtgtctatgaactcctgtcatgaatggatacgcaggtttgaacacaggtacgctgagtggcattctcccctcagcactgtggaaaccatttccaagtccagctgctctgcggtctgcgtatcagggccactcaccagtttgtaggtggataaggtcagctgcacagacaggtacttcaggccccagcctttgattctctcctggtagccacagagagccaactgcccaatgatgtggagaatagccatcctcacctgaggggacaggaccgtggacatgctgggggttggggtgggctccaaggcacccaatcctgtgacatagagagctaggaattgggggtgctctgggctagaaggggcctcagggactacctgattactgcccactctgtccacctccccctgcctcatccaggggtcccactctgcagcatgcccacctgggagcctaattgagccttggagagacacaaagctccctccctcccttccaacctcggctgctccattctagcagcccttgccgtggggagcccatctgttatcctggaccccctgggg
